United States Patent Application Publication US 2023/0026259 A1 - sequence listing, part 46

SEQ ID NO: 136683 - DNA, 3480 bp, Homo sapiens
  Payload ID: 6762
  Gene Symbol: GATAD2A
  Gene Name: GATA zinc finger domain containing 2A
  ENST ID: ENST00000418032
  CDS Start-End: 7-306
ttcagaatgaccgaagaagcatgccgaacacggagtcagaaacgagcgcttgaacgggacccaacagaggacgatgtggagagcaagaaaataaaaatggagagaggattgttggcttcagatttaaacactgacggagacatgagggtgacacctgagccgggagcaggtccaacccaaggattgctgagggcaacagaggccacggccatggccatgggcagaggcgaagggctggtgggcgatgggcccgtggacatgcgcacctcacacagaaaagcagtcctgaagaacgagaaaggatgatcaagcagctgaaggaagaattgaggttagaagaagcaaaactcgtgttgttgaaaaagttgcggcagagtcaaatacaaaaggaagccaccgcccagaagacctcttcagctcggatgcccggcagtgtcatacccccgcccctggtccgaggtgggcagcaggcgtcctcgaagctggggccacaggcgagctcacaggtcgtcatgcccccactcgtcaggggggctcagcaaatccacagcattaggcaacattccagcacagggccaccgcccctcctcctggccccccgggcgtcggtgcccagtgtgcagattcagggacagaggatcatccagcagggcctcatccgcgtcgccaatgttcccaacaccagcctgctcgtcaacatcccacagcccaccccagcatcactgaaggggacaacagccacctccgctcaggccaactccacccccactagtgtggcctctgtggtcacctctgccgagtctccagcaagccgacaggcggccgccaagctggcgctgcgcaaacagctggagaagacgctactcgagatccccccacccaagcccccagccccagagatgaacttcctgcccagcgccgccaacaacgagttcatctacctggtcggcctggaggaggtggtgcagaacctactggagacacaagcaggcaggatgtcggccgccactgtgctgtcccgggagccctacatgtgtgcacagtgcaagacggacttcacgtgccgctggcgggaggagaagagcggcgccatcatgtgtgagaactgcatgacaaccaaccagaagaaggcgctcaaggtggagcacaccagccggctgaaggccgcctttgtgaaggcgctgcagcaggaacaggagattgagcagcggctcctgcagcagggcacggcccctgcacaggccaaggccgagcccaccgctgccccacaccccgtgctgaagcaggcctccagccagctgtcccggggttcggccacgacgccccgaggtgtcctgcacacgttcagtccgtcacccaaactgcagaactcagcctcggccacagccctggtcagcaggaccggcagacattctgagagaaccgtgagcgccggcaagggcagcgccacctccaactggaagaagacgcccctcagcacaggcgggacccttgcgtttgtcagcccaagcctggcggtgcacaagagctcctcggccgtggaccgccagcgagagtacctcctggacatgatcccaccccgctccatcccccagtcagccacgtggaaatagtgcgagccaggccccgtggaagacgggctccctcctcccccacctggcccctggtctagaaggacccactgcaccaccctccgctggctcgggaagacaccgtgcccgccccaagagcaagcaccggccatgctgcagaggcaagacctcaattcttggctgcaaagtttcatcagggctagggggctggtgccgcctcataggcagacgaggatcatcgctgggggacctttcccgtgggctttcttcctttctctctttgcctttagtttgcccgacaccagcagaaaagtggaccttgggggctggttctgctcctggcccccttgttcagcccctgccggcacacgggcggctcaccctggacactgtgatgcgcatgggcaaggccagcgcccggggcttctgaaccgagcggggtgtttcatttttttgcttttccctgtcttaggctcccagtctttgactgccttcccatggcgatctataagttgaaagattttttttttttttaatcacctcatgatgatggagttaaaagtaaaccgtgcagaccctggggtccctgttgtacgctgcatcatcccgctggccctgtgccctggagggtgggcggctcatggtgccacagcccctggcagggacggccggcccgcccccgtgactgactgacagatgcagggatggccgaggcagccctcgctccagctgaacgcctccattgctgcttgttctggagacccccgcccccgcaccttccagacttagcagaagaacaaactgaagaacagacccagccagagaagcagggattccagaagctgcccattaagggagaaggagaggatccggtcggcagcagccctgagcagaaagctggaggggggactgtcgcggggtttttctgttgtggtttattttattaaattttttccttttttctattcatttcgatggacgcaatcttaagccaccctggccttgctcctgggaggtgagcgtgcacaggtgtgtgcaggtcaggaggtgccgtccaggtgtgcggcgagccgctgcgcacagatgtcaggatttccgtttgggtctagtttagaacctgtccttaaacctaggggttgctgtcaggatttgctttcagactttttttttttttgtaattccctttagagtctacaaaaatgtttttaaaaggatcaggtctgcttttagtttcatttttgtttctttcccgtcccactctttaaaaactggttccgtgaggaaaggcagaagccgttccgtgtctcttgcaggctgggccggcttcatgccagtgcgagggcgtcccgtgcccacgtacatacgtatgtctccatgagttctgggctccactggttccaattgagctccagccctggttttcctacccatgcagttagggactttaatttaattttttttttgtagggccaccgccttcaaacacaactgctacaacattctaataaaggctcatttaacccccaggctcctgtcgtgtgaatatcctcagtctgtaggaaactttttttgacacagcatagaagacctagttttggaaaacattatctaattttttgttgtgcaaatccccaaatttctcactaatttttgtttttttgtgcataacttggatgggctgaaggaggtgaggacagattggggaagggtggctttcattccaagatccagggatttggggaaaaggaaggaatttgatgttttttggggtgggaggggagggtgtgttttttacaccaaaaaaaaaaaaaaaaatcaagagtatgcaagcatttctattcctcgcatttttctgtgtgcctggcaaataaatacctgtctcctacga

SEQ ID NO: 136684 - DNA, 504 bp, Homo sapiens
  Payload ID: 6762
  Gene Symbol: GATAD2A
  Gene Name: GATA zinc finger domain containing 2A
  ENST ID: ENST00000429242
  CDS Start-End: 125-504
gcccacgcatccagtatgtgcagcacacctgctctgtgactgacactcttgcagaagtggggccacttcagggacatggacaaggtgttgtacctgctgtcacagagcctgttatctgttcagaatgaccgaagaagcatgccgaacacggagtcagaaacgagcgcttgaacgggacccaacagaggacgatgtggagagcaagaaaataaaaatggagagaggattgttggcttcagatttaaacactgacggagacatgagggtgacacctgagccgggagcaggtccaacccaaggattgctgagggcaacagaggccacggccatggccatgggcagaggcgaagggctggtgggcgatgggcccgtggacatgcgcacctcacacagtgacatgaagtccgagaggagacccccctcacctgacgtgattgtgctctccgacaacgagcagccctcgagcccgagagtgaatgggctgaccacggtggccttgaagga

SEQ ID NO: 136685 - DNA, 1652 bp, Homo sapiens
  Payload ID: 6762
  Gene Symbol: GATAD2A
  Gene Name: GATA zinc finger domain containing 2A
  ENST ID: ENST00000609040
  CDS Start-End: 170-457
cgcagtcggtcggtcggtcgtctgtcctgtcgccgctgccgccgccgccacagcggccgccgcgggcgccacctgagggagtcgcctccgcgggacgccacaagacctgaccggactgcgccgcccgaggccgtcggccgccgtcagcgagggcgccgagcaacttcgaatgaccgaagaagcatgccgaacacggagtcagaaacgagcgcttgaacgggacccaacagaggacgatgtggagagcaagaaaataaaaatggagagaggattgttggcttcagatttaaacactgacggagacatgagggtgacacctgagccgggagcaggtccaacccaaggattgctgagggcaacagaggccacggccatggccatgggcagaggcgaagggctggtgggcgatgggcccgtggacatgcgcacctcacacagcccaccccagcatcactgaaggggacaacagccacctccgctcaggccaactccacccccactagtgtggcctctgtggtcacctctgccgagtctccagcaagccgacaggcggccgccaagctggcgctgcgcaaacagctggagaagacgctactcgagatccccccacccaagcccccagccccagagatgaacttcctgcccagcgccgccaacaacgagttcatctacctggtcggcctggaggaggtggtgcagaacctactggagacacaagcaggcaggatgtcggccgccactgtgctgtcccgggagccctacatgtgtgcacagtgcaagacggacttcacgtgccgctggcgggaggagaagagcggcgccatcatgtgtgagaactgcatgacaaccaaccagaagaaggcgctcaaggtggagcacaccagccggctgaaggccgcctttgtgaaggcgctgcagcaggaacaggagattgagcagcggctcctgcagcagggcacggcccctgcacaggccaaggccgagcccaccgctgccccacaccccgtgctgaagcaggtcataaaaccccggcgtaagttggcgttccgctcaggagaggcccgcgactggagtaacggggctgtgctacaggcctccagccagctgtcccggggttcggccacgacgccccgaggtgtcctgcacacgttcagtccgtcacccaaactgcagaactcagcctcggccacagccctggtcagcaggaccggcagacattctgagagaaccgtgagcgccggcaagggcagcgccacctccaactggaagaagacgcccctcagcacaggcgggacccttgcgtttgtcagcccaagcctggcggtgcacaagagctcctcggccgtggaccgccagcgagagtacctcctggacatgatcccaccccgctccatcccccagtcagccacgtggaaatagtgcgagccaggccccgtggaagacgggctccctcctcccccacctggcccctggtctagaaggacccactgcaccaccctccgctggctcgggaagacaccgtgcccgccccaagagcaagcaccggccatgctgcagaggcaagacctcaattcttggctgcaaagtttcatcagggctagggggctggtgccgcctcataggcagacgaggatcatcgctgggggaccttt

SEQ ID NO: 136686 - DNA, 640 bp, Homo sapiens
  Payload ID: 6762
  Gene Symbol: GATAD2A
  Gene Name: GATA zinc finger domain containing 2A
  ENST ID: ENST00000494516
  CDS Start-End: 409-640
gtgaagcgggcaatttcagtgtgagactgagccgcgagactgagctgcggctccgagcgctgcgcggcggctcctcccgcccagggtcagcgccccggcgcgcgcacgcgcacccccgccgcccgagcgcgccccgcgccgcccgcgcagtcggtcggtcggtcgtctgtcctgtcgccgctgccgccgccgccacagcggccgccgcgggcgccacctgagggagtcgcctccgcgggacgccacaagacctgaccggactgcgccgcccgaggccgtcggccgccgtcagcgagggcgccgagcaacttcggttggtcagcacattgtctcaagtagccttttgatgtcactgtggccatggccaactggtaggaccagcaccccataccccgaagccagttcagaatgaccgaagaagcatgccgaacacggagtcagaaacgagcgcttgaacgggacccaacagaggacgatgtggagagcaagaaaataaaaatggagagaggattgttggcttcagatttaaacactgacggagacatgagggtgacacctgagccgggagcaggtccaacccaaggattgctgagggcaacagaggccacggccatggccatgggcagaggcgaagggctgg

SEQ ID NO: 136687 - DNA, 7478 bp, Homo sapiens
  Payload ID: 6763
  Gene Symbol: GATAD2B
  Gene Name: GATA zinc finger domain containing 2B
  Uniprot ID: Q8WXI9
  ENST ID: ENST00000368655
  CDS Start-End: 245-2026
agcgtccttgtttgtgtggtgccgccgccgccggtgcagccgtcgccgccgccgctgcccccgtctgtaccgcagtgtctgctccgcccgcccgccccggtccggcccgcccccctcccctacccccgtccctagtcccgtcagcagggtctggatcccctgtgccgtcgcctcttcctttttcgacgcctccgccgccgcctgaggaggcgagctagccgggagttacaccgccaccgccaggatggatagaatgacagaagatgctcttcgcttgaatctgttgaagcggagcttggacccagcagatgagcgagatgatgtcctggcaaagcgactcaaaatggaggggcatgaggccatggaacgtctgaaaatgttggcattgctcaaaaggaaggatttggcaaatcttgaggtgccacatgagttacccaccaaacaggatggcagtggtgtcaagggctatgaagaaaaacttaacgggaatctcaggcctcatggagacaacaggactgctggaaggccaggcaaagaaaacatcaatgatgagcctgtggatatgagtgctagacggagtgagccagagcgaggaaggctaactccctcaccagacatcattgttttgtctgacaatgaggcttccagtccccgttccagttccagaatggaagaaagactcaaagcagccaacttagagatgtttaaggggaaaggcattgaggagcggcagcagcttatcaagcagctgagggatgagctacgattggaagaagcccgactggtcctgttaaagaaactgagacagagtcagctacagaaagagaatgtggtccagaagactccagttgtacagaatgcagcatctattgttcagccatctcctgcccatgtgggacagcagggcctatctaagcttccctctcggcctggggcccaaggggttgaacctcaaaatttgagaacattacagggtcacagtgtcatccgttcagctaccaataccacccttccacacatgttgatgtctcaacgtgttattgcaccaaacccagcccagctacagggtcagcggggcccgcctaagcctggccttgtacgcaccacaacacccaacatgaatcccgccatcaattatcaaccgcagtcaagttcttctgttccatgtcagcgtacaacatcctctgccatctatatgaaccttgcttctcatatccagccagggacggtgaacagagtgtcctcgccacttcctagccccagcgccatgactgatgctgccaactcacaggctgcagccaaattggctcttcgcaaacagctggaaaagacactcctggagatcccaccccctaaacctcctgctcccttacttcatttcttgcctagtgcagccaatagcgagttcatctacatggtaggcttggaagaagtcgtacagagtgtcattgacagccaaggcaaaagctgtgcctcacttctgcgggttgaaccctttgtatgtgcccagtgccgcacagatttcacccctcactggaagcaagaaaagaatggtaagattctatgtgagcagtgtatgacctccaaccagaaaaaggctctaaaagctgaacacaccaaccggctgaaaaatgcatttgtgaaagccctacagcaggaacaggaaattgaacagcgattacagcagcaggcagccctctcccccactacggctccagctgtgtccagtgtcagtaaacaagagaccatcatgagacatcatacgcttcggcaggctccacagccccagagcagcctccagcgtggcatacccacatctgcccgctccatgctttcaaactttgcacaggcaccccagttgtctgtgccaggtggcctccttggtatgccaggtgtcaacattgcatacttgaatactggcatcggaggacacaaaggccccagtttggcagaccgacagcgtgaataccttttagacatgatccctccccggtctatatcgcagtccatcagtggacagaaataacgcctgttccacttgtactgccccatccttgaatcctttatccctttcctctttcattcccccaacttctgtcgcatgcagtgcctgtactggtgcctaccatacacggaaagcaaaacagaaaaacagaagacaaaaaatagagatcagcaagaaaacacacgccctgccctgccacctcccctttatttcacactgctgcgatctgttcttctgccgctctgtcttctctcttcagttttctttaacagtgaggtggatctttacctctgatagaggtcagaatgaggtcctggggagaatctaagccctccgatgtgtgtttctaaagttgttttatgctataattattaccatttttaatgatgttgtgtgtcctccctttgttcagtggacggttaaaccttcccccactcaaccaatctttttctttttccttttcttccttttttttttttttttttgtaaacacaaatgacattcagttcaatgatacgagcattgcagattgcagtaggggtcccagctgccaagtaggacatgactaggagtgttaggggcagaagttttgaatgcacttaaccggaggagggcgcagggtggggggtatcaaagaaggacgaatagcaccctacctgtgggtgtttgggggctggacaatttgggtggcagtgtttggtactgaagttgggctctaagaatgaggggaaagagcctggggaggagcttaaaactcaaccactctggaatttacccatagaagacgggaagaaagaggtatgaagatgggctcaattatgagccagggaggattgaaactaggtcctgcctttctgtatcttggggaaataagaccgatctcctgaccccattgggaacacggaagtctattccaggccaaccagcccaaaattatttcatcttgtattctttgtaaaattctccctcaccccaccctgcttttaaaaattctaatctatcccctctaaccatagccccatctataatacagaggaacggctgttccaaggctgtttgctgggtgtcccacaagttgggtggacataaatgagtcaagtgacaacaggaggaaatagacttagacgaaagaaaggatttctcttccaacagttgagattcgcatatttgcctattctttcaccctctgagtgccaggagatgagaggctgggggtacacaatcaggttggagtcctgtccttactctgctgcaccagctgcagaaccaactgctcaaagccaaacagctcatggcaaaaccagcttaggacctctgctgtacaaatagttgcttcccactgccccccgcccgcccccagaatgatattaattttgccttttttttttttttttttttaagcgctactaatgtagagaatgaattgaattgtgcaatgttgctgttctggggactggggagattagcatcccatttgcccacactgtgggaagacggagtggaccaggctgtttttgaagtaagggaagccccttaaaggtacgggtttctgctcttctcatagtgtacacccacctgcctctctggctccagaagctgccagagtgcactggggggaatgttctcagcagagaagaatgaggagaagtttaatattttgcccttgaaagtcacctgaggaagtttccccacttttattttttaaaattaagtaattttttaaagaaggcacttttaaaattaacacacacatgaactgcacaccttccccataaaatttggaggtggggtgggagaaagagctaaaatcaggctcagttcccctactctggcctctactccccacaccccagtgccactgtgggtgactatactggccctacgggccttcctggcttttttctttcctcccttaccccaaattcattgagcacttaaaggagcagagatgcagccagtgtctgggctcccccagtggtgaaatgatctggaagctagatgctagtaacaggtagtgattgggttttttgagtatttttccggggaatgtggtacccctgactgtaagtggtgggagagggaggggggttaatggaactgggtctgggattattttaaaattatatatatatatataaagatatattcttacatcttttctttgccctctgtgctttgaaagcactggataaattgtttggttttgcttttctctcttccacaaaattggaagctttttttaaaaatgttttccccacaagtcatcttgccttgtggcatgtctgtctagcctcttcctccctccctcatgatgaagtgccatttctgttacgtctccctctccccaagctcagaggtgctcagaggtacgagatgcccaagtttgtcagttgagattaaaagtaaggaacagagaatgtgcaataccgtctggctgggggctgtccctgccctgccctgagctgagtcctttccctgggagccaggccaccttagaatggggtttggaagtaagatgtatagagttggggaatcatggagaaggaaagcctatagtcgagtgcctgcttaggtgctgaggtcacaggggagatggtggaatcttccctgtttttatcccctcagggtcagttacatagaagctgcttcttgactagtatagctcggtgaccctttgttcaaccgctgaggtttgatttcttaccctttcttctccccattttcatactcttcccagggattagtgatggaggtgaggtctccctaatcatggtaaagtgttaaccttccacctcctcccttccctcctccttcctcatccttctgtcttcctcaattctccgtctcttttttttcatcactgattgccttgtgtccctccaagtctacttgttactatccatctccaggctctgggccgtgtagacactaaacctcatgccctaaggacaggaggaaagaccctctgtttggagcattattagtagagtgaggatcccaccagttctgcctggcttcctccatccccagaggcactaaaagcagtattttaaggttggtgtcttactccctggaagcctgaaatgggtggaatagcggtaaggcttgagtaaaactaggggacagaggttcttatttgtcgattttattttataatttgaccacagcatctgaactccctctctccctggaataagtatttttcccacatttttggatatatgtatggtagacaatttttttttaagacacagagataaatgttttcctgctttggttacctttcctttcccctttaaaaggaattagctatagaactgctttgtaaagatgcttcttgatattttacttttgttccttttccctaatcattcccttttctccccactcctccagaaggcataacccttctctccacaccccctacccccacccccgtcctaggctcccatcctttccatcaagaccttcattagcttatgatatttgctgccgagatgttataacaaggactcgttcatgtatataagctatttcttgatccatttaaaaggaattgtacattgtgtagaaaaaaaaaaaaacctgaaaaagagaaaaaaaagccctagccatggatattgtgaaactgtgttatgtcattttgtaatgtgcccgtttgtgtatgatccgtgcaaaagggtttctggggaaggggagggggtagggaggcagggctgtggagggtgggtaggggagtgggccgggcccagcacactgagactggcagctgctccaaccccatccctccttagagatgccacctcccccaccacccacccctaatttgtgccttgcctccccaccctggagtagtccctccgggtcaccagcactgccttggcagagcccactccctaccctaacctgcccaccctccctatcccccagcattaggttgatactgtggggaagtgctgggggctgggaggtagccgaggaatggggcagttcccgggggcatcgaaaccaagtattattatgaattgtaattgtatttgcactgtttttttcctctgattgcatcagcatatatacaatatacctatataacaaaattcagtgtcaagctttcttatgcaagggatttcccccaccccacctcctcaaaaaagaaagaacctagtcttatgggcctttgagggtggattgtcaggggatgatagaaaggattttaataagtcatcctgaggaaatttcacctagtgagagccacatccatctgcacagccttaggctgcgtgaaccgaggtgaggctgagctcctgtgaaagccaagacctcctggtccaggactttgtagagtaaaaagaaccaccaacacaaaaggggttgagggggctacaatctggagacctggggtctcctactaacttgctatatgatctttggtagagttaattttctgagtatcaattttcttatctgtgaagtgaagagggggatcatctggccaccaagtttaaaattctatacttctcacctgccaaaaccaaaaaacaacttgaggtgaggaaagtgttgggcccagaaaccagggaggaactgaaagtgactcgcgttgaagtggttatgtgtatgacaatgctcttggagaactgccagtcctctatggttacccttgatttgggagaggcagcagagtcatgtccagggcatcagaccagtgacatctttgcctttatgcctctagtcatctgagggcggggactaggcctcaagccccatctcacagccaaccacagagcccttaagggtggttgacaattgaatgccccaggttggtgctttagttatttactccctttgtgagctacaggatgtgtaacttttcccccatcttggtgataaaataggagagcgcagacacagcccacattttgtctcctttcctcagatttcatctgaaccccgctaaaggcagctgtttcacagtctgtctccttcaggggcccaatttccccacagcctgggctgagtactcctactctcttctttaggttctgggctgataaagcctggagagggtacagggtgatgggtgaagccctggtgaaggtgaaaggatagattggggttggggggtggggagcagggaggtgggatggggaatggccttccctgaatagggtgggtgggaggggaacaagacccttttgcacaactctctttaagtttcctttatttcttttttaactcattctgattttctgcattgtgtttgggaaataaaatgaaaaaactaagaccaatagaaactggttttcaaaaaggcaaatacactcccatctgtttcagatgctgctgagcatttcagcagtgacagattcaaataataagctaatttttggagaaaggattaaaagaaaaaaaaactttgtaatatttatcacttgcaagctatgtttaataaagaaaggaatggtttctaaaa

SEQ ID NO: 136688 - DNA, 7235 bp, Homo sapiens
  Payload ID: 6763
  Gene Symbol: GATAD2B
  Gene Name: GATA zinc finger domain containing 2B
  Uniprot ID: Q8WXI9
  ENST ID: ENST00000576342
  CDS Start-End: 2-1783
gatggatagaatgacagaagatgctcttcgcttgaatctgttgaagcggagcttggacccagcagatgagcgagatgatgtcctggcaaagcgactcaaaatggaggggcatgaggccatggaacgtctgaaaatgttggcattgctcaaaaggaaggatttggcaaatcttgaggtgccacatgagttacccaccaaacaggatggcagtggtgtcaagggctatgaagaaaaacttaacgggaatctcaggcctcatggagacaacaggactgctggaaggccaggcaaagaaaacatcaatgatgagcctgtggatatgagtgctagacggagtgagccagagcgaggaaggctaactccctcaccagacatcattgttttgtctgacaatgaggcttccagtccccgttccagttccagaatggaagaaagactcaaagcagccaacttagagatgtttaaggggaaaggcattgaggagcggcagcagcttatcaagcagctgagggatgagctacgattggaagaagcccgactggtcctgttaaagaaactgagacagagtcagctacagaaagagaatgtggtccagaagactccagttgtacagaatgcagcatctattgttcagccatctcctgcccatgtgggacagcagggcctatctaagcttccctctcggcctggggcccaaggggttgaacctcaaaatttgagaacattacagggtcacagtgtcatccgttcagctaccaataccacccttccacacatgttgatgtctcaacgtgttattgcaccaaacccagcccagctacagggtcagcggggcccgcctaagcctggccttgtacgcaccacaacacccaacatgaatcccgccatcaattatcaaccgcagtcaagttcttctgttccatgtcagcgtacaacatcctctgccatctatatgaaccttgcttctcatatccagccagggacggtgaacagagtgtcctcgccacttcctagccccagcgccatgactgatgctgccaactcacaggctgcagccaaattggctcttcgcaaacagctggaaaagacactcctggagatcccaccccctaaacctcctgctcccttacttcatttcttgcctagtgcagccaatagcgagttcatctacatggtaggcttggaagaagtcgtacagagtgtcattgacagccaaggcaaaagctgtgcctcacttctgcgggttgaaccctttgtatgtgcccagtgccgcacagatttcacccctcactggaagcaagaaaagaatggtaagattctatgtgagcagtgtatgacctccaaccagaaaaaggctctaaaagctgaacacaccaaccggctgaaaaatgcatttgtgaaagccctacagcaggaacaggaaattgaacagcgattacagcagcaggcagccctctcccccactacggctccagctgtgtccagtgtcagtaaacaagagaccatcatgagacatcatacgcttcggcaggctccacagccccagagcagcctccagcgtggcatacccacatctgcccgctccatgctttcaaactttgcacaggcaccccagttgtctgtgccaggtggcctccttggtatgccaggtgtcaacattgcatacttgaatactggcatcggaggacacaaaggccccagtttggcagaccgacagcgtgaataccttttagacatgatccctccccggtctatatcgcagtccatcagtggacagaaataacgcctgttccacttgtactgccccatccttgaatcctttatccctttcctctttcattcccccaacttctgtcgcatgcagtgcctgtactggtgcctaccatacacggaaagcaaaacagaaaaacagaagacaaaaaatagagatcagcaagaaaacacacgccctgccctgccacctcccctttatttcacactgctgcgatctgttcttctgccgctctgtcttctctcttcagttttctttaacagtgaggtggatctttacctctgatagaggtcagaatgaggtcctggggagaatctaagccctccgatgtgtgtttctaaagttgttttatgctataattattaccatttttaatgatgttgtgtgtcctccctttgttcagtggacggttaaaccttcccccactcaaccaatctttttctttttccttttcttccttttttttttttttttttgtaaacacaaatgacattcagttcaatgatacgagcattgcagattgcagtaggggtcccagctgccaagtaggacatgactaggagtgttaggggcagaagttttgaatgcacttaaccggaggagggcgcagggtggggggtatcaaagaaggacgaatagcaccctacctgtgggtgtttgggggctggacaatttgggtggcagtgtttggtactgaagttgggctctaagaatgaggggaaagagcctggggaggagcttaaaactcaaccactctggaatttacccatagaagacgggaagaaagaggtatgaagatgggctcaattatgagccagggaggattgaaactaggtcctgcctttctgtatcttggggaaataagaccgatctcctgaccccattgggaacacggaagtctattccaggccaaccagcccaaaattatttcatcttgtattctttgtaaaattctccctcaccccaccctgcttttaaaaattctaatctatcccctctaaccatagccccatctataatacagaggaacggctgttccaaggctgtttgctgggtgtcccacaagttgggtggacataaatgagtcaagtgacaacaggaggaaatagacttagacgaaagaaaggatttctcttccaacagttgagattcgcatatttgcctattctttcaccctctgagtgccaggagatgagaggctgggggtacacaatcaggttggagtcctgtccttactctgctgcaccagctgcagaaccaactgctcaaagccaaacagctcatggcaaaaccagcttaggacctctgctgtacaaatagttgcttcccactgccccccgcccgcccccagaatgatattaattttgccttttttttttttttttttttaagcgctactaatgtagagaatgaattgaattgtgcaatgttgctgttctggggactggggagattagcatcccatttgcccacactgtgggaagacggagtggaccaggctgtttttgaagtaagggaagccccttaaaggtacgggtttctgctcttctcatagtgtacacccacctgcctctctggctccagaagctgccagagtgcactggggggaatgttctcagcagagaagaatgaggagaagtttaatattttgcccttgaaagtcacctgaggaagtttccccacttttattttttaaaattaagtaattttttaaagaaggcacttttaaaattaacacacacatgaactgcacaccttccccataaaatttggaggtggggtgggagaaagagctaaaatcaggctcagttcccctactctggcctctactccccacaccccagtgccactgtgggtgactatactggccctacgggccttcctggcttttttctttcctcccttaccccaaattcattgagcacttaaaggagcagagatgcagccagtgtctgggctcccccagtggtgaaatgatctggaagctagatgctagtaacaggtagtgattgggttttttgagtatttttccggggaatgtggtacccctgactgtaagtggtgggagagggaggggggttaatggaactgggtctgggattattttaaaattatatatatatatataaagatatattcttacatcttttctttgccctctgtgctttgaaagcactggataaattgtttggttttgcttttctctcttccacaaaattggaagctttttttaaaaatgttttccccacaagtcatcttgccttgtggcatgtctgtctagcctcttcctccctccctcatgatgaagtgccatttctgttacgtctccctctccccaagctcagaggtgctcagaggtacgagatgcccaagtttgtcagttgagattaaaagtaaggaacagagaatgtgcaataccgtctggctgggggctgtccctgccctgccctgagctgagtcctttccctgggagccaggccaccttagaatggggtttggaagtaagatgtatagagttggggaatcatggagaaggaaagcctatagtcgagtgcctgcttaggtgctgaggtcacaggggagatggtggaatcttccctgtttttatcccctcagggtcagttacatagaagctgcttcttgactagtatagctcggtgaccctttgttcaaccgctgaggtttgatttcttaccctttcttctccccattttcatactcttcccagggattagtgatggaggtgaggtctccctaatcatggtaaagtgttaaccttccacctcctcccttccctcctccttcctcatccttctgtcttcctcaattctccgtctcttttttttcatcactgattgccttgtgtccctccaagtctacttgttactatccatctccaggctctgggccgtgtagacactaaacctcatgccctaaggacaggaggaaagaccctctgtttggagcattattagtagagtgaggatcccaccagttctgcctggcttcctccatccccagaggcactaaaagcagtattttaaggttggtgtcttactccctggaagcctgaaatgggtggaatagcggtaaggcttgagtaaaactaggggacagaggttcttatttgtcgattttattttataatttgaccacagcatctgaactccctctctccctggaataagtatttttcccacatttttggatatatgtatggtagacaatttttttttaagacacagagataaatgttttcctgctttggttacctttcctttcccctttaaaaggaattagctatagaactgctttgtaaagatgcttcttgatattttacttttgttccttttccctaatcattcccttttctccccactcctccagaaggcataacccttctctccacaccccctacccccacccccgtcctaggctcccatcctttccatcaagaccttcattagcttatgatatttgctgccgagatgttataacaaggactcgttcatgtatataagctatttcttgatccatttaaaaggaattgtacattgtgtagaaaaaaaaaaaaacctgaaaaagagaaaaaaaagccctagccatggatattgtgaaactgtgttatgtcattttgtaatgtgcccgtttgtgtatgatccgtgcaaaagggtttctggggaaggggagggggtagggaggcagggctgtggagggtgggtaggggagtgggccgggcccagcacactgagactggcagctgctccaaccccatccctccttagagatgccacctcccccaccacccacccctaatttgtgccttgcctccccaccctggagtagtccctccgggtcaccagcactgccttggcagagcccactccctaccctaacctgcccaccctccctatcccccagcattaggttgatactgtggggaagtgctgggggctgggaggtagccgaggaatggggcagttcccgggggcatcgaaaccaagtattattatgaattgtaattgtatttgcactgtttttttcctctgattgcatcagcatatatacaatatacctatataacaaaattcagtgtcaagctttcttatgcaagggatttcccccaccccacctcctcaaaaaagaaagaacctagtcttatgggcctttgagggtggattgtcaggggatgatagaaaggattttaataagtcatcctgaggaaatttcacctagtgagagccacatccatctgcacagccttaggctgcgtgaaccgaggtgaggctgagctcctgtgaaagccaagacctcctggtccaggactttgtagagtaaaaagaaccaccaacacaaaaggggttgagggggctacaatctggagacctggggtctcctactaacttgctatatgatctttggtagagttaattttctgagtatcaattttcttatctgtgaagtgaagagggggatcatctggccaccaagtttaaaattctatacttctcacctgccaaaaccaaaaaacaacttgaggtgaggaaagtgttgggcccagaaaccagggaggaactgaaagtgactcgcgttgaagtggttatgtgtatgacaatgctcttggagaactgccagtcctctatggttacccttgatttgggagaggcagcagagtcatgtccagggcatcagaccagtgacatctttgcctttatgcctctagtcatctgagggcggggactaggcctcaagccccatctcacagccaaccacagagcccttaagggtggttgacaattgaatgccccaggttggtgctttagttatttactccctttgtgagctacaggatgtgtaacttttcccccatcttggtgataaaataggagagcgcagacacagcccacattttgtctcctttcctcagatttcatctgaaccccgctaaaggcagctgtttcacagtctgtctccttcaggggcccaatttccccacagcctgggctgagtactcctactctcttctttaggttctgggctgataaagcctggagagggtacagggtgatgggtgaagccctggtgaaggtgaaaggatagattggggttggggggtggggagcagggaggtgggatggggaatggccttccctgaatagggtgggtgggaggggaacaagacccttttgcacaactctctttaagtttcctttatttcttttttaactcattctgattttctgcattgtgtttgggaaataaaatgaaaaaactaagaccaatagaaactggttttcaaaaaggcaaatacactcccatctgtttcagatgctgctgagcatttcagcagtgacagattcaaataataagctaatttttggagaaaggattaaaagaaaaaaaaactttgtaatatttatcacttgcaagctatgtttaataaagaaaggaatggtttctaaaa

SEQ ID NO: 136689 - DNA, 2342 bp, Homo sapiens
  Payload ID: 6763
  Gene Symbol: GATAD2B
  Gene Name: GATA zinc finger domain containing 2B
  ENST ID: ENST00000634544
  CDS Start-End: 194-1975
tgggacacactggatctgtcttccagttcagttcctgagggtcggtggaacttacccttccctaaccacaccgggacttagagtacttttggcctccctgctctcaattacattgaggagcgagccactcatgcgagtgcagaggttcaggtgccattcgcgcgcccggtacagctttcccgtttcataaaggatggatagaatgacagaagatgctcttcgcttgaatctgttgaagcggagcttggacccagcagatgagcgagatgatgtcctggcaaagcgactcaaaatggaggggcatgaggccatggaacgtctgaaaatgttggcattgctcaaaaggaaggatttggcaaatcttgaggtgccacatgagttacccaccaaacaggatggcagtggtgtcaagggctatgaagaaaaacttaacgggaatctcaggcctcatggagacaacaggactgctggaaggccaggcaaagaaaacatcaatgatgagcctgtggatatgagtgctagacggagtgagccagagcgaggaaggctaactccctcaccagacatcattgttttgtctgacaatgaggcttccagtccccgttccagttccagaatggaagaaagactcaaagcagccaacttagagatgtttaaggggaaaggcattgaggagcggcagcagcttatcaagcagctgagggatgagctacgattggaagaagcccgactggtcctgttaaagaaactgagacagagtcagctacagaaagagaatgtggtccagaagactccagttgtacagaatgcagcatctattgttcagccatctcctgcccatgtgggacagcagggcctatctaagcttccctctcggcctggggcccaaggggttgaacctcaaaatttgagaacattacagggtcacagtgtcatccgttcagctaccaataccacccttccacacatgttgatgtctcaacgtgttattgcaccaaacccagcccagctacagggtcagcggggcccgcctaagcctggccttgtacgcaccacaacacccaacatgaatcccgccatcaattatcaaccgcagtcaagttcttctgttccatgtcagcgtacaacatcctctgccatctatatgaaccttgcttctcatatccagccagggacggtgaacagagtgtcctcgccacttcctagccccagcgccatgactgatgctgccaactcacaggctgcagccaaattggctcttcgcaaacagctggaaaagacactcctggagatcccaccccctaaacctcctgctcccttacttcatttcttgcctagtgcagccaatagcgagttcatctacatggtaggcttggaagaagtcgtacagagtgtcattgacagccaaggcaaaagctgtgcctcacttctgcgggttgaaccctttgtatgtgcccagtgccgcacagatttcacccctcactggaagcaagaaaagaatggtaagattctatgtgagcagtgtatgacctccaaccagaaaaaggctctaaaagctgaacacaccaaccggctgaaaaatgcatttgtgaaagccctacagcaggaacaggaaattgaacagcgattacagcagcaggcagccctctcccccactacggctccagctgtgtccagtgtcagtaaacaagagaccatcatgagacatcatacgcttcggcaggctccacagccccagagcagcctccagcgtggcatacccacatctgcccgctccatgctttcaaactttgcacaggcaccccagttgtctgtgccaggtggcctccttggtatgccaggtgtcaacattgcatacttgaatactggcatcggaggacacaaaggccccagtttggcagaccgacagcgtgaataccttttagacatgatccctccccggtctatatcgcagtccatcagtggacagaaataacgcctgttccacttgtactgccccatccttgaatcctttatccctttcctctttcattcccccaacttctgtcgcatgcagtgcctgtactggtgcctaccatacacggaaagcaaaacagaaaaacagaagacaaaaaatagagatcagcaagaaaacacacgccctgccctgccacctcccctttatttcacactgctgcgatctgttcttctgccgctctgtcttctctcttcagttttctttaacagtgaggtggatctttacctctgatagaggtcagaatgaggtcctggggagaatctaagccctccgatgtgtgtttctaaagttgttttatgctataattattaccatttttaatgat

SEQ ID NO: 136690 - DNA, 788 bp, Homo sapiens
  Payload ID: 6763
  Gene Symbol: GATAD2B
  Gene Name: GATA zinc finger domain containing 2B
  ENST ID: ENST00000634564
  CDS Start-End: 1-788
ccgttcagctaccaataccacccttccacacatgttgatgtctcaacgtgttattgcaccaaacccagcccagctacagggtcagcggggcccgcctaagcctggccttgtacgcaccacaacacccaacatgaatcccgccatcaattatcaaccgtcaagttcttctgttccatgtcagcgtacaacatcctctgccatctatatgaaccttgcttctcatatccagccagggacggtgaacagagtgtcctcgccacttcctagccccagcgccatgactgatgctgccaactcacaggctgcagccaaattggctcttcgcaaacagctggaaaagacactcctggagatcccaccccctaaacctcctgctcccttacttcatttcttgcctagtgcagccaatagcgagttcatctacatggtaggcttggaagaagtcgtacagagtgtcattgacagccaaggcaaaagctgtgcctcacttctgcgggttgaaccctttgtatgtgcccagtgccgcacagatttcacccctcactggaagcaagaaaagaatggtaagattctatgtgagcagtgtatgacctccaaccagaaaaaggctctaaaagctgaacacaccaaccggctgaaaaatgcatttgtgaaagccctacagcaggaacaggaaattgaacagcgattacagcagcaggcagccctctcccccactacggctccagctgtgtccagtgtcagtaaacaagagaccatcatgagacatcatacgcttcggcaggctc

SEQ ID NO: 136691 - DNA, 867 bp, Homo sapiens
  Payload ID: 6763
  Gene Symbol: GATAD2B
  Gene Name: GATA zinc finger domain containing 2B
  ENST ID: ENST00000634401
  CDS Start-End: 305-867
ttgtttgtgtggtgccgccgccgccggtgcagccgtcgccgccgccgctgcccccgtctgtaccgcagtgtctgctccgcccgcccgccccggtccggcccgcccccctcccctacccccgtccctagtcccgtcagcagggtctggatcccctgtgccgtcgcctcttcctttttcgacgcctccgccgccgcctgaggaggcgagctagccgggagttacaccgccaccgccaggcaggtcttgaactcctggcctcaagtagtcctcctgccttggcctcctaaggtgttgggattacaggatggatagaatgacagaagatgctcttcgcttgaatctgttgaagcggagcttggacccagcagatgagcgagatgatgtcctggcaaagcgactcaaaatggaggggcatgaggccatggaacgtctgaaaatgttggcattgctcaaaaggaaggatttggcaaatcttgaggtgccacatgagttacccaccaaacaggatggcagtggtgtcaagggctatgaagaaaaacttaacgggaatctcaggcctcatggagacaacaggactgctggaaggccaggcaaagaaaacatcaatgatgagcctgtggatatgagtgctagacggagtgagccagagcgaggaaggctaactccctcaccagacatcattgttttgtctgacaatgaggcttccagtccccgttccagttccagaatggaagaaagactcaaagcagccaacttagagatgtttaaggggaaaggcattgaggagcggcagcagcttatcaagcagctgagggatgagctacgattggaagaagcccgactggtcctgttaaagaaactgagaca

SEQ ID NO: 136692 - DNA, 642 bp, Homo sapiens
  Payload ID: 6763
  Gene Symbol: GATAD2B
  Gene Name: GATA zinc finger domain containing 2B
  ENST ID: ENST00000634791
  CDS Start-End: 196-642
ggtctggatcccctgtgccgtcgcctcttcctttttcgacgcctccgccgccgcctgaggaggcgagctagccgggagttacaccgccaccgccaggaaaactatttttcagcgtttgtaatggttctaatactgatctgattgctgagtccaaggatatacagtcatgcctcacgtaatggtagtcccataaggatggatagaatgacagaagatgctcttcgcttgaatctgttgaagcggagcttggacccagcagatgagcgagatgatgtcctggcaaagcgactcaaaatggaggggcatgaggccatggaacgtctgaaaatgttggcattgctcaaaaggaaggatttggcaaatcttgaggtgccacatgagttacccaccaaacaggatggcagtggtgtcaagggctatgaagaaaaacttaacgggaatctcaggcctcatggagacaacaggactgctggaaggccaggcaaagaaaacatcaatgatgagcctgtggatatgagtgctagacggagtgagccagagcgaggaaggctaactccctcaccagacatcattgttttgtctgacaatgaggcttccagtccccgttccagttccagaatggaagaaagactcaaagcagcc

SEQ ID NO: 136693 - DNA, 1825 bp, Homo sapiens
  Payload ID: 6763
  Gene Symbol: GATAD2B
  Gene Name: GATA zinc finger domain containing 2B
  ENST ID: ENST00000634408
  CDS Start-End: 12-1745
ccaccgccaggatggatagaatgacagaagatgctcttcgcttgaatctgttgaagcggagcttggacccagcagatgagcgagatgatgtcctggcaaagcgactcaaaatggaggggcatgaggccatggaacgtctgaaaatgttggcattgctcaaaaggaaggatttggcaaatcttgaggtgccacatgagttacccaccaaacaggatggcagtggtgtcaagggctatgaagaaaaacttaacgggaatctcaggcctcatggagacaacaggactgctggaaggccaggcaaagaaaacatcaatgatgagcctgtggatatgagtgctagacggagtgagccagagcgaggaaggctaactccctcaccagacatcattgttttgtctgacaatgaggcttccagtccccgttccagttccagaatggaagaaagactcaaagcagccaacttagagatgtttaaggggaaaggcattgaggagcggcagcagcttatcaagcagctgagggatgagctacgattggaagaagcccgactggtcctgttaaagaaactgagacagagtcagctacagaaagagaatgtggtccagaagactccagttgtacagaatgcagcatctattgttcagccatctcctgcccatgtgggacagcagggcctatctaagcttccctctcggcctggggcccaaggggttgaacctcaaaatttgagaacattacagggtcacagtgtcatccgttcagctaccaataccacccttccacacatgttgatgtctcaacgtgttattgcaccaaacccagcccagctacagggtcagcggggcccgcctaagcctggccttcagtcaagttcttctgttccatgtcagcgtacaacatcctctgccatctatatgaaccttgcttctcatatccagccagggacggtgaacagagtgtcctcgccacttcctagccccagcgccatgactgatgctgccaactcacaggctgcagccaaattggctcttcgcaaacagctggaaaagacactcctggagatcccaccccctaaacctcctgctcccttacttcatttcttgcctagtgcagccaatagcgagttcatctacatggtaggcttggaagaagtcgtacagagtgtcattgacagccaaggcaaaagctgtgcctcacttctgcgggttgaaccctttgtatgtgcccagtgccgcacagatttcacccctcactggaagcaagaaaagaatggtaagattctatgtgagcagtgtatgacctccaaccagaaaaaggctctaaaagctgaacacaccaaccggctgaaaaatgcatttgtgaaagccctacagcaggaacaggaaattgaacagcgattacagcagcaggcagccctctcccccactacggctccagctgtgtccagtgtcagtaaacaagagaccatcatgagacatcatacgcttcggcaggctccacagccccagagcagcctccagcgtggcatacccacatctgcccgctccatgctttcaaactttgcacaggcaccccagttgtctgtgccaggtggcctccttggtatgccaggtgtcaacattgcatacttgaatactggcatcggaggacacaaaggccccagtttggcagaccgacagcgtgaataccttttagacatgatccctccccggtctatatcgcagtccatcagtggacagaaataacgcctgttccacttgtactgccccatccttgaatcctttatccctttcctctttcattcccccaacttctgtcgcatgca

SEQ ID NO: 136694 - DNA, 1257 bp, Homo sapiens
  Payload ID: 6764
  Gene Symbol: GATSL2
  Gene Name: GATS protein-like 2
  Uniprot ID: A6NHX0
  ENST ID: ENST00000616305
  CDS Start-End: 169-1158
gcctcctcccttttgtccggcccggcccggccgccgccgccccccgcgcccggcgccgagctcccgggtctccgggccggctgtcggtgccggcagggcgcggagggggcgggggccgcggctcgtccccccgcggatgagccgccgcggacggggcgcgggcggacgatggaactccacatcctggagcaccggctgcaagttgccagcgtcgccaaggagagtatcccgctgttcacctacggcctgatcaaacttgccttcctgtcctccaagaccaggtgcaagttcttcagtctgactgagacgccagaggattacactatcattgtcgatgaggaaggattcctagagctgccctcctcggagcacctgagtgtggcagatgccacctggctggccctgaacgtggtgtccggcggtggcagcttctccagctcccagcccatcggcgtgaccaagatcgccaagtcagtcatcgccccactggctgaccagaacatatccgtgttcatgctgtccacgtatcagacagacttcatcctggtgcgcgagcgggacctgccctttgtcacccacacattgtcatcagagttcaccatcctgcgggtcgtcaatggcgagaccgtggcagccgagaacctcggcatcaccaatggcttcgtgaagcccaagctggtccagaggccagtcatccacccactgtccagcccgagcaacaggttctgtgtcaccagcctggaccctgacacgctgcctgctgttgccacactcctcatggatgtcatgttctactccaatggagtgaaggaccccatggccactggggatgactgcggccacatccgcttcttctccttctccctcatcgagggctacatctccctggtgatggacgtgcagacgcagcagaggtttcctagtaacttgctgttcacaagcgcatccggagagctctggaagatggtccggattggaggacagcccctggggtttgatgagtgtggcatcgtggcccagatctcagagcccttggctgctgcagacatcccagcctactacatcagtactttcaagtttgatcatgcacttgtccccgaagagaacatcaatggtgtcatcagtgccctgaaggtcagccaagcagagaagcactagaagggtctcttctgctcctccctgccgccgcccgggcccagccctaaccctgaagattgatcttgcagtatttctctacagactggaaaatcagcctgg

SEQ ID NO: 136695 - DNA, 1623 bp, Homo sapiens
  Payload ID: 6765
  Gene Symbol: GATSL3
  Gene Name: GATS protein-like 3
  Uniprot ID: Q8WTX7
  ENST ID: ENST00000407689
  CDS Start-End: 131-1120
agcctcgcagcgggcggcgtggacgcggcagcgcagcggctcctttaaggctcgggcaccacccccgccgccccgcctcccgtgcggcctgggtctagttggcggcggggtcgggtccgcgcgagccgcgatggagctgcacatcctagaacaccgggtgcgggtgctgagcgtcgcccgtcccggtctctggctctacacccacccgctcatcaagctgctcttcctgccccgccgcagccggtgcaagttcttcagcctgacggagacccctgaggattacacgcttatggtggacgaggagggctttaaagagctgcccccatctgagttcctgcaagtagctgaggccacatggctggtgctgaacgtgtcgtctcacagcggtgcggcagtgcaggctgctggggtcaccaagatcgcccgttcggtcatcgcgccactggccgagcaccacgtgtctgtgctgatgctgtccacttaccagacggacttcatcctggtgcgggagcaggacctgtccgtggtgatccacacgctggcccaggagttcgacatttaccgcgaggtgggcggagagcctgtgcctgtgacgagggatgattccagcaatggctttccccgcactcagcatgggcccagccccacggtgcatcccatccagagcccacagaaccgcttctgtgtcctcacactggaccctgagacgcttccagccatcgccaccaccctcatagatgtcctcttctactcgcacagcacccccaaggaggcagcctctagcagtcctgaacccagctccatcacgttctttgccttctccctcatcgagggttatatctccattgtcatggatgctgaaacacagaaaaagttccccagtgacctcctgctgaccagctcctcgggggagctgtggaggatggtgcgcatcggtggacagcccctgggctttgatgaatgtggcatcgtggcacagattgcaggtcccctggctgccgctgacatctctgcctactacatcagcaccttcaacttcgaccacgccctggtgcccgaggacggtatcggcagcgtcatcgaggtcctccagcggcggcaggaaggcctggcttcctgaggcccatgggcaacagagcagcctccctgctctcccctcgacccaggcttccaaagacttctctaagctatttccttaagctctggaacgagccccctgttctgctggggaccctcgttccgctctctgtatgtaagctgcgtgcaggcaccggcttttacgcggacacctgtgtacactcacaggtggagtgggcaggtgctagcctgactgcgtgtctgcccatgcaggggaacacggtgctcggggcttaagcccccaacccatcactccctgcgcagcctcggcgtttgcacagtccctgcctgaggcctgagccattccccaaaggcttcctgggccagctgccccgctgacctccgttctgcctctggtggggttgccttccctggccaggtgagtcctgacagtgcctctccctcctggggcctccaaggaaagtattttgacatctctctctcttctgtttttattgacttgttaataaaggactttgtagtgac

SEQ ID NO: 136696 - DNA, 1460 bp, Homo sapiens
  Payload ID: 6765
  Gene Symbol: GATSL3
  Gene Name: GATS protein-like 3
  ENST ID: ENST00000404953
  CDS Start-End: 111-986
ggacgcggcagcgcagcggctcctttaaggctcgggcaccacccccgccgccccgcctcccgtgcggcctgggtctagttggcggcggggtcgggtccgcgcgagccgcgatggagctgcacatcctagaacaccgggtgcgggtgctgagcgtcgcccgtcccggtctctggctctacacccacccgctcatcaagctgctcttcctgccccgccgcagccggtgcaagttcttcagcctgacggagacccctgaggattacacgcttatggtggacgaggagggctttaaagagctgcccccatctgagttcctgcaagtagctgaggccacatggctggtgctgaacgtgtcgtctcacagcggtgcggcagtgcaggctgctggggtcaccaagatcgcccgttcggtcatcgcgccactggccgagcaccacgtgtctgtgctgatgctgtccacttaccagacggacttcatcctggtgcgggagcaggacctgtccgtggtgatccacacgctggcccaggagttcgacatttaccgcgaggtgggcggagagcctgtgcctgtgacgagggatgattccagcaatggctttccccgcactcagcatgggcccagccccacggtgcatcccatccagagcccacagaaccgcttctgtgtcctcacactggaccctgagacgcttccagccatcgccaccaccctcatagatgtcctcttctactcgcacaggttccccagtgacctcctgctgaccagctcctcgggggagctgtggaggatggtgcgcatcggtggacagcccctgggctttgatgaatgtggcatcgtggcacagattgcaggtcccctggctgccgctgacatctctgcctactacatcagcaccttcaacttcgaccacgccctggtgcccgaggacggtatcggcagcgtcatcgaggtcctccagcggcggcaggaaggcctggcttcctgaggcccatgggcaacagagcagcctccctgctctcccctcgacccaggcttccaaagacttctctaagctatttccttaagctctggaacgagccccctgttctgctggggaccctcgttccgctctctgtatgtaagctgcgtgcaggcaccggcttttacgcggacacctgtgtacactcacaggtggagtgggcaggtgctagcctgactgcgtgtctgcccatgcaggggaacacggtgctcggggcttaagcccccaacccatcactccctgcgcagcctcggcgtttgcacagtccctgcctgaggcctgagccattccccaaaggcttcctgggccagctgccccgctgacctccgttctgcctctggtggggttgccttccctggccaggtgagtcctgacagtgcctctccctcctggggcctccaaggaaagtattttgacatctctctctcttctgtttttatt

SEQ ID NO: 136697 - DNA, 975 bp, Homo sapiens
  Payload ID: 6765
  Gene Symbol: GATSL3
  Gene Name: GATS protein-like 3
  ENST ID: ENST00000421236
  CDS Start-End: 126-254
cgcagcgggcggcgtggacgcggcagcgcagcggctcctttaaggctcgggcaccacccccgccgccccgcctcccgtgcggcctgggtctagttggcggcggggtcgggtccgcgcgagccgcgatggagctgcacatcctagaacaccgggtgcgggtgctgagcgtcgcccgtcccggtctctggctctacacccacccgctcatcaagctgctcttcctgccccgccgcagccgagctgcccccatctgagttcctgcaagtagctgaggccacatggctggtgctgaacgtgtcgtctcacagcggtgcggcagtgcaggctgctggggtcaccaagatcgcccgttcggtcatcgcgccactggccgagcaccacgtgtctgtgctgatgctgtccacttaccagacggacttcatcctggtgcgggagcaggacctgtccgtggtgatccacacgctggcccaggagttcgacatttaccgcgaggtgggcggagagcctgtgcctgtgacgagggatgattccagcaatggctttccccgcactcagcatgggcccagccccacggtgcatcccatccagagcccacagaaccgcttctgtgtcctcacactggaccctgagacgcttccagccatcgccaccaccctcatagatgtcctcttctactcgcacagcacccccaaggaggcagcctctagcagtcctgaacccagctccatcacgttctttgccttctccctcatcgagggttatatctccattgtcatggatgctgaaacacagaaaaagttccccagtgacctcctgctgaccagctcctcgggggagctgtggaggatggtgcgcatcggtggacagcccctgggctttgatgaatgtggcatcgtggcacagattgcaggtcccctggctgccgctgacatctctgcctactacatcagcaccttcaacttcgaccacgccctg

SEQ ID NO: 136698 - DNA, 580 bp, Homo sapiens
  Payload ID: 6765
  Gene Symbol: GATSL3
  Gene Name: GATS protein-like 3
  ENST ID: ENST00000440704
  CDS Start-End: 1-188
tggagctgcacatcctagaacaccgggtgcgggtgctgagcgtcgcccgtcccggtctctggctctacacccacccgctcatcaagctgctcttcctgccccgccgcagccggtgcgcgcccgggttcgggagcgcagataggggctgggggctctgctctcgctccgggccagggtcggaggattaggatcgccgtaaggtgcaagttcttcagcctgacggagacccctgaggattacacgcttatggtggacgaggagggctttaaagagctgcccccatctgagttcctgcaagtagctgaggccacatggctggtgctgaacgtgtcgtctcacagcggtgcggcagtgcaggctgctggggtcaccaagatcgcccgttcggtcatcgcgccactggccgagcaccacgtgtctgtgctgatgctgtccacttaccagacggacttcatcctggtgcgggagcaggacctgtccgtggtgatccacacgctggcccaggagttcgacatttaccgcgaggtgggcggagagcctgtgcctgtgacgagggatgattccagcaatggctttcccc

SEQ ID NO: 136699 - DNA, 794 bp, Homo sapiens
  Payload ID: 6765
  Gene Symbol: GATSL3
  Gene Name: GATS protein-like 3
  ENST ID: ENST00000425691
  CDS Start-End: 44-232
cctgggtctagttggcggcggggtcgggtccgcgcgagccgcgatggagctgcacatcctagaacaccgggtgcgggtgctgagcgtcgcccgtcccggtctctggctctacacccacccgctcatcaagctgctcttcctgccccgccgcagccggtgcgcgcccgggttcgggagcgcagataggggctgggggctctgctctcgctccgggccagggtcggaggattaggatcgccgtaaggcaggtgcaagttcttcagcctgacggagacccctgaggattacacgcttatggtggacgaggagggctttaaagagctgcccccatctgagttcctgcaagtagctgaggccacatggctggtgctgaacgtgtcgtctcacagcggtgcggcagtgcaggctgctggggtcaccaagatcgcccgttcggtcatcgcgccactggccgagcaccacgtgtctgtgctgatgctgtccacttaccagacggacttcatcctggtgcgggagcaggacctgtccgtggtgatccacacgctggcccaggagttcgacatttaccgcgaggtgggcggagagcctgtgcctgtgacgagggatgattccagcaatggctttccccgcactcagcatgggcccagccccacggtgcatcccatccagagcccacagaaccgcttctgtgtcctcacactggaccctgagacgcttccagccatcgccaccaccctcatagatgtcctcttctactcgcacagcacccccaaggaggcagcctctagcagtcc

SEQ ID NO: 136700 - DNA, 793 bp, Homo sapiens
  Payload ID: 6765
  Gene Symbol: GATSL3
  Gene Name: GATS protein-like 3
  ENST ID: ENST00000440839
  CDS Start-End: 73-201
ccacccccgccgccccgcctcccgtgcggcctgggtctagttggcggcggggtcgggtccgcgcgagccgcgatggagctgcacatcctagaacaccgggtgcgggtgctgagcgtcgcccgtcccggtctctggctctacacccacccgctcatcaagctgctcttcctgccccgccgcagccgagctgcccccatctgagttcctgcaagtagctgaggccacatggctggtgctgaacgtgtcgtctcacagcggtgcggcagtgcaggctgctggggtcaccaagatcgcccgttcggtcatcgcgccactggccgagcaccacgtgtctgtgctgatgctgtccacttaccagacggacttcatcctggtgcgggagcaggacctgtccgtggtgatccacacgctggcccaggagttcgacatttaccgcgaggtgggcggagagcctgtgcctgtgacgagggatgattccagcaatggctttccccgcactcagcatgatgaatgtggcatcgtggcacagattgcaggtcccctggctgccgctgacatctctgcctactacatcagcaccttcaacttcgaccacgccctggtgcccgaggacggtatcggcagcgtcatcgaggtcctccagcggcggcaggaaggcctggcttcctgaggcccatgggcaacagagcagcctccctgctctcccctcgacccaggcttccaaagacttctctaagctatttccttaagctctggaacgagccccctgttctgctggggaccctcgttccgc

SEQ ID NO: 136701 - DNA, 740 bp, Homo sapiens
  Payload ID: 6765
  Gene Symbol: GATSL3
  Gene Name: GATS protein-like 3
  ENST ID: ENST00000415484
  CDS Start-End: 9-233
gagccgcgatggagctgcacatcctagaacaccgggtgcgggtgctgagcgtcgcccgtcccggtctctggctctacacccacccgctcatcaagctgctcttcctgccccgccgcagccggtgcaagttcttcagcctgacggagacccctgaggattacacgcttatggtggacgaggagggctttaaagatgaggaaactgagactcaaatcacccaccccaggtcataagacaaattaacaaagctgggatttgaacccagagctgcccccatctgagttcctgcaagtagctgaggccacatggctggtgctgaacgtgtcgtctcacagcggtgcggcagtgcaggctgctggggtcaccaagatcgcccgttcggtcatcgcgccactggccgagcaccacgtgtctgtgctgatgctgtccacttaccagacggacttcatcctggtgcgggagcaggacctgtccgtggtgatccacacgctggcccaggagttcgacatttaccgcgaggtgggcggagagcctgtgcctgtgacgagggatgattccagcaatggctttccccgcactcagcatgggcccagccccacggtgcatcccatccagagcccacagaaccgcttctgtgtcctcacactggaccctgagacgcttccagccatcgccaccaccctcatagatgtcctcttctactcgcacagcacccccaaggaggcagcctctagcagtcc

SEQ ID NO: 136702 - DNA, 2726 bp, Homo sapiens
  Payload ID: 6766
  Gene Symbol: GATS
  Gene Name: GATS, stromal antigen 3 opposite strand
  Uniprot ID: Q8NAP1
  ENST ID: ENST00000436886
  CDS Start-End: 236-727
tacagcgaacaccagctgctccccgcgccggcacccgcgcgccgctgctccgccggcgctgcctccctcgacccgtggctccccctcgcaacttggcgggcctcctcccttttgtccggcccggtccggccgccgccgccccccgcgcctggcgccgagctcccgggtccccgggccggctgtcggtgccggcagggcgcggagggggcgggggccgcggctcgtcccccagcggatgagctgccgcggacggggcgcgggcggacgatggaactccacatcctggagcaccggctgcaagttgccagcgtcgccaaggagagtatcccgctgttcacctacgggcctgatcaaacttgccttcctgttctccaagaccaggtgcaagttcttcagtctgactgagacaccagaggattacactatcattgtcgatgaggaaggattcctagagctgccctcctcggagcacctgagtgtggcggatgccacctggctggccctgaacgtggtgtccggcggtggcagcttctccagctcccagcctattggcatgaccaagatcgccaagtcagtcatcgccccactggctgaccagaacatatccgtgttcatgctgtccacgtatcagacagacttcatcctggtgctcaagcgggacctgccctttgtcacccacacgttgtcatcagagttcaccatcctgtggtcagtggctagactgtagcagccgagaacctcggcatcaccagtggcttcgtgaagcccaagctggggccttggtgtaccttgttgtagtgtttgaaaacatctgaggctgcatccatctccagcaccccataaagcaacagcttgcagaacccggctaggaggcggcgccgctggtgtagccgctctatctgtaaatgatcctcctgggaatcacctggctcacatggaaggcaaaagggaatcacagacttaagcttcctgccctatatttctgagctacacccaagccccagcccttactgagccccaggtatagagtcactgcaccactgcccaggtctcccggctggatgaagacgtggtccatgaggaagctggctagctcagactggagagtagcttcaggaaaaaagacaagtggcctaaggaaatcacggcccccaacaatcatctgagggctaaagatgagaagtagatcacttaataagacaaaagcctgtagggggaaaagaaaggatgtttaaaaggacagaatgtttcccaaggtagaaatgacactgtcaatttctccttggaatgggggcagggatactcgccttgttgctcccacttgagtcagtactcacctgctcctggatctcagtatccacatctgagaggcaactctggcagagttcacagaaggccaccattctgtccctcaaactcgacagctgcttctgtgggcacagtggcttgaaggggaagaatgaagacacagactcctctgttcccattatcccatctaagacccacactcacctgggaagcatctgatttagaaatgtgggttagtgtccagagaatggaaaaatagacaagagtcaaggctggcaggataacctgtaacaacaaagggtttgaaaaatgaggtttgggttaggagagggagagacagatagccagaaacacaccagtgaagaggagagaaaatgagtaaagggagagctaattccttttccagtggaaaatgagtgatattctggacattcttcagaggcatctacacgaagtagaaatgtcaccgctccctaatttactctacgtcttctagaatccctcaatattatccttggcttccaggaaatccaagaagaccctggaagtagagtccaccttctaagagaggaatgtaagaggtgacccccacccacctgatcttcctcgctttgtccactccacgcactgagacttgacacacctagtggccacctagaacgtaggtccttaaaatctagccccccagcccccaacccatctctagcctgtccactcacctggtgaggaacctctcctgtgtccacagccttctgcaggagttggcaacatggctcatagagctcccagcgagtcaggtcatgagtgctttgggggagaaaggggaatgttatactggaaaagaacagagggaaccaactccacagacaccagtaaaaacgggatggggaagaggaggaaagccactcacttgtagaaggcagagaggcgtttcagagtggctgccagattatatacctcatcctcatctaggaaggacgactgagaaggaaagaagatccacaatagcatttcccccagaactcatcagtccacatcccccgtcttgcagcccctcccacccttgtttggggtgtcccattgtccagccccagctcctacctgtaacagctcttcaagctcctgctggaagcggtcagtcagcaaatctactagctggctgcgggcaaagtccgcccggctgaagaaagtgaattcgggattacagagcaggtagagggcatgcgccccagcctcaagcaccgctggctctgcatgcttcaccaccacctcctggagttgctgcaggaacagctccaggtgctgagaagaaaaggcagaagatggtgtgctgtggggatgggaggaggacactcttctggcgggaagtggaacggggttaaaagcattaaacttcaaggataagatgcctaagaaaa

SEQ ID NO: 136703 - DNA, 1030 bp, Homo sapiens
  Payload ID: 6766
  Gene Symbol: GATS
  Gene Name: GATS, stromal antigen 3 opposite strand
  ENST ID: ENST00000454084
  CDS Start-End: 205-762
cacccgcgcgccgctgctccgccggcgctgcctccctcgacccgtggctccccctcgcaacttggcgggcctcctcccttttgtccggcccggtccggccgccgccgccccccgcgcctggcgccgagctcccgggtccccgggccggctgtcggtgccggcagggcgcggagggggcgggggccgcggctcgtcccccagcggatgagctgccgcggacggggcgcgggcggacgatggaactccacatcctggagcaccggctgcaagttgccagcgtcgccaaggagagtatcccgctgttcacctacgggcctgatcaaacttgccttcctgttctccaagaccaggtgcaagttcttcagtctgactgagacaccagaggattacactatcattgtcgatgaggaaggattcctagagctgccctcctcggagcacctgagtgtggcggatgccacctggctggccctgaacgtggtgtccggcggtggcagcttctccagctcccagcctattggcatgaccaagatcgccaagtcagtcatcgccccactggctgaccagaacatatccgtgttcatgctgtccacgtatcagacagacttcatcctgtccagatgccggtcatccacccactgtccagcccgagcaacaggttctgtgtcaccagcctggaccccgacacgctgcctgctgttgccacactcctcatggatgtcatgtcctacttcaatggggccttggtgtaccttgttgtagtgtttgaaaacatctgaggctgcatccatctccagcaccccataaagcaacagcttgcagaacccggctaggaggcggcgccgctggtgtagccgctctatctgtaaatgatcctcctgggaatcacctggctcacatggaaggcaaaagggaatcacagacttaagcttcctgccctatatttctgagctacacccaagccccagcccttactgagccccaggtatagagtcactgcaccactgcccaggtctcccggctggatgaa

SEQ ID NO: 136704 - DNA, 1306 bp, Homo sapiens
  Payload ID: 6766
  Gene Symbol: GATS
  Gene Name: GATS, stromal antigen 3 opposite strand
  Uniprot ID: Q8NAP1
  ENST ID: ENST00000435519
  CDS Start-End: 232-723
gcgaacaccagctgctccccgcgccggcacccgcgcgccgctgctccgccggcgctgcctccctcgacccgtggctccccctcgcaacttggcgggcctcctcccttttgtccggcccggtccggccgccgccgccccccgcgcctggcgccgagctcccgggtccccgggccggctgtcggtgccggcagggcgcggagggggcgggggccgcggctcgtcccccagcggatgagctgccgcggacggggcgcgggcggacgatggaactccacatcctggagcaccggctgcaagttgccagcgtcgccaaggagagtatcccgctgttcacctacgggcctgatcaaacttgccttcctgttctccaagaccaggtgcaagttcttcagtctgactgagacaccagaggattacactatcattgtcgatgaggaaggattcctagagctgccctcctcggagcacctgagtgtggcggatgccacctggctggccctgaacgtggtgtccggcggtggcagcttctccagctcccagcctattggcatgaccaagatcgccaagtcagtcatcgccccactggctgaccagaacatatccgtgttcatgctgtccacgtatcagacagacttcatcctggtgctcaagcgggacctgccctttgtcacccacacgttgtcatcagagttcaccatcctgtggtcagtggctagactgtagcagccgagaacctcggcatcaccagtggcttcgtgaagcccaagctggtccagatgccggtcatccacccactgtccagcccgagcaacaggttctgtgtcaccagcctggaccccgacacgctgcctgctgttgccacactcctcatggatgtcatgtcctacttcaatggattcattcagcttttccagaccaggcatcaccgagcggagagaggggaaacaccctggcttctctttggcacatcagcccctagttcttgagagagaagggcagggtggtctactcaccatgtctgtatcctgccgttcttcatttgactcatcctggatttctaactcttcttcctcgtcctcttccataaggctgagtctgatgtaggggcaaagagactggcttttcaaactgttctttgaggacccctgagagtttctcagacacccggggtgggggaagtggggagcagtaagtacagcatagtagtttcccgattgtgctgacaggaagtgctctgtggctaaaacaagtccaaaaagcacccacagagaggcaatgggtgagacaggaatcccctcacagtggg

SEQ ID NO: 136705 - DNA, 2007 bp, Homo sapiens
  Payload ID: 6766
  Gene Symbol: GATS
  Gene Name: GATS, stromal antigen 3 opposite strand
  Uniprot ID: Q8NAP1
  ENST ID: ENST00000414739
  CDS Start-End: 232-723
gcgaacaccagctgctccccgcgccggcacccgcgcgccgctgctccgccggcgctgcctccctcgacccgtggctccccctcgcaacttggcgggcctcctcccttttgtccggcccggtccggccgccgccgccccccgcgcctggcgccgagctcccgggtccccgggccggctgtcggtgccggcagggcgcggagggggcgggggccgcggctcgtcccccagcggatgagctgccgcggacggggcgcgggcggacgatggaactccacatcctggagcaccggctgcaagttgccagcgtcgccaaggagagtatcccgctgttcacctacgggcctgatcaaacttgccttcctgttctccaagaccaggtgcaagttcttcagtctgactgagacaccagaggattacactatcattgtcgatgaggaaggattcctagagctgccctcctcggagcacctgagtgtggcggatgccacctggctggccctgaacgtggtgtccggcggtggcagcttctccagctcccagcctattggcatgaccaagatcgccaagtcagtcatcgccccactggctgaccagaacatatccgtgttcatgctgtccacgtatcagacagacttcatcctggtgctcaagcgggacctgccctttgtcacccacacgttgtcatcagagttcaccatcctgtggtcagtggctagactgtagcagccgagaacctcggcatcaccagtggcttcgtgaagcccaagctggtccagatgccggtcatccacccactgtccagcccgagcaacaggttctgtgtcaccagcctggaccccgacacgctgcctgctgttgccacactcctcatggatgtcatgtcctacttcaatgggtgaggatacaactagaagccagcagtctacaggctggaagaaggccctcaccagaacccaacccttggacttcagcctccagaactgtgagaaatacatacctgctgtttgtaagacaccagtctatggaattctgttacagtagcctgaactcagacatagcccttttccatttataaggtggttttaccttatattttatgtaaaaggtccattttatttatttttgaattgttgatttttttttaagagacacgtgtttactatgttacccaggctggactccaactcctggactattgatcctcctgtctccacctcccgagttgctggaactacaggctaacagctctgttttaaagatgagaaaatgggccccacgcagtggctcacacctgtaatcccagcacttagggaggctgagccaggtggagccacttgaggtcaggtgttcgagattagcctggccaacatggcaaaaccccgtctctactaaaaatacaaaaaaaattagccgggcatgatggcgcgtgcctgtaatcccagctacttgggagtctgaggcaggagaattgcttgagcccaggaggcagaggttgcagtgagccgagactatgccactgcactccagcctaggtgacaaagagagactctacctcaaaaaataaaaataattaaaaaataaagatgagaaaatggaggctgaggaggggtaaaagcgctaacttgacatggagttgaggactagcactcatgtcacctcactccaaatgccaggcttttcccactacaccagcagcagttcctcctggggaaacaggctaggttagaaagggagtgagggaagggacagggaggggaagccctctagtagggagatggaggatagggggtcatgttttgtggggagagacactgaaggggctgccacttggactgaatgacctcccacctccagcattaggactccttccaattcctagggggttcggaggcaacaatatttatttagggattgggagcgagagtgctattccaaccttctttggtatttgtaatttcttttccttattctttaataaaagtagagtccaagcaaagtccaaaccaa

SEQ ID NO: 136706 - DNA, 2840 bp, Homo sapiens
  Payload ID: 6766
  Gene Symbol: GATS
  Gene Name: GATS, stromal antigen 3 opposite strand
  Uniprot ID: Q8NAP1
  ENST ID: ENST00000543273
  CDS Start-End: 226-717
accagctgctccccgcgccggcacccgcgcgccgctgctccgccggcgctgcctccctcgacccgtggctccccctcgcaacttggcgggcctcctcccttttgtccggcccggtccggccgccgccgccccccgcgcctggcgccgagctcccgggtccccgggccggctgtcggtgccggcagggcgcggagggggcgggggccgcggctcgtcccccagcggatgagctgccgcggacggggcgcgggcggacgatggaactccacatcctggagcaccggctgcaagttgccagcgtcgccaaggagagtatcccgctgttcacctacgggcctgatcaaacttgccttcctgttctccaagaccaggtgcaagttcttcagtctgactgagacaccagaggattacactatcattgtcgatgaggaaggattcctagagctgccctcctcggagcacctgagtgtggcggatgccacctggctggccctgaacgtggtgtccggcggtggcagcttctccagctcccagcctattggcatgaccaagatcgccaagtcagtcatcgccccactggctgaccagaacatatccgtgttcatgctgtccacgtatcagacagacttcatcctggtgctcaagcgggacctgccctttgtcacccacacgttgtcatcagagttcaccatcctgtggtcagtggctagactgtagcagccgagaacctcggcatcaccagtggcttcgtgaagcccaagctggtccagatgccggtcatccacccactgtccagcccgagcaacaggttctgtgtcaccagcctggaccccgacacgctgcctgctgttgccacactcctcatggatgtcatgtcctacttcaatggggccttggtgtaccttgttgtagtgtttgaaaacatctgaggctgcatccatctccagcaccccataaagcaacagcttgcagaacccggctaggaggcggcgccgctggtgtagccgctctatctgtaaatgatcctcctgggaatcacctggctcacatggaaggcaaaagggaatcacagacttaagcttcctgccctatatttctgagctacacccaagccccagcccttactgagccccaggtatagagtcactgcaccactgcccaggtctcccggctggatgaagacgtggtccatgaggaagctggctagctcagactggagagtagcttcaggaaaaaagacaagtggcctaaggaaatcacggcccccaacaatcatctgagggctaaagatgagaagtagatcacttaataagacaaaagcctgtagggggaaaagaaaggatgtttaaaaggacagaatgtttcccaaggtagaaatgacactgtcaatttctccttggaatgggggcagggatactcgccttgttgctcccacttgagtcagtactcacctgctcctggatctcagtatccacatctgagaggcaactctggcagagttcacagaaggccaccattctgtccctcaaactcgacagctgcttctgtgggcacagtggcttgaaggggaagaatgaagacacagactcctctgttcccattatcccatctaagacccacactcacctgggaagcatctgatttagaaatgtgggttagtgtccagagaatggaaaaatagacaagagtcaaggctggcaggataacctgtaacaacaaagggtttgaaaaatgaggtttgggttaggagagggagagacagatagccagaaacacaccagtgaagaggagagaaaatgagtaaagggagagctaattccttttccagtggaaaatgagtgatattctggacattcttcagaggcatctacacgaagtagaaatgtcaccgctccctaatttactctacgtcttctagaatccctcaatattatccttggcttccaggaaatccaagaagaccctggaagtagagtccaccttctaagagaggaatgtaagaggtgacccccacccacctgatcttcctcgctttgtccactccacgcactgagacttgacacacctagtggccacctagaacgtaggtccttaaaatctagccccccagcccccaacccatctctagcctgtccactcacctggtgaggaacctctcctgtgtccacagccttctgcaggagttggcaacatggctcatagagctcccagcgagtcaggtcatgagtgctttgggggagaaaggggaatgttatactggaaaagaacagagggaaccaactccacagacaccagtaaaaacgggatggggaagaggaggaaagccactcacttgtagaaggcagagaggcgtttcagagtggctgccagattatatacctcatcctcatctaggaaggacgactgagaaggaaagaagatccacaatagcatttcccccagaactcatcagtccacatcccccgtcttgcagcccctcccacccttgtttggggtgtcccattgtccagccccagctcctacctgtaacagctcttcaagctcctgctggaagcggtcagtcagcaaatctactagctggctgcgggcaaagtccgcccggctgaagaaagtgaattcgggattacagagcaggtagagggcatgcgccccagcctcaagcaccgctggctctgcatgcttcaccaccacctcctggagttgctgcaggaacagctccaggtgctgagaagaaaaggcagaagatggtgtgctgtggggatgggaggaggacactcttctggcgggaagtggaacggggttaaaagcattaaacttcaaggataagatgcctaagaaaa

SEQ ID NO: 136707 - DNA, 3526 bp, Homo sapiens
  Payload ID: 6766
  Gene Symbol: GATS
  Gene Name: GATS, stromal antigen 3 opposite strand
  Uniprot ID: Q8NAP1
  ENST ID: ENST00000328453
  CDS Start-End: 224-715
cagctgctccccgcgccggcacccgcgcgccgctgctccgccggcgctgcctccctcgacccgtggctccccctcgcaacttggcgggcctcctcccttttgtccggcccggtccggccgccgccgccccccgcgcctggcgccgagctcccgggtccccgggccggctgtcggtgccggcagggcgcggagggggcgggggccgcggctcgtcccccagcggatgagctgccgcggacggggcgcgggcggacgatggaactccacatcctggagcaccggctgcaagttgccagcgtcgccaaggagagtatcccgctgttcacctacgggcctgatcaaacttgccttcctgttctccaagaccaggtgcaagttcttcagtctgactgagacaccagaggattacactatcattgtcgatgaggaaggattcctagagctgccctcctcggagcacctgagtgtggcggatgccacctggctggccctgaacgtggtgtccggcggtggcagcttctccagctcccagcctattggcatgaccaagatcgccaagtcagtcatcgccccactggctgaccagaacatatccgtgttcatgctgtccacgtatcagacagacttcatcctggtgctcaagcgggacctgccctttgtcacccacacgttgtcatcagagttcaccatcctgtggtcagtggctagactgtagcagccgagaacctcggcatcaccagtggcttcgtgaagcccaagctggtccagatgccggtcatccacccactgtccagcccgagcaacaggttctgtgtcaccagcctggaccccgacacgctgcctgctgttgccacactcctcatggatgtcatgtcctacttcaatgggtgaggatacaactagaagccagcagtctacaggctggaagaaggccctcaccagaacccaacccttggacttcagcctccagaactattcattcagcttttccagaccaggcatcaccgagcggagagaggggaaacaccctggcttctctttggcacatcagcccctagttcttgagagagaagggcagggtggtctactcaccatgtctgtatcctgccgttcttcatttgactcatcctggatttctaactcttcttcctcgtcctcttccataaggctgagtctgatgtaggggcaaagagactggcttttcaaactgttctttgaggacccctgagagtttctcagacacccggggtgggggaagtggggagcagtaagtacagcatagtagtttcccgattgtgctgacaggaagtgctctgtggctaaaacaagtccaaaaagcacccacagagaggcaatgggtgagacaggaatcccctcacagtgggcgacagatctgaagtgaagacaggagatgatgagaaaagctcaccgcatcagctggttgcccaggccaggacctgaagggttgtgtggagtctggaaatattgtggacccaagaaccttgacctctcggtgcctgcgacgggctgactgctgggaatgaagcaggatcaatgatgggataaaaatcaaggggccttggtgtaccttgttgtagtgtttgaaaacatctgaggctgcatccatctccagcaccccataaagcaacagcttgcagaacccggctaggaggcggcgccgctggtgtagccgctctatctgtaaatgatcctcctgggaatcacctggctcacatggaaggcaaaagggaatcacagacttaagcttcctgccctatatttctgagctacacccaagccccagcccttactgagccccaggtatagagtcactgcaccactgcccaggtctcccggctggatgaagacgtggtccatgaggaagctggctagctcagactggagagtagcttcaggaaaaaagacaagtggcctaaggaaatcacggcccccaacaatcatctgagggctaaagatgagaagtagatcacttaataagacaaaagcctgtagggggaaaagaaaggatgtttaaaaggacagaatgtttcccaaggtagaaatgacactgtcaatttctccttggaatgggggcagggatactcgccttgttgctcccacttgagtcagtactcacctgctcctggatctcagtatccacatctgagaggcaactctggcagagttcacagaaggccaccattctgtccctcaaactcgacagctgcttctgtgggcacagtggcttgaaggggaagaatgaagacacagactcctctgttcccattatcccatctaagacccacactcacctgggaagcatctgatttagaaatgtgggttagtgtccagagaatggaaaaatagacaagagtcaaggctggcaggataacctgtaacaacaaagggtttgaaaaatgaggtttgggttaggagagggagagacagatagccagaaacacaccagtgaagaggagagaaaatgagtaaagggagagctaattccttttccagtggaaaatgagtgatattctggacattcttcagaggcatctacacgaagtagaaatgtcaccgctccctaatttactctacgtcttctagaatccctcaatattatccttggcttccaggaaatccaagaagaccctggaagtagagtccaccttctaagagaggaatgtaagaggtgacccccacccacctgatcttcctcgctttgtccactccacgcactgagacttgacacacctagtggccacctagaacgtaggtccttaaaatctagccccccagcccccaacccatctctagcctgtccactcacctggtgaggaacctctcctgtgtccacagccttctgcaggagttggcaacatggctcatagagctcccagcgagtcaggtcatgagtgctttgggggagaaaggggaatgttatactggaaaagaacagagggaaccaactccacagacaccagtaaaaacgggatggggaagaggaggaaagccactcacttgtagaaggcagagaggcgtttcagagtggctgccagattatatacctcatcctcatctaggaaggacgactgagaaggaaagaagatccacaatagcatttcccccagaactcatcagtccacatcccccgtcttgcagcccctcccacccttgtttggggtgtcccattgtccagccccagctcctacctgtaacagctcttcaagctcctgctggaagcggtcagtcagcaaatctactagctggctgcgggcaaagtccgcccggctgaagaaagtgaattcgggattacagagcaggtagagggcatgcgccccagcctcaagcaccgctggctctgcatgcttcaccaccacctcctggagttgctgcaggaacagctccaggtgctgagaagaaaaggcagaagatggtgtgctgtggggatgggaggaggacactcttctggcgggaagtggaacggggttaaaagcattaaacttcaaggataagatgcctaagaaaa

SEQ ID NO: 136708 - DNA, 8675 bp, Homo sapiens
  Payload ID: 6767
  Gene Symbol: GCN1
  Gene Name: GCN1 eIF2 alpha kinase activator homolog
  Uniprot ID: Q92616
  ENST ID: ENST00000300648
  CDS Start-End: 14-8029
cagccccggcaggatggcggcggacacgcaggtttccgagacactaaagcgttttgcagggaaggtgacaacagccagtgtaaaggaacggagagaaatcctcagtgaacttgggaagtgtgttgctggaaaagatcttccagagggagcagtgaaggggctctgcaaattgttctgcttgactctgcatcgatatagagatgcagcctcccgcagggccttgcaggcagccatccagcagttggctgaggcccagccagaagccactgctaagaaccttctacactctctgcagtcttctggtataggctccaaagcaggtgttcccagtaagagcagtggctctgccgccttgctggccttgacctggacctgcctcctggtgcgcattgtctttccatcgagagccaagcgacaaggagacatctggaacaaactggtggaagtgcagtgcctgctcttgctggaggtgctgggtggctcccacaagcacgccgtggatggtgctgtgaagaaactcacgaagctgtggaaagagaaccccgggctggtggaacagtacttgtcagccattctcagcctagagcccaaccagaactatgctggcatgctggggctgctggtgcagttctgcacgagtcacaaggagatggacgtggtcagtcagcacaagagcgccctactggacttttacatgaagaacatcctgatgagcaaagtcaagcctccgaagtacctgttggatagctgtgcccctctgctccgatacctgtcccactcagaatttaaggatctgatactgcccaccatacagaagtccttactgaggagtccagagaatgttattgaaactatttctagtctgctggcatcagtgacgcttgacctcagccagtatgccatggacatcgtgaaaggactggctggtcacctgaaatccaacagtccccgcctgatggatgaagctgtgctggcactgcggaacctggcacgccagtgcagtgactcttcggccatggaatccctgaccaagcacctatttgctatcctcggaggctcggaaggaaaactaactgttgtagcccagaagatgagcgtcctctcagggattgggagcgtcagtcatcacgtggtgtctggaccttccagtcaggtcctgaatgggatcgtggctgagctgttcatcccgttccttcagcaggaagttcatgaagggaccttggtacacgctgtctcagtcctggctctctggtgtaaccgattcactatggaagtgcccaagaagctcactgaatggttcaaaaaagctttcagccttaaaacctccacatctgcggtgaggcatgcctacctgcagtgcatgttggcctcttaccggggtgacacgctgttgcaggccctggacttactgcccttgctcatccagacagtggagaaggcagcctcccaaagcactcaggttcccaccatcactgaaggggttgccgcagccttgttgctcttaaagttgtcagtggctgactcacaggctgaggccaaactgagcagtttctggcagttgattgtggatgagaaaaagcaggttttcacttctgagaaattcctggtcatggcttcagaggatgccctgtgtactgtgttgcatctgacagagagacttttccttgaccacccgcatagactcactggcaacaaagttcagcagtaccaccgggctctggtggcggtgctcctgagccgcacctggcacgtccgcaggcaggctcagcagacagttcggaagctgctgtcctctcttgggggctttaagctggcgcacggactcttggaggagctgaagactgtcctcagttctcacaaggtgctgcccttagaggctttggtgactgatgctggagaggtgactgaggcaggcaaggcctacgtgcctccacgggtcctgcaggaggctctgtgtgtcatctccggtgtgccagggctcaagggtgatgtcaccgacactgaacaactggcccaggaaatgctgatcatctcccaccacccatccttagttgccgtgcagtctggactttggccagcacttcttgccaggatgaagatcgatcctgaagcctttatcaccaggcacctggatcagatcattcccaggatgaccacacagagtcccctaaaccagtcctccatgaatgccatgggctccctttccgtcctgtcgccggaccgggtcctcccacagctcatcagcaccatcactgcctccgtgcagaaccctgcactgcgcctggtgacgcgggaggagtttgccattatgcagacccctgctggggagctgtatgacaaatccatcattcagagtgcccagcaggacagcataaaaaaggccaacatgaagcgagagaacaaagcttattccttcaaagagcagatcatcgagctggagctgaaggaggagataaagaagaagaaaggcatcaaagaggaggtgcagctgaccagcaagcagaaggagatgctgcaggcccagctagacagggaggcgcaggtccggaggcggctgcaggagctggatggggagctggaggcggcgcttggactgctggacatcatcctggccaagaacccgtccggcctgacccagtacatccctgttttggtcgactcttttctgcccttgctgaagtctcccctggctgctcccaggatcaagaaccccttcttgtccttggctgcctgtgtcatgccctctaggctcaaggctttgggcactttggtgagccacgtgaccctgcgcctgctgaagccagagtgtgtcctggataagtcctggtgccaggaagagctgtcggtggctgtgaagagggcggtgatgctgctgcacacccacaccatcaccagcagggtgggcaagggggagccaggtgctgcgcccttgtccgcgccagccttctccttagtcttcccgtttctgaagatggtgctgacggagatgccccaccacagtgaggaggaggaggagtggatggcccagattcttcagatcctcactgtccaagcccagctgagggcctcccccaacaccccacccgggcgggtggacgagaatggcccggagttgctgcctcgcgtggccatgctgcgtcttctgacttgggtgatcgggacgggctcgcctcgcttacaggttctggcttcagacaccctgaccaccctgtgtgccagcagcagtggtgatgatggctgtgcctttgcagagcaggaggaggtggacgtgctgctctgtgccttgcagtccccgtgtgccagcgtgcgggaaaccgtgctccgggggctgatggaactccacatggtattgccagcacctgatactgatgagaagaatggcctgaaccttctgcggagactctgggtggtcaagtttgacaaggaggaggagatccggaagctggctgagaggctctggtcaatgatgggcctagacctgcagccagacctctgctccttgctgattgacgacgtgatctatcatgaggcggctgtaaggcaggcaggggccgaagccctctcccaagcagtggcacgttaccagcggcaggcggcggaggttatgggcaggctcatggagatttaccaggaaaagctctaccggccgcccccagtgctggatgctttgggacgagttatttcagaatctcctccagatcagtgggaagccaggtgtggcttggcgttggccctcaacaagctctcccagtatttggacagctctcaggtgaagccactctttcagttttttgtccctgatgccctcaatgaccgacacccagatgtccggaagtgcatgttggatgcagccctcgcaacgctcaacactcatgggaaggagaacgtcaactcgctgttgccagtattcgaggagttcctgaagaacgcgcccaatgatgccagctatgatgctgtgcgacagagtgtggtggtcctgatgggctctctggccaagcacctggacaagagtgaccccaaagtgaagcccattgttgccaagctcatcgctgccctctccaccccctcccagcaggtccaggagtccgtagccagctgcttgccaccccttgtgccagccatcaaggaggatgctggagggatgatccagaggcttatgcagcagctgctggagtcagacaagtacgcagagcgcaaaggggccgcctatggcctggcgggcctggtgaagggcctgggcatcctctcgctgaagcaacaggagatgatggcggcactgactgatgccatccaagataagaagaacttccgccggcgagagggagccctctttgccttcgagatgctctgcaccatgctggggaaactttttgagccgtatgtggttcacgtgctgccccatctgctcctgtgctttggggatggaaaccagtatgtgcgtgaggctgcagatgactgtgccaaggctgtgatgagcaacttgagtgctcacggggtgaagctggtgctcccctccttactggctgccctggaggaggaatcgtggcggaccaaagctgggtcagtggagcttcttggggcaatggcgtactgtgctcctaagcagctgtcatcctgtctacccaacattgtgcccaagcttacggaggtgctgaccgactcccatgtcaaagtccagaaggctggacagcaggcgctcaggcagatcggctccgttatcaggaacccggagatcctggccattgctccagtcctcctggatgccctgacggatccctccaggaagacccagaagtgcttgcagaccctgctggacaccaagtttgtccacttcattgatgccccatccctggccctcatcatgcccattgtccagagagccttccaggaccgttccacggacacgcggaagatggcagcccagattattggcaacatgtactccctgacagaccagaaggacttggctccgtacctgcccagcgtgacgcctggcctgaaagcatcgcttttggaccctgtgcctgaggtgcggaccgtatctgcaaaggcccttggggccatggtgaagggcatgggggagtcgtgctttgaggacttgctgccgtggctgatggagacactgacctatgagcagagctctgtggatcgctcaggcgctgcacaggggttggctgaggtcatggccggtttgggggtggagaagttggagaagttgatgccagaaatcgtggctacagccagcaaagtggacattgcaccccatgtccgagatggctacattatgatgtttaactacctgcccatcacctttggagacaagtttactccttatgtggggcccatcatcccctgtatcctcaaagctcttgctgatgagaatgagtttgtgcgtgacaccgccctgcgcgcgggccagcgggttatctccatgtacgctgagacagccatcgccctgctgctgccccagctagagcaaggcctctttgatgacctttggagaatcaggttcagctctgttcagctccttggggatctcctgtttcacatctcaggagtcactgggaagatgaccacagaaactgcctctgaggatgataactttggaactgcccagtccaacaaggcgatcatcactgccctgggggtagagcggcggaaccgggtgttggcagggctgtacatgggccgctcagacacccagctggtggtgcggcaggcgtccctgcatgtctggaagattgttgtctccaataccccccgcaccttgcgtgagatcctacccactctctttgggctcctgctgggtttcctggccagcacgtgtgcagataagagaacgattgcagcgagaacattgggagatcttgtgcggaagttaggggagaaaatcctccccgagatcatccccatccttgaggaaggcctgaggtctcagaagagcgatgagaggcagggtgtgtgcattggcctaagtgagatcatgaagtccaccagccgggatgccgtgctgtatttctctgaatccctcgtgcccacggcaaggaaggctttgtgtgacccactggaggaggtcagagaggcggcagccaagactttcgagcagctgcattccaccatcggccaccaggctctggaggacattctcccatttttactaaagcagctggatgacgaggaggtgtcagagtttgccttggatggtctgaagcaagtcatggctattaagagtcgtgtggtgctgccctaccttgtgcccaagctgacaacgccacctgtcaacacccgggtgctggctttcctttcgtcagtggctggtgatgccctcacccgtcatcttggcgtgatcctcccagcggtcatgctggccctgaaggaaaagcttgggaccccagatgagcagctggagatggccaattgtcaggctgtgatcctctccgtagaggatgacacagggcaccggatcatcatcgaggatctgctggaggccacccgcagccctgaggtgggcatgaggcaagctgctgccatcatcctcaacatctactgttcccgctcaaaggctgactacaccagccacctgcggagcctggtctcgggcctgatccgcctcttcaatgactccagccctgtggttctggaggagagctgggatgccctaaatgccatcactaagaagctggatgctggcaaccagttggcactcattgaagagctgcacaaggaaatccggctcatagggaacgagagcaaaggcgagcatgtgccaggattctgcctcccgaagaagggagtgacctccatccttccagtgttgcgggaaggagtcctgactggcagccctgagcagaaggaggaggcagccaaagccttaggcttggtaatccgcctgacctcggctgacgccctgaggccctccgtggtcagcatcactggccctctgatccgcatcctgggggacaggttcagctggaatgtgaaggcggctctgctcgagacactcagcctcttgttggctaaggttgggattgccctgaagcccttcctgccccagctgcagaccactttcaccaaagccctgcaggactccaaccggggggtgcgcctgaaggccgcagatgctctggggaagctcatttccatccacattaaggtggaccccctcttcacagagctgctcaatggcatccgcgccatggaggacccaggtgtcagggacaccatgctgcaggccctgaggtttgtgattcagggagcaggggccaaagtggatgccgtcatccggaaaaacatcgtctcactcctgctgagcatgctgggacacgatgaggacaacactcgcatctcctcagccgggtgcctaggggaactgtgtgcctttttgactgaagaggagcttagtgccgttctacagcagtgcttgctggcggacgtgtccggcattgactggatggttcggcacgggcggagcctggcactttccgtggctgtgaatgtggctcctggcagactttgtgccggcagatatagcagtgatgttcaggaaatgatcctgagcagtgccacggcggacaggatccccattgcggtgagcggggtccggggcatgggctttctcatgagacaccacatcgagacaggcggagggcagttgccggccaaactttccagcctgttcgttaagtgtctgcagaacccatccagcgacatcaggctggtggctgagaagatgatctggtgggcaaataaggacccactgcctcccctggacccccaggccatcaagcccatcctgaaggctcttcttgacaacaccaaggataagaacaccgtggtcagggcctacagcgaccaggcaattgtcaacctcctcaagatgcggcagggtgaagaggtgtttcagtccctctccaagatcctggatgtggccagtttggaggtgctgaacgaggttaaccgaaggtccctgaagaagctggccagccaggccgactccacggagcaggtggacgacaccatcctgacatgagaggcctgggccagcagcagcattgccgctccacatctttgctcaatgttttcatttttgaaaatacatttgttccaatggggagcttggaagatggcgttcccagaaagtattttaatatcaatagaccacagccaaagccttaaatcaaacccacacacaactgaaaattgcctcctccatctctcaccttttcctgtggagaagagaaggaaaagcacacgcatgcgcctcagcaaatggcagcccaggagctgtttgtccagtttagcatggctaggtctggaactataatagcagggtcagactgtgggttcctcttctcctgtgcttgagctctggtttgagagctggcgctaccaacctttttcctatatcccgagtggggcacagacggtggatctctgcccagtgtggtgtgtctggcttggcttttcaatattgtgaggtctgaatggatctgacccctgtcagatgaaaatgattcacagctctggcagttcccaagtctggggaggggtataggtttgaaaggctgtttgaaagaggaatgtttaataaaggctttgatttaatcttgatataaacagatttttaaaaatctccacccattaaacatgaagcttcctgcatcaggaataaggaa

SEQ ID NO: 136709 - DNA, 1786 bp, Homo sapiens
  Payload ID: 6768
  Gene Symbol: GPBP1
  Gene Name: GC-rich promoter binding protein 1
  Uniprot ID: Q86WP2
  ENST ID: ENST00000264779
  CDS Start-End: 11-1453
ctggacctaaatggcgcagcatgactttgctccagcctggcttaatttccctactccaccatcatcaacaaaggtcctgaccagcagtttgaaatcgtcattgaattttgagaagcattctgaaaactttgcatggacagagaatcgttatgatgtgaaccgtcgacgacacaactcttcagatggctttgattctgctattgggcgtcctaatggaggtaactttggaaggaaagaaaaaaatggatggcgtacacatggaagaaatggtacagaaaacataaatcatcgaggtggataccatggtggaagttcccgttctcgtagcagtattttccatgcaggaaaaagccaaggactacatgaaaacaacatacctgacaatgaaaccgggaggaaagaagacaagagagaacgcaaacagtttgaagctgaggattttccgtctttaaatcctgagtatgagagagaaccaaatcacaataagtctttagctgcaggtgtgtgggaatatcctccgaatcctaaatctagagctccaaggatgctggtcattaagaaaggtaatacaaaagacttacagctatctggattcccagtagtaggaaatcttccgtcacagccagttaagaatggaactggtccaagtgtttataaaggtttagtccctaaacctgctgctccacctacaaaacctacacaatggaaaagccaaacaaaagaaaataaagttggaacttctttccctcatgagtccacatttggcgttggcaactttaatgcttttaaatcaactgccaagaactttagtccatctacaaattcagtgaaagagtgtaatcgctcaaattcctcttctcctgttgacaaacttaatcagcagcctcgtctaaccaaactgacacgaatgcgcactgataagaagagtgaatttttgaaagcattgaaaagagacagagtagaagaggaacatgaagatgaaagccgtgctggctcagagaaggatgacgactcatttaatttacataacagcaatagtactcaccaagaaagggatataaaccgaaacttcgatgaaaatgaaattcctcaagagaatggcaatgcctcagtgatttcccagcagatcattcggtcttcaaccttcccacaaactgatgttctttcaagttcacttgaggcagaacacagattgttaaaggaaatgggctggcaggaagacagtgaaaatgatgaaacatgtgctcccttaactgaggatgaaatgagagaattccaagttattagtgaacagttacagaagaatggtctgagaaaaaatggtattttgaaaaatggcttgatctgtgacttcaagtttggaccgtggaagaacagcactttcaaacccacaactgagaatgatgacacagagacaagtagcagtgatacatcagatgacgacgatgtgtgaaggatttcctaacagctttagaaatcttagtgtgatacatctctcatacagtttggggtgaattgtaaaaatgaagaactataatttatgtagtgaaataccccattagaagaggattttttgggggacttcaatatgaagaaaaccaagaatgttttgttgggctgtgttgaacattatttctttgtaaatgaatgttgtaggaatgaggacttgggttggtccaacattgactttcttcatcactgcaacatttctctgactagcaatgtgacgatgtaacaaatgagattttctcatttaataataaaaaattgtgtaatgttttgcaaa

SEQ ID NO: 136710 - DNA, 4683 bp, Homo sapiens
  Payload ID: 6768
  Gene Symbol: GPBP1
  Gene Name: GC-rich promoter binding protein 1
  ENST ID: ENST00000424459
  CDS Start-End: 1275-2756
cacactctttctccctccttctcctcgccccgccttccctccctcctcaatccctctagttccttccccgcctcgccactgtgcacgatctcgcgagacttggcccagaacattgcggatcgggtcggcgccattttgggactgagactggttgtgggggagggaaaagcggcaaaaggggattattcaaagtaccgaaaaccttctcccgggatcaggcgcggcggcacccccaggccaggggcacctctggtggggcagaaggtgattgaattactcagatatgaagatcatcatctaggttttgtgtaaaaggccctggatattttaagtggccattttggatttacagtgtttttggataattttgccccagaagtttattaaaattggcaagaatcgtctgtgaagtgaattgatagtagtgaacaattcagcaagctacttaaaaagagacccaggcagcatttcttcagtattttggttcaaacggattatataactggttacagtatttcagctggtggtaatttttgcctccccttcccccaccccgttgttggggttcttcagccgaaactgagagacgttgatttgtgtactgagtagtttcagcagtttcaaatgactgagtattgctgaagtttcatggcagtttatttttacctttattgaaagttttaggaatttttgacttcagctctttcatgtcacaatgggacactttttctgaatgaagagattgaaagaatacagagtttttttccttttatcttttatttacgtggaaatttaagatgttgcagttttccggcagcatggtagtattgagatagctatgtgtgtctctgtatatgctgatgtttaggaatgctcttcagatgtgaaattttctttttgtttttgctttttggctcgtaaattggatatttcatctggagtggacaagtacaacagtggcaagtacatggaataataaagaagactttgatcttaaatctaaagaacttggctaattcgggagatagccatatgaaaactttaaaacagaagtatgggtagctgacttgaagtaactctatgtcaaatagtcgtaggttaagtatcttcaaagaacttcgatattatttcagaggatacaaaataaaaatacaaactggaaaataaagattacagagaaaaaaccaacaccttcctgtgcagtcctgttggaatttggacttgccatgaggtgttgaagccttgtttcactgagttggagagactggacctaaatggcgcagcatgactttgctccagcctggcttaatttccctactccaccatcatcaacaaagtcgtcattgaattttgagaagcattctgaaaactttgcatggacagagaatcgttatgatgtgaaccgtcgacgacacaactcttcagatggctttgattctgctattgggcgtcctaatggaggtaactttggaaggaaagaaaaaaatggatggcgtacacatggaagaaatggtacagaaaacataaatcatcgaggtggataccatggtggaagttcccgttctcgtagcagtattttccatgcaggaaaaagccaaggactacatgaaaacaacatacctgacaatgaaaccgggaggaaagaagacaagagagaacgcaaacagtttgaagctgaggattttccgtctttaaatcctgagtatgagagagaaccaaatcacaataagtctttagctgcaggtgtgtggggcctacacgcccagacacacacatacccaaccaaaaaaatctcccaagctcctctcttagaatatcctccgaatcctaaatctagagctccaaggatgctggtcattaagaaaggtaatacaaaagacttacagctatctggattcccagtagtaggaaatcttccgtcacagccagttaagaatggaactggtccaagtgtttataaaggtttagtccctaaacctgctgctccacctacaaaacctacacaatggaaaagccaaacaaaagaaaataaagttggaacttctttccctcatgagtccacatttggcgttggcaactttaatgcttttaaatcaactgccaagaactttagtccatctacaaattcagtgaaagagtgtaatcgctcaaattcctcttctcctgttgacaaacttaatcagcagcctcgtctaaccaaactgacacgaatgcgcactgataagaagagtgaatttttgaaagcattgaaaagagacagagtagaagaggaacatgaagatgaaagccgtgctggctcagagaaggatgacgactcatttaatttacataacagcaatagtactcaccaagaaagggatataaaccgaaacttcgatgaaaatgaaattcctcaagagaatggcaatgcctcagtgatttcccagcagatcattcggtcttcaaccttcccacaaactgatgttctttcaagttcacttgaggcagaacacagattgttaaaggaaatgggctggcaggaagacagtgaaaatgatgaaacatgtgctcccttaactgaggatgaaatgagagaattccaagttattagtgaacagttacagaagaatggtctgagaaaaaatggtattttgaaaaatggcttgatctgtgacttcaagtttggaccgtggaagaacagcactttcaaacccacaactgagaatgatgacacagagacaagtagcagtgatacatcagatgacgacgatgtgtgaaggatttcctaacagctttagaaatcttagtgtgatacatctctcatacagtttggggtgaattgtaaaaatgaagaactataatttatgtagtgaaataccccattagaagaggattttttgggggacttcaatatgaagaaaaccaagaatgttttgttgggctgtgttgaacattatttctttgtaaatgaatgttgtaggaatgaggacttgggttggtccaacattgactttcttcatcactgcaacatttctctgactagcaatgtgacgatgtaacaaatgagattttctcatttaataataaaaaattgtgtaatgttttgcaaagcttctgtcttaaaatgtccaggtcttaagaaaaaaggcagcttacactgttttgcttgcagagtcatatctttttcgtacaatggaaatcctcaagtccactttgtgcggtctccctctccttcccccaaaaaacaacaacaacaaaacaaaaaccaaaaaggaaaatgtagcatgttggctaaaactggagcaaagtgcactaaaacaatttcctgaactcacctgttgtactattcaccttttaaaccataaattgctctttagccatttgtagtgcagtaaatgttacaggaaaagacttggcacattttcttccaaattttaagaggtgattttcaaaagctttattggggtatgttgtcagaccagggttttcagagttgatggaaaagagtcttgtgagaaaacttattttgataaattattacacacgcagaaaaactgatcacactgactggatctgtccacgacatggaaaataaactggattttcagaatattgttgttttctgtagtgttcaaggtattgtttctaaacataaacatactctaaacatgctttattcacttgttaaagtcatacttttaaaagtaataccttactaaagatggtgattacttttccgaggtcagaaaaggaaagctaagcgttttcattatcaaatacacaagcttattaaatgaatgactgttaactactttattttcatttgcacattaattttggaattgtttctgttttgctgctgacggaaatactattttggctctgtgtatatttgtattttgatttttctggtttgtttacccccatttgcttttagctcccccttatgtttaaatatattctaacttatgtaaagagcataatcttagagcaaaaatacttgaggttttatgtcagatctaatcttaagtgtttgttgttttttaaaaagtgttttctcagatggctgcagtgtttttgctatttctgcataaataccctacctggactccccagttttcaccagaaactgttatttttttttgttgttgttcccactgagactgatggtgatggggaaattaaaaacaacacactagcacactcccacaaaacttgaggaagagttagaatggtaataaaatattaaatagaccttatacttaaaataaggtttcactatataatttgtcacaattcaatctaatcagctaaagttaaatgtagttagaattagccacaggagaatgtaaagcatgctttgacgaagctatcggtaacacatattgaatgtctttgagactcttagattgtactatttgcttaatagattaatgaaatttatcagatacaacctgtatttccaaaaacaagctagaaggaacctgaggaatgtggtttacatttgagatccaccttactgtgttttctactttcagaaaagattctgtagttttggtttttggcatctttcttatactcagttttttctgccttaattcccatttaccagcagttaactcatgtttattgtgctttcatgcattgtgatatggaatgtgtttagtaatttactccttataaatatggtaaagtacagtggta

SEQ ID NO: 136711 - DNA, 2857 bp, Homo sapiens
  Payload ID: 6768
  Gene Symbol: GPBP1
  Gene Name:: GC-rich promoter binding protein 1
  Uniprot ID: Q86WP2
  ENST ID: ENST00000506184
  CDS Start-End: 1106-2527
cggcaaaaggggattattcaaagtaccgaaaaccttctcccgggatcaggcgcggcggcacccccaggccaggggcacctctggtggggcagaaggtgattgaattactcagatatgaagatcatcatctaggttttgtgtaaaaggccctggatattttaagtggccattttggatttacagtgtttttggataattttgccccagaagtttattaaaattggcaagaatcgtctgtgaagtgaattgatagtagtgaacaattcagcaagctacttaaaaagagacccaggcagcatttcttcagtattttggttcaaacggattatataactggttacagtatttcagctggtggtaatttttgcctccccttcccccaccccgttgttggggttcttcagccgaaactgagagacgttgatttgtgtactgagtagtttcagcagtttcaaatgactgagtattgctgaagtttcatggcagtttatttttacctttattgaaagttttaggaatttttgacttcagctctttcatgtcacaatgggacactttttctgaatgaagagattgaaagaatacagagtttttttccttttatcttttatttacgtggaaatttaagatgttgcagttttccggcagcatggtagtattgagatagctatgtgtgtctctgtatatgctgatgtttaggaatgctcttcagatgtgaaattttctttttgtttttgctttttggctcgtaaattggatatttcatctggagtggacaagtacaacagtggcaagtacatggaataataaagaagactttgatcttaaatctaaagaacttggctaattcgggagatagccatatgaaaactttaaaacagaagtatgggtagctgacttgaagtaactctatgtcaaatagtcgtaggttaagtatcttcaaagaacttcgatattatttcagaggatacaaaataaaaatacaaactggaaaataaagattacagagaaaaaaccaacaccttcctgtgcagtcctgttggaatttggacttgccatgaggtgttgaagccttgtttcactgagttggagagactggacctaaatggcgcagcatgactttgctccagcctggcttaatttccctactccaccatcatcaacaaagtcgtcattgaattttgagaagcattctgaaaactttgcatggacagagaatcgttatgatgtgaaccgtcgacgacacaactcttcagatggctttgattctgctattgggcgtcctaatggaggtaactttggaaggaaagaaaaaaatggatggcgtacacatggaagaaatggtacagaaaacataaatcatcgaggtggataccatggtggaagttcccgttctcgtagcagtattttccatgcaggaaaaagccaaggactacatgaaaacaacatacctgacaatgaaaccgggaggaaagaagacaagagagaacgcaaacagtttgaagctgaggattttccgtctttaaatcctgagtatgagagagaaccaaatcacaataagtctttagctgcaggtgtgtgggaatatcctccgaatcctaaatctagagctccaaggatgctggtcattaagaaaggtaatacaaaagacttacagctatctggattcccagtagtaggaaatcttccgtcacagccagttaagaatggaactggtccaagtgtttataaaggtttagtccctaaacctgctgctccacctacaaaacctacacaatggaaaagccaaacaaaagaaaataaagttggaacttctttccctcatgagtccacatttggcgttggcaactttaatgcttttaaatcaactgccaagaactttagtccatctacaaattcagtgaaagagtgtaatcgctcaaattcctcttctcctgttgacaaacttaatcagcagcctcgtctaaccaaactgacacgaatgcgcactgataagaagagtgaatttttgaaagcattgaaaagagacagagtagaagaggaacatgaagatgaaagccgtgctggctcagagaaggatgacgactcatttaatttacataacagcaatagtactcaccaagaaagggatataaaccgaaacttcgatgaaaatgaaattcctcaagagaatggcaatgcctcagtgatttcccagcagatcattcggtcttcaaccttcccacaaactgatgttctttcaagttcacttgaggcagaacacagattgttaaaggaaatgggctggcaggaagacagtgaaaatgatgaaacatgtgctcccttaactgaggatgaaatgagagaattccaagttattagtgaacagttacagaagaatggtctgagaaaaaatggtattttgaaaaatggcttgatctgtgacttcaagtttggaccgtggaagaacagcactttcaaacccacaactgagaatgatgacacagagacaagtagcagtgatacatcagatgacgacgatgtgtgaaggatttcctaacagctttagaaatcttagtgtgatacatctctcatacagtttggggtgaattgtaaaaatgaagaactataatttatgtagtgaaataccccattagaagaggattttttgggggacttcaatatgaagaaaaccaagaatgttttgttgggctgtgttgaacattatttctttgtaaatgaatgttgtaggaatgaggacttgggttggtccaacattgactttcttcatcactgcaacatttctctgactagcaatgtgacgatgtaacaaatgagattttctcatttaataataaaaaattgtgtaatgttttgc

SEQ ID NO: 136712 - DNA, 3310 bp, Homo sapiens
  Payload ID: 6768
  Gene Symbol: GPBP1
  Gene Name: GC-rich promoter binding protein 1
  Uniprot ID: Q86WP2
  ENST ID: ENST00000514387
  CDS Start-End: 1567-2475
ggcccagaacattgcggatcgggtcggcgccattttgggactgagactggttgtgggggagggaaaagcggcaaaaggggattattcaaagtaccgaaaaccttctcccgggatcaggcgcggcggcacccccaggccaggggcacctctggtggggcagaaggtgattgaattactcagatatgaagatcatcatctaggttttgtgtaaaaggccctggatattttaagtggccattttggatttacagtgtttttggataattttgccccagaagtttattaaaattggcaagaatcgtctgtgaagtgaattgatagtagtgaacaattcagcaagctacttaaaaagagacccaggcagcatttcttcagtattttggttcaaacggattatataactggttacagtatttcagctggtggtaatttttgcctccccttcccccaccccgttgttggggttcttcagccgaaactgagagacgttgatttgtgtactgagtagtttcagcagtttcaaatgactgagtattgctgaagtttcatggcagtttatttttacctttattgaaagttttaggaatttttgacttcagctctttcatgtcacaatgggacactttttctgaatgaagagattgaaagaatacagagtttttttccttttatcttttatttacgtggaaatttaagatgttgcagttttccggcagcatggtagtattgagatagctatgtgtgtctctgtatatgctgatgtttaggaatgctcttcagatgtgaaattttctttttgtttttgctttttggctcgtaaattggatatttcatctggagtggacaagtacaacagtggcaagtacatggaataataaagaagactttgatcttaaatctaaagaacttggctaattcgggagatagccatatgaaaactttaaaacagaagtatgggtagctgacttgaagtaactctatgtcaaatagtcgtaggttaagtatcttcaaagaacttcgatattatttcagaggatacaaaataaaaatacaaactggaaaataaagattacagagaaaaaaccaacaccttcctgtgcagtcctgttggaattttcgtcattgaattttgagaagcattctgaaaactttgcatggacagagaatcgttatgatgtgaaccgtcgacgacacaactcttcagatggctttgattctgctattgggcgtcctaatggaggtaactttggaaggaaagaaaaaaatggatggcgtacacatggaagaaatggtacagaaaacataaatcatcgaggtggataccatggtggaagttcccgttctcgtagcagtattttccatgcaggaaaaagccaaggactacatgaaaacaacatacctgacaatgaaaccgggaggaaagaagacaagagagaacgcaaacagtttgaagctgaggattttccgtctttaaatcctgagtatgagagagaaccaaatcacaataagtctttagctgcaggtgtgtgggaatatcctccgaatcctaaatctagagctccaaggatgctggtcattaagaaaggtaatacaaaagacttacagctatctggattcccagtagtaggaaatcttccgtcacagccagttaagaatggaactggtccaagtgtttataaaggtttagtccctaaacctgctgctccacctacaaaacctacacaatggaaaagccaaacaaaagaaaataaagttggaacttctttccctcatgagtccacatttggcgttggcaactttaatgcttttaaatcaactgccaagaactttagtccatctacaaattcagtgaaagagtgtaatcgctcaaattcctcttctcctgttgacaaacttaatcagcagcctcgtctaaccaaactgacacgaatgcgcactgataagaagagtgaatttttgaaagcattgaaaagagacagagtagaagaggaacatgaagatgaaagccgtgctggctcagagaaggatgacgactcatttaatttacataacagcaatagtactcaccaagaaagggatataaaccgaaacttcgatgaaaatgaaattcctcaagagaatggcaatgcctcagtgatttcccagcagatcattcggtcttcaaccttcccacaaactgatgttctttcaagttcacttgaggcagaacacagattgttaaaggaaatgggctggcaggaagacagtgaaaatgatgaaacatgtgctcccttaactgaggatgaaatgagagaattccaagttattagtgaacagttacagaagaatggtctgagaaaaaatggtattttgaaaaatggcttgatctgtgacttcaagtttggaccgtggaagaacagcactttcaaacccacaactgagaatgatgacacagagacaagtagcagtgatacatcagatgacgacgatgtgtgaaggatttcctaacagctttagaaatcttagtgtgatacatctctcatacagtttggggtgaattgtaaaaatgaagaactataatttatgtagtgaaataccccattagaagaggattttttgggggacttcaatatgaagaaaaccaagaatgttttgttgggctgtgttgaacattatttctttgtaaatgaatgttgtaggaatgaggacttgggttggtccaacattgactttcttcatcactgcaacatttctctgactagcaatgtgacgatgtaacaaatgagattttctcatttaataataaaaaattgtgtaatgttttgcaaagcttctgtcttaaaatgtccaggtcttaagaaaaaaggcagcttacactgttttgcttgcagagtcatatctttttcgtacaatggaaatcctcaagtccactttgtgcggtctccctctccttcccccaaaaaacaacaacaacaaaacaaaaaccaaaaaggaaaatgtagcatgttggctaaaactggagcaaagtgcactaaaacaatttcctgaactcacctgttgtactattcaccttttaaaccataaattgctctttagccatttgtagtgcagtaaatgttacaggaaaagacttggcacattttcttccaaattttaagaggtgattttcaaaagctttattggggtatgttgtcagaccagggttttcagagttgatggaaaagagtcttgtgagaaaacttattttgataaattattacacacgcagaaaaactgatcacactgactggatctgtccacgacatggaaaataaactggattttcagaata

SEQ ID NO: 136713 - DNA, 2243 bp, Homo sapiens
  Payload ID: 6768
  Gene Symbol: GPBP1
  Gene Name: GC-rich promoter binding protein 1
  Uniprot ID: Q86WP2
  ENST ID: ENST00000511209
  CDS Start-End: 513-1910
tttccttttatcttttatttacgtggaaatttaagatgttgcagttttccggcagcatggtagtattgagatagctatgtgtgtctctgtatatgctgatgtttaggaatgctcttcagatgtgaaattttctttttgtttttgctttttggctcgtaaattggatatttcatctggagtggacaagtacaacagtggcaagtacatggaataataaagaagactttgatcttaaatctaaagaacttggctaattcgggagatagccatatgaaaactttaaaacagaagtatgggtagctgacttgaagtaactctatgtcaaatagtcgtaggttaagtatcttcaaagaacttcgatattatttcagaggatacaaaataaaaatacaaactggaaaataaagattacagagaaaaaaccaacaccttcctgtgcagtcctgttggaatttggacttgccatgaggtgttgaagccttgtttcactgagttggagagactggacctaaatggcgcagcatgactttgctccagcctggcttaatttccctactccaccatcatcaacaaaggtcctgaccagcagtttgaaatcgtcattgaattttgagaagcattctgaaaactttgcatggacagagaatcgttatgatgtgaaccgtcgacgacacaactcttcagatggctttgattctgctattgggcgtcctaatggaggtaactttggaaggaaagaaaaaaatggatggcgtacacatggaagaaatggtacagaaaacataaatcatcgaggtggataccatggtggaagttcccgttctcgtagcagtattttccatgcaggaaaaagccaaggactacatgaaaacaacatacctgacaatgaaaccgggaggaaagaagacaagagagaacgcaaacagtttgaagctgaggattttccgtctttaaatcctgagtatgagagagaaccaaatcacaataagtctttagctgcaggtgtgtgggaatatcctccgaatcctaaatctagagctccaaggatgctggtcattaagaaaggtaatacaaaagacttacagctatctggattcccagtagtaggaaatcttccgtcacagccagttaagaatggaactggtccaagtgtttataaaggtttagtccctaaacctgctgctccacctacaaaacctacacaatggaaaagccaaacaaaagaaaataaagttggaacttctttccctcatgagtccacatttggcgttggcaactttaatgcttttaaatcaactgccaagaactttagtccatctacaaattcagtgaaagagcagcctcgtctaaccaaactgacacgaatgcgcactgataagaagagtgaatttttgaaagcattgaaaagagacagagtagaagaggaacatgaagatgaaagccgtgctggctcagagaaggatgacgactcatttaatttacataacagcaatagtactcaccaagaaagggatataaaccgaaacttcgatgaaaatgaaattcctcaagagaatggcaatgcctcagtgatttcccagcagatcattcggtcttcaaccttcccacaaactgatgttctttcaagttcacttgaggcagaacacagattgttaaaggaaatgggctggcaggaagacagtgaaaatgatgaaacatgtgctcccttaactgaggatgaaatgagagaattccaagttattagtgaacagttacagaagaatggtctgagaaaaaatggtattttgaaaaatggcttgatctgtgacttcaagtttggaccgtggaagaacagcactttcaaacccacaactgagaatgatgacacagagacaagtagcagtgatacatcagatgacgacgatgtgtgaaggatttcctaacagctttagaaatcttagtgtgatacatctctcatacagtttggggtgaattgtaaaaatgaagaactataatttatgtagtgaaataccccattagaagaggattttttgggggacttcaatatgaagaaaaccaagaatgttttgttgggctgtgttgaacattatttctttgtaaatgaatgttgtaggaatgaggacttgggttggtccaacattgactttcttcatcactgcaacatttctctgactagcaatgtgacgatgtaacaaatgagattttctcatttaataataaaaaattgtgtaatgttttgcaaa

SEQ ID NO: 136714 - DNA, 3599 bp, Homo sapiens
  Payload ID: 6769
  Gene Symbol: GPBP1L1
  Gene Name: GC-rich promoter binding protein 1-like 1
  Uniprot ID: Q9HC44
  ENST ID: ENST00000290795
  CDS Start-End: 1223-2647
cgggcagccattttgggaagagctttgttatggttgtggactagccgcctctgccgggtcgacaagctggggacgcgtcctcagacgcagcgtctagtccctggccatagctccgccgctgcccgagtgatagattcgtgtggcctttcaaatgattgtgaagtggtggaaatggatccaaaataataagtgacttctctaccaaagcatagaagattcttcatatctccttccagtggctcaatttagattttgggaaggagcagaacaagtgaaacacagaaaactgaagagaagaaatcctcattttggacctatatttctccttgactatttcttaatatccatcctacccatcgttctaatgttttaactttgctctgaatttataaatagtaaaggccaaagacatagaatatacatttagtagctttataccaagaaatttgccttgaaagctgctgttcgtggagggaaaagtgtagcaaattcctgtctatttttattttttatttttttttaacaaagacaagatttatgtccctagattttgaaggttaaggcaaatataaatacatatctgcacactattttttagcagttgcatgagtaagagtaatgagatttgtattttaaggactttgtcatgtggatgttttggagttgactgctcagatcttttatagggctttaatatttttgatctattaccttgatgacattatttgtccacacttgagcccatctgtctttctagctatgaccttgttatgaacagtatttgcactcggtgcaaatatccatgtcttacctaattaagcaacatcatagtgccataactcaaggaagttgaatgaggtgaacatagatacagctctttccccttccccccctttttaaatgtaacaaatactttttatgttccccttccccccttccccttttcccctttccccttttggaaacgtgtcaggaaccaaatagtttaagatgagcagttgaggggactgagagagtgatcgacacagaacctggcttcttcgtgcttcatcataagtcgtgctgccggccaggttacttaagcacccttttaacaaggaaaccttgtgggagatccagctggccgactcgagttcagaaacaggaccacagaggttacactctgggatcctggccatgaggttggatgcctcaccttactgaaaggagacactggacctaaatggcgcagcatgattttgttcctgcttggctaaatttctcaacaccacagtcagctaagtcacctactgccaccttcgaaaaacacggagagcacctacccagaggagaaggtagatttggagtaagccgccgtcgacataattcctctgatggtttttttaacaatggtcccctacgaactgcaggagattcttggcaccagccctccctgttccgccatgattctgtggactctggtgtctctaagggagcatatgctggaatcacagggaacccatctggttggcatagctcttcccgaggtcatgatggcatgagccaacgtagtggaggtggcacagggaaccatcgccattggaatggcagcttccactcccggaaagggtgtgcttttcaggaaaagccacctatggagattagggaagaaaagaaagaagacaaggtggaaaagttgcagtttgaagaggaggactttccttccttgaatccagaagctggcaaacagcatcagccatgcagacctattgggacaccttctggagtatgggaaaacccgcctagtgccaagcaaccctccaagatgctagttatcaaaaaagtttccaaagaggatcctgctgctgccttctctgctgcattcacctcaccaggatctcaccatgcaaatgggaacaaattgtcatccgtggttccaagtgtctataagaacctggttcctaagcctgtaccacctccttccaagcctaatgcatggaaagctaacaggatggagcacaagtcaggatccctttcctctagccgggagtctgcttttaccagtccaatctctgttaccaaaccagtggtactggctagtggtgcagctctgagttctcccaaagagagtccctccagcaccacccctccaattgagatcagctcctctcgtctgaccaagttgacccgccgaaccaccgacaggaagagtgagttcctgaaaactctgaaggatgaccggaatggagacttctcagagaatagagactgtgacaagctggaagatttggaggacaacagcacacctgaaccaaaggaaaatggggaggaaggctgtcatcaaaatggtcttgccctccctgtagtggaagaaggggaggttctctcacactctctagaagcagagcacaggttattgaaagctatgggttggcaggaatatcctgaaaatgatgagaattgccttcccctcacagaggatgagctcaaagagttccacatgaagacagagcagctgagaagaaatggctttggaaagaatggcttcttgcagagccgcagttccagtctgttctccccttggagaagcacttgcaaagcagagtttgaggactcagacaccgaaaccagtagcagtgaaacatcagatgacgatgcctggaagtaggcatataaatgctcacagttaaatctgacccagtaaactctgtgtgtttagggagtatacaaaagaaatcgttcttttccttttcttatgttgttgaatacttcattcacaagggaaataatcatatcccaaagagagagcaattggcttgttttgcttttgttattgttcttccctgttatctgctttatagagagaagtttgtgtggtgggacagattttttaaacacactcacacacacacacacatacacacccagtatatatggggcgatgcacaggtaggagctggcagtgcagggaagaggagacactggtctgcagcaacagcttctactaccagcccttggggcactcacccctgtgatcaagcaatcattgtcaatgacaaagtgactattgaagttataattgtattaaattaatgctaataatttggatattttattttatttttggctgctcgggtaactttagcccttaaccaagcatatgtgggtttttttggttgtttttttttgttttttttttctttttcctttttgggtacagctgtaaaatatttggatataggaaatgttgtgttattcttgcagccttgatattcagggtggattgtaaaatataaatttttgtgagatttcaaagattaagattattttgataacattatttacagatttaaaagatgtggttatcacaagtctcgagggggaaactactgcataaaataactaacttggaataaatattttgcatcagtttggattgtcttgtgtaagaagtatattttctttaaaattagatgagtggattcttttttaggggaaatatttttagaagttggggggaaatgtgaattcagacacaactgtttctctattttagcagatacttttttgatgcagaaaaacctgtgcaataaattaccagtaataaagtcagaaaccaa

SEQ ID NO: 136715 - DNA, 3736 bp, Homo sapiens
  Payload ID: 6769
  Gene Symbol: GPBP1L1
  Gene Name: GC-rich promoter binding protein 1-like 1
  Uniprot ID: Q9HC44
  ENST ID: ENST00000355105
  CDS Start-End: 1362-2786
gtgtgtaaggcggggtcggacgggggatgggagggccgtgctgctggtcgctcctcctcctccacccgctctgcccctcctggaccttgtgggccgggcagccattttgggaagagctttgttatggttgtggactagccgcctctgccgggtcgacaagctggggacgcgtcctcagacgcagcgtctagtccctggccatagctccgccgctgcccgttggtgtctcacctttaactctccttatgctgggtgaaaacaaagagtgatagattcgtgtggcctttcaaatgattgtgaagtggtggaaatggatccaaaataataagtgacttctctaccaaagcatagaagattcttcatatctccttccagtggctcaatttagattttgggaaggagcagaacaagtgaaacacagaaaactgaagagaagaaatcctcattttggacctatatttctccttgactatttcttaatatccatcctacccatcgttctaatgttttaactttgctctgaatttataaatagtaaaggccaaagacatagaatatacatttagtagctttataccaagaaatttgccttgaaagctgctgttcgtggagggaaaagtgtagcaaattcctgtctatttttattttttatttttttttaacaaagacaagatttatgtccctagattttgaaggttaaggcaaatataaatacatatctgcacactattttttagcagttgcatgagtaagagtaatgagatttgtattttaaggactttgtcatgtggatgttttggagttgactgctcagatcttttatagggctttaatatttttgatctattaccttgatgacattatttgtccacacttgagcccatctgtctttctagctatgaccttgttatgaacagtatttgcactcggtgcaaatatccatgtcttacctaattaagcaacatcatagtgccataactcaaggaagttgaatgaggtgaacatagatacagctctttccccttccccccctttttaaatgtaacaaatactttttatgttccccttccccccttccccttttcccctttccccttttggaaacgtgtcaggaaccaaatagtttaagatgagcagttgaggggactgagagagtgatcgacacagaacctggcttcttcgtgcttcatcataagtcgtgctgccggccaggttacttaagcacccttttaacaaggaaaccttgtgggagatccagctggccgactcgagttcagaaacaggaccacagaggttacactctgggatcctggccatgaggttggatgcctcaccttactgaaaggagacactggacctaaatggcgcagcatgattttgttcctgcttggctaaatttctcaacaccacagtcagctaagtcacctactgccaccttcgaaaaacacggagagcacctacccagaggagaaggtagatttggagtaagccgccgtcgacataattcctctgatggtttttttaacaatggtcccctacgaactgcaggagattcttggcaccagccctccctgttccgccatgattctgtggactctggtgtctctaagggagcatatgctggaatcacagggaacccatctggttggcatagctcttcccgaggtcatgatggcatgagccaacgtagtggaggtggcacagggaaccatcgccattggaatggcagcttccactcccggaaagggtgtgcttttcaggaaaagccacctatggagattagggaagaaaagaaagaagacaaggtggaaaagttgcagtttgaagaggaggactttccttccttgaatccagaagctggcaaacagcatcagccatgcagacctattgggacaccttctggagtatgggaaaacccgcctagtgccaagcaaccctccaagatgctagttatcaaaaaagtttccaaagaggatcctgctgctgccttctctgctgcattcacctcaccaggatctcaccatgcaaatgggaacaaattgtcatccgtggttccaagtgtctataagaacctggttcctaagcctgtaccacctccttccaagcctaatgcatggaaagctaacaggatggagcacaagtcaggatccctttcctctagccgggagtctgcttttaccagtccaatctctgttaccaaaccagtggtactggctagtggtgcagctctgagttctcccaaagagagtccctccagcaccacccctccaattgagatcagctcctctcgtctgaccaagttgacccgccgaaccaccgacaggaagagtgagttcctgaaaactctgaaggatgaccggaatggagacttctcagagaatagagactgtgacaagctggaagatttggaggacaacagcacacctgaaccaaaggaaaatggggaggaaggctgtcatcaaaatggtcttgccctccctgtagtggaagaaggggaggttctctcacactctctagaagcagagcacaggttattgaaagctatgggttggcaggaatatcctgaaaatgatgagaattgccttcccctcacagaggatgagctcaaagagttccacatgaagacagagcagctgagaagaaatggctttggaaagaatggcttcttgcagagccgcagttccagtctgttctccccttggagaagcacttgcaaagcagagtttgaggactcagacaccgaaaccagtagcagtgaaacatcagatgacgatgcctggaagtaggcatataaatgctcacagttaaatctgacccagtaaactctgtgtgtttagggagtatacaaaagaaatcgttcttttccttttcttatgttgttgaatacttcattcacaagggaaataatcatatcccaaagagagagcaattggcttgttttgcttttgttattgttcttccctgttatctgctttatagagagaagtttgtgtggtgggacagattttttaaacacactcacacacacacacacatacacacccagtatatatggggcgatgcacaggtaggagctggcagtgcagggaagaggagacactggtctgcagcaacagcttctactaccagcccttggggcactcacccctgtgatcaagcaatcattgtcaatgacaaagtgactattgaagttataattgtattaaattaatgctaataatttggatattttattttatttttggctgctcgggtaactttagcccttaaccaagcatatgtgggtttttttggttgtttttttttgttttttttttctttttcctttttgggtacagctgtaaaatatttggatataggaaatgttgtgttattcttgcagccttgatattcagggtggattgtaaaatataaatttttgtgagatttcaaagattaagattattttgataacattatttacagatttaaaagatgtggttatcacaagtctcgagggggaaactactgcataaaataactaacttggaataaatattttgcatcagtttggattgtcttgtgtaagaagtatattttctttaaaattagatgagtggattcttttttaggggaaatatttttagaagttggggggaaatgtgaattcagacacaactgtttctctattttagcagatacttttttgatgcagaaaaacctgtgcaataaattaccagtaataaagtcagaaacc

SEQ ID NO: 136716 - DNA, 4440 bp, Homo sapiens
  Payload ID: 6770
  Gene Symbol: GCFC2
  Gene Name: GC-rich sequence DNA-binding factor 2
  Uniprot ID: P16383
  ENST ID: ENST00000321027
  CDS Start-End: 135-2480
gagcagaaggcaggcgggacgggcgcgcgcactcggcggccaggcgcggcgggagcgcgccctagggggcgggcactgaagctgcggcttgcggttcagcgggttctagggcgccgggcgctcgggcctcggccatggctcacaggccgaaaaggacttttcggcagcgcgcggctgattccagcgacagcgatggcgccgaggagtcgcctgctgagcctggggcgccgagggaacttccggtcccgggttctgcggaggaagagccgccctctggaggaggccgcgcgcaggtggcgggactgccccaccgggttcggggccctcgtggccggggccgggtctgggcgagctcccggcgtgccaccaaagcggctccccgcgcggacgaaggctcagaatccagaacccttgatgtgtccacagatgaagaggataaaatacatcactcctcagaaagtaaggatgatcagggtttgtcttctgacagttctagctctcttggagaaaaagaactttcatcaacagttaagatcccagatgcagcttttattcaggcagcccgcagaaaacgtgaattggccagggcccaagatgactatatttctttggatgtacaacatacctcctccatctctggtatgaagagagagagcgaagatgaccctgagagtgagcctgatgaccatgaaaagagaataccatttactctaagacctcaaacacttagacaaaggatggctgaggaatcaataagcagaaatgaagaaacaagtgaagaaagtcaggaagatgaaaagcaagatacttgggaacaacagcaaatgaggaaagcagttaaaatcatagaggaaagagacatagatctttcctgtggcaatggatcttcaaaagtgaagaaatttgatacttccatttcatttccgccagtaaatttagaaattataaagaagcaattaaatactagattaacattactacaggaaactcaccgctcacacctgagggagtatgaaaaatacgtacaagatgtcaaaagctcaaagagtaccatccagaacctagagagttcatcaaatcaagctctaaattgtaaattctataaaagcatgaaaatttatgtggaaaatttaattgactgccttaatgaaaagattatcaacatccaagaaatagaatcatccatgcatgcactccttttaaaacaagctatgacctttatgaaacgcaggcaagatgaattaaaacatgaatcaacgtatttacaacagttatcacgcaaagatgagacatccacaagtggaaacttctcagtagatgaaaaaactcagtggattttagaagagattgaatctcgaaggacaaaaagaagacaagcaagggtgctttctgggaattgtaaccatcaggaaggaacatctagtgatgatgaactgccttcagcagagatgattgacttccaaaaaagccaaggtgacattttacagaaacagaagaaagtttttgaagaagtgcaagatgatttttgtaacatccagaatattttgttgaaatttcagcaatggcgagaaaagtttcctgactcctattatgaagctttcattagtttatgcataccaaagcttttaaatcccctaatacgagttcagttgattgattggaatcctcttaagttggaatccacaggtttaaaagagatgccatggttcaaatctgtagaagaatttatggatagcagtgtggaagattcaaagaaggaaagtagttcagataaaaaagtcttgtctgcaatcatcaacaaaacaattattccccgacttacagactttgtagaattcctttgggatcctttgtcaacctcacagacaacaagtttaataacacattgcagagtgattcttgaagaacattccacttgtgaaaatgaagttagtaaaagcagacaggatttacttaaatccattgtttcaagaatgaaaaaggcagtagaagatgatgtttttattcctctgtatccaaagagtgctgtagaaaacaaaacatcacctcattcaaagttccaagaaagacagttctggtcaggcctaaagctcttccgcaatattcttctttggaatggactccttacagatgacaccttgcaagaactaggactagggaagctgctaaatcgttaccttattatagcacttctcaatgccacacctgggccagatgtggttaaaaagtgcaaccaggtagcagcatgtctaccagaaaaatggtttgaaaattctgccatgaggacatctattccacagctagaaaacttcattcagtttttattgcagtctgcacataaattatctagaagtgaattcagggatgaagtcgaagaaataattcttattttggtgaaaataaaagctttgaatcaagcagaatccttcataggagagcatcacctagaccatcttaaatcactaattaaagaagattgaataaactttattggaaaatgctaaaattttaatatagttacactcagttcctttgtttgagaagaagctggtgcctctctcttctttattccctgtaatagaaggtaggatttgaaaaaaagcaggactccacctctgtattcccccgtgctttaccttctggcatcatgaaaagctgccatgattctgtggtgttctaaggaattaaatgcactggagctttaagagctcaacgtgtttccctttgattcttttggctggtctttcaattttcttaagaggggaactggagaaaccttgctaaaggttttagcttaagtgagcatgctactaagtcttctgtcctgaaccacaataatatcttttagttctctttaactacctttatttaaaaataagtcaatatgaaaatctcagttggagtgaattatttgctaagtattaaatgattaaggcatgtgccgattgtcaaattatccttcagaaatctgtaccaatttaatgtaccaacataagcataagtgagtgccaatgaatccctaccagcagtagttattatcctttttaaaaatgcattgaaaatttgaaaggtaaaaatcttattttaatagcgtattttgtgttggctattagagagtaaacatattggttttggccatttgtaattatttctgaaatatccatctttttcttatggactttaagacctttatatttttaaagatattgattttttgcccatgcttgtggcagaagttttccttatttgccatttttcttttattttttttttaattgtattttttgagacagggtctggctctgtcacccaggctggagagtagtggcacaatctcggctcactgcaacctctgccttctgggctcaagcaatcctcccacttcaacctcccaagtagctgggactataggcatgcgccaccatgcccagctgatttttgtaattttttgtagagatggggtttcgtgacattgcccaggctggtctcgaactcttgagctcaagcagtctacccaccttgacctcccaaagtgctgggattacaggcttgagcaaccatgtttggcctttcttttaaatttgttgatgttttttgaagcattaagtcattacttattagcaagttactattttgtttttttgtcattggtggtaggactaagaaggaaacagatattttaaatactcacaacatgtgattcattttctgataaaatatttgtctaataaaacagaggcaagataatttaatcaaaagaaattaagaaaattttccaaaaatgttagtttactagtaatttttctaagtctacttattaaataacttaagggaaactgtaaatatattttgcaaattgttgttcaaaagataattggaaaaaattgaatatattgtaggatttgaatatacagcctacttttatgtcacctctaccttcaaaactacatataatttattttaggagttggatttgttatgtctgttgcagtgaggacttgtgattcactggtatgaagaattttttgatgtttatattagtaacaaaattatacaaggatagaatctcatctagaaaatgcaaactattgttgaaaagcagttagcatttccacacaaccgctgtccccagagataactgctgttttcattttaatgttatccttttagaccttttctctatttacaaaaatgttacgtgtttctatgtgtacatagttttgggttttttttttttttttacgtaagtggcagacactttattgcacatgaaatttgtaatttttttctatttaagtacacatttggaaattatcctctgacttttggatttttaactaaatatgttggacgtgttcctttatatatttaagttcagcacagaaactttcctacctttttgtggaagataaaatattaaaactgctttcaaaactacaa

SEQ ID NO: 136717 - DNA, 2516 bp, Homo sapiens
  Payload ID: 6770
  Gene Symbol: GCFC2
  Gene Name: GC-rich sequence DNA-binding factor 2
  Uniprot ID: P16383
  ENST ID: ENST00000409857
  CDS Start-End: 38-2269
agcgggttctagggcgccgggcgctcgggcctcggccatggctcacaggccgaaaaggacttttcggcagcgcgcggctgattccagcgacagcgatggcgccgaggagtcgcctgctgagcctggggcgccgagggaacttccggtcccgggttctgcggaggaagagccgccctctggaggaggccgcgcgcaggtggcgggactgccccaccgggttcggggccctcgtggccggggccgggtctgggcgagctcccggcgtgccaccaaagcggctccccgcgcggacgaaggctcagaatccagaacccttgatgtgtccacagatgaagaggataaaatacatcactcctcagaaagtaaggatgatcagggtttgtcttctgacagttctagctctcttggagaaaaagaactttcatcaacagttaagatcccagatgcagcttttattcaggcagcccgcagaaaacgtgaattggccagggcccaagatgactatatttctttggatgtacaacatacctcctccatctctgtaagcagaaatgaagaaacaagtgaagaaagtcaggaagatgaaaagcaagatacttgggaacaacagcaaatgaggaaagcagttaaaatcatagaggaaagagacatagatctttcctgtggcaatggatcttcaaaagtgaagaaatttgatacttccatttcatttccgccagtaaatttagaaattataaagaagcaattaaatactagattaacattactacaggaaactcaccgctcacacctgagggagtatgaaaaatacgtacaagatgtcaaaagctcaaagagtaccatccagaacctagagagttcatcaaatcaagctctaaattgtaaattctataaaagcatgaaaatttatgtggaaaatttaattgactgccttaatgaaaagattatcaacatccaagaaatagaatcatccatgcatgcactccttttaaaacaagctatgacctttatgaaacgcaggcaagatgaattaaaacatgaatcaacgtatttacaacagttatcacgcaaagatgagacatccacaagtggaaacttctcagtagatgaaaaaactcagtggattttagaagagattgaatctcgaaggacaaaaagaagacaagcaagggtgctttctgggaattgtaaccatcaggaaggaacatctagtgatgatgaactgccttcagcagagatgattgacttccaaaaaagccaaggtgacattttacagaaacagaagaaagtttttgaagaagtgcaagatgatttttgtaacatccagaatattttgttgaaatttcagcaatggcgagaaaagtttcctgactcctattatgaagctttcattagtttatgcataccaaagcttttaaatcccctaatacgagttcagttgattgattggaatcctcttaagttggaatccacaggtttaaaagagatgccatggttcaaatctgtagaagaatttatggatagcagtgtggaagattcaaagaaggaaagtagttcagataaaaaagtcttgtctgcaatcatcaacaaaacaattattccccgacttacagactttgtagaattcctttgggatcctttgtcaacctcacagacaacaagtttaataacacattgcagagtgattcttgaagaacattccacttgtgaaaatgaagttagtaaaagcagacaggatttacttaaatccattgtttcaagaatgaaaaaggcagtagaagatgatgtttttattcctctgtatccaaagagtgctgtagaaaacaaaacatcacctcattcaaagttccaagaaagacagttctggtcaggcctaaagctcttccgcaatattcttctttggaatggactccttacagatgacaccttgcaagaactaggactagggaagctgctaaatcgttaccttattatagcacttctcaatgccacacctgggccagatgtggttaaaaagtgcaaccaggtagcagcatgtctaccagaaaaatggtttgaaaattctgccatgaggacatctattccacagctagaaaacttcattcagtttttattgcagtctgcacataaattatctagaagtgaattcagggatgaagtcgaagaaataattcttattttggtgaaaataaaagctttgaatcaagcagaatccttcataggagagcatcacctagaccatcttaaatcactaattaaagaagattgaataaactttattggaaaatgctaaaattttaatatagttacactcagttcctttgtttgagaagaagctggtgcctctctcttctttattccctgtaatagaaggtaggatttgaaaaaaagcaggactccacctctgtattcccccgtgctttaccttctggcatcatgaaaagctgccatgattctgtggtgttctaaggaattaaatgcactggagctttaagagctcaacgtgtttccctttg

SEQ ID NO: 136718 - DNA, 632 bp, Homo sapiens
  Payload ID: 6770
  Gene Symbol: GCFC2
  Gene Name: GC-rich sequence DNA-binding factor 2
  ENST ID: ENST00000427862
  CDS Start-End: 1-600
aaagtagttcagataaaaaagtcttgtctgcaatcatcaacaaaacaattattccccgacttacaggatttacttaaatccattgtttcaagaatgaaaaaggcagtagaagatgatgtttttattcctctgtatccaaagagtgctgtagaaaacaaaacatcacctcattcaaagttccaagaaagacagttctggtcaggcctaaagctcttccgcaatattcttctttggaatggactccttacagatgacaccttgcaagaactaggactagggaagctgctaaatcgttaccttattatagcacttctcaatgccacacctgggccagatgtggttaaaaagtgcaaccaggtagcagcatgtctaccagaaaaatggtttgaaaattctgccatgaggacatctattccacagctagaaaacttcattcagtttttattgcagtctgcacataaattatctagaagtgaattcagggatgaagtcgaagaaataattcttattttggtgaaaataaaagctttgaatcaagcagaatccttcataggagagcatcacctagaccatcttaaatcactaattaaagaagattgaataaactttattggaaaatgctaaaattttaa

SEQ ID NO: 136719 - DNA, 642 bp, Homo sapiens
  Payload ID: 6770
  Gene Symbol: GCFC2
  Gene Name: GC-rich sequence DNA-binding factor 2
  ENST ID: ENST00000442309
  CDS Start-End: 87-642
gcgggagcgcgccctagggggcgggcactgaagctgcggcttgcggttcagcgggttctagggcgccgggcgctcgggcctcggccatggctcacaggccgaaaaggacttttcggcagcgcgcggctgattccagcgacagcgatggcgccgaggagtcgcctgctgagcctggggcgccgagggaacttccggtcccgggttctgcggaggaagagccgccctctggaggaggccgcgcgcaggtggcgggactgccccaccgggttcggggccctcgtggccggggccgggtctgggcgagctcccggcgtgccaccaaagcggctccccgcgcggacgaaggctcagaatccagaacccttgatgtgtccacagatgaagaggataaaatacatcactcctcagaaagtaaggatgatcagggtttgtcttctgacagttctagctctcttggagaaaaagaactttcatcaacagtaagcagaaatgaagaaacaagtgaagaaagtcaggaagatgaaaagcaagatacttgggaacaacagcaaatgaggaaagcagttaaaatcatagaggaaagagacatagatctttcctgtggcaatggatcttcaaaagtgaagaaatttgatacttcca

SEQ ID NO: 136720 - DNA, 4318 bp, Homo sapiens
  Payload ID: 6770
  Gene Symbol: GCFC2
  Gene Name: GC-rich sequence DNA-binding factor 2
  Uniprot ID: P16383
  ENST ID: ENST00000541687
  CDS Start-End: 131-895
agaaggcaggcgggacgggcgcgcgcactcggcggccaggcgcggcgggagcgcgccctagggggcgggcactgaagctgcggcttgcggttcagcgggttctagggcgccgggcgctcgggcctcggccatggctcacaggccgaaaaggacttttcggcagcgcgcggctgattccagcgacagcgatggcgccgaggagtcgcctgctgagcctggggcgccgagggaacttccggtcccgggttctgcggaggaagagccgccctctggaggaggccgcgcgcaggtggcgggactgccccaccgggttcggggccctcgtggccggggccgggtctgggcgagctcccggcgtgccaccaaagcggctccccgcgcggacgaaggctcagaatccagaacccttgatgtgtccacagatgaagaggataaaatacatcactcctcagaaagtaaggatgatcagggtttgtcttctgacagttctagctctcttggagaaaaagaactttcatcaacagttaagatcccagatgcagcttttattcaggcagcccgcagaaaacgtgaattggccagggcccaagatgactatatttctttggatgtacaacatacctcctccatctctggtatgaagagagagagcgaagatgaccctgagagtgagcctgatgaccatgaaaagagaataccatttactctaagacctcaaacacttagacaaaggatggctgaggaatcaataagcagaaatgaagaaacaagtgaagaaagtcaggaagatgaaaagcaagatacttgggaacaacagcaaatgaggaaagcagttaaaatcatagagattaacattactacaggaaactcaccgctcacacctgagggagtatgaaaaatacgtacaagatgtcaaaagctcaaagagtaccatccagaacctagagagttcatcaaatcaagctctaaattgtaaattctataaaagcatgaaaatttatgtggaaaatttaattgactgccttaatgaaaagattatcaacatccaagaaatagaatcatccatgcatgcactccttttaaaacaagctatgacctttatgaaacgcaggcaagatgaattaaaacatgaatcaacgtatttacaacagttatcacgcaaagatgagacatccacaagtggaaacttctcagtagatgaaaaaactcagtggattttagaagagattgaatctcgaaggacaaaaagaagacaagcaagggtgctttctgggaattgtaaccatcaggaaggaacatctagtgatgatgaactgccttcagcagagatgattgacttccaaaaaagccaaggtgacattttacagaaacagaagaaagtttttgaagaagtgcaagatgatttttgtaacatccagaatattttgttgaaatttcagcaatggcgagaaaagtttcctgactcctattatgaagctttcattagtttatgcataccaaagcttttaaatcccctaatacgagttcagttgattgattggaatcctcttaagttggaatccacaggtttaaaagagatgccatggttcaaatctgtagaagaatttatggatagcagtgtggaagattcaaagaaggaaagtagttcagataaaaaagtcttgtctgcaatcatcaacaaaacaattattccccgacttacagactttgtagaattcctttgggatcctttgtcaacctcacagacaacaagtttaataacacattgcagagtgattcttgaagaacattccacttgtgaaaatgaagttagtaaaagcagacaggatttacttaaatccattgtttcaagaatgaaaaaggcagtagaagatgatgtttttattcctctgtatccaaagagtgctgtagaaaacaaaacatcacctcattcaaagttccaagaaagacagttctggtcaggcctaaagctcttccgcaatattcttctttggaatggactccttacagatgacaccttgcaagaactaggactagggaagctgctaaatcgttaccttattatagcacttctcaatgccacacctgggccagatgtggttaaaaagtgcaaccaggtagcagcatgtctaccagaaaaatggtttgaaaattctgccatgaggacatctattccacagctagaaaacttcattcagtttttattgcagtctgcacataaattatctagaagtgaattcagggatgaagtcgaagaaataattcttattttggtgaaaataaaagctttgaatcaagcagaatccttcataggagagcatcacctagaccatcttaaatcactaattaaagaagattgaataaactttattggaaaatgctaaaattttaatatagttacactcagttcctttgtttgagaagaagctggtgcctctctcttctttattccctgtaatagaaggtaggatttgaaaaaaagcaggactccacctctgtattcccccgtgctttaccttctggcatcatgaaaagctgccatgattctgtggtgttctaaggaattaaatgcactggagctttaagagctcaacgtgtttccctttgattcttttggctggtctttcaattttcttaagaggggaactggagaaaccttgctaaaggttttagcttaagtgagcatgctactaagtcttctgtcctgaaccacaataatatcttttagttctctttaactacctttatttaaaaataagtcaatatgaaaatctcagttggagtgaattatttgctaagtattaaatgattaaggcatgtgccgattgtcaaattatccttcagaaatctgtaccaatttaatgtaccaacataagcataagtgagtgccaatgaatccctaccagcagtagttattatcctttttaaaaatgcattgaaaatttgaaaggtaaaaatcttattttaatagcgtattttgtgttggctattagagagtaaacatattggttttggccatttgtaattatttctgaaatatccatctttttcttatggactttaagacctttatatttttaaagatattgattttttgcccatgcttgtggcagaagttttccttatttgccatttttcttttattttttttttaattgtattttttgagacagggtctggctctgtcacccaggctggagagtagtggcacaatctcggctcactgcaacctctgccttctgggctcaagcaatcctcccacttcaacctcccaagtagctgggactataggcatgcgccaccatgcccagctgatttttgtaattttttgtagagatggggtttcgtgacattgcccaggctggtctcgaactcttgagctcaagcagtctacccaccttgacctcccaaagtgctgggattacaggcttgagcaaccatgtttggcctttcttttaaatttgttgatgttttttgaagcattaagtcattacttattagcaagttactattttgtttttttgtcattggtggtaggactaagaaggaaacagatattttaaatactcacaacatgtgattcattttctgataaaatatttgtctaataaaacagaggcaagataatttaatcaaaagaaattaagaaaattttccaaaaatgttagtttactagtaatttttctaagtctacttattaaataacttaagggaaactgtaaatatattttgcaaattgttgttcaaaagataattggaaaaaattgaatatattgtaggatttgaatatacagcctacttttatgtcacctctaccttcaaaactacatataatttattttaggagttggatttgttatgtctgttgcagtgaggacttgtgattcactggtatgaagaattttttgatgtttatattagtaacaaaattatacaaggatagaatctcatctagaaaatgcaaactattgttgaaaagcagttagcatttccacacaaccgctgtccccagagataactgctgttttcattttaatgttatccttttagaccttttctctatttacaaaaatgttacgtgtttctatgtgtacatagttttgggttttttttttttttttacgtaagtggcagacactttattgcacatgaaatttgtaatttttttctatttaagtacacatttggaaattatcctctgacttttggatttttaactaaatatgttggacgtgttcctttatatatttaagttcagcacagaaactttcctacctttttgtggaagataaaatattaaaactgctttcaaaactac

SEQ ID NO: 136721 - DNA, 2265 bp, Homo sapiens
  Payload ID: 6770
  Gene Symbol: GCFC2
  Gene Name: GC-rich sequence DNA-binding factor 2
  ENST ID: ENST00000472230
  CDS Start-End: 1-108
gcggacgaaggctcaggtgtccagggagacgcggggaagcggggaggtgacggcacagggcgggaaggggccgcggggtctctggatccttctctgggggttctataacttgctgccgaccacaagccatgctgagtcttatccagaaagacttatccagaagaatccagaacccttgatgtgtccacagatgaagaggataaaatacatcactcctcagaaagtaaggatgatcagggtttgtcttctgacagttctagctctcttggagaaaaagaactttcatcaacagttaagatcccagatgcagcttttattcaggcagcccgcagaaaacgtgaattggccagggcccaagatgactatatttctttggatgtacaacatacctcctccatctctggtatgaagagagagagcgaagatgaccctgagagtgagcctgatgaccatgaaaagagaataccatttactctaagacctcaaacacttagacaaaggatggctgaggaatcaataagcagaaatgaagaaacaagtgaagaaagtcaggaagatgaaaagcaagatacttgggaacaacagcaaatgaggaaagcagttaaaatcatagaggaaagagacatagatctttcctgtggcaatggatcttcaaaagtgaagaaatttgatacttccatttcatttccgccagtaaatttagaaattataaagaagcaattaaatactagattaacattactacaggaaactcaccgctcacacctgagggagtatgaaaaatacgtacaagatgtcaaaagctcaaagagtaccatccagaacctagagagttcatcaaatcaagctctaaattgtaaattctataaaagcatgaaaatttatgtggaaaatttaattgactgccttaatgaaaagattatcaacatccaagaaatagaatcatccatgcatgcactccttttaaaacaagctatgacctttatgaaacgcaggcaagatgaattaaaacatgaatcaacgtatttacaacagttatcacgcaaagatgagacatccacaagtggaaacttctcagtagatgaaaaaactcagtggattttagaagagattgaatctcgaaggacaaaaagaagacaagcaagggtgctttctgggaattgtaaccatcaggaaggaacatctagtgatgatgaactgccttcagcagagatgattgacttccaaaaaagccaaggtgacattttacagaaacagaagaaagtttttgaagaagtgcaagatgatttttgtaacatccagaatattttgttgaaatttcagcaatggcgagaaaagtttcctgactcctattatgaagctttcattagtttatgcataccaaagcttttaaatcccctaatacgagttcagttgattgattggaatcctcttaagttggaatccacaggtttaaaagagatgccatggttcaaatctgtagaagaatttatggatagcagtgtggaagattcaaagaaggaaagtagttcagataaaaaagtcttgtctgcaatcatcaacaaaacaattattccccgacttacagactttgtagaattcctttgggatcctttgtcaacctcacagacaacaagtttaataacacattgcagagtgattcttgaagaacattccacttgtgaaaatgaagttagtaaaagcagacaggatttacttaaatccattgtttcaagaatgaaaaaggcagtagaagatgatgtttttattcctctgtatccaaagagtgctgtagaaaacaaaacatcacctcattcaaagttccaagaaagacagttctggtcaggcctaaagctcttccgcaatattcttctttggaatggactccttacagatgacaccttgcaagaactaggactagggaagctgctaaatcgttaccttattatagcacttctcaatgccacacctgggccagatgtggttaaaaagtgcaaccaggtagcagcatgtctaccagaaaaatggtttgaaaattctgccatgaggacatctattccacagctagaaaacttcattcagtttttattgcagtctgcacataaattatctagaagtgaattcagggatgaagtcgaagaaataattcttattttggtgaaaataaaagctttgaatcaagcagaatccttcataggagagcatcacctagaccatcttaaatcactaattaaagaagattgaataaactttattggaaaatgc

SEQ ID NO: 136722 - DNA, 1066 bp, Homo sapiens
  Payload ID: 6770
  Gene Symbol: GCFC2
  Gene Name: GC-rich sequence DNA-binding factor 2
  Uniprot ID: P16383
  ENST ID: ENST00000470503
  CDS Start-End: 45-692
gcggttcagcgggttctagggcgccgggcgctcgggcctcggccatggctcacaggccgaaaaggacttttcggcagcgcgcggctgattccagcgacagcgatggcgccgaggagtcgcctgctgagcctggggcgccgagggaacttccggtcccgggttctgcggaggaagagccgccctctggaggaggccgcgcgcaggtggcgggactgccccaccgggttcggggccctcgtggccggggccgggtctgggcgagctcccggcgtgccaccaaagcggctccccgcgcggacgaaggctcagaatccagaacccttgatgtgtccacagatgaagaggataaaatacatcactcctcagaaagtaaggatgatcagggtttgtcttctgacagttctagctctcttggagaaaaagaactttcatcaacagttaagatcccagatgcagcttttattcaggcagcccgcagaaaacgtgaattggccagggcccaagatgactatatttctttggatgtacaacatacctcctccatctctggtatgaagagagagagcgaagatgaccctgagagtgagcctgatgaccatgaaaagagaataccatttactctaagacctcaaacacttagacaaaggatggctgaggaatcaagtatggatttaccaatatatgaagattaggatattttttattagaatataatatgagagaatctccataaaaaatgtaatatgctggctcacattttatagtgttgataatggtttttaacatcgatttggtccatgatattgtgacctctaaaagatgtatctgtatcaaaatgttattatcaaggagtatgtgtaataatgtttattaatgcctgacctcccaccttgatgtttttggacaggttaaaaaaaatgtgcagtatcttactttcaaagcattgaaaacgatcgtttttacctgtataaatatattttttttaacatggaagcatctatagagattttagatgtcatgtattaaaatcttccctgctgtaataaaaaatttcctctaccaataa

SEQ ID NO: 136723 - DNA, 443 bp, Homo sapiens
  Payload ID: 6770
  Gene Symbol: GCFC2
  Gene Name: GC-rich sequence DNA-binding factor 2
  ENST ID: ENST00000492826
  CDS Start-End: 1-83
agctgctaaatcgttaccttattatagcacttctcaatgccacacctgggccagatgtggttaaaaagtgcaaccagggatgaagtcgaagaaataattcttattttggtgaaaataaaagctttgaatcaagcagaatccttcataggagagcatcacctagaccatcttaaatcactaattaaagaagattgaataaactttattggaaaatgctaaaattttaatatagttacactcagttcctttgtttgagaagaagctggtgcctctctcttctttattccctgtaatagaaggtaggatttgaaaaaaagcaggactccacctctgtattcccccgtgctttaccttctggcatcatgaaaagctgccatgattctgtggtgttctaaggaattaaatgcactggagctttaagagctcaacgtgtttccctttga

SEQ ID NO: 136724 - DNA, 423 bp, Homo sapiens
  Payload ID: 6770
  Gene Symbol: GCFC2
  Gene Name: GC-rich sequence DNA-binding factor 2
  ENST ID: ENST00000470285
  CDS Start-End: 1-131
gaagtgaattcagggatgaagtcgaagaaataattcttattttggtgaaaataaaagctttgaatcaagcagaatccttcataggagagcatcacctagaccatcttaaatcactaattaaagaagattgaataaactttattggaaaatgctaaaattttaatatagttacactcagttcctttgtttgagaagaagctggtgcctctctcttctttattccctgtaatagaagaggatctgttcttccccttcgaggaatgaattcaggactcaagaacctgtaaaaaatacaaataaataattaaaagtaaactcaaaaggctgctagaagaaaaattgttgcttttcaaagaaattaaatatgatattgatgtattttattcttcattgtctaaataaaagtcaatcttatttctaaaa

SEQ ID NO: 136725 - DNA, 2583 bp, Homo sapiens
  Payload ID: 6771
  Gene Symbol: GFRA1
  Gene Name: GDNF family receptor alpha 1
  Uniprot ID: P56159
  ENST ID: ENST00000355422
  CDS Start-End: 552-1949
tctggccagaagaaatctggcctcggaacacgccattctccgcgccgcttccaataaccactaacatccctaacgagcatccgagccgagggctctgctcggaaatcgtcctggcccaactcggcccttcgagctctcgaagattaccgcatctatttttttttcttttttttcttttcctagcgcagataaagtgagcccggaaagggaaggagggggcggggacaccattgccctgaaagaataaataagtaaataaacaaactggctcctcgccgcagctggacgcggtcggttgagtccaggttgggtcggacctgaacccctaaaagcggaaccgcctcccgccctcgccatcccggagctgagtcgccggcggcggtggctgctgccagacccggagtttcctctttcactggatggagctgaactttgggcggccagagcagcacagctgtccggggatcgctgcacgctgagctccctcggcaagacccagcggcggctcgggatttttttgggggggcggggaccagccccgcgccggcaccatgttcctggcgaccctgtacttcgcgctgccgctcttggacttgctcctgtcggccgaagtgagcggcggagaccgcctggattgcgtgaaagccagtgatcagtgcctgaaggagcagagctgcagcaccaagtaccgcacgctaaggcagtgcgtggcgggcaaggagaccaacttcagcctggcatccggcctggaggccaaggatgagtgccgcagcgccatggaggccctgaagcagaagtcgctctacaactgccgctgcaagcggggtatgaagaaggagaagaactgcctgcgcatttactggagcatgtaccagagcctgcagggaaatgatctgctggaggattccccatatgaaccagttaacagcagattgtcagatatattccgggtggtcccattcatatcagatgtttttcagcaagtggagcacattcccaaagggaacaactgcctggatgcagcgaaggcctgcaacctcgacgacatttgcaagaagtacaggtcggcgtacatcaccccgtgcaccaccagcgtgtccaacgatgtctgcaaccgccgcaagtgccacaaggccctccggcagttctttgacaaggtcccggccaagcacagctacggaatgctcttctgctcctgccgggacatcgcctgcacagagcggaggcgacagaccatcgtgcctgtgtgctcctatgaagagagggagaagcccaactgtttgaatttgcaggactcctgcaagacgaattacatctgcagatctcgccttgcggatttttttaccaactgccagccagagtcaaggtctgtcagcagctgtctaaaggaaaactacgctgactgcctcctcgcctactcggggcttattggcacagtcatgacccccaactacatagactccagtagcctcagtgtggccccatggtgtgactgcagcaacagtgggaacgacctagaagagtgcttgaaatttttgaatttcttcaaggacaatacatgtcttaaaaatgcaattcaagcctttggcaatggctccgatgtgaccgtgtggcagccagccttcccagtacagaccaccactgccactaccaccactgccctccgggttaagaacaagcccctggggccagcagggtctgagaatgaaattcccactcatgttttgccaccgtgtgcaaatttacaggcacagaagctgaaatccaatgtgtcgggcaatacacacctctgtatttccaatggtaattatgaaaaagaaggtctcggtgcttccagccacataaccacaaaatcaatggctgctcctccaagctgtggtctgagcccactgctggtcctggtggtaaccgctctgtccaccctattatctttaacagaaacatcatagctgcattaaaaaaatacaatatggacatgtaaaaagacaaaaaccaagttatctgtttcctgttctcttgtatagctgaaattccagtttaggagctcagttgagaaacagttccattcaactggaacattttttttttttccttttaagaaagcttcttgtgatcctttggggcttctgtgaaaaacctgatgcagtgctccatccaaactcagaaggctttgggatatgctgtattttaaagggacagtttgtaacttgggctgtaaagcaaactggggctgtgttttcgatgatgatgatgatcatgatgatgatcatcatgatcatgatgatgatcatcatgatcatgatgatgattttaacagttttacttctggcctttcctagctagagaaggagttaatatttctaaggtaactcccatatctcctttaatgacattgatttctaatgatataaatttcagcctacattgatgccaagcttttttgccacaaagaagattcttaccaagagtgggctttgtggaaacagctggtactgatgttcacctttatatatgtactagcattttccacgctgatgtttatgtactgtaaacagttctgcactcttgtacaaaagaaaaaac

SEQ ID NO: 136726 - DNA, 1807 bp, Homo sapiens
  Payload ID: 6771
  Gene Symbol: GFRA1
  Gene Name: GDNF family receptor alpha 1
  Uniprot ID: P56159
  ENST ID: ENST00000369234
  CDS Start-End: 413-1807
ggcccggggggcgctcgtggcgccgggctgcacctgccggggcacgccgggactgcgggccggcgcgctcgccctgggctggggtgcggaagcgcccgagtcctgggcaccgggcgagagtgtgagaggagcggacgcccaggagggagccgaggacgcgcggcgggttgggtcggacctgaacccctaaaagcggaaccgcctcccgccctcgccatcccggagctgagtcgccggcggcggtggctgctgccagacccggagtttcctctttcactggatggagctgaactttgggcggccagagcagcacagctgtccggggatcgctgcacgctgagctccctcggcaagacccagcggcggctcgggatttttttgggggggcggggaccagccccgcgccggcaccatgttcctggcgaccctgtacttcgcgctgccgctcttggacttgctcctgtcggccgaagtgagcggcggagaccgcctggattgcgtgaaagccagtgatcagtgcctgaaggagcagagctgcagcaccaagtaccgcacgctaaggcagtgcgtggcgggcaaggagaccaacttcagcctggcatccggcctggaggccaaggatgagtgccgcagcgccatggaggccctgaagcagaagtcgctctacaactgccgctgcaagcggggtatgaagaaggagaagaactgcctgcgcatttactggagcatgtaccagagcctgcagggaaatgatctgctggaggattccccatatgaaccagttaacagcagattgtcagatatattccgggtggtcccattcatatcagatgtttttcagcaagtggagcacattcccaaagggaacaactgcctggatgcagcgaaggcctgcaacctcgacgacatttgcaagaagtacaggtcggcgtacatcaccccgtgcaccaccagcgtgtccaacgatgtctgcaaccgccgcaagtgccacaaggccctccggcagttctttgacaaggtcccggccaagcacagctacggaatgctcttctgctcctgccgggacatcgcctgcacagagcggaggcgacagaccatcgtgcctgtgtgctcctatgaagagagggagaagcccaactgtttgaatttgcaggactcctgcaagacgaattacatctgcagatctcgccttgcggatttttttaccaactgccagccagagtcaaggtctgtcagcagctgtctaaaggaaaactacgctgactgcctcctcgcctactcggggcttattggcacagtcatgacccccaactacatagactccagtagcctcagtgtggccccatggtgtgactgcagcaacagtgggaacgacctagaagagtgcttgaaatttttgaatttcttcaaggacaatacatgtcttaaaaatgcaattcaagcctttggcaatggctccgatgtgaccgtgtggcagccagccttcccagtacagaccaccactgccactaccaccactgccctccgggttaagaacaagcccctggggccagcagggtctgagaatgaaattcccactcatgttttgccaccgtgtgcaaatttacaggcacagaagctgaaatccaatgtgtcgggcaatacacacctctgtatttccaatggtaattatgaaaaagaaggtctcggtgcttccagccacataaccacaaaatcaatggctgctcctccaagctgtggtctgagcccactgctggtcctggtggtaaccgctctgtccaccctattatctttaacagaaacatca

SEQ ID NO: 136727 - DNA, 9109 bp, Homo sapiens
  Payload ID: 6771
  Gene Symbol: GFRA1
  Gene Name: GDNF family receptor alpha 1
  Uniprot ID: P56159
  ENST ID: ENST00000369236
  CDS Start-End: 254-1636
cttccaggttgggtcggacctgaacccctaaaagcggaaccgcctcccgccctcgccatcccggagctgagtcgccggcggcggtggctgctgccagacccggagtttcctctttcactggatggagctgaactttgggcggccagagcagcacagctgtccggggatcgctgcacgctgagctccctcggcaagacccagcggcggctcgggatttttttgggggggcggggaccagccccgcgccggcaccatgttcctggcgaccctgtacttcgcgctgccgctcttggacttgctcctgtcggccgaagtgagcggcggagaccgcctggattgcgtgaaagccagtgatcagtgcctgaaggagcagagctgcagcaccaagtaccgcacgctaaggcagtgcgtggcgggcaaggagaccaacttcagcctggcatccggcctggaggccaaggatgagtgccgcagcgccatggaggccctgaagcagaagtcgctctacaactgccgctgcaagcggggtatgaagaaggagaagaactgcctgcgcatttactggagcatgtaccagagcctgcagggaaatgatctgctggaggattccccatatgaaccagttaacagcagattgtcagatatattccgggtggtcccattcatatcagtggagcacattcccaaagggaacaactgcctggatgcagcgaaggcctgcaacctcgacgacatttgcaagaagtacaggtcggcgtacatcaccccgtgcaccaccagcgtgtccaacgatgtctgcaaccgccgcaagtgccacaaggccctccggcagttctttgacaaggtcccggccaagcacagctacggaatgctcttctgctcctgccgggacatcgcctgcacagagcggaggcgacagaccatcgtgcctgtgtgctcctatgaagagagggagaagcccaactgtttgaatttgcaggactcctgcaagacgaattacatctgcagatctcgccttgcggatttttttaccaactgccagccagagtcaaggtctgtcagcagctgtctaaaggaaaactacgctgactgcctcctcgcctactcggggcttattggcacagtcatgacccccaactacatagactccagtagcctcagtgtggccccatggtgtgactgcagcaacagtgggaacgacctagaagagtgcttgaaatttttgaatttcttcaaggacaatacatgtcttaaaaatgcaattcaagcctttggcaatggctccgatgtgaccgtgtggcagccagccttcccagtacagaccaccactgccactaccaccactgccctccgggttaagaacaagcccctggggccagcagggtctgagaatgaaattcccactcatgttttgccaccgtgtgcaaatttacaggcacagaagctgaaatccaatgtgtcgggcaatacacacctctgtatttccaatggtaattatgaaaaagaaggtctcggtgcttccagccacataaccacaaaatcaatggctgctcctccaagctgtggtctgagcccactgctggtcctggtggtaaccgctctgtccaccctattatctttaacagaaacatcatagctgcattaaaaaaatacaatatggacatgtaaaaagacaaaaaccaagttatctgtttcctgttctcttgtatagctgaaattccagtttaggagctcagttgagaaacagttccattcaactggaacattttttttttttccttttaagaaagcttcttgtgatcctttggggcttctgtgaaaaacctgatgcagtgctccatccaaactcagaaggctttgggatatgctgtattttaaagggacagtttgtaacttgggctgtaaagcaaactggggctgtgttttcgatgatgatgatgatcatgatgatgatcatcatgatcatgatgatgatcatcatgatcatgatgatgattttaacagttttacttctggcctttcctagctagagaaggagttaatatttctaaggtaactcccatatctcctttaatgacattgatttctaatgatataaatttcagcctacattgatgccaagcttttttgccacaaagaagattcttaccaagagtgggctttgtggaaacagctggtactgatgttcacctttatatatgtactagcattttccacgctgatgtttatgtactgtaaacagttctgcactcttgtacaaaagaaaaaacacctgtcacatccaaatatagtatctgtcttttcgtcaaaatagagagtggggaatgagtgtgccgattcaatacctcaatccctgaacgacactctcctaatcctaagccttacctgagtgagaagccctttacctaacaaaagtccaatatagctgaaatgtcgctctaatactctttacacatatgaggttatatgtagaaaaaaattttactactaaatgatttcaactattggctttctatattttgaaagtaatgatattgtctcatttttttactgatggtttaatacaaaatacacagagcttctttcccctcataagtagtgttcgctctgatatgaacttcacaaatacagctcatcaaaagcagactctgagaagcctcgtgctgtagcagaaagttctgcatcatgtgactgtggacaggcaggaggaaacagaacagacaagcattgtcttttgtcattgctcgaagtgcaagcgtgcatacctgtggagggaactggtggctgcttgtaaatgttctgcagcatctcttgacacacttgtcatgacacaatccagtaccttggttttcaggttatctgacaaaggcagctttgattgggacatggaggcatgggcaggttctcctttctttggaaacacatccatgctgggatgcacagttcttttcctaaggattgtgtttactcctgactgcaacgtcttggccactgtttggagcagtttggtctgaaggtcattaaggatctgcttgcatcttgtttcatgtcctccgtgacagactgcagaccatgttagaagagaaggaaggtttgtggatcaagagggttgacattaggtttggtgagatgagttgcttggcacagatcagcagaacaggaccctggtgataaggcatctggctttgctaaccacttatcatcttccattattctctttcttaactaagtagacccgaaagtgcacttttgaagtctggtttagatggcgagattccgaatctacaatgatcgagtactggtggccacttttctccaacattaagtaaagaggaggagattccaccttcagaaagtgctgggaagcattggctttcttcccacattggtagaagagatggaggaggaaaccagggtgcacatttctacagatcccctttgcctgctggtgtttgccttgtaagataagtcactggggggaaggggaaatctatgaaatccaagataaaggcatagtctttcagctctattggtgttaaaagtatatttgtgtccaaatgttaatcaacacaaatgtacagtactcagtactgacttttttcacttcaaaatgttttcaagggaaattcagcagacacccaactgtatttaattagtgaaaagatctataaagactcttactttgaataaacacattaagtaagtgtgtcaaaatatttggaatgccagttatctatgagcgcatatctcttacagagtgtattttgttttcattaaggtatctctgtgtatctacactggactaatttcatagggatctgattctatgtgatccactgtagaaagctactgattacttctgcagtaacagcagctctaattagcatcagatgaccaaagcggaaatgggagtttcagcgctaacaagggcagccttcattgaagaatgcatgggtaggcaatatataaattacattttgaaaagcctcatctgtcaccaacaaatatctcatttttcttcagtgataaaagcatattcaagttaccagctcctcaatttgaaaatcagttgctgattaaataaatagggggaagcatcttgttcagggacaacacgttagagagattcttatcaaagcaagccaagcaaggtttccgccattcagtgtgatcttagtttgacacggtgaccctaaaacaccatcatttgccccagaactggagcacaataagttaaatcatttacctgtctcacttcttcttggcgtgcttaaaagcaaaaatgattcgctacttcctgtccttcagtccgggcatttggggtgccactgaagacaggggttatctgctgaggtttgggtgtcttgcaggaagtatctcattgcagttgattttgatgaaaccaaacagtaactagggtccatgcagaccgtgactccctgattacatctagccatgccctacttatttcagagagaaagagagggggaataaaggcagtattgccacactgattagaagcacattcattccactttgatgttgaatatttttgaccgatacatgcttgagtatctttttaatagagcacatgaaggaagaagcacacaatatagagaaggaattgagaatgccaattacatatttatttttccatacctgatttttttcaagtctgtaataaaaaaagtataagttgagattaacataggttatttttcatgaagtatagcaaacgatctagaatgtgataggagtgtggtttccatttctttttttttttttttaacagacttttgtgctgtagtaagaatgtcttagaagttgtgtcttcgagttcctcaaacaccggacagggctcccccagagctgcctcagcctttgatttggtccatattcagacacttcctgtcttgcatacactctgaggatgggccgcttctagctgccgcccgtctccctcttgccttcttgtctctaaatcagacactcccaagcactccatctgctatactaggagagtgggagagccaaagcattttggagtccatgtaaagtgcctgggaaaagagatgtaagagcagtgggagtttatataattagcgaattcttttctcagaattcagcggaaatgtatttctgttgttattatttacaaaattgtggcctcagaggagctgtcttttggaaaataagttttcattcatgcagttagttagacatgcacgatgtacttgaatcaataaactgtggaccagaaaagggctgcttaaatgaattcacgtgttctaattctctttcgaggctgttgatgacctcctggattcatacccccatgatctgtcttgctcttgcctctgttctttgataaagcacatcagactatgtgacacccatcttttcaagaacgacctaaaagcaatgacaacaggcaggagagaattaccactggcctgggcacagtgacagcagaaggcccacctgagcttggagagttggcgagataaggcaaaatcaaggtgcaacagtgggccatgttccaagggtgaatggatctgagagtccgctgatgttccttactgatcagaacagggaccttctaacgaaacagccagagttccttgaatcaggcagaagttctttagagacaggaagccagagctattgataatatccgaacgacagaggaaggaatttcttattagaaattctaaaataaaacaagtggggatttggttggatacccttagaagctacatttttctctcatccctaagatagatatctcaagtgtatatctgacacctcttggctttgacacggctctgcttctcaagtgaccatttgttttaagtctgttgtctagaattctttgtgggggctggacctctgaaaaagattctcactgcagaggctttaaatctgtgtttttttccactccctccgtcctgggatgtattcggtaggacatttcatttatatcaggatattggctgattcagctctctttcatcgttattattcaggcctccctccaccaccttgttctttattgcctaagtattgccctccccaattcttcatcgtaatagctctaaatttagtttgacccaaattaatttttgttccaacagatatattttaagacagagaagcctctctcaggagccagatgatctgaagatgatgctaatccccaaatacgaagttcctccagctaactctcctctgagctccctcttcttagctttgggattggggatggtctcatccttgccaggaatccctttgttgctcccagtgtctctgatgagcttctcctccctcccagagacaatgcaggggtggttttcagcagaatgtgccacctgcacttctgattgttctgagacccagcccagaggggtggagaaggcgcacaaaccctattccaataaactgcctgcagagaaccacagcctgctaatagtcgttgaggtctcagccccctaaggtctccaagctcatttgaccagcgcagctgcgacttcggctgtctgcctctggcaggtgccaatatcagcatcttgtcccactgccatggggagttaatttttgctccagggcagctgccaagcccagcaccggcatcaatagaaggttttctctgattttcttctcttcctctcaggctaggctttcttaccaatccccaattttcttctgtagggcgccaggagactggccagagatctttagactcttacttagtttgaacatctcttgctgctcacacccaggcttcttcagcagaaagcatgacccatagtaggtactcagaaactggttgaatgaaaagccttgacatttaagggctttattctgtcatacggtagcaagaactggcctattggcatcgtattcctggcattgagctgtattgaccctgaatgtgtcctcctgaggtttttgagggtgacctaggagaaagggtctgaaaaagcactgggatccaagtgactttaaatctgcccgtggcatttcctgctgagaggcgagaaactagcatctctcccaacaggctcacatccgccaggaaggacagagcccaaaacgggggtagactttgtgggaaattcgccagttagtccgctgagattttaatctgcctcaagcacaggatgctgacaagaaaggtagaccactcccccgatcccagacaaaccccaggggtgacaacttctccatcagtatcctgagaagcaacatcaaatgcttaccaagtcagcacgtttactgagtgagtactctgacggaataaaccagcatttggagctgaacttgagaacacagggccctctgacagcagcttagggaaacacccatcccttccagattggcagaatccttccatttcatgtccttcggagacgctgtattctctttacaaatcattcatgaaactgagactcagtctcccaggggtaagtcctgggccacgtgcaaacaatggcaaatccagctcttccatgatagagaaggcaaacacacccaccttcatcctgagcctaaaaggccacctctgagcacttgggcagccactcctctgggcctcagagggccatgagcttggccaggtaggcacagcggcggggaagtcacagctgtcaggtaccggccatggtgcaggtgggaataggagatgccagagctgctttagctgaggaaagcaaacagtcagcagtgctcaaaggagcaaaacttcgaatgtgcacattgacccctgacacctgcaagcataacacagatcctaagactagagtgaagtaggaagaagaattagaaaatccagtggatgtcctgagtatagggaaccagggccgttgaaaatcagtaaaggttgattacctggggcgagaccgggtgactgtggcagtgcaggtgaaggtaccctggaccttctcagttcgctggcacataaggctccgccaataaagcgtggttctctctgtcacacacacacacacacacacacacacacacacacacacacacacacacacaatgattggagggctatatgatccagcattagcttcctggtgtgccaagcatgcttgatcgggaatttttttttattattattattttttagctgtagctgaaggcatttctcggatgtggagaggagaatggaaatcgcagaaccaaatcagtttgccctgccatatttggctgtggtctgtcattgggcatttctgatgtgcttttctggattcaggaagagctgattgtcctccgagggttgaaaaaaaaaaaacagtttcagaaacctgaatccagggccttatagttctcctcattatctatcttcttctcccttccctcgcccaagggagtgggggaaacacttttcactgcagagtttgctttaaagttttcccatcttgcgtgcattatcccttgatattaaaattattttctcagtttaatccaactcctgctgagaagctgtgtgagatttaggctgtggggtttttttcttgtactcttttggatggtgttgcatttttcactcttaacccgagggtgtgtttcagcttatgttcgttctgtttcatgcaggtttatagcacggtagagtagaaggcggcttctgatttttagggtatttttagaattcattcctgagtgaggggttcagacacccagtctcctcggaacaggggtgaggggtcgactgagctttgttgagaagcctccagttaggcttcgggcgggtctccatgttatattgtgtgtttactgagcttcccactggtagaagatgacacatttgtccatcgtcctgtgtatctgctttccagaggacaccggagcattctcctggggtcactcccacatggctgcctcacatagctgttttgcaacagcctttattgccaacacccttggaagaacatctcctgtagaagtacaagttttgcaatatggactttggaagtggttttgtgatgttcgaattttctgttagcctattgctcaagcactacagaatgtacatagtccctttggccatcctctcaccccagaatatcctaataaacattgttttcttttttaaaaaaaa

SEQ ID NO: 136728 - DNA, 9216 bp, Homo sapiens
  Payload ID: 6771
  Gene Symbol: GFRA1
  Gene Name: GDNF family receptor alpha 1
  Uniprot ID: P56159
  ENST ID: ENST00000439649
  CDS Start-End: 369-1751
cgcagataaagtgagcccggaaagggaaggagggggcggggacaccattgccctgaaagaataaataagtaaataaacaaactggctcctcgccgcagctggacgcggtcggttgagtccaggttgggtcggacctgaacccctaaaagcggaaccgcctcccgccctcgccatcccggagctgagtcgccggcggcggtggctgctgccagacccggagtttcctctttcactggatggagctgaactttgggcggccagagcagcacagctgtccggggatcgctgcacgctgagctccctcggcaagacccagcggcggctcgggatttttttgggggggcggggaccagccccgcgccggcaccatgttcctggcgaccctgtacttcgcgctgccgctcttggacttgctcctgtcggccgaagtgagcggcggagaccgcctggattgcgtgaaagccagtgatcagtgcctgaaggagcagagctgcagcaccaagtaccgcacgctaaggcagtgcgtggcgggcaaggagaccaacttcagcctggcatccggcctggaggccaaggatgagtgccgcagcgccatggaggccctgaagcagaagtcgctctacaactgccgctgcaagcggggtatgaagaaggagaagaactgcctgcgcatttactggagcatgtaccagagcctgcagggaaatgatctgctggaggattccccatatgaaccagttaacagcagattgtcagatatattccgggtggtcccattcatatcagtggagcacattcccaaagggaacaactgcctggatgcagcgaaggcctgcaacctcgacgacatttgcaagaagtacaggtcggcgtacatcaccccgtgcaccaccagcgtgtccaacgatgtctgcaaccgccgcaagtgccacaaggccctccggcagttctttgacaaggtcccggccaagcacagctacggaatgctcttctgctcctgccgggacatcgcctgcacagagcggaggcgacagaccatcgtgcctgtgtgctcctatgaagagagggagaagcccaactgtttgaatttgcaggactcctgcaagacgaattacatctgcagatctcgccttgcggatttttttaccaactgccagccagagtcaaggtctgtcagcagctgtctaaaggaaaactacgctgactgcctcctcgcctactcggggcttattggcacagtcatgacccccaactacatagactccagtagcctcagtgtggccccatggtgtgactgcagcaacagtgggaacgacctagaagagtgcttgaaatttttgaatttcttcaaggacaatacatgtcttaaaaatgcaattcaagcctttggcaatggctccgatgtgaccgtgtggcagccagccttcccagtacagaccaccactgccactaccaccactgccctccgggttaagaacaagcccctggggccagcagggtctgagaatgaaattcccactcatgttttgccaccgtgtgcaaatttacaggcacagaagctgaaatccaatgtgtcgggcaatacacacctctgtatttccaatggtaattatgaaaaagaaggtctcggtgcttccagccacataaccacaaaatcaatggctgctcctccaagctgtggtctgagcccactgctggtcctggtggtaaccgctctgtccaccctattatctttaacagaaacatcatagctgcattaaaaaaatacaatatggacatgtaaaaagacaaaaaccaagttatctgtttcctgttctcttgtatagctgaaattccagtttaggagctcagttgagaaacagttccattcaactggaacattttttttttttccttttaagaaagcttcttgtgatcctttggggcttctgtgaaaaacctgatgcagtgctccatccaaactcagaaggctttgggatatgctgtattttaaagggacagtttgtaacttgggctgtaaagcaaactggggctgtgttttcgatgatgatgatgatcatgatgatgatcatcatgatcatgatgatgatcatcatgatcatgatgatgattttaacagttttacttctggcctttcctagctagagaaggagttaatatttctaaggtaactcccatatctcctttaatgacattgatttctaatgatataaatttcagcctacattgatgccaagcttttttgccacaaagaagattcttaccaagagtgggctttgtggaaacagctggtactgatgttcacctttatatatgtactagcattttccacgctgatgtttatgtactgtaaacagttctgcactcttgtacaaaagaaaaaacacctgtcacatccaaatatagtatctgtcttttcgtcaaaatagagagtggggaatgagtgtgccgattcaatacctcaatccctgaacgacactctcctaatcctaagccttacctgagtgagaagccctttacctaacaaaagtccaatatagctgaaatgtcgctctaatactctttacacatatgaggttatatgtagaaaaaaattttactactaaatgatttcaactattggctttctatattttgaaagtaatgatattgtctcatttttttactgatggtttaatacaaaatacacagagcttctttcccctcataagtagtgttcgctctgatatgaacttcacaaatacagctcatcaaaagcagactctgagaagcctcgtgctgtagcagaaagttctgcatcatgtgactgtggacaggcaggaggaaacagaacagacaagcattgtcttttgtcattgctcgaagtgcaagcgtgcatacctgtggagggaactggtggctgcttgtaaatgttctgcagcatctcttgacacacttgtcatgacacaatccagtaccttggttttcaggttatctgacaaaggcagctttgattgggacatggaggcatgggcaggttctcctttctttggaaacacatccatgctgggatgcacagttcttttcctaaggattgtgtttactcctgactgcaacgtcttggccactgtttggagcagtttggtctgaaggtcattaaggatctgcttgcatcttgtttcatgtcctccgtgacagactgcagaccatgttagaagagaaggaaggtttgtggatcaagagggttgacattaggtttggtgagatgagttgcttggcacagatcagcagaacaggaccctggtgataaggcatctggctttgctaaccacttatcatcttccattattctctttcttaactaagtagacccgaaagtgcacttttgaagtctggtttagatggcgagattccgaatctacaatgatcgagtactggtggccacttttctccaacattaagtaaagaggaggagattccaccttcagaaagtgctgggaagcattggctttcttcccacattggtagaagagatggaggaggaaaccagggtgcacatttctacagatcccctttgcctgctggtgtttgccttgtaagataagtcactggggggaaggggaaatctatgaaatccaagataaaggcatagtctttcagctctattggtgttaaaagtatatttgtgtccaaatgttaatcaacacaaatgtacagtactcagtactgacttttttcacttcaaaatgttttcaagggaaattcagcagacacccaactgtatttaattagtgaaaagatctataaagactcttactttgaataaacacattaagtaagtgtgtcaaaatatttggaatgccagttatctatgagcgcatatctcttacagagtgtattttgttttcattaaggtatctctgtgtatctacactggactaatttcatagggatctgattctatgtgatccactgtagaaagctactgattacttctgcagtaacagcagctctaattagcatcagatgaccaaagcggaaatgggagtttcagcgctaacaagggcagccttcattgaagaatgcatgggtaggcaatatataaattacattttgaaaagcctcatctgtcaccaacaaatatctcatttttcttcagtgataaaagcatattcaagttaccagctcctcaatttgaaaatcagttgctgattaaataaatagggggaagcatcttgttcagggacaacacgttagagagattcttatcaaagcaagccaagcaaggtttccgccattcagtgtgatcttagtttgacacggtgaccctaaaacaccatcatttgccccagaactggagcacaataagttaaatcatttacctgtctcacttcttcttggcgtgcttaaaagcaaaaatgattcgctacttcctgtccttcagtccgggcatttggggtgccactgaagacaggggttatctgctgaggtttgggtgtcttgcaggaagtatctcattgcagttgattttgatgaaaccaaacagtaactagggtccatgcagaccgtgactccctgattacatctagccatgccctacttatttcagagagaaagagagggggaataaaggcagtattgccacactgattagaagcacattcattccactttgatgttgaatatttttgaccgatacatgcttgagtatctttttaatagagcacatgaaggaagaagcacacaatatagagaaggaattgagaatgccaattacatatttatttttccatacctgatttttttcaagtctgtaataaaaaaagtataagttgagattaacataggttatttttcatgaagtatagcaaacgatctagaatgtgataggagtgtggtttccatttctttttttttttttttaacagacttttgtgctgtagtaagaatgtcttagaagttgtgtcttcgagttcctcaaacaccggacagggctcccccagagctgcctcagcctttgatttggtccatattcagacacttcctgtcttgcatacactctgaggatgggccgcttctagctgccgcccgtctccctcttgccttcttgtctctaaatcagacactcccaagcactccatctgctatactaggagagtgggagagccaaagcattttggagtccatgtaaagtgcctgggaaaagagatgtaagagcagtgggagtttatataattagcgaattcttttctcagaattcagcggaaatgtatttctgttgttattatttacaaaattgtggcctcagaggagctgtcttttggaaaataagttttcattcatgcagttagttagacatgcacgatgtacttgaatcaataaactgtggaccagaaaagggctgcttaaatgaattcacgtgttctaattctctttcgaggctgttgatgacctcctggattcatacccccatgatctgtcttgctcttgcctctgttctttgataaagcacatcagactatgtgacacccatcttttcaagaacgacctaaaagcaatgacaacaggcaggagagaattaccactggcctgggcacagtgacagcagaaggcccacctgagcttggagagttggcgagataaggcaaaatcaaggtgcaacagtgggccatgttccaagggtgaatggatctgagagtccgctgatgttccttactgatcagaacagggaccttctaacgaaacagccagagttccttgaatcaggcagaagttctttagagacaggaagccagagctattgataatatccgaacgacagaggaaggaatttcttattagaaattctaaaataaaacaagtggggatttggttggatacccttagaagctacatttttctctcatccctaagatagatatctcaagtgtatatctgacacctcttggctttgacacggctctgcttctcaagtgaccatttgttttaagtctgttgtctagaattctttgtgggggctggacctctgaaaaagattctcactgcagaggctttaaatctgtgtttttttccactccctccgtcctgggatgtattcggtaggacatttcatttatatcaggatattggctgattcagctctctttcatcgttattattcaggcctccctccaccaccttgttctttattgcctaagtattgccctccccaattcttcatcgtaatagctctaaatttagtttgacccaaattaatttttgttccaacagatatattttaagacagagaagcctctctcaggagccagatgatctgaagatgatgctaatccccaaatacgaagttcctccagctaactctcctctgagctccctcttcttagctttgggattggggatggtctcatccttgccaggaatccctttgttgctcccagtgtctctgatgagcttctcctccctcccagagacaatgcaggggtggttttcagcagaatgtgccacctgcacttctgattgttctgagacccagcccagaggggtggagaaggcgcacaaaccctattccaataaactgcctgcagagaaccacagcctgctaatagtcgttgaggtctcagccccctaaggtctccaagctcatttgaccagcgcagctgcgacttcggctgtctgcctctggcaggtgccaatatcagcatcttgtcccactgccatggggagttaatttttgctccagggcagctgccaagcccagcaccggcatcaatagaaggttttctctgattttcttctcttcctctcaggctaggctttcttaccaatccccaattttcttctgtagggcgccaggagactggccagagatctttagactcttacttagtttgaacatctcttgctgctcacacccaggcttcttcagcagaaagcatgacccatagtaggtactcagaaactggttgaatgaaaagccttgacatttaagggctttattctgtcatacggtagcaagaactggcctattggcatcgtattcctggcattgagctgtattgaccctgaatgtgtcctcctgaggtttttgagggtgacctaggagaaagggtctgaaaaagcactgggatccaagtgactttaaatctgcccgtggcatttcctgctgagaggcgagaaactagcatctctcccaacaggctcacatccgccaggaaggacagagcccaaaacgggggtagactttgtgggaaattcgccagttagtccgctgagattttaatctgcctcaagcacaggatgctgacaagaaaggtagaccactcccccgatcccagacaaaccccaggggtgacaacttctccatcagtatcctgagaagcaacatcaaatgcttaccaagtcagcacgtttactgagtgagtactctgacggaataaaccagcatttggagctgaacttgagaacacagggccctctgacagcagcttagggaaacacccatcccttccagattggcagaatccttccatttcatgtccttcggagacgctgtattctctttacaaatcattcatgaaactgagactcagtctcccaggggtaagtcctgggccacgtgcaaacaatggcaaatccagctcttccatgatagagaaggcaaacacacccaccttcatcctgagcctaaaaggccacctctgagcacttgggcagccactcctctgggcctcagagggccatgagcttggccaggtaggcacagcggcggggaagtcacagctgtcaggtaccggccatggtgcaggtgggaataggagatgccagagctgctttagctgaggaaagcaaacagtcagcagtgctcaaaggagcaaaacttcgaatgtgcacattgacccctgacacctgcaagcataacacagatcctaagactagagtgaagtaggaagaagaattagaaaatccagtggatgtcctgagtatagggaaccagggccgttgaaaatcagtaaaggttgattacctggggcgagaccgggtgactgtggcagtgcaggtgaaggtaccctggaccttctcagttcgctggcacataaggctccgccaataaagcgtggttctctctgtcacacacacacacacacacacacacacacacacacacacacacacacacacaatgattggagggctatatgatccagcattagcttcctggtgtgccaagcatgcttgatcgggaatttttttttattattattattttttagctgtagctgaaggcatttctcggatgtggagaggagaatggaaatcgcagaaccaaatcagtttgccctgccatatttggctgtggtctgtcattgggcatttctgatgtgcttttctggattcaggaagagctgattgtcctccgagggttgaaaaaaaaaaaacagtttcagaaacctgaatccagggccttatagttctcctcattatctatcttcttctcccttccctcgcccaagggagtgggggaaacacttttcactgcagagtttgctttaaagttttcccatcttgcgtgcattatcccttgatattaaaattattttctcagtttaatccaactcctgctgagaagctgtgtgagatttaggctgtggggtttttttcttgtactcttttggatggtgttgcatttttcactcttaacccgagggtgtgtttcagcttatgttcgttctgtttcatgcaggtttatagcacggtagagtagaaggcggcttctgatttttagggtatttttagaattcattcctgagtgaggggttcagacacccagtctcctcggaacaggggtgaggggtcgactgagctttgttgagaagcctccagttaggcttcgggcgggtctccatgttatattgtgtgtttactgagcttcccactggtagaagatgacacatttgtccatcgtcctgtgtatctgctttccagaggacaccggagcattctcctggggtcactcccacatggctgcctcacatagctgttttgcaacagcctttattgccaacacccttggaagaacatctcctgtagaagtacaagttttgcaatatggactttggaagtggttttgtgatgttcgaattttctgttagcctattgctcaagcactacagaatgtacatagtccctttggccatcctctcaccccagaatatcctaataaacattgttttctttttt

SEQ ID NO: 136729 - DNA, 3558 bp, Homo sapiens
  Payload ID: 6772
  Gene Symbol: GFRA2
  Gene Name: GDNF family receptor alpha 2
  ENST ID: ENST00000306793
  CDS Start-End: 661-849
ggagagagaaagacacacgcacgcagagacacacggtcactggaattccattagaaaaaagtgagccgagcaagggttagcgggagaagatttttttgaatcttgtcttcgtcttggtgcgaaagaagcgactccagtctctcgtcctcgaagctccgactggattgttcttgggcgctgacacccgtctgtggatttcttttctatttgcattttattccgaccccctccctcgccgcttccttccagcccttcactcgcaaatcgcctctctccccacctccccaggcccctcctgggaagcgcaggggaattggacccgcggggactcacgccttcccggacgattggaggggagggctgaccccaggactgggctgttggcttagaaagccgatacacagatacgcgtatatttgattgtagcgggcaaggggggcgtcgagaggcagcagcccatcgcccgcctctcaccccaccccctccagccagaggcgagaatcgcaggactcgggatcttcatcgggtggactagctgggatctccgcattggatttggggctgattaccactgcttgcctattattattgttgttgttactactattatttttttttacccaagggagaaagacaaaaaaacggtgggatttatttaacatgatcttggcaaacgtcttctgcctcttcttctttctaggcccagggccgctgctgaggaggaatggagtgcaaagggagaaaacttgctcctacatccaggggaggatgatgcctgagttctccctggggtatgaggagggctgtcccacagagtcgccttggtgtgctttggcgaaatgggtgtgacgttcccagcagggcccaagcccccaggcctgcatcttgggtgggagattgtggcggccgtcattcatgcttgtcttccctccccaccacccagacgagaccctccgctctttggccagcccttcctccctgcagggccccgagctccacggctggcgccccccagtggactgtgtccgggccaatgagctgtgtgccgccgaatccaactgcagctctcgctaccgcactctgcggcagtgcctggcaggccgcgaccgcaacaccatgctggccaacaaggagtgccaggcggccttggaggtcttgcaggagagcccgctgtacgactgccgctgcaagcggggcatgaagaaggagctgcagtgtctgcagatctactggagcatccacctggggctgaccgagggtgaggagttctacgaagcctccccctatgagccggtgacctcccgcctctcggacatcttcaggcttgcttcaatcttctcagggacaggggcagacccggtggtcagcgccaagagcaaccattgcctggatgctgccaaggcctgcaacctgaatgacaactgcaagaagctgcgctcctcctacatctccatctgcaaccgcgagatctcgcccaccgagcgctgcaaccgccgcaagtgccacaaggccctgcgccagttcttcgaccgggtgcccagcgagtacacctaccgcatgctcttctgctcctgccaagaccaggcgtgcgctgagcgccgccggcaaaccatcctgcccagctgctcctatgaggacaaggagaagcccaactgcctggacctgcgtggcgtgtgccggactgaccacctgtgtcggtcccggctggccgacttccatgccaattgtcgagcctcctaccagacggtcaccagctgccctgcggacaattaccaggcgtgtctgggctcttatgctggcatgattgggtttgacatgacacctaactatgtggactccagccccactggcatcgtggtgtccccctggtgcagctgtcgtggcagcgggaacatggaggaggagtgtgagaagttcctcagggacttcaccgagaacccatgcctccggaacgccatccaggcctttggcaacggcacggacgtgaacgtgtccccaaaaggcccctcgttccaggccacccaggcccctcgggtggagaagacgccttctttgccagatgacctcagtgacagtaccagcttggggaccagtgtcatcaccacctgcacgtctgtccaggagcaggggctgaaggccaacaactccaaagagttaagcatgtgcttcacagagctcacgacaaatatcatcccagggagtaacaaggtgatcaaacctaactcaggccccagcagagccagaccgtcggctgccttgaccgtgctgtctgtcctgatgctgaaactggccttgtaggctgtgggaaccgagtcagaatatttttgaaagctacgcagacaagaacagccgcctgacgaaatggaaacacacacagacacacacacaccttgcaaaaaaaaaattgtttttcccaccttgtcgctgaacctgtctcctcccaggtttcttctctggagaagtttttgtaaaccaaacagacaagcaggcaggcagcctgagagctggcccaggggtcccctggcaggggaaactctggtgccggggagggcacgaggctctagaaatgcccttcactttctcctggtgtttttctctctggacccttctgaagcagagaccggacaagagcctgcagcggaagggactctgggctgtgcctgaggctggctgggggcaggacaacacagctgcttccccaggctgcccactctggggacccgctgggggctggcagagggcatcggtcagcggggcagcggggctggccatgagggtccaccttcagccctttggcttcaaggatggagatggttttgccctccctctctgccctcgggtggggctggtgggtctgcagctggtgtgggaacttccccacggatggcggtggagggggttcgcaccgtgctgggctccccctgactgtagcacggagtgttggggctgggggccagctccaggagggcttgagagctcagcctgcctgggagagcccttgtggcgaggcattaaaacttgggcaccagcttctttctcggtggcagaaattttgaagtcagagagaaacggtcctttgttggcttctttgctttctcgtgggtcctttggcaggcctccctttggggagagggaggggagagaccacagccgggtgtgtgtctgcagcaccgtgggccctcaagctttcctgctgtcttctccctcctcctcctttcccctttctctttcctcatttcctagacgtacgtcaactgtatgtacataccggggctcctctcctaacatatatgtatatacacatccatatacatatattgtgtggtttcccctttctttcctttttttaagcaacaaaactatggaaataataccccaacagatgagcgaaaatgtattattgtaaagtttattttttttaatactgttgtctataatggggaaaaaggacattggccccgcagtgccctgccccagtcagcctggctgggctctggtgggggctcctgatccgcatccaagcttaaccaaggctccaataaacgtgctaggaagcaa

SEQ ID NO: 136730 - DNA, 4921 bp, Homo sapiens
  Payload ID: 6772
  Gene Symbol: GFRA2
  Gene Name: GDNF family receptor alpha 2
  Uniprot ID: O00451
  ENST ID: ENST00000524240
  CDS Start-End: 652-2046
aagacacacgcacgcagagacacacggtcactggaattccattagaaaaaagtgagccgagcaagggttagcgggagaagatttttttgaatcttgtcttcgtcttggtgcgaaagaagcgactccagtctctcgtcctcgaagctccgactggattgttcttgggcgctgacacccgtctgtggatttcttttctatttgcattttattccgaccccctccctcgccgcttccttccagcccttcactcgcaaatcgcctctctccccacctccccaggcccctcctgggaagcgcaggggaattggacccgcggggactcacgccttcccggacgattggaggggagggctgaccccaggactgggctgttggcttagaaagccgatacacagatacgcgtatatttgattgtagcgggcaaggggggcgtcgagaggcagcagcccatcgcccgcctctcaccccaccccctccagccagaggcgagaatcgcaggactcgggatcttcatcgggtggactagctgggatctccgcattggatttggggctgattaccactgcttgcctattattattgttgttgttactactattatttttttttacccaagggagaaagacaaaaaaacggtgggatttatttaacatgatcttggcaaacgtcttctgcctcttcttctttctagacgagaccctccgctctttggccagcccttcctccctgcagggccccgagctccacggctggcgccccccagtggactgtgtccgggccaatgagctgtgtgccgccgaatccaactgcagctctcgctaccgcactctgcggcagtgcctggcaggccgcgaccgcaacaccatgctggccaacaaggagtgccaggcggccttggaggtcttgcaggagagcccgctgtacgactgccgctgcaagcggggcatgaagaaggagctgcagtgtctgcagatctactggagcatccacctggggctgaccgagggtgaggagttctacgaagcctccccctatgagccggtgacctcccgcctctcggacatcttcaggcttgcttcaatcttctcagggacaggggcagacccggtggtcagcgccaagagcaaccattgcctggatgctgccaaggcctgcaacctgaatgacaactgcaagaagctgcgctcctcctacatctccatctgcaaccgcgagatctcgcccaccgagcgctgcaaccgccgcaagtgccacaaggccctgcgccagttcttcgaccgggtgcccagcgagtacacctaccgcatgctcttctgctcctgccaagaccaggcgtgcgctgagcgccgccggcaaaccatcctgcccagctgctcctatgaggacaaggagaagcccaactgcctggacctgcgtggcgtgtgccggactgaccacctgtgtcggtcccggctggccgacttccatgccaattgtcgagcctcctaccagacggtcaccagctgccctgcggacaattaccaggcgtgtctgggctcttatgctggcatgattgggtttgacatgacacctaactatgtggactccagccccactggcatcgtggtgtccccctggtgcagctgtcgtggcagcgggaacatggaggaggagtgtgagaagttcctcagggacttcaccgagaacccatgcctccggaacgccatccaggcctttggcaacggcacggacgtgaacgtgtccccaaaaggcccctcgttccaggccacccaggcccctcgggtggagaagacgccttctttgccagatgacctcagtgacagtaccagcttggggaccagtgtcatcaccacctgcacgtctgtccaggagcaggggctgaaggccaacaactccaaagagttaagcatgtgcttcacagagctcacgacaaatatcatcccagggagtaacaaggtgatcaaacctaactcaggccccagcagagccagaccgtcggctgccttgaccgtgctgtctgtcctgatgctgaaactggccttgtaggctgtgggaaccgagtcagaatatttttgaaagctacgcagacaagaacagccgcctgacgaaatggaaacacacacagacacacacacaccttgcaaaaaaaaaattgtttttcccaccttgtcgctgaacctgtctcctcccaggtttcttctctggagaagtttttgtaaaccaaacagacaagcaggcaggcagcctgagagctggcccaggggtcccctggcaggggaaactctggtgccggggagggcacgaggctctagaaatgcccttcactttctcctggtgtttttctctctggacccttctgaagcagagaccggacaagagcctgcagcggaagggactctgggctgtgcctgaggctggctgggggcaggacaacacagctgcttccccaggctgcccactctggggacccgctgggggctggcagagggcatcggtcagcggggcagcggggctggccatgagggtccaccttcagccctttggcttcaaggatggagatggttttgccctccctctctgccctcgggtggggctggtgggtctgcagctggtgtgggaacttccccacggatggcggtggagggggttcgcaccgtgctgggctccccctgactgtagcacggagtgttggggctgggggccagctccaggagggcttgagagctcagcctgcctgggagagcccttgtggcgaggcattaaaacttgggcaccagcttctttctcggtggcagaaattttgaagtcagagagaaacggtcctttgttggcttctttgctttctcgtgggtcctttggcaggcctccctttggggagagggaggggagagaccacagccgggtgtgtgtctgcagcaccgtgggccctcaagctttcctgctgtcttctccctcctcctcctttcccctttctctttcctcatttcctagacgtacgtcaactgtatgtacataccggggctcctctcctaacatatatgtatatacacatccatatacatatattgtgtggtttcccctttctttcctttttttaagcaacaaaactatggaaataataccccaacagatgagcgaaaatgtattattgtaaagtttattttttttaatactgttgtctataatggggaaaaaggacattggccccgcagtgccctgccccagtcagcctggctgggctctggtgggggctcctgatccgcatccaagcttaaccaaggctccaataaacgtgctaggaagcaagctgcctctgcctcggtcccgtggggttttgcccccattttgttcttggtccagtgttacctgcgtaagtggagctcccagtgggctggggaaatgtgtgtccgtgtgtgtgcctgtgtgcatgtgtgtgcatccatgtgtctcacccatgtgtccacattgtgtgtagatggagctctcttaggagctggtttgacactgggggcgggatctgagggtccacgctgtgctgagcctggtgggctgttctgttccctctttgctcacttctccagttggcgcaaatgcctgtggctcccaggctggaagagaatgcagtggacgtggacgtggtggggagccacagcttggcatcacacgttgggaatgttttattgtcaggctgtctgggtggccctgttagtcttacatagagcaaagtggtatgtccctctgggactcctggcttatttgagatgtgtgattgtgagtgcagtgacctggccttttgggtcccaccagagaagaaggacatgactgtgcatgttctggggtcatggtctgaaagcataagtattttttgggtctccctctattccttcctttcctgtttctccatttgctacccaggccccacttggacactaggcctgccatagtctccaagagagattctccccagagaggaccaggagaatgcctgctggccaagtgtgtgtgtgtccatgtatgtgagcatgtgtacatgtgtgtgcggtcgtgtgcaggctcgcacatgttcacgtgcacgtgtgaatatatacccatggcaggagggagaatggaagactggtaggcgagaagatgtttctactgtcagcctggccttcagggctgcatgtgagcccatcccatttcaactggacaataggatgcagttttcccatctcccaatcgcaggtcccctcaatggcttttgcttctggttgtatatgtgtgagcagcatccgttcacagcgtttatcactgtggtgtattgccttccagcctctgcatggaaggggtacagtgagccagccaggtctctgtccagccattgcgggtagacgtggtcatggcatccacttaggaatccgtgttctttgcaaacagcaaagaccatttaacttaaaaagtactttactggaaggctatgggagaaggtggctcacggaatttgtgggaggtggggggaccaggggaggcgagggcagggactggagggcatctgaggggctggaaggcaggatgtacagggtcagcattctgctgccaaccattgcccatctggctgaactgggccttgtgcctgccctctgccatacttgagtgtgagagagaggatatatatgtcatgtctggtatccctaataggaggtaagcccttaggctacatcatgggggagagaaaatttcccaagaggaaactgaggtgccattatgaaggaggagtggatactagctagctttactctgccctcaaatgtctccctatccaagtatcacatggctgaaattttaccattaggtattcattcctttggttgagatgattcctatttgtgattctctcaaaatatgcaaatcgaactagaagaataaattgttgctatcttaa

SEQ ID NO: 136731 - DNA, 872 bp, Homo sapiens
  Payload ID: 6772
  Gene Symbol: GFRA2
  Gene Name: GDNF family receptor alpha 2
  ENST ID: ENST00000522071
  CDS Start-End: 79-872
gccgtagccgggggagccagtcagtttccggccaaggcagcagggagaaagacaaaaaaacggtgggatttatttaacatgatcttggcaaacgtcttctgcctcttcttctttctagacgagaccctccgctctttggccagcccttcctccctgcagggccccgagctccacggctggcgccccccagtggactgtgtccgggccaatgagctgtgtgccgccgaatccaactgcagctctcgctaccgcactctgcggcagtgcctggcaggccgcgaccgcaacaccatgctggccaacaaggagtgccaggcggccttggaggtcttgcaggagagcccgctgtacgactgccgctgcaagcggggcatgaagaaggagctgcagtgtctgcagatctactggagcatccacctggggctgaccgagggtgaggagttctacgaagcctccccctatgagccggtgacctcccgcctctcggacatcttcaggcttgcttcaatcttctcagggacaggggcagacccggtggtcagcgccaagagcaaccattgcctggatgctgccaaggcctgcaacctgaatgacaactgcaagaagctgcgctcctcctacatctccatctgcaaccgcgagatctcgcccaccgagcgctgcaaccgccgcaagtgccacaaggccctgcgccagttcttcgaccgggtgcccagcgagtacacctaccgcatgctcttctgctcctgccaagaccaggcgtgcgctgagcgccgccggcaaaccatcctgcccagctgctcctatgaggacaaggagaagcccaactgcctggacctgcgtggcgtgtgccggactgaccacctgtgtcg

SEQ ID NO: 136732 - DNA, 1503 bp, Homo sapiens
  Payload ID: 6772
  Gene Symbol: GFRA2
  Gene Name: GDNF family receptor alpha 2
  Uniprot ID: O00451
  ENST ID: ENST00000518077
  CDS Start-End: 165-1160
gagaatcgcaggactcgggatcttcatcgggtggactagctgggatctccgcattggatttggggctgattaccactgcttgcctattattattgttgttgttactactattatttttttttacccaagggagaaagacaaaaaaacggtgggatttatttaacatgatcttggcaaacgtcttctgcctcttcttctttctagggacaggggcagacccggtggtcagcgccaagagcaaccattgcctggatgctgccaaggcctgcaacctgaatgacaactgcaagaagctgcgctcctcctacatctccatctgcaaccgcgagatctcgcccaccgagcgctgcaaccgccgcaagtgccacaaggccctgcgccagttcttcgaccgggtgcccagcgagtacacctaccgcatgctcttctgctcctgccaagaccaggcgtgcgctgagcgccgccggcaaaccatcctgcccagctgctcctatgaggacaaggagaagcccaactgcctggacctgcgtggcgtgtgccggactgaccacctgtgtcggtcccggctggccgacttccatgccaattgtcgagcctcctaccagacggtcaccagctgccctgcggacaattaccaggcgtgtctgggctcttatgctggcatgattgggtttgacatgacacctaactatgtggactccagccccactggcatcgtggtgtccccctggtgcagctgtcgtggcagcgggaacatggaggaggagtgtgagaagttcctcagggacttcaccgagaacccatgcctccggaacgccatccaggcctttggcaacggcacggacgtgaacgtgtccccaaaaggcccctcgttccaggccacccaggcccctcgggtggagaagacgccttctttgccagatgacctcagtgacagtaccagcttggggaccagtgtcatcaccacctgcacgtctgtccaggagcaggggctgaaggccaacaactccaaagagttaagcatgtgcttcacagagctcacgacaaatatcatcccagggagtaacaaggtgatcaaacctaactcaggccccagcagagccagaccgtcggctgccttgaccgtgctgtctgtcctgatgctgaaactggccttgtaggctgtgggaaccgagtcagaatatttttgaaagctacgcagacaagaacagccgcctgacgaaatggaaacacacacagacacacacacaccttgcaaaaaaaaaattgtttttcccaccttgtcgctgaacctgtctcctcccaggtttcttctctggagaagtttttgtaaaccaaacagacaagcaggcaggcagcctgagagctggcccaggggtcccctggcaggggaaactctggtgccggggagggcacgaggctctagaaatgcccttcactttctcctggtgtttttctctctggacccttctgaagcagagaccggacaagagcctgcagcgg

SEQ ID NO: 136733 - DNA, 2104 bp, Homo sapiens
  Payload ID: 6772
  Gene Symbol: GFRA2
  Gene Name: GDNF family receptor alpha 2
  Uniprot ID: O00451
  ENST ID: ENST00000517328
  CDS Start-End: 275-1669
gggagtggagccagcagctgagaccccggcaagggcaaccatggatctggagttggaacgggacaatgcgccatcaggccggcagaagctggcagatgagggccgagttgcggcacacaggtgccagatctccaaatagaggaaattggaaagaaaaagataaagctaatctgtaatttcatcacccggagacaactgctgttgacattgcattgtgtgtctaaggaggactttgacagggagaaagacaaaaaaacggtgggatttatttaacatgatcttggcaaacgtcttctgcctcttcttctttctagacgagaccctccgctctttggccagcccttcctccctgcagggccccgagctccacggctggcgccccccagtggactgtgtccgggccaatgagctgtgtgccgccgaatccaactgcagctctcgctaccgcactctgcggcagtgcctggcaggccgcgaccgcaacaccatgctggccaacaaggagtgccaggcggccttggaggtcttgcaggagagcccgctgtacgactgccgctgcaagcggggcatgaagaaggagctgcagtgtctgcagatctactggagcatccacctggggctgaccgagggtgaggagttctacgaagcctccccctatgagccggtgacctcccgcctctcggacatcttcaggcttgcttcaatcttctcagggacaggggcagacccggtggtcagcgccaagagcaaccattgcctggatgctgccaaggcctgcaacctgaatgacaactgcaagaagctgcgctcctcctacatctccatctgcaaccgcgagatctcgcccaccgagcgctgcaaccgccgcaagtgccacaaggccctgcgccagttcttcgaccgggtgcccagcgagtacacctaccgcatgctcttctgctcctgccaagaccaggcgtgcgctgagcgccgccggcaaaccatcctgcccagctgctcctatgaggacaaggagaagcccaactgcctggacctgcgtggcgtgtgccggactgaccacctgtgtcggtcccggctggccgacttccatgccaattgtcgagcctcctaccagacggtcaccagctgccctgcggacaattaccaggcgtgtctgggctcttatgctggcatgattgggtttgacatgacacctaactatgtggactccagccccactggcatcgtggtgtccccctggtgcagctgtcgtggcagcgggaacatggaggaggagtgtgagaagttcctcagggacttcaccgagaacccatgcctccggaacgccatccaggcctttggcaacggcacggacgtgaacgtgtccccaaaaggcccctcgttccaggccacccaggcccctcgggtggagaagacgccttctttgccagatgacctcagtgacagtaccagcttggggaccagtgtcatcaccacctgcacgtctgtccaggagcaggggctgaaggccaacaactccaaagagttaagcatgtgcttcacagagctcacgacaaatatcatcccagggagtaacaaggtgatcaaacctaactcaggccccagcagagccagaccgtcggctgccttgaccgtgctgtctgtcctgatgctgaaactggccttgtaggctgtgggaaccgagtcagaatatttttgaaagctacgcagacaagaacagccgcctgacgaaatggaaacacacacagacacacacacaccttgcaaaaaaaaaattgtttttcccaccttgtcgctgaacctgtctcctcccaggtttcttctctggagaagtttttgtaaaccaaacagacaagcaggcaggcagcctgagagctggcccaggggtcccctggcaggggaaactctggtgccggggagggcacgaggctctagaaatgcccttcactttctcctggtgtttttctctctggacccttctgaagcagagaccggacaagagcctgcagcggaagggactctgggctgtgcctgaggctggctgggggcaggacaacacagctgcttccccaggctgcccactctggggacccgctgggggctg

SEQ ID NO: 136734 - DNA, 1176 bp, Homo sapiens
  Payload ID: 6772
  Gene Symbol: GFRA2
  Gene Name: GDNF family receptor alpha 2
  Uniprot ID: O00451
  ENST ID: ENST00000517892
  CDS Start-End: 1-1080
atgatcttggcaaacgtcttctgcctcttcttctttctaggtgaggagttctacgaagcctccccctatgagccggtgacctcccgcctctcggacatcttcaggcttgcttcaatcttctcagggacaggggcagacccggtggtcagcgccaagagcaaccattgcctggatgctgccaaggcctgcaacctgaatgacaactgcaagaagctgcgctcctcctacatctccatctgcaaccgcgagatctcgcccaccgagcgctgcaaccgccgcaagtgccacaaggccctgcgccagttcttcgaccgggtgcccagcgagtacacctaccgcatgctcttctgctcctgccaagaccaggcgtgcgctgagcgccgccggcaaaccatcctgcccagctgctcctatgaggacaaggagaagcccaactgcctggacctgcgtggcgtgtgccggactgaccacctgtgtcggtcccggctggccgacttccatgccaattgtcgagcctcctaccagacggtcaccagctgccctgcggacaattaccaggcgtgtctgggctcttatgctggcatgattgggtttgacatgacacctaactatgtggactccagccccactggcatcgtggtgtccccctggtgcagctgtcgtggcagcgggaacatggaggaggagtgtgagaagttcctcagggacttcaccgagaacccatgcctccggaacgccatccaggcctttggcaacggcacggacgtgaacgtgtccccaaaaggcccctcgttccaggccacccaggcccctcgggtggagaagacgccttctttgccagatgacctcagtgacagtaccagcttggggaccagtgtcatcaccacctgcacgtctgtccaggagcaggggctgaaggccaacaactccaaagagttaagcatgtgcttcacagagctcacgacaaatatcatcccagggagtaacaaggtgatcaaacctaactcaggccccagcagagccagaccgtcggctgccttgaccgtgctgtctgtcctgatgctgaaactggccttgtaggctgtgggaaccgagtcagaatatttttgaaagctacgcagacaagaacagccgcctgacgaaatggaaacacacacagacacacacacaccttgc

SEQ ID NO: 136735 - DNA, 546 bp, Homo sapiens
  Payload ID: 6772
  Gene Symbol: GFRA2
  Gene Name: GDNF family receptor alpha 2
  ENST ID: ENST00000519195
  CDS Start-End: 325-546
gtcactggaattccattagaaaaaagtgagccgagcaagggttagcgggagaagatttttttgaatcttgtcttcgtcttggtgcgaaagaagcgactccagtctctcgtcctcgaagctccgactggattgttcttgggcgctgacacccacgagaccctccgctctttggccagcccttcctccctgcagggccccgagctccacggctggcgccccccagtggactgtgtccgggccaatgagctgtgtgccgccgaatccaactgcagctctcgctaccgcactctgcggcagtgcctggcaggccgcgaccgcaacaccatgctggccaacaaggagtgccaggcggccttggaggtcttgcaggagagcccgctgtacgactgccgctgcaagcggggcatgaagaaggagctgcagtgtctgcagatctactggagcatccacctggggctgaccgagggtgaggagttctacgaagcctccccctatgagccggtgacctcccgcctctcggacatcttcaggcttgcttcaatcttc

SEQ ID NO: 136736 - DNA, 2039 bp, Homo sapiens
  Payload ID: 6773
  Gene Symbol: GFRA3
  Gene Name: GDNF family receptor alpha 3
  Uniprot ID: O60609
  ENST ID: ENST00000274721
  CDS Start-End: 248-1450
gcggctcccggggcgccggccctcccccgcccccacccccgcggtccctcggaccagcgctggaggcgcgtggtgtggacgcgcgcttcggagttggagggcggcgcccaggaccctggtgggagagtgtgtgcgtcgcgctggagggcgggaggcgggggcgggaggtgccggtcgagggagccccgctctcagagctccaggggaggagcgaggggagcgcggagcccggcgcctacagctcgccatggtgcgccccctgaacccgcgaccgctgccgcccgtagtcctgatgttgctgctgctgctgccgccgtcgccgctgcctctcgcagccggagacccccttcccacagaaagccgactcatgaacagctgtctccaggccaggaggaagtgccaggctgatcccacctgcagtgctgcctaccaccacctggattcctgcacctctagcataagcaccccactgccctcagaggagccttcggtccctgctgactgcctggaggcagcacagcaactcaggaacagctctctgataggctgcatgtgccaccggcgcatgaagaaccaggttgcctgcttggacatctattggaccgttcaccgtgcccgcagccttggtaactatgagctggatgtctccccctatgaagacacagtgaccagcaaaccctggaaaatgaatctcagcaaactgaacatgctcaaaccagactcagacctctgcctcaagtttgccatgctgtgtactctcaatgacaagtgtgaccggctgcgcaaggcctacggggaggcgtgctccgggccccactgccagcgccacgtctgcctcaggcagctgctcactttcttcgagaaggccgccgagccccacgcgcagggcctgctactgtgcccatgtgcccccaacgaccggggctgcggggagcgccggcgcaacaccatcgcccccaactgcgcgctgccgcctgtggcccccaactgcctggagctgcggcgcctctgcttctccgacccgctttgcagatcacgcctggtggatttccagacccactgccatcccatggacatcctaggaacttgtgcaacagagcagtccagatgtctacgagcatacctggggctgattgggactgccatgacccccaactttgtcagcaatgtcaacaccagtgttgccttaagctgcacctgccgaggcagtggcaacctgcaggaggagtgtgaaatgctggaagggttcttctcccacaacccctgcctcacggaggccattgcagctaagatgcgttttcacagccaactcttctcccaggactggccacaccctacctttgctgtgatggcacaccagaatgaaaaccctgctgtgaggccacagccctgggtgccctctcttttctcctgcacgcttcccttgattctgctcctgagcctatggtagctggacttccccagggccctcttcccctccaccacacccaggtggacttgcagcccacaaggggtgaggaaaggacagcagcaggaaggaggtgcagtgcgcagatgagggcacaggagaagctaagggttatgacctccagatccttactggtccagtcctcattccctccaccccatctccacttctgattcatgctgcccctccttggtggccacaatttagccatgtcatctggtggtgaccagctccaccaagcccctttctgagcccttcctcttgactaccaggatcaccagaatctaataagttagccattctctattgcattccagattagggttagggtagggaggactgggtgttctgaggcagcctagaaagtcattctcctttgtgaagaaggctcctgccccctcgtctcctcctctgagtggaggatggaaaactactgcctgcactgccctgtccccggatcctgccgaacatctgggcatcaggagctggagcctgtgggccttgctttattcctattattgtcctaaagtctctctgggctcttggatcatgattaaacctttgacttaag

SEQ ID NO: 136737 - DNA, 1837 bp, Homo sapiens
  Payload ID: 6773
  Gene Symbol: GFRA3
  Gene Name: GDNF family receptor alpha 3
  Uniprot ID: O60609
  ENST ID: ENST00000378362
  CDS Start-End: 142-1251
cccaggaccctggtgggagagtgtgtgcgtcgcgctggagggcgggaggcgggggcgggaggtgccggtcgagggagccccgctctcagagctccaggggaggagcgaggggagcgcggagcccggcgcctacagctcgccatggtgcgccccctgaacccgcgaccgctgccgcccgtagtcctgatgttgctgctgctgctgccgccgtcgccgctgcctctcgcagccggagacccccttcccacagaaagccgactcatgaacagctgtctccaggccaggaggaagtgccaggctgatcccacctgcagtgctgcctaccaccacctggattcctgcacctctagcataagcaccccactgccctcagaggagccttcggtccctgctgactgcctggaggcagcacagcaactcaggaacagctctctgataggctgcatgtgccaccggcgcatgaagaaccaggttgcctgcttggacatctattggaccgttcaccgtgcccgcagccttgactcagacctctgcctcaagtttgccatgctgtgtactctcaatgacaagtgtgaccggctgcgcaaggcctacggggaggcgtgctccgggccccactgccagcgccacgtctgcctcaggcagctgctcactttcttcgagaaggccgccgagccccacgcgcagggcctgctactgtgcccatgtgcccccaacgaccggggctgcggggagcgccggcgcaacaccatcgcccccaactgcgcgctgccgcctgtggcccccaactgcctggagctgcggcgcctctgcttctccgacccgctttgcagatcacgcctggtggatttccagacccactgccatcccatggacatcctaggaacttgtgcaacagagcagtccagatgtctacgagcatacctggggctgattgggactgccatgacccccaactttgtcagcaatgtcaacaccagtgttgccttaagctgcacctgccgaggcagtggcaacctgcaggaggagtgtgaaatgctggaagggttcttctcccacaacccctgcctcacggaggccattgcagctaagatgcgttttcacagccaactcttctcccaggactggccacaccctacctttgctgtgatggcacaccagaatgaaaaccctgctgtgaggccacagccctgggtgccctctcttttctcctgcacgcttcccttgattctgctcctgagcctatggtagctggacttccccagggccctcttcccctccaccacacccaggtggacttgcagcccacaaggggtgaggaaaggacagcagcaggaaggaggtgcagtgcgcagatgagggcacaggagaagctaagggttatgacctccagatccttactggtccagtcctcattccctccaccccatctccacttctgattcatgctgcccctccttggtggccacaatttagccatgtcatctggtggtgaccagctccaccaagcccctttctgagcccttcctcttgactaccaggatcaccagaatctaataagttagccattctctattgcattccagattagggttagggtagggaggactgggtgttctgaggcagcctagaaagtcattctcctttgtgaagaaggctcctgccccctcgtctcctcctctgagtggaggatggaaaactactgcctgcactgccctgtccccggatcctgccgaacatctgggcatcaggagctggagcctgtgggccttgctttattcctattattgtcctaaagtctctctgggctcttggatcatgattaaacctttgactt

SEQ ID NO: 136738 - DNA, 1427 bp, Homo sapiens
  Payload ID: 6774
  Gene Symbol: GFRA4
  Gene Name: GDNF family receptor alpha 4
  Uniprot ID: Q9GZZ7
  ENST ID: ENST00000290417
  CDS Start-End: 1-810
atggtccgctgcctggggcctgcgctgctgctgctgctgttactggggtcggcgagctcggtcggagggaaccgatgtgtggacgcggccgaagcctgcacggcggacgcgcggtgccagcgtttgcgctccgagtatgtggcgcagtgcctgggccgggctgcgcaggggggctgtccccgcgcccgctgccgccgggccctgcgccgcttcttcgcccgcgggccgcccgcgctcacccacgcactgctcttctgcccgtgcgcgggccccgcgtgcgccgagcgtcggcgccagaccttcgtgccctcctgcgccttttcggggcccggccccgcgccgccctcctgccttgagcccttaaacttctgcgagcgcagccgggtctgcaggcctcgcctcctggcctttcaggtctcgtgcaccccagcgcccagcgcccccgacggctgcctgctggaccagggcgcccgctgcctgcgcgcctacgcgggcctcgtgggcaccgccgtcacccctaactacgtggacaacgtgagcgcgcgcgtggcgccctggtgcgactgcggagccagcgggaaccggcgtgaggactgcgaagccttccgggggctctttaccaggaaccgctgcttggatggtgccattcaggcctttgccagcgggtggcccccagtcctgctggaccagctgaacccccagggagacccggagcacagcctcctgcaggtgtcctccacaggcagggccctggagagacgctccctgctctccatacttcctgtcctggctctcccggccctgctctgattaggacagcgacctcggatagcacagccagctactccaccctgcctgcctgggccgcctctgtggcctactggccccttgagaaggggctggcttaccccccaagccggccctggtgctttcactccgctgccctttgtaggtttggacaccctgtgtgccgtcccctggggcaagggatgtaggctggggcctgactgtaaagcccccgtctccctgtcaggaggcatcttggttgtaagtccctttattcacagaccttgagaccactggggtctcccacaaggtggggtcaggagagggtcacttttgtagctgagacctctctggagacccagatcccctagagcaggtcagagaccatccagaatcccagaattctaggaaattgtatcagcctcccaagcatataaccccctaaggaatccatcggacaagaccccgtctaacactgcatcctcccaactgggcattacccaccattgtagccacctgtgcgccatgaccatgctggcagagtctttcctgttccccatatgctgcttgaggggccccaccctgtgccctgcctggcattggccctgtggccatcttccccctggtttcctgcagctgta

SEQ ID NO: 136739 - DNA, 900 bp, Homo sapiens
  Payload ID: 6774
  Gene Symbol: GFRA4
  Gene Name: GDNF family receptor alpha 4
  Uniprot ID: Q9GZZ7
  ENST ID: ENST00000319242
  CDS Start-End: 1-900
atggtccgctgcctggggcctgcgctgctgctgctgctgttactggggtcggcgagctcggtcggagggaaccgatgtgtggacgcggccgaagcctgcacggcggacgcgcggtgccagcgtttgcgctccgagtatgtggcgcagtgcctgggccgggctgcgcaggggggctgtccccgcgcccgctgccgccgggccctgcgccgcttcttcgcccgcgggccgcccgcgctcacccacgcactgctcttctgcccgtgcgcgggccccgcgtgcgccgagcgtcggcgccagaccttcgtgccctcctgcgccttttcggggcccggccccgcgccgccctcctgccttgagcccttaaacttctgcgagcgcagccgggtctgcaggtgcgcgcgggcggcggcggggccgtggcgagggtggggacggggcctctctccggctcaccgccctcccgccgcgcaggcctcgcctcctggcctttcaggtctcgtgcaccccagcgcccagcgcccccgacggctgcctgctggaccagggcgcccgctgcctgcgcgcctacgcgggcctcgtggggtccccgcaggcaccgccgtcacccctaactacgtggacaacgtgagcgcgcgcgtggcgccctggtgcgactgcggagccagcgggaaccggcgtgaggactgcgaagccttccgggggctctttaccaggaaccgctgcttggatggtgccattcaggcctttgccagcgggtggcccccagtcctgctggaccagctgaacccccagggagacccggagcacagcctcctgcaggtgtcctccacaggcagggccctggagagacgctccctgctctccatacttcctgtcctggctctcccggccctgctctga

SEQ ID NO: 136740 - DNA, 549 bp, Homo sapiens
  Payload ID: 6774
  Gene Symbol: GFRA4
  Gene Name: GDNF family receptor alpha 4
  Uniprot ID: Q9GZZ7
  ENST ID: ENST00000477160
  CDS Start-End: 1-549
atggtccgctgcctggggcctgcgctgctgctgctgctgttactggggtcggcgagctcggtcggagggaaccgatgtgtggacgcggccgaagcctgcacggcggacgcgcggtgccagcgtttgcgctccgagtatgtggcgcagtgcctgggccgggctgcgcaggggggctgtccccgcgcccgctgccgccgggccctgcgccgcttcttcgcccgcgggccgcccgcgctcacccacgcactgctcttctgcccgtgcgcgggccccgcgtgcgccgagcgtcggcgccagaccttcgtgccctcctgcgccttttcggggcccggccccgcgccgccctcctgccttgagcccttaaacttctgcgagcgcagccgggtctgcaggcctcgcctcctggcctttcaggtctcgtgcaccccagcgcccagcgcccccgacggctgcctgctggaccagggcgcccgctgcctgcgcgcctacgcgggcctcgtggggtccccgcaggcaccgccgtcacccctaactacgtggacaacgtga

SEQ ID NO: 136741 - DNA, 1911 bp, Homo sapiens
  Payload ID: 6775
  Gene Symbol: GFRAL
  Gene Name: GDNF family receptor alpha like
  Uniprot ID: Q6UXV0
  ENST ID: ENST00000340465
  CDS Start-End: 87-1271
ttattctggacagttactcttaagaaagttgtcagaagaaacgcatctgcctttttttccaggtgaactgccgtgagttgtccagcatgatagtgtttattttcttggctatggggttaagcttggaaaatgaatacacttcccaaaccaataattgcacatatttaagagagcaatgcttacgtgatgcaaatggatgtaaacatgcttggagagtaatggaagatgcctgcaatgattcagatccaggtgacccctgcaagatgaggaattcatcatactgtaacctgagtatccagtacttagtggaaagcaatttccaatttaaagagtgtctttgcactgatgacttctattgtactgtgaacaaactgcttggaaaaaaatgtatcaataaatcagataacgtgaaagaggataaattcaaatggaatctaactacacgttcccatcatggattcaaagggatgtggtcctgtttggaagtggcagaggcatgtgtaggggatgtggtctgtaatgcacagttggcctcttaccttaaagcttgctcagcaaatggaaatccgtgtgatctgaaacagtgccaagcagccatacggttcttctatcaaaatataccttttaacattgcccagatgttggctttttgtgactgtgctcaatctgatataccttgtcagcagtccaaagaagctcttcacagcaagacatgtgcagtgaacatggttccaccccctacttgcctcagtgtaattcgcagctgccaaaatgatgaattatgcaggaggcactatagaacatttcagtcaaaatgctggcagcgtgtgactagaaagtgccatgaagatgagaattgcattagcaccttaagcaaacaggacctcacttgttcaggaagtgatgactgcaaagctgcttacatagatatccttgggacggtccttcaagtgcaatgtacctgtaggaccattacacaaagtgaggaatctttgtgtaagattttccagcacatgcttcatagaaaatcatgtttcaattatccaaccctgtctaatgtcaaaggcatggcattgtatacaagaaaacatgcaaacaaaatcactttaactggatttcattcccccttcaatggagaagtaatctatgctgccatgtgcatgacagtcacctgtggaatccttctgttggttatggtcaagcttagaacttccagaatatcaagtaaagcaagagatccttcatcgatccaaatacctggagaactctgattcattaggagtcatggacctataacaatcactcttttctctgcttttcttctttcctcttttcttctctcctctcctctcctctcttctcctctcctcccctcccctctctgtttctttttctttttcttttcttttttgtggcggagttttgctcttgttgcccaggctgcagtacaatggctcaatctcggttcactgcaacctctgcctccaaggttcaagtgattttcctgcctcagccttcccgagtagctgggattacaggtacccgccaccacgcccagctaatttttttgtatttttagtagagatggggttttgccaaattggccagggtggtctcaaactcctgacctcaggtgatccacccacctcggcctcccaaagtgctgggattacaggcgtgagcaaccacgtcaagacaacaatcactttctttaaagcaaatcctacagctggtcaacaccctattccatctgtcatcgagaaagaaaatgttaaaatagacttaaaaatattgctttgttacatataataatatggcatgatgatgttatttttttcttaatactcaagaaaaaatatatggtggtatcttttacaacactggaacagaaataaagtttcccttgaaggc

SEQ ID NO: 136742 - DNA, 4835 bp, Homo sapiens
  Payload ID: 6776
  Gene Symbol: GZF1
  Gene Name: GDNF-inducible zinc finger protein 1
  Uniprot ID: Q9H116
  ENST ID: ENST00000338121
  CDS Start-End: 78-2213
gttcctaccggcctggtccagcggacagcggctgcagcgggggcgccggctgggagctgtttttggaaggaagaaagatggaaagcggtgcagttctgctggaatccaaatcctccccatttaacctactgcatgagatgcatgagcttcgcctcctgggtcacctgtgtgacgtgacagtcagcgtggagtatcagggtgtccgcaaagacttcatggcccacaaggcagtgctggctgccaccagcaagttttttaaggaagtgttccttaatgagaagagtgtggatggtactaggactaatgtctacttaaatgaagtgcaggttgctgactttgcttcatttcttgagtttgtctacactgcaaaggtacaggtggaagaagatcgggtgcagcgaatgctggaagtggctgaaaagctgaaatgtttggatttatcagaaacttgttttcaattaaagaaacagatgttagagtcagtacttttggagttgcaaaatttctcagagtctcaggaggtggaggtgagcagtggctcccaagttagtgctgctcctgcccccagggcaagtgtggccaccgatggccctcaccccagtggtctcacggattccttggactacccaggagagagagccagcaatggcatgtcttcagatttgccaccgaagaagtccaaggacaaactagacaagaagaaagaggtagttaaacctccctaccctaaaatcaggagagctagtggaaggctggctgggaggaaggtctttgtggagatccctaaaaagaaatatacgagaagactccgagagcagcagaaaactgctgagggtgatgtgggggactacaggtgtccccaggaccaaagcccggacagggtgggcacggagatggagcaggtttccaaaaatgagggttgccaggcaggtgctgagttggaggaattgtcaaagaaagcagggccggaggaggaagaggaggaggaggaggaggacgaagaaggggagaagaagaagagcaactttaagtgcagcatttgcgagaaggcgtttctgtatgagaagagcttcctgaagcacagcaagcaccgccacggcgtggccaccgaggtggtgtaccgctgcgacacctgcggccagaccttcgccaaccgctgcaacctgaagagccaccagcgccacgtgcacagcagcgagcgccatttcccatgcgagctgtgcgggaagaagttcaagcgcaagaaggacgtgaagcggcacgtgctgcaggtgcatgagggcggcggcgagcggcaccgctgcggccagtgcggcaagggcctgagttccaagacagcgctgcggctgcacgagcgcacacacacgggagaccggccctacggctgcaccgagtgcggcgccaggttctcgcagccgtccgcgctcaagacgcacatgagaattcatacaggggaaaaaccttttgtctgtgatgaatgtggtgcaagattcactcagaaccacatgctgatttatcataaaaggtgtcacacaggtgaaagaccttttatgtgtgaaacatgtggcaagagttttgcttctaaggagtacttaaaacaccacaatagaatccatactggatccaaaccctttaaatgtgaagtatgtttcaggacttttgcccagcggaattcactgtaccagcatattaaagtccacacaggggagcgtccctactgctgtgaccagtgcggcaagcagttcacccagctcaacgccctccagcgccaccgccgcatccacacaggggagaggccattcatgtgcaatgcgtgcggacggacattcaccgacaagtccactcttcggcggcacacctcaatacacgataagaatactccatggaagtctttccttgtcattgtagatggctcgcccaagaacgatgacggacacaagactgaacagcctgacgaagagtatgtgtcatccaagctttcggataaattgctgtcttttgcagaaaatggccatttccacaacctggctgcagtccaagacactgtacctaccatgcaggagaacagttctgctgacacagcctgcaaggcagatgactccgtggtgtcccaggacaccctcctggccaccaccatcagtgagcttagcgagctgaccccacagacagactcgatgcccacacagcttcactctttgagcaacatggaataagagcttcaagcagttcccatcctgttagtctgcgtgtgtggtagctgaactcaagatgatgtggggctaagaaaaataattgtccatgtgcaaagatgtgggcaagaatggcctctgcagattttcctgaacttctgctaacttgcacggctttatcacagcatttttaaagctttccctcaaaaatcctgatctgcatgatctcagctactttattgacaaaaaggcagtgaacataacctcacttaattctggtgtagggtgtatgtgctaatcgttctaattcttgattacctagtttatagataactgctggtcttaattgcagagtacagagaactgaaccagctcctgatattgtagttagcagtcttcctggcttctcactctgccttatatttccatgtgggtttacttctctcataactactttcaaggtatttttcttccaagctgaaataaaactggggccacatattttcagtcatttcttccctgttgaattgaagcaaatcagattttctgtggggaccctcaaatgcaactgaagaaatagattgttgcattcattcctccccaccccccatttgtaggcagtaaacaaagtatgactgacagattgaacacctgcaaaactgctagcgtaatctcagcacatacgcagctaggaagtttgtcataaaatcaacttagaaatgagatgaggctgttcagtttgtcttaaaaaaatcagattaggtaaaagctgtcctaccaaagagtctagcaaaacaatatagtatttttttgcagaggcatgaaaaattaagacgctttagagtacttgaaagttgtgtagtcattttatttgcaaaatgaggtgactgtggcaaattatagaacacagagtattattacttttgccaggtttttctgacttgatttctgtaatttccagaaacccagacttctcatttccacacctagagatggaaacaggcaagtaactgacatgtctatttccttgggagcatgtgagaacatagcagtagggaccaaaagtctcagcacacttacctccgattatgccttaaagagttgattgtgaagaaccagtaactttgtcccaaatgcttctttggctgtttcatgcaggacttaattattgcttttaaaaattcacaatgaaaagacgattctgctgtatttgttaaacgttgacatttggttctagggccttgagtatgtgccacgtgcttgtgaaatgctatgattcacatgtaacatttaaacattaatttaaaaagggaaccttggagaattcttttgttcactagttccttttttctctacatttttaatttattaaacttgctgtgaaaacactttgattttctaagaggaaggtactttaagttccagaatgaacatgtagctgcactatgccagaaattaatgagggaagactttcttcctaagtgcttatgttttaacttatgttagtgaaaccactacaaggtgtttcaggcgctgataacatgcttcacacctgcccttggaggtcacagtactaatttacttcaaatttagttatgacagtgtcactgtatcctagttatgtttacagcacaaataaataatgactgtcatacatccagaggagaccgaacctgcccagctgatgtactgttttatggaataaagtcacttgatcagaaggaattgaaacaatagatcattttgttacctactggagggatttttgtcttgaatttgtttccttagaaattctacaaaaaaatgttgttaataaatgtctgctttgtaaaagcagttttgcaattttttaaagatctatttctgttataatttaggttctgcagaaatatgattcttaattgaaacatataatttgcttaattacgtgaataatgaaatgtaaaatccgggtccataagcctttatttcatacagtcctaggattaagctgtttaactgcttggatcccagttggtctctggcagtgggatcctggagaggagaaatcctggcctctgctcatgcgcaggccacaaccgggctggaagtgcggttgagctctctgccactttcttcaatgtaaaaagtaggcatcaaagatacgacttctactatatacatttctctgtccctgagaacagagaaacgtaaccctgtaggggactggttacagaggacctcctggagcatctgccccattcctccaagtccaagcacagccatgctgagtggaagcgaggccaccatctgagtggattggtcccaagtgtgtaatgaggaaagtggccaggtgccggcacagtgcctctcccagagcctcaagaagggccatttaggagcttgcttcaaccattttccaaccattttctgtgaaatgctgtcagcccaaactccaaagggatgtgcagcctttcgttttaccaaattctttgctgtcgtttggaaaaaatgggccatgtggtggagacctttatttaaggtgatttttacagaaatgtgattttgctgtaggtgattatccaaacaagtaaatttgagtgtataatttaatttttaacctgttaaataaaccttgtccctccaaggagttcatttttgggaaac

SEQ ID NO: 136743 - DNA, 4740 bp, Homo sapiens
  Payload ID: 6776
  Gene Symbol: GZF1
  Gene Name: GDNF-inducible zinc finger protein 1
  Uniprot ID: Q9H116
  ENST ID: ENST00000377051
  CDS Start-End: 1-2136
atggaaagcggtgcagttctgctggaatccaaatcctccccatttaacctactgcatgagatgcatgagcttcgcctcctgggtcacctgtgtgacgtgacagtcagcgtggagtatcagggtgtccgcaaagacttcatggcccacaaggcagtgctggctgccaccagcaagttttttaaggaagtgttccttaatgagaagagtgtggatggtactaggactaatgtctacttaaatgaagtgcaggttgctgactttgcttcatttcttgagtttgtctacactgcaaaggtacaggtggaagaagatcgggtgcagcgaatgctggaagtggctgaaaagctgaaatgtttggatttatcagaaacttgttttcaattaaagaaacagatgttagagtcagtacttttggagttgcaaaatttctcagagtctcaggaggtggaggtgagcagtggctcccaagttagtgctgctcctgcccccagggcaagtgtggccaccgatggccctcaccccagtggtctcacggattccttggactacccaggagagagagccagcaatggcatgtcttcagatttgccaccgaagaagtccaaggacaaactagacaagaagaaagaggtagttaaacctccctaccctaaaatcaggagagctagtggaaggctggctgggaggaaggtctttgtggagatccctaaaaagaaatatacgagaagactccgagagcagcagaaaactgctgagggtgatgtgggggactacaggtgtccccaggaccaaagcccggacagggtgggcacggagatggagcaggtttccaaaaatgagggttgccaggcaggtgctgagttggaggaattgtcaaagaaagcagggccggaggaggaagaggaggaggaggaggaggacgaagaaggggagaagaagaagagcaactttaagtgcagcatttgcgagaaggcgtttctgtatgagaagagcttcctgaagcacagcaagcaccgccacggcgtggccaccgaggtggtgtaccgctgcgacacctgcggccagaccttcgccaaccgctgcaacctgaagagccaccagcgccacgtgcacagcagcgagcgccatttcccatgcgagctgtgcgggaagaagttcaagcgcaagaaggacgtgaagcggcacgtgctgcaggtgcatgagggcggcggcgagcggcaccgctgcggccagtgcggcaagggcctgagttccaagacagcgctgcggctgcacgagcgcacacacacgggagaccggccctacggctgcaccgagtgcggcgccaggttctcgcagccgtccgcgctcaagacgcacatgagaattcatacaggggaaaaaccttttgtctgtgatgaatgtggtgcaagattcactcagaaccacatgctgatttatcataaaaggtgtcacacaggtgaaagaccttttatgtgtgaaacatgtggcaagagttttgcttctaaggagtacttaaaacaccacaatagaatccatactggatccaaaccctttaaatgtgaagtatgtttcaggacttttgcccagcggaattcactgtaccagcatattaaagtccacacaggggagcgtccctactgctgtgaccagtgcggcaagcagttcacccagctcaacgccctccagcgccaccgccgcatccacacaggggagaggccattcatgtgcaatgcgtgcggacggacattcaccgacaagtccactcttcggcggcacacctcaatacacgataagaatactccatggaagtctttccttgtcattgtagatggctcgcccaagaacgatgacggacacaagactgaacagcctgacgaagagtatgtgtcatccaagctttcggataaattgctgtcttttgcagaaaatggccatttccacaacctggctgcagtccaagacactgtacctaccatgcaggagaacagttctgctgacacagcctgcaaggcagatgactccgtggtgtcccaggacaccctcctggccaccaccatcagtgagcttagcgagctgaccccacagacagactcgatgcccacacagcttcactctttgagcaacatggaataagagcttcaagcagttcccatcctgttagtctgcgtgtgtggtagctgaactcaagatgatgtggggctaagaaaaataattgtccatgtgcaaagatgtgggcaagaatggcctctgcagattttcctgaacttctgctaacttgcacggctttatcacagcatttttaaagctttccctcaaaaatcctgatctgcatgatctcagctactttattgacaaaaaggcagtgaacataacctcacttaattctggtgtagggtgtatgtgctaatcgttctaattcttgattacctagtttatagataactgctggtcttaattgcagagtacagagaactgaaccagctcctgatattgtagttagcagtcttcctggcttctcactctgccttatatttccatgtgggtttacttctctcataactactttcaaggtatttttcttccaagctgaaataaaactggggccacatattttcagtcatttcttccctgttgaattgaagcaaatcagattttctgtggggaccctcaaatgcaactgaagaaatagattgttgcattcattcctccccaccccccatttgtaggcagtaaacaaagtatgactgacagattgaacacctgcaaaactgctagcgtaatctcagcacatacgcagctaggaagtttgtcataaaatcaacttagaaatgagatgaggctgttcagtttgtcttaaaaaaatcagattaggtaaaagctgtcctaccaaagagtctagcaaaacaatatagtatttttttgcagaggcatgaaaaattaagacgctttagagtacttgaaagttgtgtagtcattttatttgcaaaatgaggtgactgtggcaaattatagaacacagagtattattacttttgccaggtttttctgacttgatttctgtaatttccagaaacccagacttctcatttccacacctagagatggaaacaggcaagtaactgacatgtctatttccttgggagcatgtgagaacatagcagtagggaccaaaagtctcagcacacttacctccgattatgccttaaagagttgattgtgaagaaccagtaactttgtcccaaatgcttctttggctgtttcatgcaggacttaattattgcttttaaaaattcacaatgaaaagacgattctgctgtatttgttaaacgttgacatttggttctagggccttgagtatgtgccacgtgcttgtgaaatgctatgattcacatgtaacatttaaacattaatttaaaaagggaaccttggagaattcttttgttcactagttccttttttctctacatttttaatttattaaacttgctgtgaaaacactttgattttctaagaggaaggtactttaagttccagaatgaacatgtagctgcactatgccagaaattaatgagggaagactttcttcctaagtgcttatgttttaacttatgttagtgaaaccactacaaggtgtttcaggcgctgataacatgcttcacacctgcccttggaggtcacagtactaatttacttcaaatttagttatgacagtgtcactgtatcctagttatgtttacagcacaaataaataatgactgtcatacatccagaggagaccgaacctgcccagctgatgtactgttttatggaataaagtcacttgatcagaaggaattgaaacaatagatcattttgttacctactggagggatttttgtcttgaatttgtttccttagaaattctacaaaaaaatgttgttaataaatgtctgctttgtaaaagcagttttgcaattttttaaagatctatttctgttataatttaggttctgcagaaatatgattcttaattgaaacatataatttgcttaattacgtgaataatgaaatgtaaaatccgggtccataagcctttatttcatacagtcctaggattaagctgtttaactgcttggatcccagttggtctctggcagtgggatcctggagaggagaaatcctggcctctgctcatgcgcaggccacaaccgggctggaagtgcggttgagctctctgccactttcttcaatgtaaaaagtaggcatcaaagatacgacttctactatatacatttctctgtccctgagaacagagaaacgtaaccctgtaggggactggttacagaggacctcctggagcatctgccccattcctccaagtccaagcacagccatgctgagtggaagcgaggccaccatctgagtggattggtcccaagtgtgtaatgaggaaagtggccaggtgccggcacagtgcctctcccagagcctcaagaagggccatttaggagcttgcttcaaccattttccaaccattttctgtgaaatgctgtcagcccaaactccaaagggatgtgcagcctttcgttttaccaaattctttgctgtcgtttggaaaaaatgggccatgtggtggagacctttatttaaggtgatttttacagaaatgtgattttgctgtaggtgattatccaaacaagtaaatttgagtgtataatttaatttttaacctgttaaataaaccttgtccctccaagg

SEQ ID NO: 136744 - DNA, 795 bp, Homo sapiens
  Payload ID: 6776
  Gene Symbol: GZF1
  Gene Name: GDNF-inducible zinc finger protein 1
  ENST ID: ENST00000424216
  CDS Start-End: 650-795
ggacctgcgcgtctcggggatgcgggagcgggggcagggggcggcccgagggcctgatccacgcggccccggatgcccgcgtcgggaggcggcgcgtcgggccgaggaggggcttctctgtggctgcagtagtttgttctctgggtcgtctttggagtggccgagcggcgtccgggcgctggggcggccaagtggcgcgggaagggtgggaggtgccgtgagggcggcgaggacagcggcggatttaagccccactggaaaccccggcccttgtggccgtggactgggctgcgggtagcagcgtctcctggaagggctctggccccgtgagcctcggggattcaggggccgccgacgttggtgcagatgccgggcgcactgggaggcggccggaatgccaatgagattcggcggatacgcagctgtcaccggccgcagactgccctgtcgccacctccagtgcctgcactccagtagccaagcaacataggaaatcgcgctcagaacccactttgttgattgagaaatcagacacgttgaatccgaggtgacatctgtggtctggccgaaggaggctagaaggaaggcatgtgctttggatggatggaaacaggaatcaaagaggaagctgtttttggaaggaagaaagatggaaagcggtgcagttctgctggaatccaaatcctccccatttaacctactgcatgagatgcatgagcttcgcctcctgggtcacctgtgtgacgtgacagtcagcgtggagtatcagggtgtccgcaaagacttcatggccca

SEQ ID NO: 136745 - DNA, 2474 bp, Homo sapiens
  Payload ID: 6777
  Gene Symbol: GDI1
  Gene Name: GDP dissociation inhibitor 1
  Uniprot ID: P31150
  ENST ID: ENST00000447750
  CDS Start-End: 336-1679
ctgggccgcagcaccggccgccggcccgccccgcccgccccgccccgcgcctctctagactctcggcgagcagcgtcgcccgcggagccgcgctggtgctgtggcccgggccctggcagccctcccgggaggcgagccggggaggcggtggcccctgccggttgcggcggggcgcgggaagaggcgggactctttgacgcggcggaggggtcgggcgacggccgacgcgccgccatctttggtccagtgcggtggcggcggcggcggtggcggcggcgactgctgcggtgaaggaggaggaggagccgagcgggcgctggcaccgaggcctgaccatggacgaggaatacgatgtgatcgtgctggggaccggtctcaccgaatgcatcctgtcgggcatcatgtctgtgaacgggaagaaggtgctgcacatggaccggaacccctactacgggggcgagagctcctccatcacacccctggaggagctgtataagcgttttcagttgctggaggggccccctgagtcgatgggccgaggccgagactggaatgttgacctgattcccaaattcctcatggctaacgggcagctggtaaagatgctactgtatacagaggtgactcgctacctggacttcaaggtggtggagggcagctttgtctacaaggggggcaagatctacaaagtgccgtccactgagactgaggccttggcttccaatctgatgggcatgtttgagaaacggcgcttccgcaagttcctggtgtttgtggcaaacttcgatgagaatgaccccaagacctttgagggcgttgacccccagactaccagcatgcgtgacgtctaccggaagtttgatctgggccaggatgtcatcgatttcactggccatgccctggcgctctaccgcactgatgactacctggaccagccctgccttgagaccgtcaaccgcatcaagttgtacagtgagtccctggcccggtatggcaagagcccatatttatacccgctctacggcttgggcgagctgccccagggttttgcaagattgagtgccatctatggggggacatatatgctgaacaaacctgtggatgacatcatcatggagaacggcaaggtggtgggcgtgaagtctgagggagaggtggcccgctgcaagcagctgatctgtgaccccagctacatcccggaccgtgtgcggaaggctggccaggttatccgcatcatctgtatccttagccaccccatcaagaacaccaacgacgccaactcctgccaaataatcatcccccagaaccaggtcaacaggaagtcagacatctacgtgtgcatgatctcctatgcacacaacgtggcggcccagggcaagtacatagctattgccagcactactgtggagaccacggaccctgaaaaggaggtggagccggctctggagctgttggagcccattgaccagaagtttgtggctatcagtgacttgtatgagcccattgatgatggttgtgagagccaggtgttctgttcctgctcctacgatgccaccacacactttgagacaacctgcaacgacatcaaagacatctacaaacgcatggctggcacggcctttgactttgagaacatgaagcgcaaacagaacgacgtctttggagaagctgagcagtgattgtggccgcccccagcccctgctgccccagcctgtgtctgttctcctcgagggctccagcatcctctgcttcccccaccacgttcccatcacccacctcattgatccactgaccaaatccttaaccctagcgatggcttgggagatggggggttggatagcatcctctttcttggcccttccttatcctaggaaaagagggttcctctccttgtgtgtgtctcttccccccacccctaattcttctgctctgtttgggaagacgtggaggaaaaggtgacttctgcccccaccgctcttacccccactgtagtggcctttggagatgcccccacctcccccccaccaactctcgcgtgttggagagaaggggccctcccagcacaaagttgcattcctcccccctaatttattctaatttattaactttgacccaccctttctgagcctgcagccttcccgtgtggcctgagggctgtcgagtgagctgccccagcccctcccagcccttgcccagcctgggggagtggggaaggcttgggcatggccccgttggaggttgatttgctgttttgtttcttgtctttgtgttctgtggtacttgctgagagaaaagaaaagtgagccaagcagaaggaggtgggaaaacggacccaaaccccagtgtgccctgccccatgcctttcctttagtggtgggaaacccttatcttgcaaagtgaatgtgtccccttccccaccctctagtgtatttcacagaaaacaaaacctcccaataaaacggttgaaacctgaa

SEQ ID NO: 136746 - DNA, 568 bp, Homo sapiens
  Payload ID: 6777
  Gene Symbol: GDI1
  Gene Name: GDP dissociation inhibitor 1
  ENST ID: ENST00000445564
  CDS Start-End: 102-224
atctttggtccagtgcggtggcggcggcggcggtggcggcggcgactgctgcggtgaaggaggaggaggagccgagcgggcgctggcaccgaggcctgaccatggacgaggaatacgatgtgatcgtgctggggaccggtctcaccgagcggaggcaggtgggagtgcagcggatggtgtcaccctcccccaggaatgcatcctgtcgggcatcatgtctgtgaacgggaagaaggtgctgcacatggaccggaacccctactacgggggcgagagctcctccatcacacccctggaggagctgtataagcgttttcagttgctggaggggccccctgagtcgatgggccgaggccgagactggaatgttgacctgattcccaaattcctcatggctaacgggcagctggtaaagatgctactgtatacagaggtgactcgctacctggacttcaaggtggtggagggcagctttgtctacaaggggggcaagatctacaaagtgccgtccactgagactgaggccttggcttccaatctgatgggcatgtttgagaaacggcgcttc

SEQ ID NO: 136747 - DNA, 560 bp, Homo sapiens
  Payload ID: 6777
  Gene Symbol: GDI1
  Gene Name: GDP dissociation inhibitor 1
  ENST ID: ENST00000415109
  CDS Start-End: 90-230
gtgcggtggcggcggcggcggtggcggcggcgactgctgcggtgaaggaggaggaggagccgagcgggcgctggcaccgaggcctgaccatggacgaggaatacgatgtgatcgtgctggggaccggtctcaccatgcctctcggcgtgttggtactggaaggccatcctgtgtctgctggatgccctgcctccctcaaagcctccgttatttcactctccgccttgtgagggggacgggactcctttgcccagcaaggttgcaatggagagtgtggtcggatgaagccatcaccccaattttaggaatgcatcctgtcgggcatcatgtctgtgaacgggaagaaggtgctgcacatggaccggaacccctactacgggggcgagagctcctccatcacacccctggaggagctgtataagcgttttcagttgctggaggggccccctgagtcgatgggccgaggccgagactggaatgttgacctgattcccaaattcctcatggctaacgggcagctggtaaagatgctactgtatacagaggtgactcgctacctg

SEQ ID NO: 136748 - DNA, 816 bp, Homo sapiens
  Payload ID: 6777
  Gene Symbol: GDI1
  Gene Name: GDP dissociation inhibitor 1
  ENST ID: ENST00000434049
  CDS Start-End: 92-535
cagtgcggtggcggcggcggcggtggcggcggcgactgctgcggtgaaggaggaggaggagccgagcgggcgctggcaccgaggcctgaccatggacgaggaatacgatgtgatcgtgctggggaccggtctcaccgaatgcatcctgtcgggcatcatgtctgtgaacgggaagaaggtgctgcacatggaccggaacccctactacgggggcgagagctcctccatcacacccctggaggagctgtataagcgttttcagttgctggaggggccccctgagtcgatgggccgaggccgagactggaatgttgacctgattcccaaattcctcatggctaacgggcagctggtaaagatgctactgtatacagaggtgactcgctacctggacttcaaggtggtggagggcagctttgtctacaaggggggcaagatctacaaagtgccgtccactgagactgaggccttggcttccaggcctccactgaatccccgagacatcgccaagtgtctgagccaggaaggcccttagagcccatccaggccaatcccctcttcatccagatctgatgggcatgtttgagaaacggcgcttccgcaagttcctggtgtttgtggcaaacttcgatgagaatgaccccaagacctttgagggcgttgacccccagactaccagcatgcgtgacgtctaccggaagtttgatctgggccaggatgtcatcgatttcactggccatgccctggcgctctaccgcactgatgagtgaggggaagctgggtggtggcagccccctcgcccggcccgcccccacc

SEQ ID NO: 136749 - DNA, 786 bp, Homo sapiens
  Payload ID: 6777
  Gene Symbol: GDI1
  Gene Name: GDP dissociation inhibitor 1
  ENST ID: ENST00000630693
  CDS Start-End: 343-786
attcttcctgggccgcagcaccggccgccggcccgccccgcccgccccgccccgcgcctctctagactctcggcgagcagcgtcgcccgcggagccgcgctggtgctgtggcccgggccctggcagccctcccgggaggcgagccggggaggcggtggcccctgccggttgcggcggggcgcgggaagaggcgggactctttgacgcggcggaggggtcgggcgacggccgacgcgccgccatctttggtccagtgcggtggcggcggcggcggtggcggcggcgactgctgcggtgaaggaggaggaggagccgagcgggcgctggcaccgaggcctgaccatggacgaggaatacgatgtgatcgtgctggggaccggtctcaccgaatgcatcctgtcgggcatcatgtctgtgaacgggaagaaggtgctgcacatggaccggaacccctactacgggggcgagagctcctccatcacacccctggaggagctgtataagcgttttcagttgctggaggggccccctgagtcgatgggccgaggccgagactggaatgttgacctgattcccaaattcctcatggctaacgggcagctggtaaagatgctactgtatacagaggtgactcgctacctggacttcaaggtggtggagggcagctttgtctacaaggggggcaagatctacaaagtgccgtccactgagactgaggccttggcttccaggcctccactgaatccccgagacatcgccaagtgtctgagccaggaaggcccttag

SEQ ID NO: 136750 - DNA, 584 bp, Homo sapiens
  Payload ID: 6778
  Gene Symbol: GDI2
  Gene Name: GDP dissociation inhibitor 2
  ENST ID: ENST00000380127
  CDS Start-End: 140-584
gaagcccccggaagcctccccagaagctgttgccggtgctatgcgacctgtacagcctgcagaaccaaagatccatggtccaatataacatatcttcttcaagtatttatggggtaacatcccaaaataacacttttagatgtctctaggcaagagaaaaccttcgaacttttatttggctaattttttaggaaaggaatgtatcctgtcaggtataatgtcagtgaatggcaagaaagttcttcatatggatcgaaacccttactacggaggagagagtgcatctataacaccattggaagatttatacaaaagatttaaaataccaggatcaccacccgagtcaatggggagaggaagagactggaatgttgacttgattcccaagttccttatggctaatggtcagctggttaagatgctgctttatacagaggtaactcgctatctggattttaaagtgactgaagggagctttgtctataagggtggaaaaatctacaaggttccttccactgaagcagaagccctggcatctagcctaatgggattgtttgaaaaacgtcgcttcaggaaattcctag

SEQ ID NO: 136751 - DNA, 1408 bp, Homo sapiens
  Payload ID: 6778
  Gene Symbol: GDI2
  Gene Name: GDP dissociation inhibitor 2
  Uniprot ID: P50395
  ENST ID: ENST00000380181
  CDS Start-End: 154-1356
tggcggtcggtctcgccttgtcgccagctccattttcctctctttctcttcccctttccttcgcgcccaagagcgcctcccagcctcgtagggtggtcacggagcccctgcgccttttccttgctcgggtcctgcgtccgcgcctgccccgccatgaatgaggagtacgacgtgatcgtgctgggcaccggcctgacggaatgtatcctgtcaggtataatgtcagtgaatggcaagaaagttcttcatatggatcgaaacccttactacggaggagagagtgcatctataacaccattggaagatttatacaaaagatttaaaataccaggatcaccacccgagtcaatggggagaggaagagactggaatgttgacttgattcccaagttccttatggctaatggcctaatgggattgtttgaaaaacgtcgcttcaggaaattcctagtgtatgttgccaacttcgatgaaaaagatccaagaacttttgaaggcattgatcctaagaagaccacaatgcgagatgtgtataagaaatttgatttgggtcaagacgttatagattttactggtcatgctcttgcactttacagaactgatgattacttagatcaaccgtgttatgaaaccattaatagaattaaactttacagtgaatctttggcaagatatggcaaaagcccatacctttatccactctatggccttggagaactgccccaaggatttgcaaggctaagtgctatttatggaggtacctatatgctgaataaacccattgaagaaatcattgtacagaatggaaaagtaattggtgtaaaatctgaaggagaaattgctcgctgtaagcagctcatctgtgaccccagctacgtaaaagatcgggtagaaaaagtgggccaggtgatcagagttatttgcatcctcagccaccccatcaagaacaccaatgatgccaactcctgccagatcattattccacagaaccaagtcaatcgaaagtcagatatctacgtctgcatgatctcctttgcgcacaatgtagcagcacaagggaagtacattgctatagttagtacaactgtggaaaccaaggagcctgagaaggaaatcagaccagctttggagctcttggaaccaattgaacagaaatttgttagcatcagtgacctcctggtaccaaaagacttgggaacagaaagccagatctttatttcccgcacatatgatgccaccactcattttgagacaacgtgtgatgacattaaaaacatctataagaggatgacaggatcagagtttgactttgaggaaatgaagcgcaagaagaatgacatctatggggaagactaacagcagtacatgttattatgtaattaggacacatttaaaatttggcaaataa

SEQ ID NO: 136752 - DNA, 2412 bp, Homo sapiens
  Payload ID: 6778
  Gene Symbol: GDI2
  Gene Name: GDP dissociation inhibitor 2
  Uniprot ID: P50395
  ENST ID: ENST00000380191
  CDS Start-End: 292-1629
agagtgccgggagcgcctgattggcggccctcccggcgcctgcaggccccgccccggctgcggaggctcagtcacagccctcccctcctcgctccctcccctcctctccccgcccagttcttctcttcccgtctgaggtggcggtcggtctcgccttgtcgccagctccattttcctctctttctcttcccctttccttcgcgcccaagagcgcctcccagcctcgtagggtggtcacggagcccctgcgccttttccttgctcgggtcctgcgtccgcgcctgccccgccatgaatgaggagtacgacgtgatcgtgctgggcaccggcctgacggaatgtatcctgtcaggtataatgtcagtgaatggcaagaaagttcttcatatggatcgaaacccttactacggaggagagagtgcatctataacaccattggaagatttatacaaaagatttaaaataccaggatcaccacccgagtcaatggggagaggaagagactggaatgttgacttgattcccaagttccttatggctaatggtcagctggttaagatgctgctttatacagaggtaactcgctatctggattttaaagtgactgaagggagctttgtctataagggtggaaaaatctacaaggttccttccactgaagcagaagccctggcatctagcctaatgggattgtttgaaaaacgtcgcttcaggaaattcctagtgtatgttgccaacttcgatgaaaaagatccaagaacttttgaaggcattgatcctaagaagaccacaatgcgagatgtgtataagaaatttgatttgggtcaagacgttatagattttactggtcatgctcttgcactttacagaactgatgattacttagatcaaccgtgttatgaaaccattaatagaattaaactttacagtgaatctttggcaagatatggcaaaagcccatacctttatccactctatggccttggagaactgccccaaggatttgcaaggctaagtgctatttatggaggtacctatatgctgaataaacccattgaagaaatcattgtacagaatggaaaagtaattggtgtaaaatctgaaggagaaattgctcgctgtaagcagctcatctgtgaccccagctacgtaaaagatcgggtagaaaaagtgggccaggtgatcagagttatttgcatcctcagccaccccatcaagaacaccaatgatgccaactcctgccagatcattattccacagaaccaagtcaatcgaaagtcagatatctacgtctgcatgatctcctttgcgcacaatgtagcagcacaagggaagtacattgctatagttagtacaactgtggaaaccaaggagcctgagaaggaaatcagaccagctttggagctcttggaaccaattgaacagaaatttgttagcatcagtgacctcctggtaccaaaagacttgggaacagaaagccagatctttatttcccgcacatatgatgccaccactcattttgagacaacgtgtgatgacattaaaaacatctataagaggatgacaggatcagagtttgactttgaggaaatgaagcgcaagaagaatgacatctatggggaagactaacagcagtacatgttattatgtaattaggacacatttaaaatttggcaaataatgcatataatgaaatcaatattgtaaggcctgcttttgtaatgaaaatggagagaatgaagagcgctgtgccagtaaatactccccttcacctttctaattattaacttgttttcatggagtggctattcagcattggcagttaccacattctgttcaatttaaccaaactggctttttttttttctagtgaagttaaacaaacattgggataccgacacagacaacttgagacagtttttttaatcttttaatcagtgtagctatgtgctgctgctgctcaagagctggatccatacaggttgtgtgtcatctgtcctcttgaggttcaggagattctaaattgaatattccacggtttgggacagcatccggaagttttccctatgactttatattttgtattatgtcaaatgttatggcagggcccaaatagcatagccacaagtttggtttatgtgggcataaaattctaaccaaaccccagacatagggagtcatttggagaaagcctgtatgtggtgttttaacctaataaagttgatgagagagaaggggagaggaagcgaacataaagcgggtcaagtgtagtgcatcttttgtatctcaggcgtggcttcttcagtggaccaagctgcaatgcagtattgacttgacagagcctctacttctgtctcaaaatggctccaaatgatttctgtactgcaaaataaagccaaattctggaaacta

SEQ ID NO: 136753 - DNA, 834 bp, Homo sapiens
  Payload ID: 6778
  Gene Symbol: GDI2
  Gene Name: GDP dissociation inhibitor 2
  ENST ID: ENST00000447751
  CDS Start-End: 1-612
aagaaatttgatttgggtcaagacgttatagattttactggtcatgctcttgcactttacagaactgatgattacttagatcaaccgtgttatgaaaccattaatagaattaaactttacagtgaatctttggcaagatatggcaaaagcccatacctttatccactctatggccttggagaactgccccaaggatttgcaaggctaagtgctatttatggaggtacctatatgctgaataaacccattgaagaaatcattgtacagaatggaaaagtaattggtgtaaaatctgaaggagaaattgctcgctgtaagcagctcatctgtgaccccagctacgtaaaagatcgggtagaaaaagtgggccaggtgatcagagttatttgcatcctcagccaccccatcaagaacaccaatgatgccaactcctgccagatcattattccacagaaccaagtcaatcgaaagtcagatttgttagcatcagtgacctcctggtaccaaaagacttgggaacagaaagccagatctttatttcccgcacatatgatgccaccactcattttgagacaacgtgtgatgacattaaaaacatctataagaggatgacaggatcagagtttgactttgaggaaatgaagcgcaagaagaatgacatctatggggaagactaacagcagtacatgttattatgtaattaggacacatttaaaatttggcaaataatgcatataatgaaatcaatattgtaaggcctgcttttgtaatgaaaatggagagaatgaagagcgctgtgccagtaaatactccccttcacctttctaattatta

SEQ ID NO: 136754 - DNA, 636 bp, Homo sapiens
  Payload ID: 6778
  Gene Symbol: GDI2
  Gene Name: GDP dissociation inhibitor 2
  ENST ID: ENST00000418688
  CDS Start-End: 172-636
ttctcttcccgtctgaggtggcggtcggtctcgccttgtcgccagctccattttcctctctttctcttcccctttccttcgcgcccaagagcgcctcccagcctcgtagggtggtcacggagcccctgcgccttttccttgctcgggtcctgcgtccgcgcctgccccgccatgaatgaggagtacgacgtgatcgtgctgggcaccggcctgacgttatacaaaagatttaaaataccaggatcaccacccgagtcaatggggagaggaagagactggaatgttgacttgattcccaagttccttatggctaatggtcagctggttaagatgctgctttatacagaggtaactcgctatctggattttaaagtgactgaagggagctttgtctataagggtggaaaaatctacaaggttccttccactgaagcagaagccctggcatctagcctaatgggattgtttgaaaaacgtcgcttcaggaaattcctagtgtatgttgccaacttcgatgaaaaagatccaagaacttttgaaggcattgatcctaagaagaccacaatgcgagatgtgtataagaaatttgatttgggtcaagacgttatagattttactggtcatgctcttgcactt

SEQ ID NO: 136755 - DNA, 918 bp, Homo sapiens
  Payload ID: 6778
  Gene Symbol: GDI2
  Gene Name: GDP dissociation inhibitor 2
  ENST ID: ENST00000456041
  CDS Start-End: 130-918
cagctccattttcctctctttctcttcccctttccttcgcgcccaagagcgcctcccagcctcgtagggtggtcacggagcccctgcgccttttccttgctcgggtcctgcgtccgcgcctgccccgccatgaatgaggagtacgacgtgatcgtgctgggcaccggcctgacggaatgtatcctgtcaggtataatgtcagtgaatggcaagaaagttcttcatatggatcgaaacccttactacggaggagagagtgcatctataacaccattggaagatttatacaaaagatttaaaataccaggatcaccacccgagtcaatggggagaggaagagactggaatgttgacttgattcccaagttccttatggctaatgaggtaactcgctatctggattttaaagtgactgaagggagctttgtctataagggtggaaaaatctacaaggttccttccactgaagcagaagccctggcatctagcctaatgggattgtttgaaaaacgtcgcttcaggaaattcctagtgtatgttgccaacttcgatgaaaaagatccaagaacttttgaaggcattgatcctaagaagaccacaatgcgagatgtgtataagaaatttgatttgggtcaagacgttatagattttactggtcatgctcttgcactttacagaactgatgattacttagatcaaccgtgttatgaaaccattaatagaattaaactttacagtgaatctttggcaagatatggcaaaagcccatacctttatccactctatggccttggagaactgccccaaggatttgcaaggctaagtgctatttatggaggtacctatatgctgaataaacccattgaagaaatcattgtacagaatggaaaagtaattggtgtaaaatctgaaggagaa

SEQ ID NO: 136756 - DNA, 634 bp, Homo sapiens
  Payload ID: 6778
  Gene Symbol: GDI2
  Gene Name: GDP dissociation inhibitor 2
  ENST ID: ENST00000608581
  CDS Start-End: 244-634
attcacctgcttaggctttcgtggggtcggcctcttggagctgagaacacagcttctgcttacacctgtgtcctcaatgaagccagagattcctaagagaattctagaaaaagaggagcggggtagaaggcaagcaaggaacagtttctaagcttagggcctaaacctttgcatacaaggatcagctaccacgtttacagcggctttaagttacagccctcggaatgtatcctgtcaggtataatgtcagtgaatggcaagaaagttcttcatatggatcgaaacccttactacggaggagagagtgcatctataacaccattggaagatttatacaaaagatttaaaataccaggatcaccacccgagtcaatggggagaggaagagactggaatgttgacttgattcccaagttccttatggctaatggtcagctggttaagatgctgctttatacagaggtaactcgctatctggattttaaagtgactgaagggagctttgtctataagggtggaaaaatctacaaggttccttccactgaagcagaagccctggcatctagcctaatgggattgtttgaaaaacgtcgcttcaggaaattcctagtgtatgttgccaacttcgatgaaa

SEQ ID NO: 136757 - DNA, 622 bp, Homo sapiens
  Payload ID: 6778
  Gene Symbol: GDI2
  Gene Name: GDP dissociation inhibitor 2
  ENST ID: ENST00000609712
  CDS Start-End: 246-622
ttcttctcttcccgtctgaggtggcggtcggtctcgccttgtcgccagctccattttcctctctttctcttcccctttccttcgcgcccaagagcgcctcccagcctcgtagggtggtcacggagcccctgcgccttttccttgctcgggtcctgcgtccgcgcctgccccgccatgaatgaggagtacgacgtgatcgtgctgggcaccggcctgacggtaacatcccaaaataacacttttagatgtctctaggcaagagaaaaccttcgaacttttatttggctaattttttaggaaaggaatgtatcctgtcaggtataatgtcagtgaatggcaagaaagttcttcatatggatcgaaacccttactacggaggagagagtgcatctataacaccattggaagatttatacaaaagatttaaaataccaggatcaccacccgagtcaatggggagaggaagagactggaatgttgacttgattcccaagttccttatggctaatggtcagctggttaagatgctgctttatacagaggtaactcgctatctggattttaaagtgactgaagggagctttgtctataagggtggaaaaatctacaaggttccttccac

SEQ ID NO: 136758 - DNA, 1193 bp, Homo sapiens
  Payload ID: 6779
  Gene Symbol: GDPGP1
  Gene Name: GDP-D-glucose phosphorylase 1
  Uniprot ID: Q6ZNW5
  ENST ID: ENST00000329600
  CDS Start-End: 22-1179
tgactatttcaggtcagctctatggctcttccacatgattcaaacgaaacttcctatttgctgcctcccaacaatgaggactggggcaggcaaaccattcctgactttgtttatgggcagaaggatctcatggcagaagggattcagtggccaaggaatgcacctggcatcccagatgctctgccacaatctccctttgatgctgcactctgctctgcctggaagcagcgggtggagctggggctgtttcgctaccgtctacgggagctacagacccaaatcctccctggtgctgtgggtttcgtggctcagctgaatgtggagcgtggtgtgcagaggaggcccccgcagaccatcaagagtgtgaggcaggcatttgaccctgtacagttcaacttcaacaagatccggcccggagaagtcctcttccgtttgcaccgggagcctgatctccctgggactctgctgcaagaagacatcctggtggtgatcaacgtcagccccctggagtggggccacgtgctgctggtgcctgagcctgcccgccagctcccccagcgcctgctgccgggtgcactgagggcagggattgaggctgtgctgctgagcttacacccgggcttccgtgtcggcttcaacagcctgggaggcttggcctcggtgaaccacctccacctgcatggctattacctggcccacagactgcccgtggagcaggcgccaagcgagcccctggaccctggaggccatttgcatctgctccaggacctcccagctcctggcttcctcttttacactcgtgggccagggcctgacttggagtccttgataagcagggtatgtcgggccactgattatctgactgaccatgagattgctcataacttgtttgtcacccggggagctccgccgggaaagacatcaccttcctcagccctcacaggggtccgagtaattctgtgggcccggaagtccagctttgggataaaggacggtgaagctttcaatgttgccctctgtgagctggctgggcacctccctgtcaaaacatcccaggacttcagcagcctgacagaggcagctgctgtggccctcattcaggactgtcggctgcccccatcccaggcagaagacgtacaggcagcactggtggccctgatgtcccaggaagagcaataatacttctggatgta

SEQ ID NO: 136759 - DNA, 5323 bp, Homo sapiens
  Payload ID: 6779
  Gene Symbol: GDPGP1
  Gene Name: GDP-D-glucose phosphorylase 1
  Uniprot ID: Q6ZNW5
  ENST ID: ENST00000558017
  CDS Start-End: 421-1578
ctccccagggccaggcgtcccgcgcacctggtactcggccagcagctccttggacaggcgactgcccgagccccccatcgccccgccgcgcgcacagctccgccaactcgcctcgagacgcagacaactttctcacttccgcccttgggccgcgtcactgcccggtccccgcggcaaccgctcctggggccaccacccccgggcccgccccctcctaaaagctgccaggcgttcccagccgggtttggcaggcgagctgccggctccaagcggtcctaggctatttactgaggacccactggatgtcaagcattgtgcatagttttcttcgattgttgcaacatcccttgcgagtttctggagcagcagagctgaaggaacccaaacttggactgaagtgactctactaaggtcagctctatggctcttccacatgattcaaacgaaacttcctatttgctgcctcccaacaatgaggactggggcaggcaaaccattcctgactttgtttatgggcagaaggatctcatggcagaagggattcagtggccaaggaatgcacctggcatcccagatgctctgccacaatctccctttgatgctgcactctgctctgcctggaagcagcgggtggagctggggctgtttcgctaccgtctacgggagctacagacccaaatcctccctggtgctgtgggtttcgtggctcagctgaatgtggagcgtggtgtgcagaggaggcccccgcagaccatcaagagtgtgaggcaggcatttgaccctgtacagttcaacttcaacaagatccggcccggagaagtcctcttccgtttgcaccgggagcctgatctccctgggactctgctgcaagaagacatcctggtggtgatcaacgtcagccccctggagtggggccacgtgctgctggtgcctgagcctgcccgccagctcccccagcgcctgctgccgggtgcactgagggcagggattgaggctgtgctgctgagcttacacccgggcttccgtgtcggcttcaacagcctgggaggcttggcctcggtgaaccacctccacctgcatggctattacctggcccacagactgcccgtggagcaggcgccaagcgagcccctggaccctggaggccatttgcatctgctccaggacctcccagctcctggcttcctcttttacactcgtgggccagggcctgacttggagtccttgataagcagggtatgtcgggccactgattatctgactgaccatgagattgctcataacttgtttgtcacccggggagctccgccgggaaagacatcaccttcctcagccctcacaggggtccgagtaattctgtgggcccggaagtccagctttgggataaaggacggtgaagctttcaatgttgccctctgtgagctggctgggcacctccctgtcaaaacatcccaggacttcagcagcctgacagaggcagctgctgtggccctcattcaggactgtcggctgcccccatcccaggcagaagacgtacaggcagcactggtggccctgatgtcccaggaagagcaataatacttctggatgtatttatgttctttttttcttttcttttgagatagggtctcactctgtccccaggctagagtgtagtggtatgatcctggctcactgtagcctccacctctggggctgaagtgatcctcccacctcagcctcttgagtagctgagactataggcgtgcaccaccacacacctggctttttttttttttttttttttttttaacgattaggtgattttgtatttttttatatagacagcgtttcaccatgttgcccaggctggtcttgaactcttgggctgaagcagtcctcccacctcggcctcccaaagtactgagatgacaggagtgagcccctggattcttttctgtttctttttttttttttttttttttttttttttttgagatagtctcgctctgtcacctaggttggggtgcactggtacaatctcggctcactgcaacctccacctctagggttcgagtgatcctcctggctcagcctcccgagtagctgggactatacaggctcctgccaccaaacccggctaatttttttgtatttttaaaagagaaggggtttcaccacattggctaggctggtcttgaactcctgactttaggtgatccgcccgcctcggcctcccaaagtgctgggattacaggcgtgagccaccacacccagccaggatgtattcattttctacctgatgagtccctttccagagcactgtccatcatagtcctttggacatttattttcatggctgccttctcacctgtctcagcctaagaagaaggatgaagaaagctgataatgatctcttaaaggggagaaagataatggtctctttaaaggggagctgatagtggtctctttaaaggggagaaaatctggaataattctactgagtaagacatcatgaatgtatctgctacctctccccgttcttgttcaagccccaggggtgttaaaaaggagtgtgtgtgacagttacacactcctgactttacatttagattttgtcttcctttgatatcaaatgttagcacggtaatagtgcctgtgcctccagtattgagctgccacttctgttctcagcctgtttattcccctttgctcaccacttatttttattgctttgtcccttctttccatttagccctgctccacccaaatgccccactccttcactttccctgccaccttgagctttcctctagcccccaacaccaagttgaatgctcttcactgacatcatctgatgtaaaaacacagtgttgtcacaactttccgggtgcacgtctttttttgttttgtttttttgtaaggctggggtgcagtggtgcaatcacagctcactgcagacccaaactcttggtctcaagccaccctcccacctcagccccctgagtagctgggacgataggtgtgcaccatcacacctggctaatttttaaattttttgtagagatagggtcttgctatgttgcccgggttgctgtcaaactcctggccttaagaaatcctcccacctcggcctcccagagtgctaagatgccaccacaccttggtgcaggttttttttttttttttttttttttttttttgacacagggtcactgtcacccaggctggagtgcagtggtatgaagacagctaactgcaagcttcaacctcctgggctcaaacaatactcccatctcagcctccctagtagctgggaccacaggcatgcgccaccacacccggctatttttttggagagatagcatcttgccaagttgcccaggctggtctcgaactcctggcctcaagatcctcccacctcagcctcccaaagtgctgagattataggcatgagccactgcacctggcctgagtttttttttttttttcttgaatcagagtttcactctgttgcccaggctggagtgcagtggtgtgatctcggctcactgcgtctctgcctcctgggttcaagcaattcagcctgagtcttcttaatacccccattcaaaacgggatggagactgacagtttgtactttgttcaaggtcaggcagctggagtcgggactgcagcacaggcaggtaccagaagatgagctgggacaatgtgtgcttgtgaccgcctctccagtcagtggttcccatggtgggtagcactgtccttaacagtttgccctccctgagcctcagccatccctcttggggtctttcccaagcactttagaagctcctcttgatgtagacacaaaatccaaagctaagtcgttgttcctccgtctgcatctgagtcaatgtgggaaatttttttttatctcattgctttgttctgtcctgtttctccagacatttcacactggttccagaggaactagtcagtagacactattctaagagagtatgtgggtgtgaaatctcattttccttttagctcccttgaatgttatacagcaaaagtaaaagaagtcttgggttggctgggcacgttggctcacacctttaatcctagcactttgggaagccgaggcaggcaaatcacttgtcaggagttcgagaccagcctggccaacatggtgaaaccccatctctactaaaaatacaaaaattaggcgttgtggcggccacctgtaatcccatctacttgggaggctgaggcaggagaatcacttgaacccaggaggcggaggttgcagtgagctgagattgcacgactgtactccagcctgggcgatagtgcgagactcagtctcaaaataaataaatacataaagtcttgggtccagctctcaacagagattatcaccgccaccactccttcatcaaacatcctgaaggaatgagagtccctgttcacagcgtaagggtgaaagggggctcacacaggtgggttctggctgctgtctgagtgggctcacccaggaggggttttgatttctctgcctcccaaactgtgggtcctagccctggcttaggccttcaggtcgttggctccctatacctaggcctgtataaagccttagtttccagttttcattagaggttttacatcccaaatgatgttacaaagtctccctgtgataaagcagaatatgtgtccatagcccattttataagaaaaacagtttaggccaggtgcggtggctcacgcctgtaatcccagcactttgggaggctgaagcaggcagatcacaaggtcaggagttcaagaccagcctggccaacatggtgaaaccccgtctctactaaaaacacaaaaattagctgggtgtgggtgcacatctatagtcccagctactcaggaggctgaggcaggagaatcgcttggacctgggaggcggaggtggcagtgagccgagatcgcgccactgcactccagcctgggcggcagagagagactttgtctcaaaaaaaaaaaaaaagaaaaaaacagtttaccattctatcagaaaatgttgaccaccctcatatttttggtaaactgcagtaatttttccttaatactttttgcaagcttttgcatgcataagctccagtatcacacttaattttgcttgcttgctctctgaagggagttcggatgaccattacagcaaagtggattttgcgttcaaagtgataagccaaatatcaggattttcccagtttctccgtaggactgatgtttagaggaaagccttccctgactcaaatatgtttctccatataaaaaggggaaagtaaaatgggttttctttctggtggta

SEQ ID NO: 136760 - DNA, 504 bp, Homo sapiens
  Payload ID: 6779
  Gene Symbol: GDPGP1
  Gene Name: GDP-D-glucose phosphorylase 1
  ENST ID: ENST00000561433
  CDS Start-End: 356-504
gtgctggctgcgtatgcgtcacgggcgtcatgacctcgctgtggccccggcagcggctgcggggaaagtcgcgaggtgcatccgcttcggctgcagctatttactgaggacccactggatgtcaagcattgtgcatagttttcttcgattgttgcaacatcccttgcgagagtttcactcctgttgcccaggctggagtgcaatggcatgatctcagctcaccgcaacctccgcctcctgagttcaagcagttctcctgcctcagcctcctgaatagctcggattacagtttctggagcagcagagctgaaggaacccaaacttggactgaagtgactctactaaggtcagctctatggctcttccacatgattcaaacgaaacttcctatttgctgcctcccaacaatgaggactggggcaggcaaaccattcctgactttgtttatgggcagaaggatctcatggcagaagggattcagtggccaaggaatgcacctggcat

SEQ ID NO: 136761 - DNA, 850 bp, Homo sapiens
  Payload ID: 6779
  Gene Symbol: GDPGP1
  Gene Name: GDP-D-glucose phosphorylase 1
  ENST ID: ENST00000559204
  CDS Start-End: 209-850
catgacctcgctgtggccccggcagcggctgcggggaaagtcgcgaggtgcatccgcttcggctgcagctatttactgaggacccactggatgtcaagcattgtgcatagttttcttcgattgttgcaacatcccttgcgagtttctggagcagcagagctgaaggaacccaaacttggactgaagtgactctactaaggtcagctctatggctcttccacatgattcaaacgaaacttcctatttgctgcctcccaacaatgaggactggggcaggcaaaccattcctgactttgtttatgggcagaaggatctcatggcagaagggattcagtggccaaggaatgcacctggcatcccagatgctctgccacaatctccctttgatgctgcactctgctctgcctggaagcagcgggtggagctggggctgtttcgctaccgtctacgggagctacagacccaaatcctccctggtgctgtgggtttcgtggctcagctgaatgtggagcgtggtgtgcagaggaggcccccgcagaccatcaagagtgtgaggcaggcatttgaccctgtacagttcaacttcaacaagatccggcccggagaagtcctcttccgtttgcaccgggagcctgatctccctgggactctgctgcaagaagacatcctggtggtgatcaacgtcagccccctggagtggggccacgtgctgctggtgcctgagcctgcccgccagctcccccagcgcctgctgccgggtgcactgagggcagggattgaggctgtgctgctgagcttacacccgggcttccgtgtcggcttcaacagcctgggaggcttggcctcggtg

SEQ ID NO: 136762 - DNA, 550 bp, Homo sapiens
  Payload ID: 6779
  Gene Symbol: GDPGP1
  Gene Name: GDP-D-glucose phosphorylase 1
  ENST ID: ENST00000558291
  CDS Start-End: 520-550
aagtcgcgaggtgcatccgcttcggctgcagtaggtggtggcggcggcagccctgggtggggtcccataggggcatctgagaagtcactggagctagcgtttccgggaaacctggagactcgctgagtggcgggggtcgtcggctgcccctctgcccagcaagggcttttctagatgttatcatcaggcaatcgctgcacctgtcgcagcccccaagccacctcttccagaagtaaccataaccttgcttccttcttaggctatttactgaggacccactggatgtcaagcattgtgcatagttttcttcgattgttgcaacatcccttgcgagagtttcactcctgttgcccaggctggagtgcaatggcatgatctcagctcaccgcaacctccgcctcctgagttcaagcagttctcctgcctcagcctcctgaatagctcggattacagtttctggagcagcagagctgaaggaacccaaacttggactgaagtgactctactaaggtcagctctatggctcttccacatgattcaaacgaaactt

SEQ ID NO: 136763 - DNA, 1752 bp, Homo sapiens
  Payload ID: 6780
  Gene Symbol: GMDS
  Gene Name: GDP-mannose 4,6-dehydratase
  Uniprot ID: O60547
  ENST ID: ENST00000380815
  CDS Start-End: 271-1389
gacgcgaatgacgctgcgccagtcaggccgcagccccgctgcttggcccgtcgggcccgccttggccggctcggcccgcccccggccctccctgcacggcctcccgtgcgcccctgtcagactgtggcggccggtcgcgcggtgcgctctccctccctgcccgcagcctggagaggcgcttcgtgctgcacacccccgcgttcctgccggcaccgcgcctgccctctgccgcgctccgccctgccgccgaccgcacgcccgccgcgggacatggcacacgcaccggcacgctgccccagcgcccggggctccggggacggcgagatgggcaagcccaggaacgtggcgctcatcaccggtatcacaggccaggatggttcctacctggctgagttcctgctggagaaaggctatgaggtccatggaattgtacggcggtccagttcatttaatacgggtcgaattgagcatctgtataagaatccccaggctcacattgaaggaaacatgaagttgcactatggcgatctcactgacagtacctgccttgtgaagatcattaatgaagtaaagcccacagagatctacaaccttggagcccagagccacgtcaaaatttcctttgacctcgctgagtacactgcggacgttgacggagttggcactctacgacttctagatgcagttaagacttgtggccttatcaactctgtgaagttctaccaagcctcaacaagtgaactttatgggaaagtgcaggaaataccccagaaggagaccacccctttctatccccggtcaccctatggggcagcaaaactctatgcctattggattgtggtgaacttccgtgaggcgtataatctctttgcagtgaacggcattctcttcaatcatgagagtcccagaagaggagctaatttcgttactcgaaaaattagccggtcagtagctaagatttaccttggacaactggaatgtttcagtttgggaaatctggatgccaaacgagattggggccatgccaaggactatgtggaggctatgtggttgatgttgcagaatgatgagccggaggacttcgttatagctactggggaggtccatagtgtccgggaatttgtcgagaaatcattcttgcacattggaaaaaccattgtgtgggaaggaaagaatgaaaatgaagtgggcagatgtaaagagaccggcaaagttcacgtgactgtggatctcaagtactaccggccaactgaagtggactttctgcagggcgactgcaccaaagcgaaacagaagctgaactggaagccccgggtcgctttcgatgagctggtgagggagatggtgcacgccgacgtggagctcatgaggacaaaccccaatgcctgagcagcgcctcggagcccggcccgccctccggctacaatccccgcagagtctccggtgcagacgcgctgcggggatggggagcggcgtgccaatctgcgggtcccctgcggcccctgctgccgctgcgctgtcccggccgcaagagcggggccgccccgccgaggtttgtagcagccgggatgtgaccctccagggtttgggtcgctttgcgtttgtcgaagcctcctctgaatggctttgtgaaatcaagatgttttaatcacattcactttacttgaaattatgttgttacacaacaaattgtggggccttcaaattgtttttctcttttcatattaaaaatggtctttctgtgaactagca

SEQ ID NO: 136764 - DNA, 1440 bp, Homo sapiens
  Payload ID: 6780
  Gene Symbol: GMDS
  Gene Name: GDP-mannose 4,6-dehydratase
  Uniprot ID: O60547
  ENST ID: ENST00000530927
  CDS Start-End: 49-1077
tgtacacaggcagtttgttgggagcgttaccattgcctctggttcctcatgtgtaaaatggatggttcctacctggctgagttcctgctggagaaaggctatgaggtccatggaattgtacggcggtccagttcatttaatacgggtcgaattgagcatctgtataagaatccccaggctcacattgaaggaaacatgaagttgcactatggcgatctcactgacagtacctgccttgtgaagatcattaatgaagtaaagcccacagagatctacaaccttggagcccagagccacgtcaaaatttcctttgacctcgctgagtacactgcggacgttgacggagttggcactctacgacttctagatgcagttaagacttgtggccttatcaactctgtgaagttctaccaagcctcaacaagtgaactttatgggaaagtgcaggaaataccccagaaggagaccacccctttctatccccggtcaccctatggggcagcaaaactctatgcctattggattgtggtgaacttccgtgaggcgtataatctctttgcagtgaacggcattctcttcaatcatgagagtcccagaagaggagctaatttcgttactcgaaaaattagccggtcagtagctaagatttaccttggacaactggaatgtttcagtttgggaaatctggatgccaaacgagattggggccatgccaaggactatgtggaggctatgtggttgatgttgcagaatgatgagccggaggacttcgttatagctactggggaggtccatagtgtccgggaatttgtcgagaaatcattcttgcacattggaaaaaccattgtgtgggaaggaaagaatgaaaatgaagtgggcagatgtaaagagaccggcaaagttcacgtgactgtggatctcaagtactaccggccaactgaagtggactttctgcagggcgactgcaccaaagcgaaacagaagctgaactggaagccccgggtcgctttcgatgagctggtgagggagatggtgcacgccgacgtggagctcatgaggacaaaccccaatgcctgagcagcgcctcggagcccggcccgccctccggctacaatccccgcagagtctccggtgcagacgcgctgcggggatggggagcggcgtgccaatctgcgggtcccctgcggcccctgctgccgctgcgctgtcccggccgcaagagcggggccgccccgccgaggtttgtagcagccgggatgtgaccctccagggtttgggtcgctttgcgtttgtcgaagcctcctctgaatggctttgtgaaatcaagatgttttaatcacattcactttacttgaaattatgttgttacacaacaaattgtggggccttcaaattgtttttctcttttcatattaaaaatggtctttctgtgaactagca

SEQ ID NO: 136765 - DNA, 1544 bp, Homo sapiens
  Payload ID: 6781
  Gene Symbol: GMPPA
  Gene Name: GDP-mannose pyrophosphorylase A
  Uniprot ID: Q96IJ6
  ENST ID: ENST00000313597
  CDS Start-End: 93-1355
cttgcgagaagacacgtgcgcggaaggagcttgcagtagcgggcggcagagctggagtgaagggagctagtgtttaggtagcagtcaccattatgctcaaagcggtgatcctgattggaggccctcaaaagggaactcgcttcagacctttgtcttttgaggtgcccaaaccattgtttcctgtggcaggggtccctatgatccaacaccatattgaagcctgtgcccaggtccctggaatgcaggagattctgctcattggcttctaccaacctgatgagcccctcacccagttcctagaagccgcccagcaggagtttaaccttccagtcaggtacctgcaggaatttgcccccctaggcacagggggtggtctttaccattttcgagaccagatcctggctgggagccccgaggcattcttcgtgctcaatgctgatgtctgctccgacttccccttgagtgctatgttggaagcccaccgacgccagcgtcaccctttcttactccttggcactacggctaacaggacgcaatccctcaactacggctgcatcgttgagaatccacagacacacgaggtattgcactatgtggagaaacccagcacatttatcagtgacatcatcaactgcggcatctacctcttttctcctgaagccttgaagcctcttcgggatgtcttccagcgtaatcagcaggatgggcaattggaggactcaccaggcttgtggccaggggcaggtaccatccgcctagagcaggatgtgttttcagccctggcagggcagggccagatatacgtgcatctcactgatggtatctggagtcagatcaagtccgcaggttcagccctctacgcctcccgcctctacctgagccgataccaggacactcacccagaacggctggccaagcacaccccagggggcccatggatccgagggaatgtgtacatccacccgaccgccaaggtggccccctcggctgtgctgggccccaacgtctccatcgggaagggggtgaccgtgggtgagggtgtgcggctccgggagagcatcgtcctccatggagccactttgcaggagcacacgtgtgttctgcatagcatcgtgggctgggggagcaccgtgggacgctgggcccgcgtggagggtacccccagtgaccctaaccccaacgatccccgagcccgcatggacagtgagagcctcttcaaggacgggaagctgctgcctgctatcaccatcctgggctgccgagtccggatccctgccgaggtgctcatcctgaactcgattgttctgccacacaaggagctgagccgaagcttcaccaaccagatcatcctctgagtagggctgccagaaggcccccagctcctacccactccccttgaggctgctgcctgcttggccagcctctgtccagaaaggaccagagaaagccaggctggatcgtcacatgccggggagcaatgtggatggcctggggactcctgggttttctccctcccgactccctaataaaccccgtgaaccttg

SEQ ID NO: 136766 - DNA, 1524 bp, Homo sapiens
  Payload ID: 6781
  Gene Symbol: GMPPA
  Gene Name: GDP-mannose pyrophosphorylase A
  Uniprot ID: Q96IJ6
  ENST ID: ENST00000341142
  CDS Start-End: 73-1335
gagctggagtgaagggagctagtggtaaagggagctggtggaggggtggcggcaggggtagcagtcaccattatgctcaaagcggtgatcctgattggaggccctcaaaagggaactcgcttcagacctttgtcttttgaggtgcccaaaccattgtttcctgtggcaggggtccctatgatccaacaccatattgaagcctgtgcccaggtccctggaatgcaggagattctgctcattggcttctaccaacctgatgagcccctcacccagttcctagaagccgcccagcaggagtttaaccttccagtcaggtacctgcaggaatttgcccccctaggcacagggggtggtctttaccattttcgagaccagatcctggctgggagccccgaggcattcttcgtgctcaatgctgatgtctgctccgacttccccttgagtgctatgttggaagcccaccgacgccagcgtcaccctttcttactccttggcactacggctaacaggacgcaatccctcaactacggctgcatcgttgagaatccacagacacacgaggtattgcactatgtggagaaacccagcacatttatcagtgacatcatcaactgcggcatctacctcttttctcctgaagccttgaagcctcttcgggatgtcttccagcgtaatcagcaggatgggcaattggaggactcaccaggcttgtggccaggggcaggtaccatccgcctagagcaggatgtgttttcagccctggcagggcagggccagatatacgtgcatctcactgatggtatctggagtcagatcaagtccgcaggttcagccctctacgcctcccgcctctacctgagccgataccaggacactcacccagaacggctggccaagcacaccccagggggcccatggatccgagggaatgtgtacatccacccgaccgccaaggtggccccctcggctgtgctgggccccaacgtctccatcgggaagggggtgaccgtgggtgagggtgtgcggctccgggagagcatcgtcctccatggagccactttgcaggagcacacgtgtgttctgcatagcatcgtgggctgggggagcaccgtgggacgctgggcccgcgtggagggtacccccagtgaccctaaccccaacgatccccgagcccgcatggacagtgagagcctcttcaaggacgggaagctgctgcctgctatcaccatcctgggctgccgagtccggatccctgccgaggtgctcatcctgaactcgattgttctgccacacaaggagctgagccgaagcttcaccaaccagatcatcctctgagtagggctgccagaaggcccccagctcctacccactccccttgaggctgctgcctgcttggccagcctctgtccagaaaggaccagagaaagccaggctggatcgtcacatgccggggagcaatgtggatggcctggggactcctgggttttctccctcccgactccctaataaaccccgtgaaccttg

SEQ ID NO: 136767 - DNA, 1823 bp, Homo sapiens
  Payload ID: 6781
  Gene Symbol: GMPPA
  Gene Name: GDP-mannose pyrophosphorylase A
  Uniprot ID: Q96IJ6
  ENST ID: ENST00000358215
  CDS Start-End: 370-1632
agtagcgggcggcagagctggagtgaagggagctagtggtaaagggagctggtggaggggtggcggcaggggtaaggggcaggggacaccctctagacggagagcgggctccgaggtcctggctggccctcggtgcgcccgcccctgtgttggtcccacaatccctggcaatgagaggccagggtttattggacagagtcagttgtggggttcagagggtcagcaatcaatcaatcctccgaatccagagatttagacccagtcgtccgtattaggactggaggggggtcaataggttcagtgtttgagatgccaagggaacctgtcttttgatttggggttcaacatacagaggtagcagtcaccattatgctcaaagcggtgatcctgattggaggccctcaaaagggaactcgcttcagacctttgtcttttgaggtgcccaaaccattgtttcctgtggcaggggtccctatgatccaacaccatattgaagcctgtgcccaggtccctggaatgcaggagattctgctcattggcttctaccaacctgatgagcccctcacccagttcctagaagccgcccagcaggagtttaaccttccagtcaggtacctgcaggaatttgcccccctaggcacagggggtggtctttaccattttcgagaccagatcctggctgggagccccgaggcattcttcgtgctcaatgctgatgtctgctccgacttccccttgagtgctatgttggaagcccaccgacgccagcgtcaccctttcttactccttggcactacggctaacaggacgcaatccctcaactacggctgcatcgttgagaatccacagacacacgaggtattgcactatgtggagaaacccagcacatttatcagtgacatcatcaactgcggcatctacctcttttctcctgaagccttgaagcctcttcgggatgtcttccagcgtaatcagcaggatgggcaattggaggactcaccaggcttgtggccaggggcaggtaccatccgcctagagcaggatgtgttttcagccctggcagggcagggccagatatacgtgcatctcactgatggtatctggagtcagatcaagtccgcaggttcagccctctacgcctcccgcctctacctgagccgataccaggacactcacccagaacggctggccaagcacaccccagggggcccatggatccgagggaatgtgtacatccacccgaccgccaaggtggccccctcggctgtgctgggccccaacgtctccatcgggaagggggtgaccgtgggtgagggtgtgcggctccgggagagcatcgtcctccatggagccactttgcaggagcacacgtgtgttctgcatagcatcgtgggctgggggagcaccgtgggacgctgggcccgcgtggagggtacccccagtgaccctaaccccaacgatccccgagcccgcatggacagtgagagcctcttcaaggacgggaagctgctgcctgctatcaccatcctgggctgccgagtccggatccctgccgaggtgctcatcctgaactcgattgttctgccacacaaggagctgagccgaagcttcaccaaccagatcatcctctgagtagggctgccagaaggcccccagctcctacccactccccttgaggctgctgcctgcttggccagcctctgtccagaaaggaccagagaaagccaggctggatcgtcacatgccggggagcaatgtggatggcctggggactcctgggttttctccctcccgactccctaataaaccccgtgaaccttgga

SEQ ID NO: 136768 - DNA, 1501 bp, Homo sapiens
  Payload ID: 6781
  Gene Symbol: GMPPA
  Gene Name: GDP-mannose pyrophosphorylase A
  Uniprot ID: Q96IJ6
  ENST ID: ENST00000373908
  CDS Start-End: 49-1311
cgggcggcagagctggagtgaagggagctagtggtagcagtcaccattatgctcaaagcggtgatcctgattggaggccctcaaaagggaactcgcttcagacctttgtcttttgaggtgcccaaaccattgtttcctgtggcaggggtccctatgatccaacaccatattgaagcctgtgcccaggtccctggaatgcaggagattctgctcattggcttctaccaacctgatgagcccctcacccagttcctagaagccgcccagcaggagtttaaccttccagtcaggtacctgcaggaatttgcccccctaggcacagggggtggtctttaccattttcgagaccagatcctggctgggagccccgaggcattcttcgtgctcaatgctgatgtctgctccgacttccccttgagtgctatgttggaagcccaccgacgccagcgtcaccctttcttactccttggcactacggctaacaggacgcaatccctcaactacggctgcatcgttgagaatccacagacacacgaggtattgcactatgtggagaaacccagcacatttatcagtgacatcatcaactgcggcatctacctcttttctcctgaagccttgaagcctcttcgggatgtcttccagcgtaatcagcaggatgggcaattggaggactcaccaggcttgtggccaggggcaggtaccatccgcctagagcaggatgtgttttcagccctggcagggcagggccagatatacgtgcatctcactgatggtatctggagtcagatcaagtccgcaggttcagccctctacgcctcccgcctctacctgagccgataccaggacactcacccagaacggctggccaagcacaccccagggggcccatggatccgagggaatgtgtacatccacccgaccgccaaggtggccccctcggctgtgctgggccccaacgtctccatcgggaagggggtgaccgtgggtgagggtgtgcggctccgggagagcatcgtcctccatggagccactttgcaggagcacacgtgtgttctgcatagcatcgtgggctgggggagcaccgtgggacgctgggcccgcgtggagggtacccccagtgaccctaaccccaacgatccccgagcccgcatggacagtgagagcctcttcaaggacgggaagctgctgcctgctatcaccatcctgggctgccgagtccggatccctgccgaggtgctcatcctgaactcgattgttctgccacacaaggagctgagccgaagcttcaccaaccagatcatcctctgagtagggctgccagaaggcccccagctcctacccactccccttgaggctgctgcctgcttggccagcctctgtccagaaaggaccagagaaagccaggctggatcgtcacatgccggggagcaatgtggatggcctggggactcctgggttttctccctcccgactccctaataaaccccgtgaaccttgg

SEQ ID NO: 136769 - DNA, 1630 bp, Homo sapiens
  Payload ID: 6781
  Gene Symbol: GMPPA
  Gene Name: GDP-mannose pyrophosphorylase A
  Uniprot ID: Q96IJ6
  ENST ID: ENST00000373917
  CDS Start-End: 72-1493
ggaaggagcttgcagtagcgggcggcagagctggagtgaagggagctagtgtttaggtagcagtcaccattatgctcaaagcggtgatcctgattggaggccctcaaaagggaactcgcttcagacctttgtcttttgaggtgcccaaaccattgtttcctgtggcaggggtccctatgatccaacaccatattgaagcctgtgcccaggtccctggaatgcaggagattctgctcattggcttctaccaacctgatgagcccctcacccagttcctagaagccgcccagcaggagtttaaccttccagtcaggtacctgcaggaatttgcccccctaggcacagggggtggtctttaccattttcgagaccagatcctggctgggagccccgaggcattcttcgtgctcaatgctgatgtctgctccgacttccccttgagtgctatgttggaagcccaccgacgccagcgtcaccctttcttactccttggcactacggctaacaggacgcaatccctcaactacggctgcatcgttgagaatccacagacacacgaggtattgcactatgtggagaaacccagcacatttatcagtgacatcatcaactgcggcatctacctcttttctcctgaagccttgaagcctcttcgggatgtcttccagcgtaatcagcaggatgggcaattggaggactcaccaggcttgtggccaggggcaggtaccatccgcctagagcaggatgtgttttcagccctggcagggcagggccagatatacgtgcatctcactgatggtatctggagtcagatcaagtccgcaggttcagccctctacgcctcccgcctctacctgagccgataccaggacactcacccagaacggctggccaagcacaccccagggggcccatggatccgaggtacccagcctgccccaattcctaacctttggcttccaccccagccctctgaaccaggattcttgacctcgagtccagagttaaagcctcaatccctgccccttcctgatcaaattcggtttgggatatttgcccccagggcctctcttctgcttctagggaatgtgtacatccacccgaccgccaaggtggccccctcggctgtgctgggccccaacgtctccatcgggaagggggtgaccgtgggtgagggtgtgcggctccgggagagcatcgtcctccatggagccactttgcaggagcacacgtgtgttctgcatagcatcgtgggctgggggagcaccgtgggacgctgggcccgcgtggagggtacccccagtgaccctaaccccaacgatccccgagcccgcatggacagtgagagcctcttcaaggacgggaagctgctgcctgctatcaccatcctgggctgccgagtccggatccctgccgaggtgctcatcctgaactcgattgttctgccacacaaggagctgagccgaagcttcaccaaccagatcatcctctgagtagggctgccagaaggcccccagctcctacccactccccttgaggctgctgcctgcttggccagcctctgtccagaaaggaccagagaaagccaggctggatcgtcacatgccggggagcaatgtggatggcctgg

SEQ ID NO: 136770 - DNA, 907 bp, Homo sapiens
  Payload ID: 6781
  Gene Symbol: GMPPA
  Gene Name: GDP-mannose pyrophosphorylase A
  ENST ID: ENST00000455657
  CDS Start-End: 369-907
gggcggcagagctggagtgaagggagctagtggtaaagggagctggtggaggggtggcggcaggggtaaggggcaggggacaccctctagacggagagcgggctccgaggtcctggctggccctcggtgcgcccgcccctgtgttggtcccacaatccctggcaatgagaggccagggtttattggacagagtcagttgtggggttcagagggtcagcaatcaatcaatcctccgaatccagagatttagacccagtcgtccgtattaggactggaggggggtcaataggttcagtgtttgagatgccaagggaacctgtcttttgatttggggttcaacatacagagtttaggtagcagtcaccattatgctcaaagcggtgatcctgattggaggccctcaaaagggaactcgcttcagacctttgtcttttgaggtgcccaaaccattgtttcctgtggcaggggtccctatgatccaacaccatattgaagcctgtgcccaggtccctggaatgcaggagattctgctcattggcttctaccaacctgatgagcccctcacccagttcctagaagccgcccagcaggagtttaaccttccagtcaggtacctgcaggaatttgcccccctaggcacagggggtggtctttaccattttcgagaccagatcctggctgggagccccgaggcattcttcgtgctcaatgctgatgtctgctccgacttccccttgagtgctatgttggaagcccaccgacgccagcgtcaccctttcttactccttggcactacggctaacaggacgcaatccctcaactacggctgcatcgttgagaatccacagacacacgaggtattgcactatgtggagaaacccagcacatttatcagtgacatcatcaa

SEQ ID NO: 136771 - DNA, 1783 bp, Homo sapiens
  Payload ID: 6781
  Gene Symbol: GMPPA
  Gene Name: GDP-mannose pyrophosphorylase A
  ENST ID: ENST00000443704
  CDS Start-End: 366-1238
gcgggcggcagagctggagtgaagggagctagtggtaaagggagctggtggaggggtggcggcaggggtaaggggcaggggacaccctctagacggagagcgggctccgaggtcctggctggccctcggtgcgcccgcccctgtgttggtcccacaatccctggcaatgagaggccagggtttattggacagagtcagttgtggggttcagagggtcagcaatcaatcaatcctccgaatccagagatttagacccagtcgtccgtattaggactggaggggggtcaataggttcagtgtttgagatgccaagggaacctgtcttttgatttggggttcaacatacagaggtagcagtcaccattatgctcaaagcggtgatcctgattggaggccctcaaaagggaactcgcttcagacctttgtcttttgaggtgcccaaaccattgtttcctgtggcaggggtccctatgatccaacaccatattgaagcctgtgcccaggtccctggaatgcaggagattctgctcattggcttctaccaacctgatgagcccctcacccagttcctagaagccgcccagcaggagtttaaccttccagtcaggtacctgcaggaatttgcccccctaggcacagggggtggtctttaccattttcgagaccagatcctggctgggagccccgaggcattcttcgtgctcaatgctgatgtctgctccgacttccccttgagtgctatgttggaagcccaccgacgccagcgtcaccctttcttactccttggcactacggctaacaggacgcaatccctcaactacggctgcatcgttgagaatccacagacacacgaggtattgcactatgtggagaaacccagcacatttatcagtgacatcatcaactgcggcatctacctcttttctcctgaagccttgaagcctcttcgggatgtcttccagcgtaatcagcaggatgggcaattggaggactcaccaggcttgtggccaggggcaggtaccatccgcctagagcaggatgtgttttcagccctggcagggcagggccagatatacgtgcatctcactgatggtatctggagtcagatcaagtccgcaggttcagccctctacgcctcccgcctctacctgagccgataccaggacactcacccagaacggctggccaagcacaccccagggggcccatggatccgagggcctctcttctgcttctagggaatgtgtacatccacccgaccgccaaggtggccccctcggctgtgctgggccccaacgtctccatcgggaagggggtgaccgtgggtgagggtgtgcggctccgggagagcatcgtcctccatggagccactttgcaggagcacacgtgtgttctgcatagcatcgtgggctgggggagcaccgtgggacgctgggcccgcgtggagggtacccccagtgaccctaaccccaacgatccccgagcccgcatggacagtgagagcctcttcaaggacgggaagctgctgcctgctatcaccatcctgggctgccgagtccggatccctgccgaggtgctcatcctgaactcgattgttctgccacacaaggagctgagccgaagcttcaccaaccagatcatcctctgagtagggctgccagaaggcccccagctcctacccactccccttgaggctgctgcctgcttggccagcctctgtccagaaaggaccagagaaagccaggctggatcgtcacatgccggggagcaatgtggatggcct

SEQ ID NO: 136772 - DNA, 786 bp, Homo sapiens
  Payload ID: 6781
  Gene Symbol: GMPPA
  Gene Name: GDP-mannose pyrophosphorylase A
  ENST ID: ENST00000435316
  CDS Start-End: 39-786
gcggcagagctggagtgaagggagctagtggggtccctatgatccaacaccatattgaagcctgtgcccaggtccctggaatgcaggagattctgctcattggcttctaccaacctgatgagcccctcacccagttcctagaagccgcccagcaggagtttaaccttccagtcaggtacctgcaggaatttgcccccctaggcacagggggtggtctttaccattttcgagaccagatcctggctgggagccccgaggcattcttcgtgctcaatgctgatgtctgctccgacttccccttgagtgctatgttggaagcccaccgacgccagcgtcaccctttcttactccttggcactacggctaacaggacgcaatccctcaactacggctgcatcgttgagaatccacagacacacgaggtattgcactatgtggagaaacccagcacatttatcagtgacatcatcaactgcggcatctacctcttttctcctgaagccttgaagcctcttcgggatgtcttccagcgtaatcagcaggatgggcaattggaggactcaccaggcttgtggccaggggcaggtaccatccgcctagagcaggatgtgttttcagccctggcagggcagggccagatatacgtgcatctcactgatggtatctggagtcagatcaagtccgcaggttcagccctctacgcctcccgcctctacctgagccgataccaggacactcacccagaacggctggccaagcacaccccagggggcccatggatccgag

SEQ ID NO: 136773 - DNA, 1473 bp, Homo sapiens
  Payload ID: 6781
  Gene Symbol: GMPPA
  Gene Name: GDP-mannose pyrophosphorylase A
  ENST ID: ENST00000622191
  CDS Start-End: 22-1221
gtttaggtagcagtcaccattatgctcaaagcggtgatcctgattggaggccctcaaaagggaactcgcttcagacctttgtcttttgaggtgcccaaaccattgtttcctgtggcaggggtccctatgatccaacaccatattgaagcctgtgcccaggtccctggaatgcaggagattctgctcattggcttctaccaacctgatgagcccctcacccagttcctagaagccgcccagcaggagtttaaccttccagtcaggtacctgcaggaatttgcccccctaggcacagggggtggtctttaccattttcgagaccagatcctggctgggagccccgaggcattcttcgtgctcaatgctgatgtctgctccgacttccccttgagtgctatgttggaagcccaccgacgccagcgtcaccctttcttactccttggcactacggctaacaggacgcaatccctcaactacggctgcatcgttgagaatccacagacacacgaggtattgcactatgtggagaaacccagcacatttatcagtgacatcatcaactgcggcatctacctcttttctcctgaagccttgaagcctcttcgggatgtcttccagcgtaatcagcaggatgggcaattggaggactcaccaggcttgtggccaggggcaggtaccatccgcctagagcaggatgtgttttcagccctggcagggcagggccagatatacgtgcatctcactgatggtatctggagtcagatcaagtccgcaggttcagccctctacgcctcccgcctctacctgagccgataccaggacactcacccagaacggctggccaagcacaccccagggggcccatggatccgagggaatgtgtacatccacccgaccgccaaggtggccccctcggctgtgctgggccccaacgtctccatcgggaagggggtgaccgtgggtgagggtgtgcggctccgggagagcatcgtcctccatggagccactttgcaggagcacacgtgtgttctgcatagcatcgtgggctgggggagcaccgtgggacgctgggcccgcgtggaggtacccccagtgaccctaaccccaacgatccccgagcccgcatggacagtgagagcctcttcaaggacgggaagctgctgcctgctatcaccatcctgggctgccgagtccggatccctgccgaggtgctcatcctgaactcgattgttctgccacacaaggagctgagccgaagcttcaccaaccagatcatcctctgagtagggctgccagaaggcccccagctcctacccactccccttgaggctgctgcctgcttggccagcctctgtccagaaaggaccagagaaagccaggctggatcgtcacatgccggggagcaatgtggatggcctggggactcctgggttttctccctcccgactccctaataaaccccgtgaaccttgg

SEQ ID NO: 136774 - DNA, 571 bp, Homo sapiens
  Payload ID: 6781
  Gene Symbol: GMPPA
  Gene Name: GDP-mannose pyrophosphorylase A
  ENST ID: ENST00000480034
  CDS Start-End: 1-343
catccacccgaccgccaaggtggccccctcggctgtgctgggccccaacgtctccatcgggaagggggtgaccgtgggtgagggtgtgcggctccgggagagcatcgtcctccatggagccactttgcaggagcacacgtgtgttctgcatagcatcgtgggctgggggagcaccgtgggacgctgggcccgcgtggagggtacccccagtgaccctaaccccaacgatccccgagcccgcatggacagtgagagcctcttcaaggacgggaagctgctgcctgctatcaccatcctgggtatggcttcctgggggccagggctgggggaacccctcagctgatggccagtggccccggggagcattcgttcctctgtgtgcacgcgtgtttcttcttttagcaaacagttaccaagggcctgctgtgtgccaggccctgtgtgagtcaccgggggcatgagaccaggggcacagatgggcaggagggctccctccctgctggcagtggcccccagctccctgcccctgtctcccctcccatgacctcccctggtgccctcatccatgctg

SEQ ID NO: 136775 - DNA, 3217 bp, Homo sapiens
  Payload ID: 6782
  Gene Symbol: GMPPB
  Gene Name: GDP-mannose pyrophosphorylase B
  Uniprot ID: Q9Y5P6
  ENST ID: ENST00000308375
  CDS Start-End: 226-1389
gagttcggggccagcagccgtctacccggtgtcgcgttctgtgttgtggcggccctggatccggcgtcagggcgaccgggcggacgaggtggagccagagtctgtcaggcgggttggtgaagggcgcggggccgggcacggcgttgggagtgcgcggcagggaccggccaggcgggctgcaggcacctcagagcccgggacaccccctcaacgtccgcaggcgcgatgaaggcactgatcttagtggggggctatgggacgcggctacggccgctgacgctgagcaccccgaagccactggtggacttctgcaataagcccatcttgctgcaccaagtggaggcgctagccgcggcaggcgtggaccacgtgatcctggccgtgagctacatgtcgcaggtgctggagaaggaaatgaaggcacaggagcagaggctgggaatccgaatctccatgtcccatgaagaggagcctttggggacagctgggcccctggcgctggcccgtgacctactctctgagactgcagaccctttcttcgtcctcaacagtgacgtgatctgcgatttccccttccaagccatggtgcagttccaccggcaccatggccaggagggctccatcctggtgaccaaggtggaggaaccctccaagtacggtgtggtggtgtgtgaggctgacacaggccgcattcaccggttcgtggagaagccacaggtgtttgtgtccaataagatcaacgcaggcatgtacatcctgagccctgcagtgctgcagcgcatccagctgcagcctacgtccattgagaaggaggtcttccccattatggccaaggaggggcagctatatgccatggagttacagggcttctggatggacattgggcagcccaaggacttcctcactggcatgtgcctcttcctgcagtcactgaggcagaagcagcctgagcggctgtgctcaggccctggcattgtgggcaacgtgctggtggacccaagtgcccgcatcggccagaactgcagcattggccccaatgtgagcctgggacctggcgtggtggtcgaagatggtgtgtgtatccggcggtgcacggtgctgcgggatgcccggatccgttcccattcctggcttgagtcctgcattgtgggctggcgctgccgcgtgggtcagtgggtaagcctgtgggctgggctgggtggggagaggggcggggagtgtgcctgcctccctgacaaggcctatcctctcctggaggtacgcatggagaacgtgacagtgctgggtgaggacgtcatagttaatgatgagctctacctcaacggagccagcgtgctgccccacaagtctattggcgagtcagtgccagagcctcgtatcatcatgtgaggggatgcagtggggctggccgagccccggttttcccatcagcaaggggagtgctggcctgacacatcagaagaccctggacttgtcattatttgtctggggggcactgggtgaagctgaagctgttggacacctgccttctcatgtggacatcatctggcaggatccctgctgggcacaccccacaaaccccactccctcaagaagggccagggccagggctgtatggaataataatttaatgctcactgtggccctgactgaaagtcaagctcaggcacaattagggccatggctgggctcccaccaatgaggatacaggcaggcaaggaggttggatgtggtggtgtgggatacaggagaagggcaaagggagctcataaatagggcccagcctggctctgggttcaaaggtggaggttccaggatggcacaggctgtgagggctaggcagctgaggaggtagtactcgtattggctcccttctcccagtcctctacagacacgatggtggttttgcagaagaagcagtccttgttgttcatcaggtgctggttgatacaggctctacaacaggggaggggatgaggactgccctgcatgtacctactgctctccccaccaccaagctgtggggcccacttacttgcaggacttgtggccacagggctggaacacagcagagatggggtgggcatagcagatggggcagaggtcctcctcactggtgggctgcagggaggagagtgaagggtgggctggagttggatgcctggctatgtggatgtccgttgtgcctgtgtaggagtgcacacatattcaagtggcatggacctgtgcaccgtgttcccactcaccagggaggcagctgctgcctgggcagatgcagaggtcaggtgcgccagcatctgttccacttgggccagctcatcggcactgatataatccgcatctggggagtggtaggtagtgtcaagtcagaggtagctgaggatgtgatgcctcttgaatattcccagcctaggactttgctgttcttaaggctcctgacccgacccagccccagatttccctgacctgccccaccagcccactcacagctctgcagggagaagcgcttccggtcaggggctggcagagcagtgccaggtgctgggggctctggctgtcccaggagatagcatattgagcgtagctggaagcagggatctgccaggagcactgatgtggcttgctctctcctaggtaggggagggtgcaagggcagtcagaaggcttggggcctggctaaaagtctctcttgggattgccaatgaggagtgccatggctcgtacatgatcaccccccctgcatcctttccgtctccctgcttcccaaaccccaagtcctgtattctagtaaggtgccacacagcctgttttttttttttttttcttgagacgagtctcgctctgttgcccaggctggagtgcgatggcacgatctcggctcactgcaacctccacctcccgggttcaagtgattctcctgctttagcctcccgagtagctggaattgcagacgcccaccaccacgcccggctaattgttgtatttttagtagagacagggtttcaccaggttggccaggctggtctcgaattcctgacctcaggtgatccacctgccttggcttcccaaagtgctgggattacaggcgtgagccaccgcgcccggcctggggtaccactttaagaaggctcaggcgaaccaccttaagatagtgagagtctgcctgccccataatattatcagtccttcaaagtcacttcaaataaacactaacagc

SEQ ID NO: 136776 - DNA, 1582 bp, Homo sapiens
  Payload ID: 6782
  Gene Symbol: GMPPB
  Gene Name: GDP-mannose pyrophosphorylase B
  Uniprot ID: Q9Y5P6
  ENST ID: ENST00000308388
  CDS Start-End: 224-1306
gttcggggccagcagccgtctacccggtgtcgcgttctgtgttgtggcggccctggatccggcgtcagggcgaccgggcggacgaggtggagccagagtctgtcaggcgggttggtgaagggcgcggggccgggcacggcgttgggagtgcgcggcagggaccggccaggcgggctgcaggcacctcagagcccgggacaccccctcaacgtccgcaggcgcgatgaaggcactgatcttagtggggggctatgggacgcggctacggccgctgacgctgagcaccccgaagccactggtggacttctgcaataagcccatcttgctgcaccaagtggaggcgctagccgcggcaggcgtggaccacgtgatcctggccgtgagctacatgtcgcaggtgctggagaaggaaatgaaggcacaggagcagaggctgggaatccgaatctccatgtcccatgaagaggagcctttggggacagctgggcccctggcgctggcccgtgacctactctctgagactgcagaccctttcttcgtcctcaacagtgacgtgatctgcgatttccccttccaagccatggtgcagttccaccggcaccatggccaggagggctccatcctggtgaccaaggtggaggaaccctccaagtacggtgtggtggtgtgtgaggctgacacaggccgcattcaccggttcgtggagaagccacaggtgtttgtgtccaataagatcaacgcaggcatgtacatcctgagccctgcagtgctgcagcgcatccagctgcagcctacgtccattgagaaggaggtcttccccattatggccaaggaggggcagctatatgccatggagttacagggcttctggatggacattgggcagcccaaggacttcctcactggcatgtgcctcttcctgcagtcactgaggcagaagcagcctgagcggctgtgctcaggccctggcattgtgggcaacgtgctggtggacccaagtgcccgcatcggccagaactgcagcattggccccaatgtgagcctgggacctggcgtggtggtcgaagatggtgtgtgtatccggcggtgcacggtgctgcgggatgcccggatccgttcccattcctggcttgagtcctgcattgtgggctggcgctgccgcgtgggtcagtgggtacgcatggagaacgtgacagtgctgggtgaggacgtcatagttaatgatgagctctacctcaacggagccagcgtgctgccccacaagtctattggcgagtcagtgccagagcctcgtatcatcatgtgaggggatgcagtggggctggccgagccccggttttcccatcagcaaggggagtgctggcctgacacatcagaagaccctggacttgtcattatttgtctggggggcactgggtgaagctgaagctgttggacacctgccttctcatgtggacatcatctggcaggatccctgctgggcacaccccacaaaccccactccctcaagaagggccagggccagggctgtatggaataataatttaatgctcactgtggccctgactgaaagtcaagctca

SEQ ID NO: 136777 - DNA, 6108 bp, Homo sapiens
  Payload ID: 6782
  Gene Symbol: GMPPB
  Gene Name: GDP-mannose pyrophosphorylase B
  Uniprot ID: Q9Y5P6
  ENST ID: ENST00000480687
  CDS Start-End: 118-1200
gagttcggggccagcagccgtctacccggtgtcgcgttctgtgttgtggcggccctggatccggcgtcagggcgaccgggcggacgaggtggagccagagtctgtcaggcgggcgcgatgaaggcactgatcttagtggggggctatgggacgcggctacggccgctgacgctgagcaccccgaagccactggtggacttctgcaataagcccatcttgctgcaccaagtggaggcgctagccgcggcaggcgtggaccacgtgatcctggccgtgagctacatgtcgcaggtgctggagaaggaaatgaaggcacaggagcagaggctgggaatccgaatctccatgtcccatgaagaggagcctttggggacagctgggcccctggcgctggcccgtgacctactctctgagactgcagaccctttcttcgtcctcaacagtgacgtgatctgcgatttccccttccaagccatggtgcagttccaccggcaccatggccaggagggctccatcctggtgaccaaggtggaggaaccctccaagtacggtgtggtggtgtgtgaggctgacacaggccgcattcaccggttcgtggagaagccacaggtgtttgtgtccaataagatcaacgcaggcatgtacatcctgagccctgcagtgctgcagcgcatccagctgcagcctacgtccattgagaaggaggtcttccccattatggccaaggaggggcagctatatgccatggagttacagggcttctggatggacattgggcagcccaaggacttcctcactggcatgtgcctcttcctgcagtcactgaggcagaagcagcctgagcggctgtgctcaggccctggcattgtgggcaacgtgctggtggacccaagtgcccgcatcggccagaactgcagcattggccccaatgtgagcctgggacctggcgtggtggtcgaagatggtgtgtgtatccggcggtgcacggtgctgcgggatgcccggatccgttcccattcctggcttgagtcctgcattgtgggctggcgctgccgcgtgggtcagtgggtacgcatggagaacgtgacagtgctgggtgaggacgtcatagttaatgatgagctctacctcaacggagccagcgtgctgccccacaagtctattggcgagtcagtgccagagcctcgtatcatcatgtgaggggatgcagtggggctggccgagccccggttttcccatcagcaaggggagtgctggcctgacacatcagaagaccctggacttgtcattatttgtctggggggcactgggtgaagctgaagctgttggacacctgccttctcatgtggacatcatctggcaggatccctgctgggcacaccccacaaaccccactccctcaagaagggccagggccagggctgtatggaataataatttaatgctcactgtggccctgactgaaagtcaagctcaggcacaattagggccatggctgggctcccaccaatgaggatacaggcaggcaaggaggttggatgtggtggtgtgggatacaggagaagggcaaagggagctcataaatagggcccagcctggctctgggttcaaaggtggaggttccaggatggcacaggctgtgagggctaggcagctgaggaggtagtactcgtattggctcccttctcccagtcctctacagacacgatggtggttttgcagaagaagcagtccttgttgttcatcaggtgctggttgatacaggctctacaacaggggaggggatgaggactgccctgcatgtacctactgctctccccaccaccaagctgtggggcccacttacttgcaggacttgtggccacagggctggaacacagcagagatggggtgggcatagcagatggggcagaggtcctcctcactggtgggctgcagggaggagagtgaagggtgggctggagttggatgcctggctatgtggatgtccgttgtgcctgtgtaggagtgcacacatattcaagtggcatggacctgtgcaccgtgttcccactcaccagggaggcagctgctgcctgggcagatgcagaggtcaggtgcgccagcatctgttccacttgggccagctcatcggcactgatataatccgcatctggggagtggtaggtagtgtcaagtcagaggtagctgaggatgtgatgcctcttgaatattcccagcctaggactttgctgttcttaaggctcctgacccgacccagccccagatttccctgacctgccccaccagcccactcacagctctgcagggagaagcgcttccggtcaggggctggcagagcagtgccaggtgctgggggctctggctgtcccaggagatagcatattgagcgtagctggaagcagggatctgccaggagcactgatgtggcttgctctctcctaggtaggggagggtgcaagggcagtcagaaggcttggggcctggctaaaagtctctcttgggattgccaatgaggagtgccatggctcgtacatgatcaccccccctgcatcctttccgtctccctgcttcccaaaccccaagtcctgtattctagtaaggtgccacacagcctgttttttttttttttttcttgagacgagtctcgctctgttgcccaggctggagtgcgatggcacgatctcggctcactgcaacctccacctcccgggttcaagtgattctcctgctttagcctcccgagtagctggaattgcagacgcccaccaccacgcccggctaattgttgtatttttagtagagacagggtttcaccaggttggccaggctggtctcgaattcctgacctcaggtgatccacctgccttggcttcccaaagtgctgggattacaggcgtgagccaccgcgcccggcctggggtaccactttaagaaggctcaggcgaaccaccttaagatagtgagagtctgcctgccccataatattatcagtccttcaaagtcacttcaaataaacactaacagcagcttggagacattcttccagactcccccttttactccccgaggaaaaacgagcggcggagagctgccagccaaaggctgacggggactttggggttggccttgctccccatctggcggtcatgcggggccattgggcacaaagggatgtagccgccccgcctcctcaaacgggaaccaataggagcccgggccccgcccctggggggagtatttaggagccgatcaggaactcgcttggagagggctagcgaagccgaagggagcgcggctaagagtgccgcaccgcctcacaacctgggaaccggagagtaggggccgtcggctggcaagaacccgccgtgcctcctcggcaagggccatccggtgccacccatgtcgcactagagcagaagagggtgagtcctggaactgcaacctgcacagagctgctctgtactgtccctggtggtcgccgccatgacctggttggtgctgctggggacactgctctgcatgctgcgcgttgggttaggcaccccggactccgagggtttcccgccccgtgcgctccacaactgcccctacaaatgtatctgcgctgccgacctgctaagctgcactggcctagggctgcaggacgtgccagccgagttacctgccgctactgcggacctcgacctgagccacaacgcgctccagcgcctgcgccccggctggttggcgcccctcttccagctgcgcgccctgcacctagaccacaacgaactagatgcgctgggtcgcggcgtcttcgtcaacgccagcggcctgaggctgctcgatctatcatctaacacgttgcgggcgcttggccgccacgacctcgacgggctgggggcgctggagaagctgcttctgttcaataaccgcttggtgcacttggacgagcatgccttccacggcctgcgcgcgctcagccatctctacctgggctgcaacgaactcgcctcgttctccttcgaccacctgcacggtctgagcgccacccacctgcttactctggacctctcctccaaccggctgggacacatctccgtacctgagctggccgcgctgccggccttcctcaagaacggcctctacttgcacaacaaccctttgccttgcgactgccgcctctaccacctgctacagcgctggcaccagcggggcctgagcgccgtgcgcgactttgcgcgcgagtacgtatgcttggccttcaaggtacccgcgtcccgcgtgcgcttcttccagcacagccgcgtctttgagaactgctcgtcggccccagctcttggcctagagcggccggaagagcacctgtacgcgctggtgggtcggtccctgaggctttactgcaacaccagcgtcccggccatgcgcattgcctgggtttcgccgcagcaggagcttctcagggcgccaggatcccgcgatggcagcatcgcggtgctggccgacggcagcttggccataggcaacgtacaggagcagcatgcgggactcttcgtgtgcctggccactgggccccgcctgcaccacaaccagacgcacgagtacaacgtgagcgtgcactttccgcgcccagagcccgaggctttcaacacaggcttcaccacactgctgggctgtgccgtgggccttgtgctcgtgctgctctacctgttcgccccaccctgccgctgctgccgccgtgcctgccgctgccgccgctggccccaaacacccagcccgctccaagagctgagcgcacagtcctcagtactcagcaccacaccgccagacgcacccagccgcaaggccagcgtccacaagcacgtagtctttctggagccaggccggaggggcctcaatggccgcgtgcagctggcagtagctgaggaattcgatctctacaaccctggaggcctgcagctgaaggctggctctgagtccgccagctccataggctccgagggtcccatgacaacctagactgcccagggctcccccacccaggcccccaccctcttgctgctcgccctgctccctgcttcggtccagagaactggcagatactggtgggaagcactgtgcctggccccccagcttcctgtatgggcctcgaaacacaatgggccttctcgctcactggtagagacaggggttgtggtccccaacctgccttctgctctgcccctgcacaggacccaaaggccccaggccctgcaaggtgtgctagttcctgctttcccgcggacttcctagtgcccaaatgccctgtgaggctgagagacccaggcccctgtggctttcaacacagcacagctgtggaagtggctgtgttcttctacagcctgtggaagaacccctgtagcagagcctcccgtccaccctcaggggctgagacagctctcgaggagtggtgctcaagagctgacgcagggccacctccccttcccaagggggtgggagggagtgggcccacagggaaaagaaggcggctctgaaggaagatctcgcccacaccccaggacagaaagaggaaacaagcccgccctctggtgaaatgggactccctccatccaccaacacccaacctcctgaaagcttcacaacttcacgcagagtccggtgggcaggcaccaggcaggaaaggctcctcaagaggttcctggtggtctggcctaagccccagccagaggccctgctctctctggcctggggcatccacccgttgttctgaaggcagagcccattctgtgggctcacaagacacagtgaaggggatcatggcctgcacccctgcttttcagcagtaaaaagcccgaaaagcctggcgagcatggccgagctgggagggccgagccggaactccacgtccctcgagagcaggagcctcttaagggctggcactggtctcagcctaatggctgaggcggtaccctggcttcatatgcatctcactgctcccactgcaggggggcagggaaggggggtctgggagcccttcatgtgtgggggccgagctgggggcccccatggccatcctggacctcgctgctccagagtttaataaaggtagcacatgcttattgctag

SEQ ID NO: 136778 - DNA, 2655 bp, Homo sapiens
  Payload ID: 6783
  Gene Symbol: GSN
  Gene Name: gelsolin
  Uniprot ID: P06396
  ENST ID: ENST00000341272
  CDS Start-End: 221-2416
tcccgcccgcgccctgcccaccccggccgcgcgcaccacaacgcccccgccccgccgcccggaaccagctgagcgcagctggacccagcagccgctgtctccagtgccgcagcagcaggtagtgctcatagctctctttgtccagtgcttcggccttggtcccagcgccttcccacggagcagcactcttcaccctgcacagccttgttagcccaacagcatggtggtggaacaccccgagttcctcaaggcagggaaggagcctggcctgcagatctggcgtgtggagaagttcgatctggtgcccgtgcccaccaacctttatggagacttcttcacgggcgacgcctacgtcatcctgaagacagtgcagctgaggaacggaaatctgcagtatgacctccactactggctgggcaatgagtgcagccaggatgagagcggggcggccgccatctttaccgtgcagctggatgactacctgaacggccgggccgtgcagcaccgtgaggtccagggcttcgagtcggccaccttcctaggctacttcaagtctggcctgaagtacaagaaaggaggtgtggcatcaggattcaagcacgtggtacccaacgaggtggtggtgcagagactcttccaggtcaaagggcggcgtgtggtccgtgccaccgaggtacctgtgtcctgggagagcttcaacaatggcgactgcttcatcctggacctgggcaacaacatccaccagtggtgtggttccaacagcaatcggtatgaaagactgaaggccacacaggtgtccaagggcatccgggacaacgagcggagtggccgggcccgagtgcacgtgtctgaggagggcactgagcccgaggcgatgctccaggtgctgggccccaagccggctctgcctgcaggtaccgaggacaccgccaaggaggatgcggccaaccgcaagctggccaagctctacaaggtctccaatggtgcagggaccatgtccgtctccctcgtggctgatgagaaccccttcgcccagggggccctgaagtcagaggactgcttcatcctggaccacggcaaagatgggaaaatctttgtctggaaaggcaagcaggcaaacacggaggagaggaaggctgccctcaaaacagcctctgacttcatcaccaagatggactaccccaagcagactcaggtctcggtccttcctgagggcggtgagaccccactgttcaagcagttcttcaagaactggcgggacccagaccagacagatggcctgggcttgtcctacctttccagccatatcgccaacgtggagcgggtgcccttcgacgccgccaccctgcacacctccactgccatggccgcccagcacggcatggatgacgatggcacaggccagaaacagatctggagaatcgaaggttccaacaaggtgcccgtggaccctgccacatatggacagttctatggaggcgacagctacatcattctgtacaactaccgccatggtggccgccaggggcagataatctataactggcagggtgcccagtctacccaggatgaggtcgctgcatctgccatcctgactgctcagctggatgaggagctgggaggtacccctgtccagagccgtgtggtccaaggcaaggagcccgcccacctcatgagcctgtttggtgggaagcccatgatcatctacaagggcggcacctcccgcgagggcgggcagacagcccctgccagcacccgcctcttccaggtccgcgccaacagcgctggagccacccgggctgttgaggtattgcctaaggctggtgcactgaactccaacgatgcctttgttctgaaaaccccctcagccgcctacctgtgggtgggtacaggagccagcgaggcagagaagacgggggcccaggagctgctcagggtgctgcgggcccaacctgtgcaggtggcagaaggcagcgagccagatggcttctgggaggccctgggcgggaaggctgcctaccgcacatccccacggctgaaggacaagaagatggatgcccatcctcctcgcctctttgcctgctccaacaagattggacgttttgtgatcgaagaggttcctggtgagctcatgcaggaagacctggcaacggatgacgtcatgcttctggacacctgggaccaggtctttgtctgggttggaaaggattctcaagaagaagaaaagacagaagccttgacttctgctaagcggtacatcgagacggacccagccaatcgggatcggcggacgcccatcaccgtggtgaagcaaggctttgagcctccctcctttgtgggctggttccttggctgggatgatgattactggtctgtggaccccttggacagggccatggctgagctggctgcctgaggaggggcagggcccacccatgtcaccggtcagtgccttttggaactgtccttccctcaaagaggccttagagcgagcagagcagctctgctatgagtgtgtgtgtgtgtgtgtgttgtttcttttttttttttttacagtatccaaaaatagccctgcaaaaattcagagtccttgcaaaattgtctaaaatgtcagtgtttgggaaattaaatccaataaaaacattttgaagtgtg

SEQ ID NO: 136779 - DNA, 879 bp, Homo sapiens
  Payload ID: 6783
  Gene Symbol: GSN
  Gene Name: gelsolin
  ENST ID: ENST00000373806
  CDS Start-End: 1-203
acaagggcggcacctcccgcgagggcgggcagacagcccctgccagcacccgcctcttccaggtccgcgccaacagcgctggagccacccgggctgttgaggtaatttccaggtcctggaacacagaagggattggcctccctgaaacctcccagctcaatgaccagatctccaggcacaggaacgggggcaggggatggtgaatgacggggtattgcctaaggctggtgcactgaactccaacgatgcctttgttctgaaaaccccctcagccgcctacctgtgggtgggtacaggagccagcgaggcagagaagacgggggcccaggagctgctcagggtgctgcgggcccaacctgtgcaggtggcagaaggcagcgagccagatggcttctgggaggccctgggcgggaaggctgcctaccgcacatccccacggctgaaggacaagaagatggatgcccatcctcctcgcctctttgcctgctccaacaagattggacgttttgtgatcgaagaggttcctggtgagctcatgcaggaagacctggcaacggatgacgtcatgcttctggacacctgggaccaggtctttgtctgggttggaaaggattctcaagaagaagaaaagacagaagccttgacttctgctaagcggtacatcgagacggacccagccaatcgggatcggcggacgcccatcaccgtggtgaagcaaggctttgagcctccctcctttgtgggctggttccttggctgggatgatgattactggtctgtggaccccttggacagggccatggctgagctggctgcctgaggaggggcagggcccacccatgtcaccggtcagtgccttttggaactgtccttccctca

SEQ ID NO: 136780 - DNA, 2562 bp, Homo sapiens
  Payload ID: 6783
  Gene Symbol: GSN
  Gene Name: gelsolin
  Uniprot ID: P06396
  ENST ID: ENST00000373808
  CDS Start-End: 128-2323
tcccgcccgcgccctgcccaccccggccgcgcgcaccacaacgcccccgccccgccgcccggaaccagctgagcgcagctggacccagcagccgctgtctccagtgccgcagcagcagcccaacagcatggtggtggaacaccccgagttcctcaaggcagggaaggagcctggcctgcagatctggcgtgtggagaagttcgatctggtgcccgtgcccaccaacctttatggagacttcttcacgggcgacgcctacgtcatcctgaagacagtgcagctgaggaacggaaatctgcagtatgacctccactactggctgggcaatgagtgcagccaggatgagagcggggcggccgccatctttaccgtgcagctggatgactacctgaacggccgggccgtgcagcaccgtgaggtccagggcttcgagtcggccaccttcctaggctacttcaagtctggcctgaagtacaagaaaggaggtgtggcatcaggattcaagcacgtggtacccaacgaggtggtggtgcagagactcttccaggtcaaagggcggcgtgtggtccgtgccaccgaggtacctgtgtcctgggagagcttcaacaatggcgactgcttcatcctggacctgggcaacaacatccaccagtggtgtggttccaacagcaatcggtatgaaagactgaaggccacacaggtgtccaagggcatccgggacaacgagcggagtggccgggcccgagtgcacgtgtctgaggagggcactgagcccgaggcgatgctccaggtgctgggccccaagccggctctgcctgcaggtaccgaggacaccgccaaggaggatgcggccaaccgcaagctggccaagctctacaaggtctccaatggtgcagggaccatgtccgtctccctcgtggctgatgagaaccccttcgcccagggggccctgaagtcagaggactgcttcatcctggaccacggcaaagatgggaaaatctttgtctggaaaggcaagcaggcaaacacggaggagaggaaggctgccctcaaaacagcctctgacttcatcaccaagatggactaccccaagcagactcaggtctcggtccttcctgagggcggtgagaccccactgttcaagcagttcttcaagaactggcgggacccagaccagacagatggcctgggcttgtcctacctttccagccatatcgccaacgtggagcgggtgcccttcgacgccgccaccctgcacacctccactgccatggccgcccagcacggcatggatgacgatggcacaggccagaaacagatctggagaatcgaaggttccaacaaggtgcccgtggaccctgccacatatggacagttctatggaggcgacagctacatcattctgtacaactaccgccatggtggccgccaggggcagataatctataactggcagggtgcccagtctacccaggatgaggtcgctgcatctgccatcctgactgctcagctggatgaggagctgggaggtacccctgtccagagccgtgtggtccaaggcaaggagcccgcccacctcatgagcctgtttggtgggaagcccatgatcatctacaagggcggcacctcccgcgagggcgggcagacagcccctgccagcacccgcctcttccaggtccgcgccaacagcgctggagccacccgggctgttgaggtattgcctaaggctggtgcactgaactccaacgatgcctttgttctgaaaaccccctcagccgcctacctgtgggtgggtacaggagccagcgaggcagagaagacgggggcccaggagctgctcagggtgctgcgggcccaacctgtgcaggtggcagaaggcagcgagccagatggcttctgggaggccctgggcgggaaggctgcctaccgcacatccccacggctgaaggacaagaagatggatgcccatcctcctcgcctctttgcctgctccaacaagattggacgttttgtgatcgaagaggttcctggtgagctcatgcaggaagacctggcaacggatgacgtcatgcttctggacacctgggaccaggtctttgtctgggttggaaaggattctcaagaagaagaaaagacagaagccttgacttctgctaagcggtacatcgagacggacccagccaatcgggatcggcggacgcccatcaccgtggtgaagcaaggctttgagcctccctcctttgtgggctggttccttggctgggatgatgattactggtctgtggaccccttggacagggccatggctgagctggctgcctgaggaggggcagggcccacccatgtcaccggtcagtgccttttggaactgtccttccctcaaagaggccttagagcgagcagagcagctctgctatgagtgtgtgtgtgtgtgtgtgttgtttcttttttttttttttacagtatccaaaaatagccctgcaaaaattcagagtccttgcaaaattgtctaaaatgtcagtgtttgggaaattaaatccaataaaaacattttgaagtgtg

SEQ ID NO: 136781 - DNA, 2657 bp, Homo sapiens
  Payload ID: 6783
  Gene Symbol: GSN
  Gene Name: gelsolin
  Uniprot ID: P06396
  ENST ID: ENST00000373818
  CDS Start-End: 70-2418
gggcggctacttaaggtcggcgacccgaggccgcggctgccgactgggtcccctgccgctgtcgccaccatggctccgcaccgccccgcgcccgcgctgctttgcgcgctgtccctggcgctgtgcgcgctgtcgctgcccgtccgcgcggccactgcgtcgcggggggcgtcccaggcgggggcgccccaggggcgggtgcccgaggcgcggcccaacagcatggtggtggaacaccccgagttcctcaaggcagggaaggagcctggcctgcagatctggcgtgtggagaagttcgatctggtgcccgtgcccaccaacctttatggagacttcttcacgggcgacgcctacgtcatcctgaagacagtgcagctgaggaacggaaatctgcagtatgacctccactactggctgggcaatgagtgcagccaggatgagagcggggcggccgccatctttaccgtgcagctggatgactacctgaacggccgggccgtgcagcaccgtgaggtccagggcttcgagtcggccaccttcctaggctacttcaagtctggcctgaagtacaagaaaggaggtgtggcatcaggattcaagcacgtggtacccaacgaggtggtggtgcagagactcttccaggtcaaagggcggcgtgtggtccgtgccaccgaggtacctgtgtcctgggagagcttcaacaatggcgactgcttcatcctggacctgggcaacaacatccaccagtggtgtggttccaacagcaatcggtatgaaagactgaaggccacacaggtgtccaagggcatccgggacaacgagcggagtggccgggcccgagtgcacgtgtctgaggagggcactgagcccgaggcgatgctccaggtgctgggccccaagccggctctgcctgcaggtaccgaggacaccgccaaggaggatgcggccaaccgcaagctggccaagctctacaaggtctccaatggtgcagggaccatgtccgtctccctcgtggctgatgagaaccccttcgcccagggggccctgaagtcagaggactgcttcatcctggaccacggcaaagatgggaaaatctttgtctggaaaggcaagcaggcaaacacggaggagaggaaggctgccctcaaaacagcctctgacttcatcaccaagatggactaccccaagcagactcaggtctcggtccttcctgagggcggtgagaccccactgttcaagcagttcttcaagaactggcgggacccagaccagacagatggcctgggcttgtcctacctttccagccatatcgccaacgtggagcgggtgcccttcgacgccgccaccctgcacacctccactgccatggccgcccagcacggcatggatgacgatggcacaggccagaaacagatctggagaatcgaaggttccaacaaggtgcccgtggaccctgccacatatggacagttctatggaggcgacagctacatcattctgtacaactaccgccatggtggccgccaggggcagataatctataactggcagggtgcccagtctacccaggatgaggtcgctgcatctgccatcctgactgctcagctggatgaggagctgggaggtacccctgtccagagccgtgtggtccaaggcaaggagcccgcccacctcatgagcctgtttggtgggaagcccatgatcatctacaagggcggcacctcccgcgagggcgggcagacagcccctgccagcacccgcctcttccaggtccgcgccaacagcgctggagccacccgggctgttgaggtattgcctaaggctggtgcactgaactccaacgatgcctttgttctgaaaaccccctcagccgcctacctgtgggtgggtacaggagccagcgaggcagagaagacgggggcccaggagctgctcagggtgctgcgggcccaacctgtgcaggtggcagaaggcagcgagccagatggcttctgggaggccctgggcgggaaggctgcctaccgcacatccccacggctgaaggacaagaagatggatgcccatcctcctcgcctctttgcctgctccaacaagattggacgttttgtgatcgaagaggttcctggtgagctcatgcaggaagacctggcaacggatgacgtcatgcttctggacacctgggaccaggtctttgtctgggttggaaaggattctcaagaagaagaaaagacagaagccttgacttctgctaagcggtacatcgagacggacccagccaatcgggatcggcggacgcccatcaccgtggtgaagcaaggctttgagcctccctcctttgtgggctggttccttggctgggatgatgattactggtctgtggaccccttggacagggccatggctgagctggctgcctgaggaggggcagggcccacccatgtcaccggtcagtgccttttggaactgtccttccctcaaagaggccttagagcgagcagagcagctctgctatgagtgtgtgtgtgtgtgtgtgttgtttcttttttttttttttacagtatccaaaaatagccctgcaaaaattcagagtccttgcaaaattgtctaaaatgtcagtgtttgggaaattaaatccaataaaaacattttgaagtgtg

SEQ ID NO: 136782 - DNA, 3341 bp, Homo sapiens
  Payload ID: 6783
  Gene Symbol: GSN
  Gene Name: gelsolin
  Uniprot ID: P06396
  ENST ID: ENST00000373823
  CDS Start-End: 906-3101
gctggagtgcaatggcacgatatcagctcactgaagcctccacctcctgggctcaagcactcctcccacctcagccccccaggtagctgagactacaggaatggataaagcacggagaggaaccaagaatgtgctcagaaaaaaatccttcctcactgaaaccaggactaaggaaaggagattcccttctaccatccatggactcaggctgacggagcacgctgcctgtctgtgtctctccgtttctctctctggaacgttgtcagatgtcacggcggagggaaaagagacctggaatgacttgccgaatttttagcccataaccaggcactgtgtaaaccgctttacctcattcagtctttgcaattataccacaaggtcacactgtttagaaggagaaagaagagctcgctgtgaaaaacgctccacaatgctgcagagccttgtgaaggtggaagagtactctcatcagcaaacggcattccttccatggaaaatgtcattgggaggaaagcaggttcaagtgattctcctgcctcagcctcctgagtagctgggattacagggacaaactacaaggcattcgatgctcaacaaatacttgtgctgataacttctctttctgaagccagctccaggagaggtctgtaatcagaagagcccctgaaccctgaagcctcctgggctgcccagcccaggcatctcctctcctcactctgggaaggaggtggtcttctggcaaaagaagatatcaaagttcttccatcagaggagatccttatcagcaagacattcactctgaggtagtgctcatagctctctttgtccagtgcttcggccttggtcccagcgccttcccacggagcagcactcttcaccctgcacagccttgttagcccaacagcatggtggtggaacaccccgagttcctcaaggcagggaaggagcctggcctgcagatctggcgtgtggagaagttcgatctggtgcccgtgcccaccaacctttatggagacttcttcacgggcgacgcctacgtcatcctgaagacagtgcagctgaggaacggaaatctgcagtatgacctccactactggctgggcaatgagtgcagccaggatgagagcggggcggccgccatctttaccgtgcagctggatgactacctgaacggccgggccgtgcagcaccgtgaggtccagggcttcgagtcggccaccttcctaggctacttcaagtctggcctgaagtacaagaaaggaggtgtggcatcaggattcaagcacgtggtacccaacgaggtggtggtgcagagactcttccaggtcaaagggcggcgtgtggtccgtgccaccgaggtacctgtgtcctgggagagcttcaacaatggcgactgcttcatcctggacctgggcaacaacatccaccagtggtgtggttccaacagcaatcggtatgaaagactgaaggccacacaggtgtccaagggcatccgggacaacgagcggagtggccgggcccgagtgcacgtgtctgaggagggcactgagcccgaggcgatgctccaggtgctgggccccaagccggctctgcctgcaggtaccgaggacaccgccaaggaggatgcggccaaccgcaagctggccaagctctacaaggtctccaatggtgcagggaccatgtccgtctccctcgtggctgatgagaaccccttcgcccagggggccctgaagtcagaggactgcttcatcctggaccacggcaaagatgggaaaatctttgtctggaaaggcaagcaggcaaacacggaggagaggaaggctgccctcaaaacagcctctgacttcatcaccaagatggactaccccaagcagactcaggtctcggtccttcctgagggcggtgagaccccactgttcaagcagttcttcaagaactggcgggacccagaccagacagatggcctgggcttgtcctacctttccagccatatcgccaacgtggagcgggtgcccttcgacgccgccaccctgcacacctccactgccatggccgcccagcacggcatggatgacgatggcacaggccagaaacagatctggagaatcgaaggttccaacaaggtgcccgtggaccctgccacatatggacagttctatggaggcgacagctacatcattctgtacaactaccgccatggtggccgccaggggcagataatctataactggcagggtgcccagtctacccaggatgaggtcgctgcatctgccatcctgactgctcagctggatgaggagctgggaggtacccctgtccagagccgtgtggtccaaggcaaggagcccgcccacctcatgagcctgtttggtgggaagcccatgatcatctacaagggcggcacctcccgcgagggcgggcagacagcccctgccagcacccgcctcttccaggtccgcgccaacagcgctggagccacccgggctgttgaggtattgcctaaggctggtgcactgaactccaacgatgcctttgttctgaaaaccccctcagccgcctacctgtgggtgggtacaggagccagcgaggcagagaagacgggggcccaggagctgctcagggtgctgcgggcccaacctgtgcaggtggcagaaggcagcgagccagatggcttctgggaggccctgggcgggaaggctgcctaccgcacatccccacggctgaaggacaagaagatggatgcccatcctcctcgcctctttgcctgctccaacaagattggacgttttgtgatcgaagaggttcctggtgagctcatgcaggaagacctggcaacggatgacgtcatgcttctggacacctgggaccaggtctttgtctgggttggaaaggattctcaagaagaagaaaagacagaagccttgacttctgctaagcggtacatcgagacggacccagccaatcgggatcggcggacgcccatcaccgtggtgaagcaaggctttgagcctccctcctttgtgggctggttccttggctgggatgatgattactggtctgtggaccccttggacagggccatggctgagctggctgcctgaggaggggcagggcccacccatgtcaccggtcagtgccttttggaactgtccttccctcaaagaggccttagagcgagcagagcagctctgctatgagtgtgtgtgtgtgtgtgtgttgtttcttttttttttttttacagtatccaaaaatagccctgcaaaaattcagagtccttgcaaaattgtctaaaatgtcagtgtttgggaaattaaatccaataaaaacattttgaagtgtgt

SEQ ID NO: 136783 - DNA, 2311 bp, Homo sapiens
  Payload ID: 6783
  Gene Symbol: GSN
  Gene Name: gelsolin
  ENST ID: ENST00000394353
  CDS Start-End: 22-2268
atagctccccccagcctcgcgatggccgaggaagaagccctcaggggcaattctgacccatggcccaacagcatggtggtggaacaccccgagttcctcaaggcagggaaggagcctggcctgcagatctggcgtgtggagaagttcgatctggtgcccgtgcccaccaacctttatggagacttcttcacgggcgacgcctacgtcatcctgaagacagtgcagctgaggaacggaaatctgcagtatgacctccactactggctgggcaatgagtgcagccaggatgagagcggggcggccgccatctttaccgtgcagctggatgactacctgaacggccgggccgtgcagcaccgtgaggtccagggcttcgagtcggccaccttcctaggctacttcaagtctggcctgaagtacaagaaaggaggtgtggcatcaggattcaagcacgtggtacccaacgaggtggtggtgcagagactcttccaggtcaaagggcggcgtgtggtccgtgccaccgaggtacctgtgtcctgggagagcttcaacaatggcgactgcttcatcctggacctgggcaacaacatccaccagtggtgtggttccaacagcaatcggtatgaaagactgaaggccacacaggtgtccaagggcatccgggacaacgagcggagtggccgggcccgagtgcacgtgtctgaggagggcactgagcccgaggcgatgctccaggtgctgggccccaagccggctctgcctgcaggtaccgaggacaccgccaaggaggatgcggccaaccgcaagctggccaagctctacaaggtctccaatggtgcagggaccatgtccgtctccctcgtggctgatgagaaccccttcgcccagggggccctgaagtcagaggactgcttcatcctggaccacggcaaagatgggaaaatctttgtctggaaaggcaagcaggcaaacacggaggagaggaaggctgccctcaaaacagcctctgacttcatcaccaagatggactaccccaagcagactcaggtctcggtccttcctgagggcggtgagaccccactgttcaagcagttcttcaagaactggcgggacccagaccagacagatggcctgggcttgtcctacctttccagccatatcgccaacgtggagcgggtgcccttcgacgccgccaccctgcacacctccactgccatggccgcccagcacggcatggatgacgatggcacaggccagaaacagatctggagaatcgaaggttccaacaaggtgcccgtggaccctgccacatatggacagttctatggaggcgacagctacatcattctgtacaactaccgccatggtggccgccaggggcagataatctataactggcagggtgcccagtctacccaggatgaggtcgctgcatctgccatcctgactgctcagctggatgaggagctgggaggtacccctgtccagagccgtgtggtccaaggcaaggagcccgcccacctcatgagcctgtttggtgggaagcccatgatcatctacaagggcggcacctcccgcgagggcgggcagacagcccctgccagcacccgcctcttccaggtccgcgccaacagcgctggagccacccgggctgttgaggtattgcctaaggctggtgcactgaactccaacgatgcctttgttctgaaaaccccctcagccgcctacctgtgggtgggtacaggagccagcgaggcagagaagacgggggcccaggagctgctcagggtgctgcgggcccaacctgtgcaggtggcagaaggcagcgagccagatggcttctgggaggccctgggcgggaaggctgcctaccgcacatccccacggctgaaggacaagaagatggatgcccatcctcctcgcctctttgcctgctccaacaagattggacgttttgtgatcgaagaggttcctggtgagctcatgcaggaagacctggcaacggatgacgtcatgcttctggacacctgggaccaggtctttgtctgggttggaaaggattctcaagaagaagaaaagacagaagccttgacttctgctaagcggtacatcgagacggacccagccaatcgggatcggcggacgcccatcaccgtggtgaagcaaggctttgagcctccctcctttgtgggctggttccttggctgggatgatgattactggtctgtggaccccttggacagggccatggctgagctggctgcctgaggaggggcagggcccacccatgtcaccggtcagtgccttttgg

SEQ ID NO: 136784 - DNA, 1042 bp, Homo sapiens
  Payload ID: 6783
  Gene Symbol: GSN
  Gene Name: gelsolin
  ENST ID: ENST00000432226
  CDS Start-End: 263-1042
ctcccccacccgcctgcccggccgccccgccccgagggcggctcccgcccgcgccctgcccaccccggccgcgcgcaccacaacgcccccgccccgccgcccggaaccagctgagcgcagctggacccagcagccgctgtctccagtgccgcagcagcaggtagtgctcatagctctctttgtccagtgcttcggccttggtcccagcgccttcccacggagcagcactcttcaccctgcacagccttgttagcccaacagcatggtggtggaacaccccgagttcctcaaggcagggaaggagcctggcctgcagatctggcgtgtggagaagttcgatctggtgcccgtgcccaccaacctttatggagacttcttcacgggcgacgcctacgtcatcctgaagacagtgcagctgaggaacggaaatctgcagtatgacctccactactggctgggcaatgagtgcagccaggatgagagcggggcggccgccatctttaccgtgcagctggatgactacctgaacggccgggccgtgcagcaccgtgaggtccagggcttcgagtcggccaccttcctaggctacttcaagtctggcctgaagtacaagaaaggaggtgtggcatcaggattcaagcacgtggtacccaacgaggtggtggtgcagagactcttccaggtcaaagggcggcgtgtggtccgtgccaccgaggtacctgtgtcctgggagagcttcaacaatggcgactgcttcatcctggacctgggcaacaacatccaccagtggtgtggttccaacagcaatcggtatgaaagactgaaggccacacaggtgtccaagggcatccgggacaacgagcggagtggccgggcccgagtgcacgtgtctgaggagggcactgagcccgaggcgatgctccaggtgctgggccccaagccggctctgcctgcaggtaccgaggacaccgccaaggaggatgcggccaaccgcaagctggccaagctctacaaggtctccaatggtgcagggaccatgtcc

SEQ ID NO: 136785 - DNA, 2767 bp, Homo sapiens
  Payload ID: 6783
  Gene Symbol: GSN
  Gene Name: gelsolin
  ENST ID: ENST00000449733
  CDS Start-End: 225-2528
tcccgcccgcgccctgcccaccccggccgcgcgcaccacaacgcccccgccccgccgcccggaaccagctgagcgcagctggacccagcagccgctgtctccagtgccgcagcagcaggtagtgctcatagctctctttgtccagtgcttcggccttggtcccagcgccttcccacggagcagcactcttcaccctgcacagccttgttaggagaaggggatgaatgaatacaggacttacgcgtctgctgtggcccagctggcttccagatggtgacatgagccacccacagccggagctgttcctctttcccaaagctcagcccaacagcatggtggtggaacaccccgagttcctcaaggcagggaaggagcctggcctgcagatctggcgtgtggagaagttcgatctggtgcccgtgcccaccaacctttatggagacttcttcacgggcgacgcctacgtcatcctgaagacagtgcagctgaggaacggaaatctgcagtatgacctccactactggctgggcaatgagtgcagccaggatgagagcggggcggccgccatctttaccgtgcagctggatgactacctgaacggccgggccgtgcagcaccgtgaggtccagggcttcgagtcggccaccttcctaggctacttcaagtctggcctgaagtacaagaaaggaggtgtggcatcaggattcaagcacgtggtacccaacgaggtggtggtgcagagactcttccaggtcaaagggcggcgtgtggtccgtgccaccgaggtacctgtgtcctgggagagcttcaacaatggcgactgcttcatcctggacctgggcaacaacatccaccagtggtgtggttccaacagcaatcggtatgaaagactgaaggccacacaggtgtccaagggcatccgggacaacgagcggagtggccgggcccgagtgcacgtgtctgaggagggcactgagcccgaggcgatgctccaggtgctgggccccaagccggctctgcctgcaggtaccgaggacaccgccaaggaggatgcggccaaccgcaagctggccaagctctacaaggtctccaatggtgcagggaccatgtccgtctccctcgtggctgatgagaaccccttcgcccagggggccctgaagtcagaggactgcttcatcctggaccacggcaaagatgggaaaatctttgtctggaaaggcaagcaggcaaacacggaggagaggaaggctgccctcaaaacagcctctgacttcatcaccaagatggactaccccaagcagactcaggtctcggtccttcctgagggcggtgagaccccactgttcaagcagttcttcaagaactggcgggacccagaccagacagatggcctgggcttgtcctacctttccagccatatcgccaacgtggagcgggtgcccttcgacgccgccaccctgcacacctccactgccatggccgcccagcacggcatggatgacgatggcacaggccagaaacagatctggagaatcgaaggttccaacaaggtgcccgtggaccctgccacatatggacagttctatggaggcgacagctacatcattctgtacaactaccgccatggtggccgccaggggcagataatctataactggcagggtgcccagtctacccaggatgaggtcgctgcatctgccatcctgactgctcagctggatgaggagctgggaggtacccctgtccagagccgtgtggtccaaggcaaggagcccgcccacctcatgagcctgtttggtgggaagcccatgatcatctacaagggcggcacctcccgcgagggcgggcagacagcccctgccagcacccgcctcttccaggtccgcgccaacagcgctggagccacccgggctgttgaggtattgcctaaggctggtgcactgaactccaacgatgcctttgttctgaaaaccccctcagccgcctacctgtgggtgggtacaggagccagcgaggcagagaagacgggggcccaggagctgctcagggtgctgcgggcccaacctgtgcaggtggcagaaggcagcgagccagatggcttctgggaggccctgggcgggaaggctgcctaccgcacatccccacggctgaaggacaagaagatggatgcccatcctcctcgcctctttgcctgctccaacaagattggacgttttgtgatcgaagaggttcctggtgagctcatgcaggaagacctggcaacggatgacgtcatgcttctggacacctgggaccaggtctttgtctgggttggaaaggattctcaagaagaagaaaagacagaagccttgacttctgctaagcggtacatcgagacggacccagccaatcgggatcggcggacgcccatcaccgtggtgaagcaaggctttgagcctccctcctttgtgggctggttccttggctgggatgatgattactggtctgtggaccccttggacagggccatggctgagctggctgcctgaggaggggcagggcccacccatgtcaccggtcagtgccttttggaactgtccttccctcaaagaggccttagagcgagcagagcagctctgctatgagtgtgtgtgtgtgtgtgtgttgtttcttttttttttttttacagtatccaaaaatagccctgcaaaaattcagagtccttgcaaaattgtctaaaatgtcagtgtttgggaaattaaatccaataaaaacattttgaagtgtg

SEQ ID NO: 136786 - DNA, 985 bp, Homo sapiens
  Payload ID: 6783
  Gene Symbol: GSN
  Gene Name: gelsolin
  ENST ID: ENST00000449773
  CDS Start-End: 301-985
ctcccccacccgcctgcccggccgccccgccccgagggcggctcccgcccgcgccctgcccaccccggccgcgcgcaccacaacgcccccgccccgccgcccggaaccagctgagcgcagctggacccagcagccgctgtctccagtgccgcagcagcaggtagtgctcatagctctctttgtccagtgcttcggccttggtcccagcgccttcccacggagcagcactcttcaccctgcacagccttgttagttcttgcagatacagcgctaggaaaaggggagtaattcaggtctagaatggaaaaactgttttgttgctttcccaacagcatggtggtggaacaccccgagttcctcaaggcagggaaggagcctggcctgcagatctggcgtgtggagaagttcgatctggtgcccgtgcccaccaacctttatggagacttcttcacgggcgacgcctacgtcatcctgaagacagtgcagctgaggaacggaaatctgcagtatgacctccactactggctgggcaatgagtgcagccaggatgagagcggggcggccgccatctttaccgtgcagctggatgactacctgaacggccgggccgtgcagcaccgtgaggtccagggcttcgagtcggccaccttcctaggctacttcaagtctggcctgaagtacaagaaaggaggtgtggcatcaggattcaagcacgtggtacccaacgaggtggtggtgcagagactcttccaggtcaaagggcggcgtgtggtccgtgccaccgaggtacctgtgtcctgggagagcttcaacaatggcgactgcttcatcctggacctgggcaacaacatccaccagtggtgtggttccaacagcaatcggtatgaaagactgaaggccacacaggtgtccaagggcatccgggacaacgagcggagtggccgggcccgagtgcacgtgtctgaggagggcactgagcccgagg

SEQ ID NO: 136787 - DNA, 2726 bp, Homo sapiens
  Payload ID: 6783
  Gene Symbol: GSN
  Gene Name: gelsolin
  Uniprot ID: P06396
  ENST ID: ENST00000436847
  CDS Start-End: 259-2487
tcccgcccgcgccctgcccaccccggccgcgcgcaccacaacgcccccgccccgccgcccggaaccagctgagcgcagctggacccagcagccgctgtctccagtgccgcagcagcaggtagtgctcatagctctctttgtccagtgcttcggccttggtcccagcgccttcccacggagcagcactcttcaccctgcacagccttgttagttcttgcagatacagcgctaggaaaaggggagtaattcaggtctagaatggaaaaactgttttgttgctttcccaacagcatggtggtggaacaccccgagttcctcaaggcagggaaggagcctggcctgcagatctggcgtgtggagaagttcgatctggtgcccgtgcccaccaacctttatggagacttcttcacgggcgacgcctacgtcatcctgaagacagtgcagctgaggaacggaaatctgcagtatgacctccactactggctgggcaatgagtgcagccaggatgagagcggggcggccgccatctttaccgtgcagctggatgactacctgaacggccgggccgtgcagcaccgtgaggtccagggcttcgagtcggccaccttcctaggctacttcaagtctggcctgaagtacaagaaaggaggtgtggcatcaggattcaagcacgtggtacccaacgaggtggtggtgcagagactcttccaggtcaaagggcggcgtgtggtccgtgccaccgaggtacctgtgtcctgggagagcttcaacaatggcgactgcttcatcctggacctgggcaacaacatccaccagtggtgtggttccaacagcaatcggtatgaaagactgaaggccacacaggtgtccaagggcatccgggacaacgagcggagtggccgggcccgagtgcacgtgtctgaggagggcactgagcccgaggcgatgctccaggtgctgggccccaagccggctctgcctgcaggtaccgaggacaccgccaaggaggatgcggccaaccgcaagctggccaagctctacaaggtctccaatggtgcagggaccatgtccgtctccctcgtggctgatgagaaccccttcgcccagggggccctgaagtcagaggactgcttcatcctggaccacggcaaagatgggaaaatctttgtctggaaaggcaagcaggcaaacacggaggagaggaaggctgccctcaaaacagcctctgacttcatcaccaagatggactaccccaagcagactcaggtctcggtccttcctgagggcggtgagaccccactgttcaagcagttcttcaagaactggcgggacccagaccagacagatggcctgggcttgtcctacctttccagccatatcgccaacgtggagcgggtgcccttcgacgccgccaccctgcacacctccactgccatggccgcccagcacggcatggatgacgatggcacaggccagaaacagatctggagaatcgaaggttccaacaaggtgcccgtggaccctgccacatatggacagttctatggaggcgacagctacatcattctgtacaactaccgccatggtggccgccaggggcagataatctataactggcagggtgcccagtctacccaggatgaggtcgctgcatctgccatcctgactgctcagctggatgaggagctgggaggtacccctgtccagagccgtgtggtccaaggcaaggagcccgcccacctcatgagcctgtttggtgggaagcccatgatcatctacaagggcggcacctcccgcgagggcgggcagacagcccctgccagcacccgcctcttccaggtccgcgccaacagcgctggagccacccgggctgttgaggtattgcctaaggctggtgcactgaactccaacgatgcctttgttctgaaaaccccctcagccgcctacctgtgggtgggtacaggagccagcgaggcagagaagacgggggcccaggagctgctcagggtgctgcgggcccaacctgtgcaggtggcagaaggcagcgagccagatggcttctgggaggccctgggcgggaaggctgcctaccgcacatccccacggctgaaggacaagaagatggatgcccatcctcctcgcctctttgcctgctccaacaagattggacgttttgtgatcgaagaggttcctggtgagctcatgcaggaagacctggcaacggatgacgtcatgcttctggacacctgggaccaggtctttgtctgggttggaaaggattctcaagaagaagaaaagacagaagccttgacttctgctaagcggtacatcgagacggacccagccaatcgggatcggcggacgcccatcaccgtggtgaagcaaggctttgagcctccctcctttgtgggctggttccttggctgggatgatgattactggtctgtggaccccttggacagggccatggctgagctggctgcctgaggaggggcagggcccacccatgtcaccggtcagtgccttttggaactgtccttccctcaaagaggccttagagcgagcagagcagctctgctatgagtgtgtgtgtgtgtgtgtgttgtttcttttttttttttttacagtatccaaaaatagccctgcaaaaattcagagtccttgcaaaattgtctaaaatgtcagtgtttgggaaattaaatccaataaaaacattttgaagtgtg

SEQ ID NO: 136788 - DNA, 2734 bp, Homo sapiens
  Payload ID: 6783
  Gene Symbol: GSN
  Gene Name: gelsolin
  Uniprot ID: P06396
  ENST ID: ENST00000412819
  CDS Start-End: 300-2495
tcccgcccgcgccctgcccaccccggccgcgcgcaccacaacgcccccgccccgccgcccggaaccagctgagcgcagctggacccagcagccgctgtctccagtgccgcagcagcaggtagtgctcatagctctctttgtccagtgcttcggccttggtcccagcgccttcccacggagcagcactcttcaccctgcacagccttgttaggccttggttgctattctgtagaagagcagagtccccataaagaggaggtgcaggaattcttcccagaggctttggagagcccaacagcatggtggtggaacaccccgagttcctcaaggcagggaaggagcctggcctgcagatctggcgtgtggagaagttcgatctggtgcccgtgcccaccaacctttatggagacttcttcacgggcgacgcctacgtcatcctgaagacagtgcagctgaggaacggaaatctgcagtatgacctccactactggctgggcaatgagtgcagccaggatgagagcggggcggccgccatctttaccgtgcagctggatgactacctgaacggccgggccgtgcagcaccgtgaggtccagggcttcgagtcggccaccttcctaggctacttcaagtctggcctgaagtacaagaaaggaggtgtggcatcaggattcaagcacgtggtacccaacgaggtggtggtgcagagactcttccaggtcaaagggcggcgtgtggtccgtgccaccgaggtacctgtgtcctgggagagcttcaacaatggcgactgcttcatcctggacctgggcaacaacatccaccagtggtgtggttccaacagcaatcggtatgaaagactgaaggccacacaggtgtccaagggcatccgggacaacgagcggagtggccgggcccgagtgcacgtgtctgaggagggcactgagcccgaggcgatgctccaggtgctgggccccaagccggctctgcctgcaggtaccgaggacaccgccaaggaggatgcggccaaccgcaagctggccaagctctacaaggtctccaatggtgcagggaccatgtccgtctccctcgtggctgatgagaaccccttcgcccagggggccctgaagtcagaggactgcttcatcctggaccacggcaaagatgggaaaatctttgtctggaaaggcaagcaggcaaacacggaggagaggaaggctgccctcaaaacagcctctgacttcatcaccaagatggactaccccaagcagactcaggtctcggtccttcctgagggcggtgagaccccactgttcaagcagttcttcaagaactggcgggacccagaccagacagatggcctgggcttgtcctacctttccagccatatcgccaacgtggagcgggtgcccttcgacgccgccaccctgcacacctccactgccatggccgcccagcacggcatggatgacgatggcacaggccagaaacagatctggagaatcgaaggttccaacaaggtgcccgtggaccctgccacatatggacagttctatggaggcgacagctacatcattctgtacaactaccgccatggtggccgccaggggcagataatctataactggcagggtgcccagtctacccaggatgaggtcgctgcatctgccatcctgactgctcagctggatgaggagctgggaggtacccctgtccagagccgtgtggtccaaggcaaggagcccgcccacctcatgagcctgtttggtgggaagcccatgatcatctacaagggcggcacctcccgcgagggcgggcagacagcccctgccagcacccgcctcttccaggtccgcgccaacagcgctggagccacccgggctgttgaggtattgcctaaggctggtgcactgaactccaacgatgcctttgttctgaaaaccccctcagccgcctacctgtgggtgggtacaggagccagcgaggcagagaagacgggggcccaggagctgctcagggtgctgcgggcccaacctgtgcaggtggcagaaggcagcgagccagatggcttctgggaggccctgggcgggaaggctgcctaccgcacatccccacggctgaaggacaagaagatggatgcccatcctcctcgcctctttgcctgctccaacaagattggacgttttgtgatcgaagaggttcctggtgagctcatgcaggaagacctggcaacggatgacgtcatgcttctggacacctgggaccaggtctttgtctgggttggaaaggattctcaagaagaagaaaagacagaagccttgacttctgctaagcggtacatcgagacggacccagccaatcgggatcggcggacgcccatcaccgtggtgaagcaaggctttgagcctccctcctttgtgggctggttccttggctgggatgatgattactggtctgtggaccccttggacagggccatggctgagctggctgcctgaggaggggcagggcccacccatgtcaccggtcagtgccttttggaactgtccttccctcaaagaggccttagagcgagcagagcagctctgctatgagtgtgtgtgtgtgtgtgtgttgtttcttttttttttttttacagtatccaaaaatagccctgcaaaaattcagagtccttgcaaaattgtctaaaatgtcagtgtttgggaaattaaatccaataaaaacattttgaagtgtg

SEQ ID NO: 136789 - DNA, 2428 bp, Homo sapiens
  Payload ID: 6783
  Gene Symbol: GSN
  Gene Name: gelsolin
  Uniprot ID: P06396
  ENST ID: ENST00000545652
  CDS Start-End: 156-2375
gtgctcccagggcccacaactgcttgaatgactattggtgttcctgtttgtgtgccctctgggccgggaagtcagagaaagaaaggagacaatttgtgattgaacagccactgtggccatcattctccttacctgtctgatgagagctgatcttcatgccactgtgtacacccaacagcatggtggtggaacaccccgagttcctcaaggcagggaaggagcctggcctgcagatctggcgtgtggagaagttcgatctggtgcccgtgcccaccaacctttatggagacttcttcacgggcgacgcctacgtcatcctgaagacagtgcagctgaggaacggaaatctgcagtatgacctccactactggctgggcaatgagtgcagccaggatgagagcggggcggccgccatctttaccgtgcagctggatgactacctgaacggccgggccgtgcagcaccgtgaggtccagggcttcgagtcggccaccttcctaggctacttcaagtctggcctgaagtacaagaaaggaggtgtggcatcaggattcaagcacgtggtacccaacgaggtggtggtgcagagactcttccaggtcaaagggcggcgtgtggtccgtgccaccgaggtacctgtgtcctgggagagcttcaacaatggcgactgcttcatcctggacctgggcaacaacatccaccagtggtgtggttccaacagcaatcggtatgaaagactgaaggccacacaggtgtccaagggcatccgggacaacgagcggagtggccgggcccgagtgcacgtgtctgaggagggcactgagcccgaggcgatgctccaggtgctgggccccaagccggctctgcctgcaggtaccgaggacaccgccaaggaggatgcggccaaccgcaagctggccaagctctacaaggtctccaatggtgcagggaccatgtccgtctccctcgtggctgatgagaaccccttcgcccagggggccctgaagtcagaggactgcttcatcctggaccacggcaaagatgggaaaatctttgtctggaaaggcaagcaggcaaacacggaggagaggaaggctgccctcaaaacagcctctgacttcatcaccaagatggactaccccaagcagactcaggtctcggtccttcctgagggcggtgagaccccactgttcaagcagttcttcaagaactggcgggacccagaccagacagatggcctgggcttgtcctacctttccagccatatcgccaacgtggagcgggtgcccttcgacgccgccaccctgcacacctccactgccatggccgcccagcacggcatggatgacgatggcacaggccagaaacagatctggagaatcgaaggttccaacaaggtgcccgtggaccctgccacatatggacagttctatggaggcgacagctacatcattctgtacaactaccgccatggtggccgccaggggcagataatctataactggcagggtgcccagtctacccaggatgaggtcgctgcatctgccatcctgactgctcagctggatgaggagctgggaggtacccctgtccagagccgtgtggtccaaggcaaggagcccgcccacctcatgagcctgtttggtgggaagcccatgatcatctacaagggcggcacctcccgcgagggcgggcagacagcccctgccagcacccgcctcttccaggtccgcgccaacagcgctggagccacccgggctgttgaggtattgcctaaggctggtgcactgaactccaacgatgcctttgttctgaaaaccccctcagccgcctacctgtgggtgggtacaggagccagcgaggcagagaagacgggggcccaggagctgctcagggtgctgcgggcccaacctgtgcaggtggcagaaggcagcgagccagatggcttctgggaggccctgggcgggaaggctgcctaccgcacatccccacggctgaaggacaagaagatggatgcccatcctcctcgcctctttgcctgctccaacaagattggacgttttgtgatcgaagaggttcctggtgagctcatgcaggaagacctggcaacggatgacgtcatgcttctggacacctgggaccaggtctttgtctgggttggaaaggattctcaagaagaagaaaagacagaagccttgacttctgctaagcggtacatcgagacggacccagccaatcgggatcggcggacgcccatcaccgtggtgaagcaaggctttgagcctccctcctttgtgggctggttccttggctgggatgatgattactggtctgtggaccccttggacagggccatggctgagctggctgcctgaggaggggcagggcccacccatgtcaccggtcagtgccttttggaactgtcctt

SEQ ID NO: 136790 - DNA, 806 bp, Homo sapiens
  Payload ID: 6783
  Gene Symbol: GSN
  Gene Name: gelsolin
  ENST ID: ENST00000477104
  CDS Start-End: 111-806
atagctccccccagcctcgcgatggccgaggaagaagccctcaggggcaattctgacccatggttcttgcagatacagcgctaggaaaaggggagtaattcaggtctagaatggaaaaactgttttgttgctttcccaacagcatggtggtggaacaccccgagttcctcaaggcagggaaggagcctggcctgcagatctggcgtgtggagaagttcgatctggtgcccgtgcccaccaacctttatggagacttcttcacgggcgacgcctacgtcatcctgaagacagtgcagctgaggaacggaaatctgcagtatgacctccactactggctgggcaatgagtgcagccaggatgagagcggggcggccgccatctttaccgtgcagctggatgactacctgaacggccgggccgtgcagcaccgtgaggtccagggcttcgagtcggccaccttcctaggctacttcaagtctggcctgaagtacaagaaaggaggtgtggcatcaggattcaagcacgtggtacccaacgaggtggtggtgcagagactcttccaggtcaaagggcggcgtgtggtccgtgccaccgaggtacctgtgtcctgggagagcttcaacaatggcgactgcttcatcctggacctgggcaacaacatccaccagtggtgtggttccaacagcaatcggtatgaaagactgaaggccacacaggtgtccaagggcatccgggacaacgagcggagtggccgggcccgagtgcacgtgtctgaggagggcactgagcccgaggcgatgctccag

SEQ ID NO: 136791 - DNA, 1094 bp, Homo sapiens
  Payload ID: 6784
  Gene Symbol: GEMIN2
  Gene Name: gem (nuclear organelle) associated protein 2
  Uniprot ID: O14893
  ENST ID: ENST00000250379
  CDS Start-End: 1-798
atgcgccgagcggaactggctggtttgaaaaccatggcgtgggtaccagcggagtccgcagtggaagagttgatgcctcggctattgccggtagagccttgcgacttgacggaaggtttcgatccctcggtacccccgaggacgcctcaggaatacctgaggcgggtccagatcgaagcagctcaatgtccagatgttgtggtagctcaaattgacccaaagaagttgaaaaggaagcaaagtgtgaatatttctctttcaggatgccaacccgcccctgaaggttattccccaacacttcaatggcaacagcaacaagtggcacagttttcaactgttcgacagaatgtgaacaaacatagaagtcactggaaatcacaacagttggatagtaatgtgacaatgccaaaatctgaagatgaagaaggctggaagaaattttgtctgggtgaaaagttatgtgctgacggggctgttggaccagccacaaatgaaagtcctggaatagattatgtacaagcaacagtaactagtgtcttggaatatctgagtaattggtttggagaaagagactttactccagaattgggaagatggctttatgctttattggcttgtcttgaaaagcctttgttacctgaggctcattcactgattcggcagcttgcaagaaggtgctctgaagtgaggctcttagtggatagcaaagatgatgagagggttcctgctttgaatttattaatctgcttggttagcaggtattttgaccaacgtgatttagctgatgagccatcttgatgtagctgatctctcagggatagaagatatttctcatgaaggcagcctaactctgaggaaaacaatgccaattcaagtacagatttcaacacatcttcaacactatgtgaagggttcacatcttaacctgtgcaattcagattgatactcagaatatgggttgatttgaatatctgaaatatcaatggaaaatcccactcagtttttgatgaacagtttgaacagttttctgtaatcaagcagcttgcatagaaattgtatgatgaaattttacataggttcttggtgctgttttg

SEQ ID NO: 136792 - DNA, 1420 bp, Homo sapiens
  Payload ID: 6784
  Gene Symbol: GEMIN2
  Gene Name: gem (nuclear organelle) associated protein 2
  Uniprot ID: O14893
  ENST ID: ENST00000308317
  CDS Start-End: 84-926
taacgctccctaaactgccacttgctcagctccgcgcctaaggtgtctattagtacgcctgcgctgtgacctagaatgggcgcatgcgccgagcggaactggctggtttgaaaaccatggcgtgggtaccagcggagtccgcagtggaagagttgatgcctcggctattgccggtagagccttgcgacttgacggaaggtttcgatccctcggtacccccgaggacgcctcaggaatacctgaggcgggtccagatcgaagcagctcaatgtccagatgttgtggtagctcaaattgacccaaagaagttgaaaaggaagcaaagtgtgaatatttctctttcaggatgccaacccgcccctgaaggttattccccaacacttcaatggcaacagcaacaagtggcacagttttcaactgttcgacagaatgtgaacaaacatagaagtcactggaaatcacaacagttggatagtaatgtgacaatgccaaaatctgaagatgaagaaggctggaagaaattttgtctgggtgaaaagttatgtgctgacggggctgttggaccagccacaaatgaaagtcctggaatagattatgtacaaattggttttcctcccttgcttagtattgttagcagaatgaatcaggcaacagtaactagtgtcttggaatatctgagtaattggtttggagaaagagactttactccagaattgggaagatggctttatgctttattggcttgtcttgaaaagcctttgttacctgaggctcattcactgattcggcagcttgcaagaaggtgctctgaagtgaggctcttagtggatagcaaagatgatgagagggttcctgctttgaatttattaatctgcttggttagcaggtattttgaccaacgtgatttagctgatgagccatcttgatgtagctgatctctcagggatagaagatatttctcatgaaggcagcctaactctgaggaaaacaatgccaattcaagtacagatttcaacacatcttcaacactatgtgaagggttcacatcttaacctgtgcaattcagattgatactcagaatatgggttgatttgaatatctgaaatatcaatggaaaatcccactcagtttttgatgaacagtttgaacagttttctgtaatcaagcagcttgcatagaaattgtatgatgaaattttacataggttcttggtgctgttttgttctttttttgttttttgttgttttgttatttacttatatacatataaaattttattgaaaatatgttttggttactaaaattttgtttgactcctaacaaaagacaatggatggccttagcatcagaattaaaataatctggattaaatggcaatgtgttcatagtcagcaataaaattaaacatttttccctttaa

SEQ ID NO: 136793 - DNA, 801 bp, Homo sapiens
  Payload ID: 6784
  Gene Symbol: GEMIN2
  Gene Name: gem (nuclear organelle) associated protein 2
  Uniprot ID: O14893
  ENST ID: ENST00000396249
  CDS Start-End: 1-753
atgcgccgagcggaactggctggtttgaaaaccatggcgtgggtaccagcggagtccgcagtggaagagttgatgcctcggctattgccggtagagccttgcgacttgacggaaggtttcgatccctcggtacccccgaggacgcctcaggaatacctgaggcgggtccagatcgaagcagctcaatgtccagatgttgtggtagctcaaattgacccaaagaagttgaaaaggaagcaaagtgtgaatatttctctttcaggatgccaacccgcccctgaaggttattccccaacacttcaatggcaacagcaacaagtggcacagttttcaactgttcgacagaatgtgaacaaacatagaagtcactggaaatcacaacagttggatagtaatgtgacaatgccaaaatctgaagatgaagaaggctggaagaaattttgtctgggtgaaaagttatgtgctgacggggctgttggaccagccacaaatgaaagtcctggaatagattatgtacaaattggttttcctcccttgcttagtattgttagcagaatgaatcaggcaacagtaactagtgtcttggaatatctgagtaattggtttggagaaagagactttactccagaattgggaagatggctttatgctttattggcttgtcttgaaaagcctttgttacctgaggctcattcactgattcggcagcttgcaagaaggtgctctgaagtgaggctcttagtggtattttgaccaacgtgatttagctgatgagccatcttgatgtagctgatctctcag

SEQ ID NO: 136794 - DNA, 825 bp, Homo sapiens
  Payload ID: 6784
  Gene Symbol: GEMIN2
  Gene Name: gem (nuclear organelle) associated protein 2
  Uniprot ID: O14893
  ENST ID: ENST00000412033
  CDS Start-End: 1-135
atgcgccgagcggaactggctggtttgaaaaccatggcgtgggtaccagcggagtccgcagtggaagagttgatgcctcggctattgccggatcgaagcagctcaatgtccagatgttgtggtagctcaaattgacccaaagaagttgaaaaggaagcaaagtgtgaatatttctctttcaggatgccaacccgcccctgaaggttattccccaacacttcaatggcaacagcaacaagtggcacagttttcaactgttcgacagaatgtgaacaaacatagaagtcactggaaatcacaacagttggatagtaatgtgacaatgccaaaatctgaagatgaagaaggctggaagaaattttgtctgggtgaaaagttatgtgctgacggggctgttggaccagccacaaatgaaagtcctggaatagattatgtacaaattggttttcctcccttgcttagtattgttagcagaatgaatcaggcaacagtaactagtgtcttggaatatctgagtaattggtttggagaaagagactttactccagaattgggaagatggctttatgctttattggcttgtcttgaaaagcctttgttacctgaggctcattcactgattcggcagcttgcaagaaggtgctctgaagtgaggctcttagtggatagcaaagatgatgagagggttcctgctttgaatttattaatctgcttggttagcaggtattttgaccaacgtgatttagctgatgagccatcttgatgtagctgatctctcagggatagaagatatttctcatgaaggcagcctaactctgaggaaaa

SEQ ID NO: 136795 - DNA, 630 bp, Homo sapiens
  Payload ID: 6784
  Gene Symbol: GEMIN2
  Gene Name: gem (nuclear organelle) associated protein 2
  ENST ID: ENST00000531684
  CDS Start-End: 1-136
actggctggtttgaaaaccatggcgtgggtaccagcggagtccgcagtggaagagttgatgcctcggctattgccggtagagccttgcgacttgacggaaggatcgaagcagctcaatgtccagatgttgtggtagctcaaattgacccaaagaagttgaaaaggaagcaaagtgtgaatatttctctttcaggatgccaacccgcccctgaaggttattccccaacacttcaatggcaacagcaacaagtggcacagttttcaactgttcgacagaatgtgaacaaacatagaagtcactggaaatcacaacagttggatagtaatgtgacaatgccaaaatctgaagatgaagaaggctggaagaaattttgtctgggtgaaaagttatgtgctgacggggctgttggaccagccacaaatgaaagtcctggaatagattatgtacaaattggttttcctcccttgcttagtattgttagcagaatgaatcaggcaacagtaactagtgtcttggaatatctgagtaattggtttggagaaagagactttactccagaattgggaagatggctttatgctttattggcttgtcttgaaaagcctttgttacctgaggctcattcactg

SEQ ID NO: 136796 - DNA, 592 bp, Homo sapiens
  Payload ID: 6784
  Gene Symbol: GEMIN2
  Gene Name: gem (nuclear organelle) associated protein 2
  ENST ID: ENST00000527381
  CDS Start-End: 1-592
tgaaaaccatggcgtgggtaccagcggagtccgcagtggaagagttgatgcctcggctattgccggtagagccttgcgacttgacggaaggtttcgatccctcggtacccccgaggacgcctcaggaatacctgaggatcgaagcagctcaatgtccagatgttgtggtagctcaaattgacccaaagaagttgaaaaggaagcaaagtgtgaatatttctctttcaggatgccaacccgcccctgaaggttattccccaacacttcaatggcaacagcaacaagtggcacagttttcaactgttcgacagaatgtgaacaaacatagaagtcactggaaatcacaacagttggatagtaatgtgacaatgccaaaatctgaagatgaagaaggctggaagaaattttgtctgggtgaaaagttatgtgctgacggggctgttggaccagccacaaatgaaagtcctggaatagattatgtacaaattggttttcctcccttgcttagtattgttagcagaatgaatcaggcaacagtaactagtgtcttggaatatctgagtaattggtttggagaaagagactttactcc

SEQ ID NO: 136797 - DNA, 658 bp, Homo sapiens
  Payload ID: 6784
  Gene Symbol: GEMIN2
  Gene Name: gem (nuclear organelle) associated protein 2
  ENST ID: ENST00000534684
  CDS Start-End: 1-658
ggctggtttgaaaaccatggcgtgggtaccagcggagtccgcagtggaagagttgatgcctcggctattgccggtagagccttgcgacttgacggaaggtttcgatccctcggtacccccgaggacgcctcaggaatacctgaggcgggtccagatcgaagcagctcaatgtccagatgttgtggtagctcaaattgacccaaagaagttgaaaaggaagcaaagtgtgaatatttctctttcaggatgccaacccgcccctgaaggttattccccaacacttcaatggcaacagcaacaagtggcacagttttcaactgttcgacagaatgtgaacaaacatagaagtcactggaaatcacaacagttggatagtaatgtgacaatgccaaaatctgaagatgaagaaggctggaagaaattttgtctgggtgaaaagttatgtgctgacggggctgttggaccagccacaaatgaaagtcctggaatagattatgtacaaattggttttcctcccttgcttagtattgttagcagaatgaatcagggaagatggctttatgctttattggcttgtcttgaaaagcctttgttacctgaggctcattcactgattcggcagcttgcaagaaggtgctctgaagtgaggctcttagtg

SEQ ID NO: 136798 - DNA, 1476 bp, Homo sapiens
  Payload ID: 6784
  Gene Symbol: GEMIN2
  Gene Name: gem (nuclear organelle) associated protein 2
  ENST ID: ENST00000525153
  CDS Start-End: 22-471
gctgtgacctagaatgggcgcatgcgccgagcggaactggctggtttgaaaaccatggcgtgggtaccagcggagtccgcagtggaagagttgatgcctcggctattgccggtagagccttgcgacttgacggaaggtttcgatccctcggtacccccgaggacgcctcaggaatacctgaggcgggtccagatcgaagcagctcaatgtccagatgttgtggtagctcaaattgacccaaagaagttgaaaaggaagcaaagtgtgaatatttctctttcaggatgccaacccgcccctgaaggttattccccaacacttcaatggcaacagcaacaagtggcacagttttcaactgttcgacagaatgtgaacaaacatagaagtcactggaaatcacaacagttggatagtaatgtgacaatgaggtggggttttgccatgttggccaggctggtcttgaactcctgacttcatgtgatcgcctgcctcggcctcccaaagtgctgggattacaggcgtgaaccaccgcacccggcctaagccaaaatctgaagatgaagaaggctggaagaaattttgtctgggtgaaaagttatgtgctgacggggctgttggaccagccacaaatgaaagtcctggaatagattatgtacaaattggttttcctcccttgcttagtattgttagcagaatgaatcaggcaacagtaactagtgtcttggaatatctgagtaattggtttggagaaagagactttactccagaattgggaagatggctttatgctttattggcttgtcttgaaaagcctttgttacctgaggctcattcactgattcggcagcttgcaagaaggtgctctgaagtgaggctcttagtggatagcaaagatgatgagagggttcctgctttgaatttattaatctgcttggttagcaggtattttgaccaacgtgatttagctgatgagccatcttgatgtagctgatctctcagggatagaagatatttctcatgaaggcagcctaactctgaggaaaacaatgccaattcaagtacagatttcaacacatcttcaacactatgtgaagggttcacatcttaacctgtgcaattcagattgatactcagaatatgggttgatttgaatatctgaaatatcaatggaaaatcccactcagtttttgatgaacagtttgaacagttttctgtaatcaagcagcttgcatagaaattgtatgatgaaattttacataggttcttggtgctgttttgttctttttttgttttttgttgttttgttatttacttatatacatataaaattttattgaaaatatgttttggttactaaaattttgtttgactcctaacaaaagacaatggatggccttagcatcagaattaaaataatctggattaaatggcaatgtgttcatagtcagcaataaaattaaacatttttccctttaa

SEQ ID NO: 136799 - DNA, 649 bp, Homo sapiens
  Payload ID: 6784
  Gene Symbol: GEMIN2
  Gene Name: gem (nuclear organelle) associated protein 2
  ENST ID: ENST00000524781
  CDS Start-End: 1-69
gatagcaaagatgatgagagggttcctgctttgaatttattaatctgcttggttagcaggtatagttaatccttggcttctttattatttatcagtgagtctcactctgttgctatagttagggtgcagtggcgcaatcacagctcactagagctttaacttcctgggctccagcaatcctcccacctcagcctcctgagtagctaggaccacaaccaagcaccaccacacctggctaattaaaaaaaattgttcgtagagacagggtctcactatgttgcccaggctggtctcaaaactcctgggctcaagcgatcctcccacctaagcctccgaaagtgcagggattacaggtgtaaagccactgcattcagcctgcatttttgtttaattgcctgtgtcctgcgttcattttcagttgtggcatatttttatttagtatctgttttatttcatttcttacatagaaattcttcttggaatttatttgaaaactttttttgttgttttgttttgagacagagtctcgctctgttgcccaggctggagtgcaatggcaccatctcggctcactacaaccttcacctcctgggttcaagcaattctcccccctcagcctcccaagtagctgggcttacaggcacctgcc

SEQ ID NO: 136800 - DNA, 3748 bp, Homo sapiens
  Payload ID: 6785
  Gene Symbol: GEMIN4
  Gene Name: gem (nuclear organelle) associated protein 4
  Uniprot ID: P57678
  ENST ID: ENST00000319004
  CDS Start-End: 120-3296
aggcctaagcgcggccgccgtggctcctgcgtctcccatcgtgccgtgcgtcccgcgccgcgttcgagttctcggaggggagggggcgttagccccgcgcagccgccggcgtcgccgccatggacctaggacccttgaacatctgtgaagaaatgactattctgcatggaggcttcttgctggccgagcagctgttccaccctaaggcactggcagaattaacaaagtctgactgggaacgtgttggacggcccatcgtggaggccttaagggagatctcctcggctgcagcacactcccagccctttgcctggaagaagaaagccctgatcatcatctgggccaaggttctgcagccgcaccccgtgaccccgtccgacacagagacacggtggcaggaagacctgttcttctcggtgggcaacatgatccccaccatcaaccacaccatcctcttcgagctgctcaaatccctggaagcttctggactctttatccagctcctgatggccctgcccaccaccatctgccatgcagaactagagcgctttctggaacatgtgaccgttgacacttctgccgaagacgtggccttcttcctggacgtctggtgggaggtgatgaagcacaagggtcacccgcaggaccccctgctctcccagtttagtgcaatggcccataagtacctgcctgccttagatgagttcccccatcctccaaagaggcttaggtcagacccagacgcgtgccccaccatgcccctgttggccatgctgctccgcgggctgacacagatccagagtcggatcctgggcccggggaggaagtgctgtgcgctggccaacctggctgacatgctgactgtgtttgcgctgacagaggacgacccccaggaggtgtctgcaaccgtgtatctggacaaactggccacggtgatctctgtgtggaactcggacacccagaatccctaccaccagcaggcgctggcagagaaggtgaaggaggcagaacgggatgtcagcctgacctcgctggccaaactccccagtgagaccattttcgtgggctgcgagttcctgcaccacctgctgcgggagtggggggaggagttgcaggccgtgctccgcagcagccaggggacaagttacgacagctaccggctgtgcgacagtctgacttccttcagccagaacgcgacgctctacctgaaccgcaccagcctgtccaaggaggacaggcaggtggtctctgagctggcggagtgtgtcagggacttcctgaggaaaacgagcacggtgctgaagaacagggccttggaggatatcacagcttccattgccatggccgtcatccagcagaagatggaccgccatatggaagtgtgctacatttttgcctctgagaagaagtgggccttctcggacgagtgggtagcctgcctggggagtaacagggccctcttccgacagccagacttggtgttgaggctgctggaaacagtgatagacgtcagcacagctgacagagccatccctgagtctcagatccggcaggtgatccacctgatcctggaatgttacgcagacctctccctgccaggtaaaaataaagtccttgcaggtatcctgcgttcctgggggcgaaagggcctctctgaaaagttgctggcttatgtggagggttttcaggaagacctcaatacaacttttaaccagctcactcagagtgcctccgaacagggcttggcaaaagctgtggcctccgtggcccgcctggtcatagtgcacccggaagtcacggtgaagaaaatgtgcagcctggctgtggtcaatctcggcacccacaagttcctggcccagattctcactgccttccctgcccttaggtttgtggaagagcagggtcccaattcatctgccactttcatggtgtcatgcctcaaagaaaccgtctggatgaagttctctacacccaaggaagaaaagcaatttttagagctcctgaactgcctgatgagtcccgtgaaaccccaagggattccagtggctgctcttcttgagccagacgaggtgctgaaggaatttgtcctgcctttcttgaggttagatgttgaagaggtagacctcagtctgaggatcttcatccagactctagaggcaaacgcgtgccgagaggaatactggctccagacctgctccccgtttccactcctcttcagcttgtgccagctcttggaccgcttcagcaaatactggcagcttcccaaggagaagcggtgcctctctttggataggaaggatctagcgatccatatcctggagctcctgtgtgagattgtatcagccaatgctgagaccttctccccggatgtctggatcaagtccctgtcctggctccaccgcaagttagaacagctagactggactgtgggcctgaggctgaagagcttcttcgaggggcacttcaagtgtgaagtgccagccacactttttgagatctgtaagctttcagaagacgagtggacctcccaggcccacccagggtacggggctggcacggggctcctggcctggatggagtgctgctgcgtctccagcggcatctcggagaggatgctgtctctcttggtggtggacgtgggcaatcctgaggaggtcagactgttcagcaaaggctttctggtggccctggtgcaagtcatgccttggtgcagccctcaggagtggcagcgccttcaccagctgaccaggagactgctggagaagcagctcctccatgtcccttatagcctggaatatattcagtttgttcccctgctcaacctgaagccctttgcccaggagttgcaactctccgtcctcttcctgaggactttccagtttctctgcagccatagctgtcgtgattggcttcctctggaaggctggaaccacgtggtcaaactcctctgtggcagtctgacccgcctcctggactcagtcagggcgatacaggcagctggcccttgggttcaaggaccagagcaggacctgacccaggaagccctgtttgtttacacccaggtgttctgccatgctctgcacatcatggccatgctccacccggaggtctgtgagccactctacgttttagccttggaaaccctcacctgctatgagactttgagcaagaccaacccttctgtcagctccttgctccagagggcacacgagcagcgcttcttaaagtccattgctgagggcatcggccctgaagaacggcgccaaaccctgttgcagaagatgagcagcttctgacttggcgtggggagctgggccccaacatggcgggtctgcagaagatcagcagcttcttacctgtgcgggagcgaaaaagctgggcttcaacatggcaggtctgtaggggtcagacccgagcagcctggactttacagttatgtgaaactgtccacaaaaagtcatggcaataatggtgtaaagaaaatagtttcttgggtatttgtaacgtacaaactatcataaaaattctcctctttcgcatctcactttgtctcttctaagtcggcctcagcaatagcccaggattaaatatgctctgaaattgggtttagtgtcttcaagatcaaatccagccaggaggaacatgttcataactggacttttccatcctagattttggcaaataagcccaaagttgaaaccatgtgagtggaaaaagcattacatggtacgtataacccccttcaaga

SEQ ID NO: 136801 - DNA, 1182 bp, Homo sapiens
  Payload ID: 6785
  Gene Symbol: GEMIN4
  Gene Name: gem (nuclear organelle) associated protein 4
  ENST ID: ENST00000437269
  CDS Start-End: 33-587
gttagccccgcgcagccgccggcgtcgccgccatggacctaggacccttgaacatctgtgaagaaatgactattctgcatggaggcttcttgctggccgagcagctgttccaccctaaggcactggcagaattaacaaagtctgactgggaacgtgttggacggcccatcgtggaggccttaagggagatctcctcggctgcagcacactcccagccctttgcctggaagaagaaagccctgatcatcatctgggccaaggttctgcagccgcaccccgtgaccccgtccgacacagagacacggtggcaggaagacctgttcttctcggtgggcaacatgatccccaccatcaaccacaccatcctcttcgagctgctcaaatccctggaagcttctggactctttatccagctcctgatggccctgcccaccaccatctgccatgcagaactagagcgctttctggaacatgtgaccgttgacacttctgccgaagacgtggccttcttcctggacgtctggtgggagaggacgacccccaggaggtgtctgcaaccgtgtatctggacaaactggccacggtgatctctgtgtggaactcggacacccagaatccctaccaccagcaggcgctggcagagaaggtgaaggaggcagaacgggatgtcagcctgacctcgctggccaaactccccagtgagaccattttcgtgggctgcgagttcctgcaccacctgctgcgggagtggggggaggagttgcaggccgtgctccgcagcagccaggggacaagttacgacagctaccggctgtgcgacagtctgacttccttcagccagaacgcgacgctctacctgaaccgcaccagcctgtccaaggaggacaggcaggtggtctctgagctggcggagtgtgtcagggacttcctgaggaaaacgagcacggtgctgaagaacagggccttggaggatatcacagcttccattgccatggccgtcatccagcagaagatggaccgccatatggaagtgtgctacatttttgcctctgagaagaagtgggccttctcggacgagtgggtagcctgcctggggagtaacagggccctcttccgacagccagacttggtgttgaggctgctggaaacagtgatagacgtcagcacagctgacagagccat

SEQ ID NO: 136802 - DNA, 673 bp, Homo sapiens
  Payload ID: 6785
  Gene Symbol: GEMIN4
  Gene Name: gem (nuclear organelle) associated protein 4
  ENST ID: ENST00000574958
  CDS Start-End: 463-673
gcgcgggcccggaccgaaacgtcccccgcgtcggggcgggtctaggggtcccggggtggccttggcggggggtggtccgggtcccgccgcgcgttgggccgcgtcttgccgcctccggccccctgcgcttgaaaacacggagcagacgtgaagttagagcccttggaagcgcccggggctcgcgcacgtgctttgggaaacgggctccctccgagcacccctgggcgccccgacggcctcatttcctgaacggcagctgcgttcttgagcaagtgtcttaacgctccaagtgtcttacgctcatgacgtttcctcatcgacagagcggggagaatggaagtgtgtctccccactgagttttgggcgactttgcattgagatcgccgagagctagggccatgagtaccttgtttttgactggaaggagctgtggggtggaccgtttccctgaaagctagaagaatgtttgaagcctgttcccaaggacccttgaacatctgtgaagaaatgactattctgcatggaggcttcttgctggccgagcagctgttccaccctaaggcactggcagaattaacaaagtctgactgggaacgtgttggacggcccatcgtggaggccttaagggagatctcctcggctgcagcacactcccagccctttgcctggaaga

SEQ ID NO: 136803 - DNA, 4729 bp, Homo sapiens
  Payload ID: 6785
  Gene Symbol: GEMIN4
  Gene Name: gem (nuclear organelle) associated protein 4
  ENST ID: ENST00000576778
  CDS Start-End: 1343-4486
tggccgtgtgattgctctgtgcccattaccctgtggccgtgtgactgctgctgtgcccattaccctgtggccgtgtgattgctgctgtgcccattaccctgtggccgtgtgattgctctgtgcccattatcctgtggccgtgtgattgctctgtgcccattaccctgtggccgtgtgattgctctgtgcccattaccctgtggccgtgtgattgctctgtgcccattatcctgtggccgtgtgattgctctgtgcccattatcctgtggccgtgtgattgctctgtgcccattatcctgtggccgtgtgattgctctgtgcccattaccctgtggccgtgtgattgctgctgtgcccattaccctgtggccgtgtgattgctctgtgcccattatcctgtggccgtgtgattgctctgtgcccattatcctgtggctgtgtgattgctctgtgcccattatcctgtagccgtgtgattgcttctgtgcccattaccctgtggctgtgtgattgctgctgtgcccattatcctgtggctgtgtgattgctgctgtgcccattaccctgtggctgtgtgattgctctgtgcccattaccctgtggctgtgtgattgctctgtgcccattatcctgtggccgtgtgattgctgctgtgcctgttaccctgtggctgtgtgattgctctgtgcccattaccctgtggctatgctcccttcatctgtcatgagaagctcagctgtcatgtcctgtggtacatgctcagtggcccctgtagtttgtactgtcctcctatttctaaacccctctccccacatcctctgctggcccagcctttgctggagggtctcgcctcagcagcccagctttttcttttcacacacttttcctgaaggatctcattcaccgtcttggttccggtgatcccctctgggcagatacctctcagaatcacatttcccagcttacttccctcctgaacttccacctggcatttccgttgctggaggacatctgtaccttgatggccaaagctgaactcatctttcctcacacctgctctgattctcctccattccctgtatgtgatgtcacctggtggcctcccagttcccaggctggagagctcggaagccattctggattcctcggccaagtccttctgactccagctgtgcagtggctcttgtagtcatcccttctccccgtccgctgatgtcctttaaaacccttgtcatctcaaaccatgacagcctactaacagcagtggccatctggaaacattttcactatactgtcttatttggcttgtctgtgtgcaggacccttgaacatctgtgaagaaatgactattctgcatggaggcttcttgctggccgagcagctgttccaccctaaggcactggcagaattaacaaagtctgactgggaacgtgttggacggcccatcgtggaggccttaagggagatctcctcggctgcagcacactcccagccctttgcctggaagaagaaagccctgatcatcatctgggccaaggttctgcagccgcaccccgtgaccccgtccgacacagagacacggtggcaggaagacctgttcttctcggtgggcaacatgatccccaccatcaaccacaccatcctcttcgagctgctcaaatccctggaagcttctggactctttatccagctcctgatggccctgcccaccaccatctgccatgcagaactagagcgctttctggaacatgtgaccgttgacacttctgccgaagacgtggccttcttcctggacgtctggtgggaggtgatgaagcacaagggtcacccgcaggaccccctgctctcccagtttagtgcaatggcccataagtacctgcctgccttagatgagttcccccatcctccaaagaggcttaggtcagacccagacgcgtgccccaccatgcccctgttggccatgctgctccgcgggctgacacagatccagagtcggatcctgggcccggggaggaagtgctgtgcgctggccaacctggctgacatgctgactgtgtttgcgctgacagaggacgacccccaggaggtgtctgcaaccgtgtatctggacaaactggccacggtgatctctgtgtggaactcggacacccagaatccctaccaccagcaggcgctggcagagaaggtgaaggaggcagaacgggatgtcagcctgacctcgctggccaaactccccagtgagaccattttcgtgggctgcgagttcctgcaccacctgctgcgggagtggggggaggagttgcaggccgtgctccgcagcagccaggggacaagttacgacagctaccggctgtgcgacagtctgacttccttcagccagaacgcgacgctctacctgaaccgcaccagcctgtccaaggaggacaggcaggtggtctctgagctggcggagtgtgtcagggacttcctgaggaaaacgagcacggtgctgaagaacagggccttggaggatatcacagcttccattgccatggccgtcatccagcagaagatggaccgccatatggaagtgtgctacatttttgcctctgagaagaagtgggccttctcggacgagtgggtagcctgcctggggagtaacagggccctcttccgacagccagacttggtgttgaggctgctggaaacagtgatagacgtcagcacagctgacagagccatccctgagtctcagatccggcaggtgatccacctgatcctggaatgttacgcagacctctccctgccaggtaaaaataaagtccttgcaggtatcctgcgttcctgggggcgaaagggcctctctgaaaagttgctggcttatgtggagggttttcaggaagacctcaatacaacttttaaccagctcactcagagtgcctccgaacagggcttggcaaaagctgtggcctccgtggcccgcctggtcatagtgcacccggaagtcacggtgaagaaaatgtgcagcctggctgtggtcaatctcggcacccacaagttcctggcccagattctcactgccttccctgcccttaggtttgtggaagagcagggtcccaattcatctgccactttcatggtgtcatgcctcaaagaaaccgtctggatgaagttctctacacccaaggaagaaaagcaatttttagagctcctgaactgcctgatgagtcccgtgaaaccccaagggattccagtggctgctcttcttgagccagacgaggtgctgaaggaatttgtcctgcctttcttgaggttagatgttgaagaggtagacctcagtctgaggatcttcatccagactctagaggcaaacgcgtgccgagaggaatactggctccagacctgctccccgtttccactcctcttcagcttgtgccagctcttggaccgcttcagcaaatactggcagcttcccaaggagaagcggtgcctctctttggataggaaggatctagcgatccatatcctggagctcctgtgtgagattgtatcagccaatgctgagaccttctccccggatgtctggatcaagtccctgtcctggctccaccgcaagttagaacagctagactggactgtgggcctgaggctgaagagcttcttcgaggggcacttcaagtgtgaagtgccagccacactttttgagatctgtaagctttcagaagacgagtggacctcccaggcccacccagggtacggggctggcacggggctcctggcctggatggagtgctgctgcgtctccagcggcatctcggagaggatgctgtctctcttggtggtggacgtgggcaatcctgaggaggtcagactgttcagcaaaggctttctggtggccctggtgcaagtcatgccttggtgcagccctcaggagtggcagcgccttcaccagctgaccaggagactgctggagaagcagctcctccatgtcccttatagcctggaatatattcagtttgttcccctgctcaacctgaagccctttgcccaggagttgcaactctccgtcctcttcctgaggactttccagtttctctgcagccatagctgtcgtgattggcttcctctggaaggctggaaccacgtggtcaaactcctctgtggcagtctgacccgcctcctggactcagtcagggcgatacaggcagctggcccttgggttcaaggaccagagcaggacctgacccaggaagccctgtttgtttacacccaggtgttctgccatgctctgcacatcatggccatgctccacccggaggtctgtgagccactctacgttttagccttggaaaccctcacctgctatgagactttgagcaagaccaacccttctgtcagctccttgctccagagggcacacgagcagcgcttcttaaagtccattgctgagggcatcggccctgaagaacggcgccaaaccctgttgcagaagatgagcagcttctgacttggcgtggggagctgggccccaacatggcgggtctgcagaagatcagcagcttcttacctgtgcgggagcgaaaaagctgggcttcaacatggcaggtctgtaggggtcagacccgagcagcctggactttacagttatgtgaaactgtccacaaaaagtcatggcaataatggtgtaaagaaaatagtttcttgggtatttgtaacgtacaaactatcataaaaattctcctctttcgca

SEQ ID NO: 136804 - DNA, 1015 bp, Homo sapiens
  Payload ID: 6785
  Gene Symbol: GEMIN4
  Gene Name: gem (nuclear organelle) associated protein 4
  ENST ID: ENST00000573482
  CDS Start-End: 128-1015
ggggagggggcgttagccccgcgcagccgccggcgtcgccgccatggacctagagctagggccatgagtaccttgtttttgactggaaggagctgtggggtggaccgtttccctgaaagctagaagaatgtttgaagcctgttcccaaggacccttgaacatctgtgaagaaatgactattctgcatggaggcttcttgctggccgagcagctgttccaccctaaggcactggcagaattaacaaagtctgactgggaacgtgttggacggcccatcgtggaggccttaagggagatctcctcggctgcagcacactcccagccctttgcctggaagaagaaagccctgatcatcatctgggccaaggttctgcagccgcaccccgtgaccccgtccgacacagagacacggtggcaggaagacctgttcttctcggtgggcaacatgatccccaccatcaaccacaccatcctcttcgagctgctcaaatccctggaagcttctggactctttatccagctcctgatggccctgcccaccaccatctgccatgcagaactagagcgctttctggaacatgtgaccgttgacacttctgccgaagacgtggccttcttcctggacgtctggtgggaggtgatgaagcacaagggtcacccgcaggaccccctgctctcccagtttagtgcaatggcccataagtacctgcctgccttagatgagttcccccatcctccaaagaggcttaggtcagacccagacgcgtgccccaccatgcccctgttggccatgctgctccgcgggctgacacagatccagagtcggatcctgggcccggggaggaagtgctgtgcgctggccaacctggctgacatgctgactgtgtttgcgctgacagaggacgacccccaggaggtgtctgcaaccgtgtatctggacaaactggccacggtgatctctgtgtggaactcggacacccagaatccctaccaccagcaggcgctggcagagaag

SEQ ID NO: 136805 - DNA, 1048 bp, Homo sapiens
  Payload ID: 6785
  Gene Symbol: GEMIN4
  Gene Name: gem (nuclear organelle) associated protein 4
  ENST ID: ENST00000570364
  CDS Start-End: 234-1048
tgtcaagcacagattgcaagctcggggtccagcgtaaaccccaccatgtttgggctcacacggcgcattttctggggaggaccagccgtcaaaaagcgtctaggatccggaacgctgctgtctggagggggcggcgcggcaggagcgcgttgagggactagctagggccatgagtaccttgtttttgactggaaggagctgtggggtggaccgtttccctgaaagctagaagaatgtttgaagcctgttcccaaggacccttgaacatctgtgaagaaatgactattctgcatggaggcttcttgctggccgagcagctgttccaccctaaggcactggcagaattaacaaagtctgactgggaacgtgttggacggcccatcgtggaggccttaagggagatctcctcggctgcagcacactcccagccctttgcctggaagaagaaagccctgatcatcatctgggccaaggttctgcagccgcaccccgtgaccccgtccgacacagagacacggtggcaggaagacctgttcttctcggtgggcaacatgatccccaccatcaaccacaccatcctcttcgagctgctcaaatccctggaagcttctggactctttatccagctcctgatggccctgcccaccaccatctgccatgcagaactagagcgctttctggaacatgtgaccgttgacacttctgccgaagacgtggccttcttcctggacgtctggtgggaggtgatgaagcacaagggtcacccgcaggaccccctgctctcccagtttagtgcaatggcccataagtacctgcctgccttagatgagttcccccatcctccaaagaggcttaggtcagacccagacgcgtgccccaccatgcccctgttggccatgctgctccgcgggctgacacagatccagagtcggatcctgggcccggggaggaagtgctgtgcgctggccaacctggctgacatgctgactgtgtttgcgctgacagaggacgacccccaggaggtgtctgcaaccgtgtatctggacaa

SEQ ID NO: 136806 - DNA, 633 bp, Homo sapiens
  Payload ID: 6785
  Gene Symbol: GEMIN4
  Gene Name: gem (nuclear organelle) associated protein 4
  ENST ID: ENST00000576383
  CDS Start-End: 65-633
atcatcacggaaagcttggtctccctcaaaacatgaaccgggacccttgaacatctgtgaagaaatgactattctgcatggaggcttcttgctggccgagcagctgttccaccctaaggcactggcagaattaacaaagtctgactgggaacgtgttggacggcccatcgtggaggccttaagggagatctcctcggctgcagcacactcccagccctttgcctggaagaagaaagccctgatcatcatctgggccaaggttctgcagccgcaccccgtgaccccgtccgacacagagacacggtggcaggaagacctgttcttctcggtgggcaacatgatccccaccatcaaccacaccatcctcttcgagctgctcaaatccctggaagcttctggactctttatccagctcctgatggccctgcccaccaccatctgccatgcagaactagagcgctttctggaacatgtgaccgttgacacttctgccgaagacgtggccttcttcctggacgtctggtgggaggtgatgaagcacaagggtcacccgcaggaccccctgctctcccagtttagtgcaatggcccataagtacctgcctgccttagatgagttcccccatcctccaaa

SEQ ID NO: 136807 - DNA, 5397 bp, Homo sapiens
  Payload ID: 6786
  Gene Symbol: GEMIN5
  Gene Name: gem (nuclear organelle) associated protein 5
  Uniprot ID: Q8TEQ6
  ENST ID: ENST00000285873
  CDS Start-End: 77-4603
cccgctccctacctaaggcgtgaggctacgagcggtcggctgtggcagcttctcttgtctctgacggcttgtagttatggggcaggagccgcggacgctgccgccctcccccaactggtactgcgcccgctgcagcgatgccgtgcccgggggcctctttggcttcgccgcgcggacctccgtcttccttgtccgcgtgggcccgggcgcaggcgagagtccagggacacccccgtttcgagtcataggagagttggtgggacacaccgaaagggtctctggcttcacattttctcatcaccctggtcagtacaacctctgtgccaccagctccgacgatgggactgtgaaaatatgggatgtagagacaaaaacagttgtgacagaacatgcactccatcagcatacgatatcaacattacattggtctcctcgagtaaaggacttaatagtatctggggatgaaaaaggagtagttttctgttactggtttaacagaaatgacagccagcacctctttatagaacccaggacaattttctgtcttacttgttcacctcatcatgaagatttagtagccattggctacaaggatggcatagtggtgataattgacatcagtaagaaaggagaagttattcataggcttcgaggccatgatgatgaaatccactccatagcctggtgtcccctgcctggtgaagattgtttatctataaaccaagaggaaacttcagaagaagctgaaattaccaacgggaatgctgtagcacaagctccagtaacaaaaggttgctacttagccactggaagcaaagatcaaaccattcgaatctggagctgttctagaggccgaggggtgatgattttgaaattgccctttctgaagagaagaggagggggtatagacccaactgttaaagagcgcctttggttgacactccattggcccagcaatcaaccaacacagctggtatctagctgttttggaggtgaactgttgcaatgggatctcactcaatcttggagacggaaatacaccctcttcagtgcctcatcagaagggcaaaatcattcaagaattgtgtttaatttatgtcctttacaaacagaggatgacaaacagctattactttctacatcaatggatagagatgtaaaatgttgggacatagccaccttggagtgcagctggacccttccttcccttggtgggtttgcatacagcctggctttctcttctgtggacataggctctttggccataggtgttggggatggcatgatccgtgtatggaatacactctccataaagaacaactatgatgtgaaaaatttttggcaaggcgtgaagtccaaggttacagcgctgtgctggcacccaaccaaggaaggttgcttagcttttggaactgatgatggaaaagtgggattgtatgacacctactccaacaagcctccacagatttctagcacatatcataagaagactgtatatactttagcctgggggccaccagtaccccccatgtcacttggaggagaaggagacagaccttcccttgctttatacagctgtggaggagaagggattgtcttacagcataatccctggaagcttagtggagaagcctttgacatcaacaaactcatcagggacaccaattcaatcaaatacaaattgcctgtacacacagagataagttggaaagcagatggcaaaatcatggctcttggcaatgaagatggatcaatagaaatatttcagattcccaacctgaaactgatctgtactatccaacagcatcacaagcttgtgaataccattagctggcatcatgagcatggcagccagccagaattgagctatctgatggcctctggctccaacaatgcagtcatttacgtgcacaacctgaagactgtcatagagagcagccctgagtctccagtgaccattacagagccctaccggaccctctcagggcatacggccaagattaccagtgtggcgtggagcccacatcatgatggaaggctggtatctgcttcctatgatggtacagcccaggtgtgggatgctctccgggaagagcccctgtgcaatttccgaggacatcgaggtcgactgctttgtgtggcatggtctcctttggatccagactgcatctattcaggggcagatgacttttgtgtgcacaagtggctcacttccatgcaagatcattcccggcctcctcaaggcaaaaaaagtattgaattggagaaaaaacggctctctcaacctaaggcaaagcccaaaaagaagaaaaagcccaccttgagaactcctgtaaagctggaatcgattgatggaaatgaagaagaaagcatgaaggagaactcaggacctgttgagaatggtgtgtcagaccaagaaggggaggagcaagcacgggagccggaattaccctgtggccttgctccagcggtttctagagaaccagttatctgcactccagtttcctcaggctttgaaaagtcaaaagtcaccattaataacaaagtcattttactgaaaaaggagccaccaaaagagaagccagaaaccttaatcaagaagagaaaagctcgttccttgcttcccctgagtacaagcctggaccacagatccaaagaggagcttcatcaggactgtttggtactagcaactgcaaagcactccagagagctgaatgaagatgtgtctgctgatgttgaggaaagatttcatctggggcttttcacagacagggctaccctgtatagaatgattgatattgaaggaaaaggtcacttagaaaatggccaccctgagttatttcaccagcttatgctttggaaaggagatctcaaaggtgttctccagactgcagcagaaagaggggagctgacagacaaccttgtggctatggcaccagcagctggctaccatgtgtggctatgggctgtggaagcttttgccaaacagctgtgttttcaggatcagtatgtcaaggctgcttctcacctactttccatccacaaagtgtatgaagcggtggagctgctcaagtcaaaccatttttacagggaagctattgcgattgccaaggcccggctgcgcccggaggacccagtcctgaaggacttgtacctcagctggggaaccgtcctagaaagagatggccactatgctgtagctgccaaatgctatttaggggccacttgtgcttatgatgcagccaaagttttggccaaaaagggggatgcggcatcacttagaacggctgcagagttggctgccatcgtaggagaggatgagttgtctgcttccctggctctcagatgtgcccaagagctgcttctggccaacaactgggtgggagcccaggaagccctgcagctgcatgaaagtctacagggtcagagattggtgttttgccttctggagctactgtccaggcatctggaggaaaagcagctttcagagggcaaaagctcctcctcttaccacacttggaacacgggcaccgaagggcctttcgtggagagggtgactgcagtgtggaagagcatcttcagccttgacacccctgagcagtatcaggaagcctttcagaagctgcagaacatcaagtacccatctgctacaaataacacacctgccaaacagctcctgcttcacatttgccatgacttgaccctggcagtgctgagccaacagatggcctcctgggacgaggctgtgcaggcgctccttcgggcggtggtccggagctatgactcagggagcttcaccatcatgcaggaagtgtactcagcctttctccctgacggctgtgaccacctaagagacaagttgggggaccatcaatcccctgccacaccagctttcaaaagtttggaggccttttttctttatgggcgtctgtatgaattctggtggtctctctccagaccttgcccaaattccagtgtctgggtaagggctggtcacagaacactctctgttgagccaagccagcagttagacactgccagcactgaagaaacggaccctgaaacttctcagccagagccaaacaggccttcagaactagacttgagactcacagaagaaggtgagcgaatgctgagtacttttaaggagctcttttcagaaaagcatgccagtctccaaaactcacagagaactgttgctgaagtccaagagaccttggcagaaatgatccgacaacaccaaaagagtcaactctgtaaatccacagcaaatggtcctgataagaatgaaccggaagtagaagcagagcagcccctctgcagttctcagagccagtgtaaagaagaaaaaaatgagccactttctctgcctgagttaaccaaaaggcttaccgaggcaaatcagagaatggcgaaatttcctgagagcattaaggcctggcccttcccagatgtgctggagtgctgcctcgtcctgcttctcatcaggtcccactttcctggctgtctggcccaggaaatgcagcagcaggcccaagagctccttcagaaatacggcaacacgaaaacttacagaagacactgccagaccttctgtatgtgaattttcacacaccttgaagaaactgccaaattgaaaatgtttgacatctttcacctctgcagttatgcctcaccagacattcactctggtccctagatgtttttgcagtaatccaaaagaatacaaacaaggattaagtttgaatcaaccctgcctacccatagacaacggtggatctgactttagactcaattgtggtctcctactggagggaagatcatgaaaagcccacagtagttattcagaactaacacctgcagagtgttggtcatctctacagccttaggcaggtttcacccaaagaggagaaacttctgtcgtcacccaaagtgttacatgcttaaaacacaagctacctttgtaaatacttcatctgatcagaagtgtgtcatgcttgtttgagatggagttgctgcattttaggactattgatacctttttttaattgtttttataatatttaatttgaaagaggagacccttctctctctactctttcatagactgaagtttgaatatgaaataggccttaaccatcatgttgactctcctgtcagaattttaggttggaaatttggttttattctttcatgtaattgcttatttgaacagatcacttactaaagctttagaagaagtgattcaaatgtgtgttttcccttcagttttataacaaatggattgatggcagtcaaatagctcaggaataaattactgtttcaatggttcttaaactttcttggatcataggatccttttgagaatcagattaaagccaaagatactctttggag

SEQ ID NO: 136808 - DNA, 3728 bp, Homo sapiens
  Payload ID: 6787
  Gene Symbol: GEMIN6
  Gene Name: gem (nuclear organelle) associated protein 6
  Uniprot ID: Q8WXD5
  ENST ID: ENST00000281950
  CDS Start-End: 117-620
ggcgcaaagcatgctggtctcaggcggtctccgctcaacgatccttcctcaaagcatggttgctgagtacccagagttgcgaggagttttttaactgatttagccaggtggcaatcatgagtgaatggatgaagaaaggccccttagaatggcaagattacatttacaaagaggtccgagtgacagccagtgagaagaatgagtataaaggatgggttttaactacagacccagtctctgccaatattgtccttgtgaacttccttgaagatggcagcatgtctgtgaccggaattatgggacatgctgtgcagactgttgaaactatgaatgaaggggaccatagagtgagggagaagctgatgcatttgttcacgtctggagactgcaaagcatacagcccagaggatctggaagagagaaagaacagcctaaagaaatggcttgagaagaaccacatccccatcactgaacagggagacgctccaaggactctctgtgtggctggggtcctgactatagacccaccatatggtccagaaaattgcagcagctctaatgagattattctgtcgcgtgttcaggatcttattgaaggacatcttacagcttcccaatgagaggccaggaagtgtgaacatactgatagaaaaagactatattttatccctcataaaatgttttaaatgtaaatgtacatgactgtgtgtgtgtatgtgtgtgtgtgtataattctttgttgttttggtaaaatcagaggagtgggttataagtgctaatttccttgggaaattaatgaactagggcaagtatagcatcccatgcataaaattagcacagggacatcagaattgtatgggtcttcttttttctttttttcttttttttttgagatggagtctcgctctgttgccaggtttgagtgcagtggcgcaatctcagctcagtgcaacctccgcctcccaggttcaaccgattcccctgcctcagcctctcgagtagctgggactacaggtgcacgccaccactcccagctaattttttgtattttagtagagatggggtttcacctgtatgggtcttttcttgtgatggggttacacccccatttttgttaggcaagaaaagcatttggaaaaaaatgtaacatgttagattcaatataaaatattatggtaagatcatggtcttgttaagtctcttcactaactgtatgtgtctgtttttaaaagatgtgtcttggtggggcgcggtggctcacgcctgtaatcccagcactttgggaggccgaggcaggtggatcatgaggtcaggagatcgagaccatcctggctaacacggtgaaaccccttctctactaaaaatacaaaaaaaattagccgggcgtggtggcaggtgcctgtagtcccagctactcaggaggctgaggcaggagaatggcatgaacccgggaggcagagcttgcagtgagccgagatcgcgccactgcactctagcctgggtgacagagcgagactccgtctcaaaaaaaaaaaaaaaaattattggaacacagcattacctattgaattacagttttctggtttttttgtggagtttttgttttggtttttgagatggagtttcactcttgttccccaggctggagtgtaatagtgcaatctcggcttaccacaacctctgcctcccaggttcaagcaattctcctgcctcagcctcctgagtagctggtattacaggcatgcaccatcacgccccactaattttgtatttttttagtagagacggggtttttccatgttggtcaggctggtctcaaactcccgacctcaggtgatccgcccgcctcggcctcccaaagttctgggattacaggtgtgagccaccgtgcccggctgttttttgtgggttttttgtttgtttgtttgtttttgagacagagtcttgctctgtcactcaggctggagtgcagtggcacaatctcggctcactgcaacctctgcctcctgagttcaagccattctcctgcctcagccccctcagtagctgggattaccaggcacatagcaccatgcccagctaatgtttgtatttttagtagagacagggtttcaccatgttgaccaggctggtcttgaactcctgacctcatgatctgcctgccgtggcctcccaaagtgctgggattataggcatgagagcctccgtgcctggctttttttttttttttttttttttaaaagagggtcttgatatgttgcccaggcttgtcttcaactcctgggttcaagtgatccttccaccttggcctcccaaagtgctgggaatataggtgtgagctgccatgtccagctgtaagaaatattttaaaatatttaagcttcagggcctttgaatacaggccctgataacatagctattttcctgcatagttgtctaataacaagatggtatagcccagtgcttcttgcactttagcaagcatcagaatcagcaaatatttaggtttcagggcctttgaatacagtctgataacacagctattttcctgcatagttgtctaataacaagatggtatagtccagtgcttcctgcatgttggcaagcatcagaatcagctgcagggcttttcaaaacagattgctggaccctcctcccaacagattctgattcagtagttctagttgggacccaggaatttgcatttccaacagactcccagataatgatgttaccgttcccagaccacacttgcagaagcagttcagaaacttcaggggaacagaaagttcctccctcacggcttcaaagttccatgatcctgaaagcaaaatttagcacacatcacctttctcctagtggctaagactctcctgttcaaaccctggatgtcttcagaaagcaaatagaaggggaatatgaacagactgaagtcagcaaggaaatgactgacaagatgagggaggcctttgaaaaggaagaagccagctgggcgcggtggctcacgcctgtaatcccagcactttgggaggcctaggcgggccgatcacttgaggccaggatttgtgaccaacctgggcaacatggtgaaaccctgtctctactaaaaaaaaaaaaaatagctgggtgtggtggtgagcgcctataatctcagctactcaggaggctgaggcactcgcttgaatctgggaggtggaggttgcagtgagccgagattgtacgcattccagcttgggcagcagaacgagactctgtctcaaaaaaaaaaaaaaagccacgtaggaaattatccacagcatcaattggacttgatcttggctcagggaccaggcccggtgccttgatattggtagatttatttgccatcagactaatgagctggggacattgactgtttcctggcaactgagtcctctgattgtgtaaacaatttgcctgcaaacaaaacctgagtgcttgaaagggtaagtgatcctgatctgccatagaaaccttcatgcttagggagtttccctagctaattcctcagctaagattctccccaggagtttcactcacctgtttccagtgcctcctttgggctgtcagcatctgtgattccacattccccagagggagattcctccccaaagctggttgtatttactgccagtcctgggctgtagccagggcagtctttgaacacattatcaagaatactttttaaaataaaagtctgtttcgacttc

SEQ ID NO: 136809 - DNA, 834 bp, Homo sapiens
  Payload ID: 6787
  Gene Symbol: GEMIN6
  Gene Name: gem (nuclear organelle) associated protein 6
  ENST ID: ENST00000409566
  CDS Start-End: 92-427
ggtctccgctcaacgatccttcctcaaagcatggttgctgagtacccagagttgcgaggagttttttaactgatttagccaggtggcaatcatgagtgaatggatgaagaaaggccccttagaatggcaagattacatttacaaagaggtccgagtgacagccagtgagaagaatgagtataaaggatgggttttaactacagacccagtctctgccaaggttctactgtcacccaggctggaatgcagtggcgagatctcggctctttgtaacctccacctcgcaggttcaagcgattctcctgccttagcctcccgagtagctgggactacaggcatttgccaccacgtctggctaatttttgtattttttgtggagacggggcttcgccatgttgcccagtattgtccttgtgaacttccttgaagatggcagcatgtctgtgaccggaattatgggacatgctgtgcagactgttgaaactatgaatgaaggggaccatagagtgagggagaagctgatgcatttgttcacgtctggagactgcaaagcatacagcccagaggatctggaagagagaaagaacagcctaaagaaatggcttgagaagaaccacatccccatcactgaacagggagacgctccaaggactctctgtgtggctggggtcctgactatagacccaccatatggtccagaaaattgcagcagctctaatgagattattctgtcgcgtgttcaggatcttattgaaggacatcttacagcttcccaatgagaggccaggaagtgtgaacatactgatagaaaaagactatattttatccctcata

SEQ ID NO: 136810 - DNA, 1210 bp, Homo sapiens
  Payload ID: 6787
  Gene Symbol: GEMIN6
  Gene Name: gem (nuclear organelle) associated protein 6
  ENST ID: ENST00000409011
  CDS Start-End: 566-775
aacgccacgatctctccagtaaacctgaggccttccccatgctgtcccgccccctcctctccccgttttctacaccctccttgtcttctttcccgtctccctaccctctgcctcctttcgtttttccccaggctagggaccctcagccttaacaatcttagtacggatgcattagaccggcctatgaaaggctgtacaatttaaccgctgatgttgcagccgtcgcgcccttctgctgggggacctggcctagtcagctactctgatctttggggctcatcagagcatgtaagtcttctcatgaatgtctcctcatgatggaaagaggctgcctcacctccaggccttatgtccaagccaggcaggctgaaggaagaatggtcccgcgactctcagacctccaagtaggactacaaaacagaggtttctgggggaaggaagtgacgatcggcgcaaagcatgctggtctcaggcggtctccgctcaacgatccttcctcaaagcatggttgctgagtacccagagttgcgaggagttttttaactgatttagccaggtggcaatcatgagtgaatggatgaagaaaggccccttagaatggcaagattacatttacaaagaggtccgagtgacagccagtgagaagaatgagtataaaggatgggttttaactacagacccagtctctgccaaggttctactgtcacccaggctggaatgcagtggcgagatctcggctctttgtaacctccacctcgcagtattgtccttgtgaacttccttgaagatggcagcatgtctgtgaccggaattatgggacatgctgtgcagactgttgaaactatgaatgaaggggaccatagagtgagggagaagctgatgcatttgttcacgtctggagactgcaaagcatacagcccagaggatctggaagagagaaagaacagcctaaagaaatggcttgagaagaaccacatccccatcactgaacagggagacgctccaaggactctctgtgtggctggggtcctgactatagacccaccatatggtccagaaaattgcagcagctctaatgagattattctgtcgcgtgttcaggatcttattgaaggacatcttacagcttcccaatgagaggccaggaagtgtgaacatactgatagaaaaagactatattttatccctcataaaatgttttaaatgtaaa

SEQ ID NO: 136811 - DNA, 1657 bp, Homo sapiens
  Payload ID: 6788
  Gene Symbol: GEMIN7
  Gene Name: gem (nuclear organelle) associated protein 7
  Uniprot ID: Q9H840
  ENST ID: ENST00000270257
  CDS Start-End: 248-643
cagtagccgcggacctcggtgagtacaaggtggtggggggtcgccagcaggttccctctccccggccccagctctggacgctcaccccagtgcaacgccctgagtgacggaaagaggtctggcggcttctctgttgacaactcagctggttccacaccctggcaattgtgaagagttggccaaatgtttgtccactgagctgatctcctctctggagcaccggggccaccaggagggagccaagacaatgcaaactccagtgaacattcccgtgcctgtgctccggctgccccggggccctgatggcttcagccgtggctttgcccctgatggacgcagagcccccttgaggccagaggttcctgaaatccaggagtgtcccatagctcaagaatccctggaatcccaggagcagcgggcacgagccgcccttcgggagcgttacctccgcagcctgctggccatggtgggtcatcaggtgagcttcacgttgcacgagggtgtgcgtgtggccgcccactttggagccaccgacctggatgtggccaacttctacgtgtcacagctgcagactcccataggtgtgcaagcagaggcgctgctccgatgtagtgacattatttcatataccttcaagccataaagatattgtgttcacttttctgcttgaggctaaggcactgtatcccaggcctcccaatgttcccgagccaggaactctgggccccatggagttatgagctcccttggaattttgagccaagctttaagcaagtctggactcctgagacctcctgggtctagtcagtaaaattctgcaactctaggaattctaagatcccattggaaggaatgctctacctcacagaactctgaaccctacagaaatatgggcctgctgccatttcctgaagaccggggcatcggggtggggtgataaaggatacaacctgcacagggggaagttattaaagaggctgcaaagtccagccaccctgaagatactccccagtgctcccctcctgctaaagaaccagttaccccaggaaaattcgactcctgtttttctttaattaactataccgacggggatggagtcatctttaggggctggtagggtggttatccaagggctgaatccagtggagctgggccaagtacgacaggagtccagataaaggtgtaggggctgcacggccgcaagtctcctggaaaggctggagtgaccggcatgccgggattgggagattaggatttgatttcattttggggcgggcggtggctcgtgctgggtcacgtggtcgtgcccaagcgctcctcctgttgccccacctgtggttgctgtggactgcacacgacagcagattcgctgtcccctcgttggaggcgaatggtcggaccccgagtggcggcgcccctgataaaaggccgaggattcgcgatcagggtgcaacttcactccctcctcttttctctccagccttgcagcgtggccgttcacatcacgcgcttcactaagcctcctatcactagtaacctttcagcgcattgtttaaaaagaaagcagtttctgtccctttctgtagttcctttaagttcaggatgtaagcgaagccttccattaagtaaaggtgagtgtcgtttcgtctcagtcgcg

SEQ ID NO: 136812 - DNA, 716 bp, Homo sapiens
  Payload ID: 6788
  Gene Symbol: GEMIN7
  Gene Name: gem (nuclear organelle) associated protein 7
  Uniprot ID: Q9H840
  ENST ID: ENST00000391951
  CDS Start-End: 118-513
cgcggacctcggtgagtacaaggtggtggggggtcgccagcaggttccctctccccggccccagctctggacgctcaccccagtgcaacgccctgagtgacggaaagagccaagacaatgcaaactccagtgaacattcccgtgcctgtgctccggctgccccggggccctgatggcttcagccgtggctttgcccctgatggacgcagagcccccttgaggccagaggttcctgaaatccaggagtgtcccatagctcaagaatccctggaatcccaggagcagcgggcacgagccgcccttcgggagcgttacctccgcagcctgctggccatggtgggtcatcaggtgagcttcacgttgcacgagggtgtgcgtgtggccgcccactttggagccaccgacctggatgtggccaacttctacgtgtcacagctgcagactcccataggtgtgcaagcagaggcgctgctccgatgtagtgacattatttcatataccttcaagccataaagatattgtgttcacttttctgcttgaggctaaggcactgtatcccaggcctcccaatgttcccgagccaggaactctgggccccatggagttatgagctcccttggaattttgagccaagctttaagcaagtctggactcctgagacctcctgggtctagtcagtaaaattctgcaactctaggaattctaagatcccattg

SEQ ID NO: 136813 - DNA, 576 bp, Homo sapiens
  Payload ID: 6788
  Gene Symbol: GEMIN7
  Gene Name: gem (nuclear organelle) associated protein 7
  Uniprot ID: Q9H840
  ENST ID: ENST00000591747
  CDS Start-End: 154-549
acaccagtagccgcggacctcggtctggcggcttctctgttgacaactcagctggttccacaccctggcaattgtgaagagttggccaaatgtttgtccactgagctgatctcctctctggagcaccggggccaccaggagggagccaagacaatgcaaactccagtgaacattcccgtgcctgtgctccggctgccccggggccctgatggcttcagccgtggctttgcccctgatggacgcagagcccccttgaggccagaggttcctgaaatccaggagtgtcccatagctcaagaatccctggaatcccaggagcagcgggcacgagccgcccttcgggagcgttacctccgcagcctgctggccatggtgggtcatcaggtgagcttcacgttgcacgagggtgtgcgtgtggccgcccactttggagccaccgacctggatgtggccaacttctacgtgtcacagctgcagactcccataggtgtgcaagcagaggcgctgctccgatgtagtgacattatttcatataccttcaagccataaagatattgtgttcacttttctgcttga

SEQ ID NO: 136814 - DNA, 848 bp, Homo sapiens
  Payload ID: 6788
  Gene Symbol: GEMIN7
  Gene Name: gem (nuclear organelle) associated protein 7
  Uniprot ID: Q9H840
  ENST ID: ENST00000591607
  CDS Start-End: 94-489
cccaggctccgcggcttgcggcctgcccgggcctctgcagcgggggcgccggcggaagtggggacaccagtagccgcggacctcgccaagacaatgcaaactccagtgaacattcccgtgcctgtgctccggctgccccggggccctgatggcttcagccgtggctttgcccctgatggacgcagagcccccttgaggccagaggttcctgaaatccaggagtgtcccatagctcaagaatccctggaatcccaggagcagcgggcacgagccgcccttcgggagcgttacctccgcagcctgctggccatggtgggtcatcaggtgagcttcacgttgcacgagggtgtgcgtgtggccgcccactttggagccaccgacctggatgtggccaacttctacgtgtcacagctgcagactcccataggtgtgcaagcagaggcgctgctccgatgtagtgacattatttcatataccttcaagccataaagatattgtgttcacttttctgcttgaggctaaggcactgtatcccaggcctcccaatgttcccgagccaggaactctgggccccatggagttatgagctcccttggaattttgagccaagctttaagcaagtctggactcctgagacctcctgggtctagtcagtaaaattctgcaactctaggaattctaagatcccattggaaggaatgctctacctcacagaactctgaaccctacagaaatatgggcctgctgccatttcctgaagaccggggcatcggggtggggtgataaaggatacaacctgcacagggggaagttattaaagaggctgcaaagtccagccaccctgaaga

SEQ ID NO: 136815 - DNA, 868 bp, Homo sapiens
  Payload ID: 6789
  Gene Symbol: GEMIN8
  Gene Name: gem (nuclear organelle) associated protein 8
  ENST ID: ENST00000332885
  CDS Start-End: 338-868
gagattcctaaatcattgcaggttaattgtgagaggggaccagtcccagaggctctcagctctgcagtgcttccgaatcactggacgactctttaagaattctgatccccgggcccccatcccggaccaatgaaatcagaatctctaatagtggggccctggcatcggtagtttttaaagctgcccaggtgattctggggtgccgagaaccaccgtgttaagctccaccagcccattggagaaaagttactgttcagtccctgaaggcttgtgccataaaagagtgggagacattcccagggagtttcagcacccatttggactttcacaatcagagatggcagcggtaaaggcatcaacatcgaaagctaccaggccttggtattctcatccggtatatgcaagatactggcaacattatcatcaagcaatggcttggatgcaaagccatcacaatgcctacaggaaggccgtggaatcctgtttcaatcttccatggtacttaccttctgcgcttcttccccaaagctcttacgataatgaggctgcgtatcctcagtccttctatgaccatcatgtggcctggcaggactacccctgcagttcttcacatttcagaagatctgggcagcatccacgttacagcagtaggatccaggcatccacaaaagaagaccaagctttgtccaaagaggaagagatggagactgagtcagatgcagaggtagaatgtgacctgagcaatatggaaatcactgaagagctccgccagtactttgcagagaccgagaggcatagagaagaacgacggcggcagcagcagctggatgcagagcgcctggacagctatgtgaacgctgaccacgac

SEQ ID NO: 136816 - DNA, 1682 bp, Homo sapiens
  Payload ID: 6789
  Gene Symbol: GEMIN8
  Gene Name: gem (nuclear organelle) associated protein 8
  Uniprot ID: Q9NWZ8
  ENST ID: ENST00000380523
  CDS Start-End: 320-1048
agtcgccccggcaacagccgcctccctcgcgtcccccactccccctctgtctctccaaggaaaactaggcccctgcgcggccaacgcccaggatccgcaagctgcgcgcccacgagctccaccagcccattggagaaaagttactgttcagtccctgaaggcttgtgccataaaagagtgggagacattcccagggaggtgaggaatgaaagatcgaattaaagaccattaaagaccaaagggcatctaaatctgcagcaaccatcagctctcttttctttgagagtttcagcacccatttggactttcacaatcagagatggcagcggtaaaggcatcaacatcgaaagctaccaggccttggtattctcatccggtatatgcaagatactggcaacattatcatcaagcaatggcttggatgcaaagccatcacaatgcctacaggaaggccgtggaatcctgtttcaatcttccatggtacttaccttctgcgcttcttccccaaagctcttacgataatgaggctgcgtatcctcagtccttctatgaccatcatgtggcctggcaggactacccctgcagttcttcacatttcagaagatctgggcagcatccacgttacagcagtaggatccaggcatccacaaaagaagaccaagctttgtccaaagaggaagagatggagactgagtcagatgcagaggtagaatgtgacctgagcaatatggaaatcactgaagagctccgccagtactttgcagagaccgagaggcatagagaagaacgacggcggcagcagcagctggatgcagagcgcctggacagctatgtgaacgctgaccacgacctgtactgcaacacccgccggtcggtagaagccccaactgagaggcctggtgagcggcgccaggccgagatgaagcgtttgtacggggacagtgctgccaagatccaagccatggaggccgcggtgcagctgagctttgacaagcactgtgaccgaaagcagcccaagtactggccggtcatccccctgaagttctgagctcagggcacagggtacccagcctctccttcttccttttgggtacacgctctttatctctccttctgtacatttcttagggaaaggggactttgtactggggtacaggcatgttcaccacagtcccagtgggcctgtcacggggtggatgtactatgccagccacttggaggtctgcaggacatgttctgttgccaacatgataaattttctcctgacataaaataattttgcatatactatactggttttttatgttgttggtaacagttcaattcattaacgttcttgcctagagatactgcctggtgttttgcttttttatcttttcttgtctttaacctgtctgaactacacaaatgcctttaaaaaaccagatatcctctctgactctagctccattagcccccactaaaaatgagccaagtgtgtagtgagacaaataccactacctgtagtggagagggatgcatgttctataaagggccagagagtgaatatctttggcactgcaagccacacggtcagtgttgtgactactcaaccctccctttgtagtgtgaaagcagctgtagacagtaagtaaacaaatgggtgtggctgtgttctaataaaactttatttataaaaacag

SEQ ID NO: 136817 - DNA, 1119 bp, Homo sapiens
  Payload ID: 6789
  Gene Symbol: GEMIN8
  Gene Name: gem (nuclear organelle) associated protein 8
  Uniprot ID: Q9NWZ8
  ENST ID: ENST00000398355
  CDS Start-End: 151-879
cagtcgccccggcaacagccgcctccctcgcgtcccccactccccctctgtctctccaaggaaaactaggcccctgcgcggccaacgcccaggatccgcaagctgcgcgcccacgagtttcagcacccatttggactttcacaatcagagatggcagcggtaaaggcatcaacatcgaaagctaccaggccttggtattctcatccggtatatgcaagatactggcaacattatcatcaagcaatggcttggatgcaaagccatcacaatgcctacaggaaggccgtggaatcctgtttcaatcttccatggtacttaccttctgcgcttcttccccaaagctcttacgataatgaggctgcgtatcctcagtccttctatgaccatcatgtggcctggcaggactacccctgcagttcttcacatttcagaagatctgggcagcatccacgttacagcagtaggatccaggcatccacaaaagaagaccaagctttgtccaaagaggaagagatggagactgagtcagatgcagaggtagaatgtgacctgagcaatatggaaatcactgaagagctccgccagtactttgcagagaccgagaggcatagagaagaacgacggcggcagcagcagctggatgcagagcgcctggacagctatgtgaacgctgaccacgacctgtactgcaacacccgccggtcggtagaagccccaactgagaggcctggtgagcggcgccaggccgagatgaagcgtttgtacggggacagtgctgccaagatccaagccatggaggccgcggtgcagctgagctttgacaagcactgtgaccgaaagcagcccaagtactggccggtcatccccctgaagttctgagctcagggcacagggtacccagcctctccttcttccttttgggtacacgctctttatctctccttctgtacatttcttagggaaaggggactttgtactggggtacaggcatgttcaccacagtcccagtgggcctgtcacggggtggatgtactatgccagccacttggaggtctgcaggacatgttctgttgccaacatgataaattttctcctgacataaaataattttgcatatac

SEQ ID NO: 136818 - DNA, 3538 bp, Homo sapiens
  Payload ID: 6790
  Gene Symbol: GMIP
  Gene Name: GEM interacting protein
  Uniprot ID: Q9P107
  ENST ID: ENST00000203556
  CDS Start-End: 139-3051
cgtggcctccgctgggcagggcgacgcggaaccgaggcggcggcggcggctgcggcggcaggaaatcggggctcggccccgccggcgcgcgaccccatccccatcccggtccctgcagagcgatccccgggcccagatatggacgcagcagagccgggactccccccaggtcctgagggcaggaagaggtacagtgacatcttccggagcctggacaacctcgaaatctcactggggaacgtgacccttgagatgctggctggagaccctctactctcagaagacccagaacctgacaagacccctacagccactgttaccaacgaagccagctgttggagcggcccctccccagagggtcctgtacccctcacaggggaggaactggacttgcggctcattcggacaaaggggggtgtggacgcagccctggaatatgccaagacctggagccgctatgccaaggaactgcttgcctggactgaaaagagagccagctatgagctggagtttgctaagagcaccatgaagatcgctgaagctggcaaggtgtccattcaacagcagagccacatgcctctgcagtacatctacaccctgtttctggagcacgatctcagcctgggaaccctggccatggagacagtggcccagcagaaaagagactactaccagcccctcgccgccaaacggactgagattgagaagtggcggaaggagttcaaggagcagtggatgaaggagcagaagcggatgaatgaggcggtgcaggcactgcggcgcgcccagctgcagtatgtgcaacgcagcgaggacctgcgggcacgctcccaggggtcccctgaggactcggccccccaggcctcgccgggacctagcaagcagcaggagcggcggcggcgctcgcgagaggaggcccaggccaaggcgcaggaggccgaggcgctgtaccaggcctgtgtccgcgaggccaacgcgcggcagcaggacctggagatcgccaagcagcgaatcgtgtcgcacgtgcgcaagctggtgtttcagggggatgaagtgctgaggcgggtgacgctgagtctcttcgggctgcggggggcgcaggcagagcgtggcccccgcgccttcgccgccctggccgagtgctgtgcgccctttgagccgggccagcgctaccaggagtttgtacgggcgctgcggcccgaggccccgccgcccccgccgcccgccttctccttccaggagttccttccctccttgaacagctcccctctggacatcagaaagaagctctctgggcctcttcctccaaggctggatgagaattcagctgagccaggcccttgggaggatccgggcacaggctggcgctggcaagggactccaggccccactccgggcagcgatgtggacagcgtgggtggcggcagcgagtctcggtccctggactcacccacttccagcccaggcgctggcacgaggcagctggtgaaggcttcgtccacaggcactgagtcctcagatgactttgaggagcgagaccctgacctgggagacgggctggagaatgggctgggcagccccttcgggaagtggacactgtccagcgcggctcagacccaccagctgcggcgactgcggggcccagccaagtgccgcgagtgcgaagccttcatggtcagcgggacggagtgtgaggagtgctttctgacctgccacaagcgctgcctggagactctcctgatcctctgtggacacaggcggctcccagcccggacacccctttttggggttgacttcctgcagctacccagggacttcccggaggaggtaccctttgtggtcacgaagtgcacggctgagatagaacaccgtgccctggatgtgcagggcatttaccgggtcagcgggtcccgggtccgtgtggagcggctgtgccaggctttcgagaatggccgagcgttggtggagctgtcggggaactcgcctcatgacgtctcgagtgtcctcaagcgatttcttcaggagctcaccgagcccgtgatccccttccacctctacgacgccttcatctctctggctaagaccttgcatgcagaccctggggacgaccctgggacccccagccccagccctgaggttatccgctcgctgaagaccctcttggtacagctgcctgactctaactacaacaccctgcggcacctggtggcccatctgttcagggtggctgcacgatttatggaaaacaagatgtctgccaacaacctgggcattgtgtttgggccgacactgctgcggccgccggacggcccgcgggcagccagcgccatccctgtcacctgcctgctggactctgggcatcaggcccagcttgtggagttcctcatcgtgcactacgagcagatctttgggatggatgagctcccccaggccactgagcccccgccccaagactccagcccagcccctgggcccctcacaaccagctcccaaccgccacccccgcaccttgacccagactcccagcccccagtcctagcctcagaccccggcccagacccccagcaccacagtaccctggagcagcatcccacggccacacctaccgagattccaactccacagagtgaccagagagaggacgtggctgaagacaccaaagatgggggaggggaagtgtccagccaaggcccagaggactcactcctggggacacagtctcgtggccacttcagccgccagccagtgaagtatccccggggcggtgtgaggcctgtaacccaccagctgtccagtctggccctggtggcttccaagctgtgcgaggagacccccatcacatcagtgcccagagggagtttgcgggggcgggggcccagccctgcagctgcctcccctgagggcagccccctgcgccgcaccccgctgcccaagcattttgagattacccaggagacagcccggctactctcgaaattggacagcgaggctgtgcccagggccacctgctgcccggacgtccagcctgaggaagccgaggaccatctctgaccaccctggcaccttaaataaggaagaggcccagattgtgaagacggacccatatatccctacctcccaccacctagtggccaaacaccccgccaggagttcaatgctgggagaggtccagagggttcctataaggaaaaactatttaatacatgacctaggggaggcctaaaacccttttggggataatgtcccagagtccccccactagacacaggtcactgccaagcatcagggccactcgggctcagaggtcactcagggtcaatactcagggtcagtgcaggttatgagatccttggggtccaccctagtctctgacacctgggacaggggtgcttttgctactttggttgtggtcactcccccacacctgcctgcctccttcacggactcgaagtgaccttcctggaggaggtgggcagctcagactccacatgctggtggtgcctgaggtctgatggcctctaataaactgtgtcctata

SEQ ID NO: 136819 - DNA, 910 bp, Homo sapiens
  Payload ID: 6790
  Gene Symbol: GMIP
  Gene Name: GEM interacting protein
  ENST ID: ENST00000593186
  CDS Start-End: 1-910
ggcgctcgcgagaggaggcccaggccaaggcgcaggaggccgaggcgctgtaccaggcctgtgtccgcgaggccaacgcgcggcagcaggacctggagatcgccaagcagcgaatcgtgtcgcacgtgcgcaagctggtgtttcagggggatgaagtgctgaggcgggtgacgctgagtctcttcgggctgcggggggcgcaggcagagcgtggcccccgcgccttcgccgccctggccgagtgctgtgcgccctttgagccgggccagcgctaccaggagtttgtacgggcgctgcggcccgaggccccgccgcccccgccgcccgccttctccttccaggagttccttccctccttgaacagctcccctctggacatcagaaagaagctctctgggcctcttcctccaaggctggatgagaattcagctgagccaggcccttgggaggatccgggcacaggctggcgctggcaaggccccactccgggcagcgatgtggacagcgtgggtggcggcagcgagtctcggtccctggactcacccacttccagcccaggcgctggcacgaggcagctggtgaaggcttcgtccacaggcactgagtcctcagatgactttgaggagcgagaccctgacctgggagacgggctggagaatgggctgggcagccccttcgggaagtggacactgtccagcgcggctcagacccaccagctgcggcgactgcggggcccagccaagtgccgcgagtgcgaagccttcatggtcagcgggacggagtgtgaggagtgctttctgacctgccacaagcgctgcctggagactctcctgatcctctgtggacacaggcggctcccagcccggacacccctttttggggttgacttcctgcagctacccagggactt

SEQ ID NO: 136820 - DNA, 747 bp, Homo sapiens
  Payload ID: 6790
  Gene Symbol: GMIP
  Gene Name: GEM interacting protein
  ENST ID: ENST00000591047
  CDS Start-End: 73-183
cggggctcggccccgccggcgcgcgaccccatccccatcccggtccctgcagagcgatccccgggcccagatatggacgcagcagagccgggactccccccaggtcctgagggcaggaagaggtacagtgacatcttccggagcctggacaacctcgaaatctcactggggaacgacccttgagatgctggctggagaccctctactctcagaagacccagaacctgacaagacccctacagccactgttaccaacgaagccagctgttggagcggcccctccccagagggtcctgtacccctcacaggggaggaactggacttgcggctcattcggacaaaggggggtgtggacgcagccctggaatatgccaagacctggagccgctatgccaaggaactgcttgcctggactgaaaagagagccagctatgagccacatgcctctgcagtacatctacaccctgtttctggagcacgatctcagcctgggaaccctggccatggagacagtggcccagcagaaaagagactactaccagcccctcgccgccaaacggactgagattgagaagtggcggaaggagttcaaggagcagtggatgaaggagcagaagcggatgaatgaggcggtgcaggcactgcggcgcgcccagctgcagtatgtgcaacgcagcgaggacctgcgggcacgctcccaggggtcccctgaggactcggccccccaggcctcgccgggacctagca

SEQ ID NO: 136821 - DNA, 2987 bp, Homo sapiens
  Payload ID: 6790
  Gene Symbol: GMIP
  Gene Name: GEM interacting protein
  Uniprot ID: Q9P107
  ENST ID: ENST00000587238
  CDS Start-End: 33-2867
cggtccctgcagagcgatccccgggcccagatatggacgcagcagagccgggactccccccaggtcctgagggcaggaagaggtacagtgacatcttccggagcctggacaacctcgaaatctcactggggaacgtgacccttgagatgctggctggagaccctctactctcagaagacccagaacctgacaagacccctacagccactgttaccaacgaagccagctgttggagcggcccctccccagagggtcctgtacccctcacaggggaggaactggacttgcggctcattcggacaaaggggggtgtggacgcagccctggaatatgccaagacctggagccgctatgccaaggaactgcttgcctggactgaaaagagagccagctatgagctggagtttgctaagagcaccatgaagatcgctgaagctggcaaggtgtccattcaacagcagagccacatgcctctgcagtacatctacaccctgtttctggagcacgatctcagcctgggaaccctggccatggagacagtggcccagcagaaaagagactactaccagcccctcgccgccaaacggactgagattgagaagtggcggaaggagttcaaggagcagtggatgaaggagcagaagcggatgaatgaggcggtgcaggcactgcggcgcgcccagctgcagtatgtgcaacgcagcgaggacctgcgggcacgctcccaggggtcccctgaggactcggccccccaggcctcgccgggacctagcaagcagcaggagcggcggcggcgctcgcgagaggaggcccaggccaaggcgcaggaggccgaggcgctgtaccaggcctgtgtccgcgaggccaacgcgcggcagcaggacctggagatcgccaagcagcgaatcgtgtcgcacgtgcgcaagctggtgtttcagggggatgaagtgctgaggcgggtgacgctgagtctcttcgggctgcggggggcgcaggcagagcgtggcccccgcgccttcgccgccctggccgagtgctgtgcgccctttgagccgggccagcgctaccaggagtttgtacgggcgctgcggcccgaggccccgccgcccccgccgcccgccttctccttccaggagttccttccctccttgaacagctcccctctggacatcagaaagaagctctctgggcctcttcctccaaggctggatgagaattcagctgagccaggcccttgggaggatccgggcacaggctggcgctggcaagggactccaggccccactccgggcagcgatgtggacagcgtgggtggcggcagcgagtctcggtccctggactcacccacttccagcccagacctgggagacgggctggagaatgggctgggcagccccttcgggaagtggacactgtccagcgcggctcagacccaccagctgcggcgactgcggggcccagccaagtgccgcgagtgcgaagccttcatggtcagcgggacggagtgtgaggagtgctttctgacctgccacaagcgctgcctggagactctcctgatcctctgtggacacaggcggctcccagcccggacacccctttttggggttgacttcctgcagctacccagggacttcccggaggaggtaccctttgtggtcacgaagtgcacggctgagatagaacaccgtgccctggatgtgcagggcatttaccgggtcagcgggtcccgggtccgtgtggagcggctgtgccaggctttcgagaatggccgagcgttggtggagctgtcggggaactcgcctcatgacgtctcgagtgtcctcaagcgatttcttcaggagctcaccgagcccgtgatccccttccacctctacgacgccttcatctctctggctaagaccttgcatgcagaccctggggacgaccctgggacccccagccccagccctgaggttatccgctcgctgaagaccctcttggtacagctgcctgactctaactacaacaccctgcggcacctggtggcccatctgttcagggtggctgcacgatttatggaaaacaagatgtctgccaacaacctgggcattgtgtttgggccgacactgctgcggccgccggacggcccgcgggcagccagcgccatccctgtcacctgcctgctggactctgggcatcaggcccagcttgtggagttcctcatcgtgcactacgagcagatctttgggatggatgagctcccccaggccactgagcccccgccccaagactccagcccagcccctgggcccctcacaaccagctcccaaccgccacccccgcaccttgacccagactcccagcccccagtcctagcctcagaccccggcccagacccccagcaccacagtaccctggagcagcatcccacggccacacctaccgagattccaactccacagagtgaccagagagaggacgtggctgaagacaccaaagatgggggaggggaagtgtccagccaaggcccagaggactcactcctggggacacagtctcgtggccacttcagccgccagccagtgaagtatccccggggcggtgtgaggcctgtaacccaccagctgtccagtctggccctggtggcttccaagctgtgcgaggagacccccatcacatcagtgcccagagggagtttgcgggggcgggggcccagccctgcagctgcctcccctgagggcagccccctgcgccgcaccccgctgcccaagcattttgagattacccaggagacagcccggctactctcgaaattggacagcgaggctgtgcccagggccacctgctgcccggacgtccagcctgaggaagccgaggaccatctctgaccaccctggcaccttaaataaggaagaggcccagattgtgaagacggacccatatatccctacctcccaccacctagtggccaaacaccccgccaggagttcaatgctgggagaggtcca

SEQ ID NO: 136822 - DNA, 594 bp, Homo sapiens
  Payload ID: 6790
  Gene Symbol: GMIP
  Gene Name: GEM interacting protein
  ENST ID: ENST00000587205
  CDS Start-End: 312-594
ggctcggccccgccggcgcgcgaccccatccccatcccggtccctgcagagcgatccccgggcccagatatggacgcagcagagccggggtgccacgactgctgagggagagggcaacgcggtaggatccccacagggcccctctgtagccctggggagtcggcagtgctggtctaggccccttaggagagggggcaggggggcagcagtagaaatgactccccccaggtcctgagggcaggaagaggtacagtgacatcttccggagcctggacaacctcgaaatctcactggggaacgtgacccttgagatgctggctggagaccctctactctcagaagacccagaacctgacaagacccctacagccactgttaccaacgaagccagctgttggagcggcccctccccagagggtcctgtacccctcacaggggaggaactggacttgcggctcattcggacaaaggggggtgtggacgcagccctggaatatgccaagacctggagccgctatgccaaggaactgcttgcctggactgaaaagagagccagctatgagctggagtttgctaagagcaccatgaagatcg

SEQ ID NO: 136823 - DNA, 869 bp, Homo sapiens
  Payload ID: 6790
  Gene Symbol: GMIP
  Gene Name: GEM interacting protein
  ENST ID: ENST00000588171
  CDS Start-End: 92-202
ggctgcggcggcaggaaatcggggctcggccccgccggcgcgcgaccccatccccatcccggtccctgcagagcgatccccgggcccagatatggacgcagcagagccgggactccccccaggtcctgagggcaggaagaggtacagtgacatcttccggagcctggacaacctcgaaatctcactggggaacgacccttgagatgctggctggagaccctctactctcagaagacccagaacctgacaagacccctacagccactgttaccaacgaagccagctgttggagcggcccctccccagagggtcctgtacccctcacaggggaggaactggacttgcggctcattcggacaaaggggggtgtggacgcagccctggaatatgccaagacctggagccgctatgccaaggaactgcttgcctggactgaaaagagagccagctatgagctggagtttgctaagagcaccatgaagatcgctgaagctggcaaggtgtccattcaacagcagagccacatgcctctgcagtacatctacaccctgtttctggagcacgatctcagcctgggaaccctggccatggagacagtggcccagcagaaaagagactactaccagcccctcgccgccaaacggactgagattgagaagtggcggaaggagttcaaggagcagtggatgaaggagcagaagcggatgaatgaggcggtgcaggcactgcggcgcgcccagctgcagtatgtgcaacgcagcgaggacctgcgggcacgctcccaggggtcccctgaggactcggccccccaggcctcgccgggacctagcaagcagcaggagcggcggcggcgctcgcgagaggaggcc

SEQ ID NO: 136824 - DNA, 513 bp, Homo sapiens
  Payload ID: 6791
  Gene Symbol: GMNC
  Gene Name: geminin coiled-coil domain containing
  ENST ID: ENST00000456552
  CDS Start-End: 62-253
cactggttttactgaaaaattgagtgggctcagtttctgcagcgctttcttccactgcaagatgaacaccattctgccttgccaagaccagtactttgtaggaggccagagctataattgcccgtattccactacaacgtcagaatctagtgttgacgtttccacggagacttgggtctctttctgggctgctggtctcctggacaacagagagctccaacaagcaccacaggcacaggtatcaacaatataaccagagaaggacaagagtctaaactgtactagatgaagaaaagaaagtaaaagtagacctgaatcattcagtgactcaaattttcctcttccggacttgtgctcatgggaagaggctcagctttcctctcagctctacagaaataagcagctgcaagataccctggtgcagaaggaagaagaactcgccaggttacacgaagagaataatcacctcagacaatacctgaattctgctttggttaaatgtcttgaagaaaa

SEQ ID NO: 136825 - DNA, 3422 bp, Homo sapiens
  Payload ID: 6791
  Gene Symbol: GMNC
  Gene Name: geminin coiled-coil domain containing
  Uniprot ID: A6NCL1
  ENST ID: ENST00000442080
  CDS Start-End: 1-1005
atgaacaccattctgccttgccaagaccagtactttgtaggaggccagagctataattgcccgtattccactacaacgtcagaatctagtgttgacgtttccacggagacttgggtctctttctgggctgctggtctcctggacaacagagagctccaacaagcaccacaggcacaggaatcattcagtgactcaaattttcctcttccggacttgtgctcatgggaagaggctcagctttcctctcagctctacagaaataagcagctgcaagataccctggtgcagaaggaagaagaactcgccaggttacacgaagagaataatcacctcagacaatacctgaattctgctttggttaaatgtcttgaagaaaaggccaagaaattgctctcatctgatgagttctccaaagcatatggaaaattcaggaaggggaagagaaaatccaaagagcaaagatactctcctgctgagattccccatcccaaaaatgccaaaagaaacctctctagtgaatttgctaactgtgaagaacaagctgggccccctgtggatccctgggtccttcaaacacttgggttaaaagaccttgacactatcgatgacacctcatcagctaactacagtgccctcgcatctcatcccagaagagtcgccagcacattttcccagtttccggatgatgcagttgattataaaaatatccccagagaggatatgccaattgactatagaggtgacagaacaacccccttgcacagcactgccactcatggagaagatttccacatcctttctcaactttcaaatcccccagtggggctgaaaactcttccttactatactgctcatgtgtcacccaacaagacagagatggcattttccacatccctgagccctcattgtaatgtgaaaactcattccttccaccagggacaagcctttgtgcgtcgagatgaggagggaggctggaagtttacctgggtccctaagcagtcttagtgacccctcttttatcacaaagcactgccacgaactctgtttacaaagacctctcttgcacttgaatttgactatgtggaacacagaagctgttgcttagactgtctcctgccactttaaatgtcactctcaattacccacttaaatctgcagggaatggcttccaagaatccataatgaaacgtgtccgcgcttcttttacctaaatttgacttgtttacacaccaatacctgctattgacatcctctctttgccctatacttgataaggtattttccactcacttctatattcctttaagacctagatacatttttccaattttaaccagtttaacagattttcctcttttaagtagttgaaatattcacagcccttttacttttctccctttgtcatttctgaaaactgtctttagaatgagccctatttttgcttcaagtacttgctactgcatgttcaaatagctgagggtggggttgaaacaagtgtctttgcccatcaccactactcctgaagacataatgtggatgtgtgtagcattatgttcatggcagttcaaaaagttcagtgccccatagtggcattgacaaagcctcttaaaacaactgtaactccactaataatcaatatcacagataaactttaaaattacaaagaatttaaattatttttaaatgcctcatgatgtatcagcttctatatgtacccagcatcatttctttaaccaacatgactccaagaagaacattttgagggactgtggtaacaaaactagtcatcatctgcaactacccagatgctgacaaactcctattgctgaaaatagactaacctagctcagccattgtctcattcattcattcattcgcgtattcattttttcattgatcagtccacccaagaaatctgtagaatacctaatgcctactttgtaccaggcactatgctatgtgatggtgataaaatacaagcaatttagacactgtggccaccatcatgagacttagacctactcatctgctatgactttgcgaaaacgacttcccttttgtgaaggttcagtttcccaactgtagaatacagaagttggactagataattactaatattctatgaattgaggctgggtcctatcagatttactccaacatggcagtttcaggtcactgaagaaactaaagagaagtctttagataggcactgcaagtattaggtagggtaaactttatgtacaattaataaaattcaaaaacataagtcatttgaagttaacattagaaatcattgctctgatcacagtactctttttctagagcccattttgcagttaactcggcgtaactgtgtaagaataatttgcctctaaaaatagatacatattaatttttaaataagtgcggatagattgcatataaatattgctatcaaggacttcatatttctaaatttgaaacaatatattttcagtgcttgtgctagttttcttctttcccatctctcaagacccctatcattcccagaataatttgcacatcctgcatgtgcacctatgttttttggacaaacttcaattaatgatgaaatctttcatgttgaaacctgttctcatttttctcttttccacatctcaataagtcatcttgcacaatcaatatctcgtaggtcaactgtgttggttaggattctttgtaacagagacatgcctttcattgttgtttctgtttggttgttgctttattttggtgatgtaagcaaagggtctgttttataaagttttgttgccacccacttttaaaaataatttatgaagaaaatccaatatagtaattaatattactctctggagtactttaagaagtagaacacattccattttctaaaaaataaaataaaataaataactgtgccttttacattctggtatctgggcccctggtcggtgaaatttgtcgctttttagaataagagatttaaggattcgaattattgtactttatgacactaggaattgagaaagtaatataactaattttgaaagtctaataatcaagctgtaaaaggaaatgtatgagttaacaaatatttattttgcattctttgtgtgccttatcatgtgttaagtaccatgagggtacacccaggcttagcacaatgcatttggtatacaaaaccatgtaaaatgtcatagcttttgatagcttttaaatgaaacttaattttggcccagtttaaagatattaccgaacatttgggataaaatgtgatggtttcctggcttctatcatggacgatgttatggaagacaattaccacgtttttgaaatcatgtctataaatatttaatatccatttaaattatgtatagaaaattattttgttcatgttttagaaattaaacatttctttcacctga

SEQ ID NO: 136826 - DNA, 1262 bp, Homo sapiens
  Payload ID: 6792
  Gene Symbol: GMNN
  Gene Name: geminin, DNA replication inhibitor
  Uniprot ID: O75496
  ENST ID: ENST00000230056
  CDS Start-End: 333-962
tcagttggtcacgtggttgttcggagcgggcgagcggagttagcagggctttactgcagagcgcgccgggcactccagcgaccgtggggatcagcgtaggtgagctgtggccttttgcgaggtgctgcagccatagctacgtgcgttcgctacgaggattgagcgtctccacccagtaagtgggcaagaggcggcaggaagtgggtacgcaggggcgcaaggcgcacagcctctagacgactcgctttccctccggccaacctctgaagccgcgtcctactttgacagctgcagggccgcggcctggtcttctgtgcttcaccatctacataatgaatcccagtatgaagcagaaacaagaagaaatcaaagagaatataaagaatagttctgtcccaagaagaactctgaagatgattcagccttctgcatctggatctcttgttggaagagaaaatgagctgtccgcaggcttgtccaaaaggaaacatcggaatgaccacttaacatctacaacttccagccctggggttattgtcccagaatctagtgaaaataaaaatcttggaggagtcacccaggagtcatttgatcttatgattaaagaaaatccatcctctcagtattggaaggaagtggcagaaaaacggagaaaggcgctgtatgaagcacttaaggaaaatgagaaacttcataaagaaattgaacaaaaggacaatgaaattgcccgcctgaaaaaggagaataaagaactggcagaagtagcagaacatgtacagtatatggcagagctaatagagagactgaatggtgaacctctggataattttgaatcactggataatcaggaatttgattctgaagaagaaactgttgaggattctctagtggaagactcagaaattggcacgtgtgctgaaggaactgtatcttcctctacggatgcaaagccatgtatatgaaatgcattaatatttgactgttgagaattttactgccgaagtttacctccactagttctttgtagcagagtacataactacataatgccaactctggaatcaaatttccttgtttgaatcctgggaccctattgcattaaagtacaaatactatgtatttttaatctatgatggtttatgtgaataggattttctcagttgtcagccatgacttatgtttattactaaataaacttcaaactcctgttgaacattgtgtataacttagaataatgaaatataaggagtatgtgtagaaaa

SEQ ID NO: 136827 - DNA, 1133 bp, Homo sapiens
  Payload ID: 6792
  Gene Symbol: GMNN
  Gene Name: geminin, DNA replication inhibitor
  Uniprot ID: O75496
  ENST ID: ENST00000356509
  CDS Start-End: 208-837
gtctgcgtcagttggtcacgtggttgttcggagcgggcgagcggagttagcagggctttactgcagagcgcgccgggcactccagcgaccgtggggatcagcgtaggtgagctgtggccttttgcgaggtgctgcagccatagctacgtgcgttcgctacgaggattgagcgtctccacccatcttctgtgcttcaccatctacataatgaatcccagtatgaagcagaaacaagaagaaatcaaagagaatataaagaatagttctgtcccaagaagaactctgaagatgattcagccttctgcatctggatctcttgttggaagagaaaatgagctgtccgcaggcttgtccaaaaggaaacatcggaatgaccacttaacatctacaacttccagccctggggttattgtcccagaatctagtgaaaataaaaatcttggaggagtcacccaggagtcatttgatcttatgattaaagaaaatccatcctctcagtattggaaggaagtggcagaaaaacggagaaaggcgctgtatgaagcacttaaggaaaatgagaaacttcataaagaaattgaacaaaaggacaatgaaattgcccgcctgaaaaaggagaataaagaactggcagaagtagcagaacatgtacagtatatggcagagctaatagagagactgaatggtgaacctctggataattttgaatcactggataatcaggaatttgattctgaagaagaaactgttgaggattctctagtggaagactcagaaattggcacgtgtgctgaaggaactgtatcttcctctacggatgcaaagccatgtatatgaaatgcattaatatttgactgttgagaattttactgccgaagtttacctccactagttctttgtagcagagtacataactacataatgccaactctggaatcaaatttccttgtttgaatcctgggaccctattgcattaaagtacaaatactatgtatttttaatctatgatggtttatgtgaataggattttctcagttgtcagccatgacttatgtttattactaaataaacttcaaactcctgttgaacattgtgtataacttagaataatgaaatataaggagtatgtgtag

SEQ ID NO: 136828 - DNA, 653 bp, Homo sapiens
  Payload ID: 6792
  Gene Symbol: GMNN
  Gene Name: geminin, DNA replication inhibitor
  ENST ID: ENST00000378054
  CDS Start-End: 116-653
gacgcgcggggccacactgcccgccccctagcctggcgctgggcctccgggacaagttggctgggtccgggcttggggactgcaacgcggtcttctgtgcttcaccatctacataatgaatcccagtatgaagcagaaacaagaagaaatcaaagagaatataaagaatagttctgtcccaagaagaactctgaagatgattcagccttctgcatctggatctcttgttggaagagaaaatgagctgtccgcaggcttgtccaaaaggaaacatcggaatgaccacttaacatctacaacttccagccctggggttattgtcccagaatctagtgaaaataaaaatcttggaggagtcacccaggagtcatttgatcttatgattaaagaaaatccatcctctcagtattggaaggaagtggcagaaaaacggagaaaggcgctgtatgaagcacttaaggaaaatgagaaacttcataaagaaattgaacaaaaggacaatgaaattgcccgcctgaaaaaggagaataaagaactggcagaagtagcagaacatgtacagtatatggcagagctaatagagagactgaatggtgaacctctggataattttgaatcactggataatcaggaatttgattctgaagaagaaa

SEQ ID NO: 136829 - DNA, 688 bp, Homo sapiens
  Payload ID: 6792
  Gene Symbol: GMNN
  Gene Name: geminin, DNA replication inhibitor
  ENST ID: ENST00000378059
  CDS Start-End: 382-688
gatgctgctctttaggatggacctgggcataccctagtatctgtttattttgctttttctggtgactatttaatccaggacaatatgtttagaaattttaaaccagttttagaaattggtttaaaatacattaatttcattttttcagctataattattatgtgtgtatatatgtaaaatatagatatcaagagtcattaactttagtcaccttagtcattgacagggctgagtttggattaagagagaaaaaataatagttctactgtacaatagtataatttttatgattgtaagtattttaaacctagactccaccttcgggggtgcaaaccatattgttttttaattactagtcttctgtgcttcaccatctacataatgaatcccagtatgaagcagaaacaagaagaaatcaaagagaatataaagaatagttctgtcccaagaagaactctgaagatgattcagccttctgcatctggatctcttgttggaagagaaaatgagctgtccgcaggcttgtccaaaaggaaacatcggaatgaccacttaacatctacaacttccagccctggggttattgtcccagaatctagtgaaaataaaaatcttggaggagtcacccaggagtcatttgatcttatgattaaagaaaatccatcctctcagtattggaaggaagtgg

SEQ ID NO: 136830 - DNA, 580 bp, Homo sapiens
  Payload ID: 6792
  Gene Symbol: GMNN
  Gene Name: geminin, DNA replication inhibitor
  ENST ID: ENST00000476555
  CDS Start-End: 384-580
agttggctgggtccgggcttggggactgcaacgcgggtaagggactcagcctgggcttgccagctgtggggatgaggcgaagcatccatcctcttggcagttaagtggctggtcctgatctgagggatctgcaaatttggctcatggaaagaggtggctgaattctgcgtctcccattaaacggatactggcgttgttgatacgggtttcgcatggaccctgtcctgtgccagggtttttaatctagctattaaaggaactggagaataacaagtaagggttgcaaggtcgctgacaggcgtgggaaacttgtgaaggattagaatgctaagtggctttcagcttttttcacactaagtcttctgtgcttcaccatctacataatgaatcccagtatgaagcagaaacaagaagaaatcaaagagaatataaagaatagttctgtcccaagaagaactctgaagatgattcagccttctgcatctggatctcttgttggaagagaaaatgagctgtccgcaggcttgtccaaaaggaaacatcggaatgaccacttaacatctacaacttccagccctgg

SEQ ID NO: 136831 - DNA, 1039 bp, Homo sapiens
  Payload ID: 6792
  Gene Symbol: GMNN
  Gene Name: geminin, DNA replication inhibitor
  Uniprot ID: O75496
  ENST ID: ENST00000620958
  CDS Start-End: 116-745
gacgcgcggggccacactgcccgccccctagcctggcgctgggcctccgggacaagttggctgggtccgggcttggggactgcaacgcggtcttctgtgcttcaccatctacataatgaatcccagtatgaagcagaaacaagaagaaatcaaagagaatataaagaatagttctgtcccaagaagaactctgaagatgattcagccttctgcatctggatctcttgttggaagagaaaatgagctgtccgcaggcttgtccaaaaggaaacatcggaatgaccacttaacatctacaacttccagccctggggttattgtcccagaatctagtgaaaataaaaatcttggaggagtcacccaggagtcatttgatcttatgattaaagaaaatccatcctctcagtattggaaggaagtggcagaaaaacggagaaaggcgctgtatgaagcacttaaggaaaatgagaaacttcataaagaaattgaacaaaaggacaatgaaattgcccgcctgaaaaaggagaataaagaactggcagaagtagcagaacatgtacagtatatggcagagctaatagagagactgaatggtgaacctctggataattttgaatcactggataatcaggaatttgattctgaagaagaaactgttgaggattctctagtggaagactcagaaattggcacgtgtgctgaaggaactgtatcttcctctacggatgcaaagccatgtatatgaaatgcattaatatttgactgttgagaattttactgccgaagtttacctccactagttctttgtagcagagtacataactacataatgccaactctggaatcaaatttccttgtttgaatcctgggaccctattgcattaaagtacaaatactatgtatttttaatctatgatggtttatgtgaataggattttctcagttgtcagccatgacttatgtttattactaaataaacttcaaactcctgttgaacattgtgtataacttagaataatgaaatataaggagtatgtgt

SEQ ID NO: 136832 - DNA, 9854 bp, Homo sapiens
  Payload ID: 6793
  Gene Symbol: GEN1
  Gene Name: GEN1 Holliday junction 5' flap endonuclease
  Uniprot ID: Q17RS7
  ENST ID: ENST00000317402
  CDS Start-End: 126-2852
gcagttgcggggtttcgcgccgccggagtctgagaggccggaagtgccccttagcgggtgggggaagctggtaggcacgggcggctccgcagtgaccggactcgggggagcagataatcaccagaatgggagtgaatgacttgtggcaaattttggagcctgttaagcaacacatccccttgcgtaatcttggtgggaaaaccattgcagttgatctgagtctctgggtgtgtgaggcacagacagtcaaaaaaatgatgggcagcgtcatgaagccccacctcaggaacttattttttcgtatctcatatttaacacaaatggatgtaaaactggtatttgttatggaaggggaaccaccaaagctgaaagctgatgtcataagcaagaggaatcagtctcggtatgggtcttctggaaaatcgtggtctcagaaaacagggagatcacattttaaatcagtcttaagagagtgcctccatatgctcgaatgcttaggaatcccctgggttcaggctgctggggaagctgaagccatgtgtgcttatctcaatgctggtggtcatgtcgatggctgcctcaccaatgatggagatactttcctttatggggcccagactgtttacaggaatttcactatgaatacaaaggacccacatgttgactgttacacaatgtcatctatcaagagtaaactaggtttggatagagatgctctggttggattagcaatacttcttggctgtgattatctcccaaagggagtccctggagttggaaaagagcaagcattaaaacttatacagattttgaaagggcaaagtttacttcagaggtttaatcggtggaatgaaacatcttgtaactctagtccacaactgctagtcactaaaaaactggctcattgttccgtatgttcccatccaggttcacctaaggatcatgaacgtaatggatgcagattatgtaaaagtgataaatattgtgagccacatgactatgaatactgctgtccttgtgagtggcaccgtacagaacatgataggcaactcagtgaagtagagaacaatattaagaagaaagcttgctgttgtgagggattcccattccatgaggttattcaagaattccttttaaacaaggataaattggtgaaggttatcaggtaccaaagacctgatttgttattgtttcagagatttactcttgaaaaaatggagtggcccaatcactatgcatgtgagaaattgctggtacttttgacccattatgacatgatagaaagaaagcttggtagcagaaactctaatcaactacagccaattcgaattgttaagactcgaatcagaaatggagttcattgttttgaaatagaatgggaaaagcctgaacattatgctatggaagataaacaacatggagaatttgctttattaacaattgaggaagaatcattgtttgaagcagcatatcctgagatcgttgctgtttaccaaaaacaaaagttagaaattaaagggaagaaacaaaaacgtattaagcctaaagaaaacaatttgccagaaccagatgaagtaatgagctttcagtcacacatgactttaaaacccacatgtgaaatctttcataagcagaattccaagttaaattcggggatttcccctgatcctacattaccacaggaatctatttctgcctcattgaatagcttgcttttacctaaaaatactccatgtttgaatgcacaagaacagttcatgtcttctctaagacctttggctatacagcaaattaaagctgtcagtaagtctctaatttcagaatctagtcaacccaatacctcatctcataatatatccgtgattgctgatctacacttgagcactattgactgggaaggtacttcttttagtaattctccagctattcaaaggaatactttttctcatgatttaaaatcagaagttgaatcagagctatcagccatccctgatggctttgaaaatatcccagaacaactgtcctgtgaatcagaaaggtacactgcaaacataaagaaagtgttggatgaggattctgatgggattagtcctgaagagcatctactttctggcattactgatttatgtcttcaggatttgcctttaaaggaacgaatatttacaaaattatcatatcctcaggataatctacaaccagatgtcaacctgaaaactttgtccatacttagtgtaaaagaatcttgtattgctaacagtggttctgattgtacatcacatctttcaaaggatcttccaggaattcccttgcaaaatgaatccagagactctaaaattctaaaaggagaccagctgcttcaagaagactataaagtcaatacttctgtcccttattctgtcagtaacacagtggtaaagacctgcaatgttagaccaccaaatactgctttagatcatagtagaaaagttgatatgcaaaccactcggaaaattttaatgaagaagagtgtttgccttgacagacattcctctgatgaacaaagtgccccagtgtttgggaaagctaagtacacaactcaaagaatgaagcacagttctcaaaagcataattcatcccatttcaaagaaagtggccataacaagttgagtagccctaagatacatattaaagaaactgaacagtgtgtcagatcttatgaaacagctgaaaatgaagaaagctgtttcccagattcaacaaaaagttctctgagttctctacaatgtcataagaaagaaaacaactctggtacttgtttggatagccctcttcctttacgccagagattaaaactaagattccaaagcacttgaaatttaaaacacttaggtataacttaactattttagtactatcagcaatagcagagacagagggaaggtatctagttcatgtgtggtaaaaattttaatgttctctgtgtcatgaaacacttgccattttaatcaaagttgtaatttttaaaaagtcacctaaaactctggttttaaaagatcctctgtattgaaaacttctgataatgtatgtcattatgtccttactattccttaattgtagttttaaaatattggtatagtacttgacagagtaaatacttcatctgattgttcatttttactttttcttccacaagcctctaaagtatttatattccagcttgttcccaagaggataattctttatacttctcttcattcttttaaggccttgcaaggtcttccgttataactcgctttcctaaaagctattttctccctcagtgtgaagatacctttagtgtgctcttccactttggaaggccatgcaaggtgttccattataactctttttcctaagagttatattctccctcagtttgaagatacctttagtgtgctcttccacttttggtgtcttagtctcttttgaggggcaaaaatagaaaaggagagaagatgtcagtatgtttagtaaaaatcatgctcgtaatggctgaataaactgagcaaagtaactccttatgtatccccagaagttcacaggtatatcgggtggaaaaagatttggaaaatcaaatgtataaccaaaaggattagaaactagcccaggatcacgtagctaactaataatcctgtgggaatcagttttcttgcctgctaatttttttatttttctattttttccttctatagcacttttcccccttttgttttgaatctatgcaatattgactttaataccaccaaatattaagtcatgcattaatttaggtcgcactcaaaaattctagagaggcatccagattgaaaaggaaaatggtgtctgcagatgacaagattgtatgcatcaaaaattctaagaaatccactagaaaactattaaaactgataaagcgagttcatccaggtcgtagaatacaagaccaatgtgcaatgatcattgcattttgtttttgtttgtttgtttttttttgagacagagtctcactcttgtcgagactggggtgtagtggcgccatcttggctcactgcaacctctgcctcccaggttcacgcaattcacatgcctcagccacctgagtagcagggattacaggtgtgtgccaccatgcctggctaatttttagtatttttagtagagatgggattttcccttgttggtcaggctagtcatgaactcctggcctcaagcgatccacccatcttggcctcccagagtgctgggattacaggtgtgaatcaccatactcagcctcaattgtatttctgtacacctctaaataaatggaaatacattccatgttcatgaatcagaagacataagatgaccatactccccaaactgatctacaggttaaatgtaattcccattaattccagctggtttctttgctgattctaaaattcatatggaaatttcaggaacacagaatattaggaagaatcttgaaagagtttgaatgacccacccttcctgattttaagtatacagaactacagtaatgaatgtgttgtactggtataaaggtagacatataggtcaatatagatcaatggcatagaattgagaattcagaaaaaaagccttcacgtttatggtcagttgattttaaaccagagtgccaagacaattcaatgggaaaaggaaacagtctttgaaccaactgtcttctggatctattggatatctatgtaaaaaagagtgacatttgattcctacttcacatgatatttaagaagtaacttaagatggatcaaatacctaaatgtaagctaaagctataaaactcttagaagaaaacatagacgtaaatctttgtgactttggattaggcaaggatttcttaaatatacccaaagcataggcaacaaaagagaatacacaaactggacttcatcaaaactaaaaactgttgtttgaaatgacaccatcaagaaagtgaaaagacagcttacagaatgggagaaaatatttgcaaatcataaatgtgataagggacttgtatcttggtggtatataaagaactcgtaactcaattataaaaagacaactttgaaatgggcaaaatagctcaacaggcttttctgcaaagaagaaatacaaatgaccaagaagcacatttaaaaattttcagtactattactcatcaggaaaatgcaaatcaaaaccacaagacacccaatgtctacaatcaaaaagataataactagtattgatgaggatgtggagaaattgaaattctcataacatgctggtaggaatgtaaaatggggcagccactttggaaaaagtctggtagttcttcaaatggttaaatgtagagttacgatatgatccagcaattcctctcccaggtatatacccaagataaatgaaaacttatatccacataaaaacctgtgcacaaatgtccatagcagcgttattcataatagcctaaaagtggaaacaatcccagttccagaatgaggaaggggagaaactaatgtgtattagctattgtgtgctaagcattcaactagattatttacaaaccttgtatcatctcaactctttaaggactgtattgcaatgttttgaatattcagagagaaaaaagtcgttgctaaaacattttccaaggttctgcttattctgatttgttcagtcgtggctgtgatagttcaggaccatctagaccaggtaaataaaatatctagaggcattcttgagattgtatgagatgaaaataacaaaattagttgggagtggccagtctgagttcattttgctatatagctcaggagtccccaacccctgggctatggacaggtaccagtccatcacctgtcaggaaccggcctgcacagcaggtgttgagcggcatgcaagcgagaattaccgcctgagctctgcctcctgtcagatcagcggtggcattagagtctcataggagcatgaaccctattgtgaactacgcatgcgaggatctagtttgtgcactcctactgagaatctaatgcctgatgatataaggtggaacagcttcatcccacagccatctccccctcatcatccgtggaaaaactgttttccacgaaagtggtcctcggtgccagaaaggttggggactgctgatatacctaatataggcataagtgtaaaattatagttcctcctcctcaaggatttctctgttttcattgtccaggttataccaattctttttaaagcattccatgttcttgttccttgatgtggtcatgttatcacttgtaaatcaaatcttttaagttgctgcttacgtatttgctcatcacttcattgtcttgttgaggatgccttgcttccctttgaaatactctgccaaagatctgcctccagctgctaggatcctgtaattggtttctttctgatggctccatgctaaggccctgctctggcctaactgctttgggctttgtgtaatcaatcttaagtccttggcggtttttcttttagatttttttccatataaaatctctatctggccacacatggtggccgtgcctgtaatcccagcacgctgggaggctgaggcgggtggattgcttgaggccaggagttcaagaccagcctggccaacatggtgaaaccccatctctactaaaaatacaaaaatcagtggggcctggtggcgtgcacctgtaatcccagctactcgggaagctgaggcaggagaatcgcttgaacctgggaggcagaggttgcagtgagctgagatagtgccactgcacttcactccaggatgggcgaaaaagtgtctaaaaaaaattaaaatttaaattaaaaaaaaatatacaatctccgtcttctagattttataatgaggactctactttttccttttgggtagcatggcttgagccatcttgtcaggcatacctagcttcagattcttttctgctaacagattttctctgtgaccctggagacattttctaacttttctgagactcatttattcaaatgtttatgtgacaggcattgtgctgggccctggagatacagtgatcaatggcatcctataaggttttgatatctgtgaagtcactgccaccattgacacattctagggactcagtaaattgtagctgtgtccgataccatcatttggaaagagcactatcagattttggattcaaactgaatgcagccaagcactgccttttggtaaaaatgtggacacagtaacactagtagggggcagtgtgagggtgggagatgtgttttcagaagaaggaaactctagattagcatcacacaagggatcctaacgtggcatttgagctactggaaaaaaattgtgcttgcttaaatataatgtggtaactaatattcatctaatcacctaccacatttttggagcacccactttgagcaaggttcttaggcttttctatgtacaacagccagctggaggcccagtgagtttaaaatttttccaggtcacccaactagaaaaagttaaagctgggactagaactcagatctcctaattcatgagtgaaaacaattctctgtatttatgtttccatacatcattcagttcttgactcaaatatcacctcagagagtcctaatctttttatctcctgacattataaatgttgagttcagggttttttttttcattgtttcccaaactagaatgcagacttgatgagggcagggactaagtcctttctgttcacagaattctagaacagtgtttgacacagtaactactagatgcatgaatgacaattctccacaacgccccacccatggagcctgtaccagcagtggctgcacttaaccttgcggaatctggccttagtacttcagcatggctcacaaggctgaggcagcctggccccaacttgtctcttcagcttcatgcattcatagtcatgaaccttggctctagccacctaagaccatttgttattccctgcacggatgtctctgcctgaaatgcttgctgcttccttattggctagataaacctcatctattaaggaccagctcacatgtcataactttataatcccaagcagaattatttgctctatacgtgtccccaaagaaattacccatacattcatcagagtatttatcacattcattcattcgttccacaaatattagctgatgcctgccgtgtaggaggcacaatattccttacttaaaaatgcctctatctctccctcagataagactaagatctctgagcacaggaatcaagtcttatttctgttcacttcccccagatgcctacacagggtttgactcttctgcctcaccaactcttacccatcgagattcagtgtaaacgtggtcttctctaagaaagtcttctgttgcttctctggatcgctgctagtccccatagacttctaaaatattatctgtctatagttttgtgttgggttacattttttgtttcccacaccagactatgaacatcctcagggcagagaaactatattgtacttctgaatttatagcacccggcagagggattggcacagaaagtgtccagtgaggccgggtgtgggggctcacatcagcagtttgggaggccgagatgggcagattgcctgaggtcaggagttcgagaccaacctggccaacatggtgaaatcccatctctacaaaaaatacaaaaattagccgggtgtggtgatgggtacctgtaatcccacctacttgggaggctgagacaagagaatcacttgaacccgggaggcggaggttgcagtgagctgagaccgtgccattgcactctagcctgggcaagaagagcgaaactccatctaaacaaaagaaaaaagaaagtgttcagtgaatgggtgctgattgactgatggtgatttcagtcagggtcttagttctaaatttctctgtggagagagaccaaatctaaccgggtggattagcttgatacctagtcgcctttagccacttcaagacgccctgccaagatgcttgctttctgaaggtgaagagtctaaatcaactgctgttcctgttctgctggtagcacttagggtaaaacagcttaaatagtattactgaaggcagcctcctttcatctatatattaacgtggcaatgtttatcaccttcttaaccaagcaaagcttttatcaggctcagctaacagcttgcattagcctctttcaggaacttgccacattgcctataaactgacatgctgcagagtcagccccagcaatagtccaaaacagtgggactctttttgatgatttcaaaatggatagtttagttagccccaggccagataaattcactaagttgcctgtttggcaatggagggcagagttatcagcaaagtaggctgacccttctgtgggcagaatgaatattttgctaatgtttagaagaattccttttgtaagcatcaaagaagaactttaataaggattaagtgtctgagcttccttagcattattctattccaagacccaaaaaggaaaataacctccccaaatggtaaaaactgcttgtatatttagaattctctgatcaaagacctaatgaaaagattctatagtgtttgcgtcatcataagttaaatcttcatctaccacccaactgatacctgcctttctgtgagtgaaatcagaaacggctgttctttaataaatgctttcaatctgaaagtcagaaagtgatttatgaaacacccaggtgaggggagactacaagtccctttgccttttagttttcaagcaatactggttgcagtaactgctctgatgtaattattgctaacatttacgtttttattaaactgaaaatgctaactgtgaa

SEQ ID NO: 136833 - DNA, 6367 bp, Homo sapiens
  Payload ID: 6793
  Gene Symbol: GEN1
  Gene Name: GEN1 Holliday junction 5' flap endonuclease
  Uniprot ID: Q17RS7
  ENST ID: ENST00000381254
  CDS Start-End: 215-2941
gaaacgcttcctggtgctcctgggcctggcggttgagcccggggagctagtctttgcttgggtaaagaaagaggactttcctttttttttttccttttgagaaaattcagaaatttggaggcacagtagttaggattcaggccaaactggtaaatgacgaaggggcttcttccagagccaaggaggaagggttgtccggcagataatcaccagaatgggagtgaatgacttgtggcaaattttggagcctgttaagcaacacatccccttgcgtaatcttggtgggaaaaccattgcagttgatctgagtctctgggtgtgtgaggcacagacagtcaaaaaaatgatgggcagcgtcatgaagccccacctcaggaacttattttttcgtatctcatatttaacacaaatggatgtaaaactggtatttgttatggaaggggaaccaccaaagctgaaagctgatgtcataagcaagaggaatcagtctcggtatgggtcttctggaaaatcgtggtctcagaaaacagggagatcacattttaaatcagtcttaagagagtgcctccatatgctcgaatgcttaggaatcccctgggttcaggctgctggggaagctgaagccatgtgtgcttatctcaatgctggtggtcatgtcgatggctgcctcaccaatgatggagatactttcctttatggggcccagactgtttacaggaatttcactatgaatacaaaggacccacatgttgactgttacacaatgtcatctatcaagagtaaactaggtttggatagagatgctctggttggattagcaatacttcttggctgtgattatctcccaaagggagtccctggagttggaaaagagcaagcattaaaacttatacagattttgaaagggcaaagtttacttcagaggtttaatcggtggaatgaaacatcttgtaactctagtccacaactgctagtcactaaaaaactggctcattgttccgtatgttcccatccaggttcacctaaggatcatgaacgtaatggatgcagattatgtaaaagtgataaatattgtgagccacatgactatgaatactgctgtccttgtgagtggcaccgtacagaacatgataggcaactcagtgaagtagagaacaatattaagaagaaagcttgctgttgtgagggattcccattccatgaggttattcaagaattccttttaaacaaggataaattggtgaaggttatcaggtaccaaagacctgatttgttattgtttcagagatttactcttgaaaaaatggagtggcccaatcactatgcatgtgagaaattgctggtacttttgacccattatgacatgatagaaagaaagcttggtagcagaaactctaatcaactacagccaattcgaattgttaagactcgaatcagaaatggagttcattgttttgaaatagaatgggaaaagcctgaacattatgctatggaagataaacaacatggagaatttgctttattaacaattgaggaagaatcattgtttgaagcagcatatcctgagatcgttgctgtttaccaaaaacaaaagttagaaattaaagggaagaaacaaaaacgtattaagcctaaagaaaacaatttgccagaaccagatgaagtaatgagctttcagtcacacatgactttaaaacccacatgtgaaatctttcataagcagaattccaagttaaattcggggatttcccctgatcctacattaccacaggaatctatttctgcctcattgaatagcttgcttttacctaaaaatactccatgtttgaatgcacaagaacagttcatgtcttctctaagacctttggctatacagcaaattaaagctgtcagtaagtctctaatttcagaatctagtcaacccaatacctcatctcataatatatccgtgattgctgatctacacttgagcactattgactgggaaggtacttcttttagtaattctccagctattcaaaggaatactttttctcatgatttaaaatcagaagttgaatcagagctatcagccatccctgatggctttgaaaatatcccagaacaactgtcctgtgaatcagaaaggtacactgcaaacataaagaaagtgttggatgaggattctgatgggattagtcctgaagagcatctactttctggcattactgatttatgtcttcaggatttgcctttaaaggaacgaatatttacaaaattatcatatcctcaggataatctacaaccagatgtcaacctgaaaactttgtccatacttagtgtaaaagaatcttgtattgctaacagtggttctgattgtacatcacatctttcaaaggatcttccaggaattcccttgcaaaatgaatccagagactctaaaattctaaaaggagaccagctgcttcaagaagactataaagtcaatacttctgtcccttattctgtcagtaacacagtggtaaagacctgcaatgttagaccaccaaatactgctttagatcatagtagaaaagttgatatgcaaaccactcggaaaattttaatgaagaagagtgtttgccttgacagacattcctctgatgaacaaagtgccccagtgtttgggaaagctaagtacacaactcaaagaatgaagcacagttctcaaaagcataattcatcccatttcaaagaaagtggccataacaagttgagtagccctaagatacatattaaagaaactgaacagtgtgtcagatcttatgaaacagctgaaaatgaagaaagctgtttcccagattcaacaaaaagttctctgagttctctacaatgtcataagaaagaaaacaactctggtacttgtttggatagccctcttcctttacgccagagattaaaactaagattccaaagcacttgaaatttaaaacacttaggtataacttaactattttagtactatcagcaatagcagagacagagggaaggtatctagttcatgtgtggtaaaaattttaatgttctctgtgtcatgaaacacttgccattttaatcaaagttgtaatttttaaaaagtcacctaaaactctggttttaaaagatcctctgtattgaaaacttctgataatgtatgtcattatgtccttactattccttaattgtagttttaaaatattggtatagtacttgacagagtaaatacttcatctgattgttcatttttactttttcttccacaagcctctaaagtatttatattccagcttgttcccaagaggataattctttatacttctcttcattcttttaaggccttgcaaggtcttccgttataactcgctttcctaaaagctattttctccctcagtgtgaagatacctttagtgtgctcttccactttggaaggccatgcaaggtgttccattataactctttttcctaagagttatattctccctcagtttgaagatacctttagtgtgctcttccacttttggtgtcttagtctcttttgaggggcaaaaatagaaaaggagagaagatgtcagtatgtttagtaaaaatcatgctcgtaatggctgaataaactgagcaaagtaactccttatgtatccccagaagttcacaggtatatcgggtggaaaaagatttggaaaatcaaatgtataaccaaaaggattagaaactagcccaggatcacgtagctaactaataatcctgtgggaatcagttttcttgcctgctaatttttttatttttctattttttccttctatagcacttttcccccttttgttttgaatctatgcaatattgactttaataccaccaaatattaagtcatgcattaatttaggtcgcactcaaaaattctagagaggcatccagattgaaaaggaaaatggtgtctgcagatgacaagattgtatgcatcaaaaattctaagaaatccactagaaaactattaaaactgataaagcgagttcatccaggtcgtagaatacaagaccaatgtgcaatgatcattgcattttgtttttgtttgtttgtttttttttgagacagagtctcactcttgtcgagactggggtgtagtggcgccatcttggctcactgcaacctctgcctcccaggttcacgcaattcacatgcctcagccacctgagtagcagggattacaggtgtgtgccaccatgcctggctaatttttagtatttttagtagagatgggattttcccttgttggtcaggctagtcatgaactcctggcctcaagcgatccacccatcttggcctcccagagtgctgggattacaggtgtgaatcaccatactcagcctcaattgtatttctgtacacctctaaataaatggaaatacattccatgttcatgaatcagaagacataagatgaccatactccccaaactgatctacaggttaaatgtaattcccattaattccagctggtttctttgctgattctaaaattcatatggaaatttcaggaacacagaatattaggaagaatcttgaaagagtttgaatgacccacccttcctgattttaagtatacagaactacagtaatgaatgtgttgtactggtataaaggtagacatataggtcaatatagatcaatggcatagaattgagaattcagaaaaaaagccttcacgtttatggtcagttgattttaaaccagagtgccaagacaattcaatgggaaaaggaaacagtctttgaaccaactgtcttctggatctattggatatctatgtaaaaaagagtgacatttgattcctacttcacatgatatttaagaagtaacttaagatggatcaaatacctaaatgtaagctaaagctataaaactcttagaagaaaacatagacgtaaatctttgtgactttggattaggcaaggatttcttaaatatacccaaagcataggcaacaaaagagaatacacaaactggacttcatcaaaactaaaaactgttgtttgaaatgacaccatcaagaaagtgaaaagacagcttacagaatgggagaaaatatttgcaaatcataaatgtgataagggacttgtatcttggtggtatataaagaactcgtaactcaattataaaaagacaactttgaaatgggcaaaatagctcaacaggcttttctgcaaagaagaaatacaaatgaccaagaagcacatttaaaaattttcagtactattactcatcaggaaaatgcaaatcaaaaccacaagacacccaatgtctacaatcaaaaagataataactagtattgatgaggatgtggagaaattgaaattctcataacatgctggtaggaatgtaaaatggggcagccactttggaaaaagtctggtagttcttcaaatggttaaatgtagagttacgatatgatccagcaattcctctcccaggtatatacccaagataaatgaaaacttatatccacataaaaacctgtgcacaaatgtccatagcagcgttattcataatagcctaaaagtggaaacaatcccagttccagaatgaggaaggggagaaactaatgtgtattagctattgtgtgctaagcattcaactagattatttacaaaccttgtatcatctcaactctttaaggactgtattgcaatgttttgaatattcagagagaaaaaagtcgttgctaaaacattttccaaggttctgcttattctgatttgttcagtcgtggctgtgatagttcaggaccatctagaccaggtaaataaaatatctagaggcattcttgagattgtatgagatgaaaataacaaaattagttgggagtggccagtctgagttcattttgctatatagctcaggagtccccaacccctgggctatggacaggtaccagtccatcacctgtcaggaaccggcctgcacagcaggtgttgagcggcatgcaagcgagaattaccgcctgagctctgcctcctgtcagatcagcggtggcattagagtctcataggagcatgaaccctattgtgaactacgcatgcgaggatctagtttgtgcactcctactgagaatctaatgcctgatgatataaggtggaacagcttcatcccacagccatctccccctcatcatccgtggaaaaactgttttccacgaaagtggtcctcggtgccagaaaggttggggactgctgatatacctaatataggcataagtgtaaaattatagttcctcctcctcaaggatttctctgttttcattgtccaggttataccaattctttttaaagcattccatgttcttgttccttgatgtggtcatgttatcacttgtaaat

SEQ ID NO: 136834 - DNA, 498 bp, Homo sapiens
  Payload ID: 6793
  Gene Symbol: GEN1
  Gene Name: GEN1 Holliday junction 5' flap endonuclease
  ENST ID: ENST00000532257
  CDS Start-End: 219-498
gtgctcctgggcctggcggttgagcccggggagctagtctttgcttgggtaaagaaagaggactttcctttttttttttccttttgagaaaattcagaaatttggaggcacagtagttaggattcaggccaaactggtaaatgacgaaggggcttcttccagagccaaggaggaagggttgtccggtgtgtttcacataacagcagataatcaccagaatgggagtgaatgacttgtggcaaattttggagcctgttaagcaacacatccccttgcgtaatcttggtgggaaaaccattgcagttgatctgagtctctgggtgtgtgaggcacagacagtcaaaaaaatgatgggcagcgtcatgaagccccacctcaggaacttattttttcgtatctcatatttaacacaaatggatgtaaaactggtatttgttatggaaggggaaccaccaaagctgaaagctgatgtcataagcaagaggaatcagtctcggt

SEQ ID NO: 136835 - DNA, 593 bp, Homo sapiens
  Payload ID: 6793
  Gene Symbol: GEN1
  Gene Name: GEN1 Holliday junction 5' flap endonuclease
  ENST ID: ENST00000524465
  CDS Start-End: 215-593
gaaacgcttcctggtgctcctgggcctggcggttgagcccggggagctagtctttgcttgggtaaagaaagaggactttcctttttttttttccttttgagaaaattcagaaatttggaggcacagtagttaggattcaggccaaactggtaaatgacgaaggggcttcttccagagccaaggaggaagggttgtccggcagataatcaccagaatgggagtgaatgacttgtggcaaattttggagcctgttaagcaacacatccccttgcgtaatcttggtgggaaaaccattgcagttgatctgagtctctgggtgtgtgaggcacagacagtcaaaaaaatgatgggcagcgtcatgaagccccacctcaggaacttattttttcgtatctcatatttaacacaaatggatgtaaaactggtatttgttatggaaggggaaccaccaaagctgaaagctgatgtcataagcaagaggaatcagtctcggtatgggtcttctggaaaatcgtggtctcagaaaacagggagatcacattttaaatcagtcttaagagagtgcctccatatgctcgaatgcttaggaatcc

SEQ ID NO: 136836 - DNA, 457 bp, Homo sapiens
  Payload ID: 6793
  Gene Symbol: GEN1
  Gene Name: GEN1 Holliday junction 5' flap endonuclease
  ENST ID: ENST00000534451
  CDS Start-End: 1-390
catgaacgtaatggatgcagattatgtaaaagtgataaatattgtgagccacatgactatgaatactgctgtccttgtgagtggcaccgtacagaacatgataggcaactcagtgaagtagagaacaatattaagaagaaagcttgctgttgtgagggattcccattccatgaggttattcaagaattccttttaaacaaggataaattggtgaaggttatcaggtaccaaagacctgatttgttattgtttcagagatttactcttgaaaaaatggagtggcccaatcactatgcatgtgagaaattgctggtacttttgacccattatgacatgatagaaagaaagcttggtagcagaaactctaatcaactacagccaattcggtaatgtaaagaactgtatggtgaaggtggtgtttttacttgagtattttataattaaaatattcctaata

SEQ ID NO: 136837 - DNA, 1677 bp, Homo sapiens
  Payload ID: 6794
  Gene Symbol: GTF2A1
  Gene Name: general transcription factor IIA, 1, 19/37kDa
  ENST ID: ENST00000298173
  CDS Start-End: 435-614
ggcggcggcggcggcggcggtggtggctcgcgcagcttgttggctcgctatataaaggagagaagcgggcggaccggacggctggagctgcagccggtggcggcagcggcggcgcagggagcggtgaccggtggtggtttccctccttggcgcggggtggggagcgggcaacgccccccggacccctgaagggtcgtggctttttttttttttttaaggcgattctcgaggttttcagctgcgggaggagtgcccccctcctcctcctctctccgctctcccctactccttcaggattgattttgtttaaaattttttccccaatcttgcggtgatttgggtcaccctccgggtgttatagtttttttttttttggttttgtttttatcttgttttcttggggttgccccctcttgtttgtgttgtgtgtggaaatggcgaactcggcaaatacaaacaccgtgcctaaattatacagatctgtgattgaagatgtcattaatgatgtgagagacatctttctggatgatggagtggatgaacaagtactgatggaactaaaaactatcctgaataagacagttgctgcccagaagatgttcatactttggtagaaatggtagactttgtgtgttatgggaaaacaaactaatgcagtccagggcagtagatggatttcattcagaagagcagcagcttctactgcaagttcaacagcagcatcaaccccagcagcagcagcatcaccaccatcaccatcatcagcaagctcagcctcagcagacagtacctcagcaagcgcagacccagcaggttcttattcctgcatcacagcaagccacagcaccacaagttattgttccagattctaagttgatacagcatatgaatgcatcaaacatgagtgctgctgctacagctgctaccttagcactccctgcaggtgtgactcctgttcagcagatattaacaaattcaggccagcttcttcaggtggtcagagcagccaatggtgcccaatatatctttcagcctcagcagtcagtggttctacaacaacaggttataccacaaatgcagcctggtggagtacaagctcctgttatacagcaggtgctggctcctcttcctggagggatttcaccacagacaggtgtcatcatccagcctcagcaaatcttatttacaggaaataagactcaagttatacctacgacagtggcagcacctacaccagcccaagcacagataactgcaactggccagcagcaaccgcaggcccagcctgctcaaacacaagctccattggtcttacaagttgatggaactggggatacatcatctgaagaagatgaagatgaagaagaagactatgatgatgatgaggaggaagacaaagagaaagatggagctgaagatgggcaggtggaagaagagcccctcaatagtgaagatgatgtgagtgatgaggaaggacaggaactctttgacacagaaaatgttgttgtatgccaatatgataagatacacagaagtaaaaacaaatggaaatttcatctcaaggatggcattatgaatcttaatggaagagattatatattttccaaagccattggagatgcagaatggtgaagagttgctttttttcttttataaataaaagaaacttaaaaaaaa

SEQ ID NO: 136838 - DNA, 1199 bp, Homo sapiens
  Payload ID: 6794
  Gene Symbol: GTF2A1
  Gene Name: general transcription factor IIA, 1, 19/37kDa
  Uniprot ID: P52655
  ENST ID: ENST00000434192
  CDS Start-End: 172-1185
gctttgcaagttcttcaccgcaaagaactgccgcagacttccgcctgggtgccaaccacgtgatcacgcgagcgttggagaggccctaaattatacagatctgtgattgaagatgtcattaatgatgtgagagacatctttctggatgatggagtggatgaacaagtactgatggaactaaaaactttatgggaaaacaaactaatgcagtccagggcagtagatggatttcattcagaagagcagcagcttctactgcaagttcaacagcagcatcaaccccagcagcagcagcatcaccaccatcaccatcatcagcaagctcagcctcagcagacagtacctcagcaagcgcagacccagcaggttcttattcctgcatcacagcaagccacagcaccacaagttattgttccagattctaagttgatacagcatatgaatgcatcaaacatgagtgctgctgctacagctgctaccttagcactccctgcaggtgtgactcctgttcagcagatattaacaaattcaggccagcttcttcaggtggtcagagcagccaatggtgcccaatatatctttcagcctcagcagtcagtggttctacaacaacaggttataccacaaatgcagcctggtggagtacaagctcctgttatacagcaggtgctggctcctcttcctggagggatttcaccacagacaggtgtcatcatccagcctcagcaaatcttatttacaggaaataagactcaagttatacctacgacagtggcagcacctacaccagcccaagcacagataactgcaactggccagcagcaaccgcaggcccagcctgctcaaacacaagctccattggtcttacaagttgatggaactggggatacatcatctgaagaagatgaagatgaagaagaagactatgatgatgatgaggaggaagacaaagagaaagatggagctgaagatgggcaggtggaagaagagcccctcaatagtgaagatgatgtgagtgatgaggaaggacaggaactctttgacacagaaaatgttgttgtatgccaatatgataagatacacagaagtaaaaacaaatggaaatttcatctcaaggatggcattatgaatcttaatggaagagattatatattttccaaagccattggagatgcagaatggtgaagagttgctttttt

SEQ ID NO: 136839 - DNA, 6306 bp, Homo sapiens
  Payload ID: 6794
  Gene Symbol: GTF2A1
  Gene Name: general transcription factor IIA, 1, 19/37kDa
  Uniprot ID: P52655
  ENST ID: ENST00000553612
  CDS Start-End: 405-1535
cgcagcttgttggctcgctatataaaggagagaagcgggcggaccggacggctggagctgcagccggtggcggcagcggcggcgcagggagcggtgaccggtggtggtttccctccttggcgcggggtggggagcgggcaacgccccccggacccctgaagggtcgtggctttttttttttttttaaggcgattctcgaggttttcagctgcgggaggagtgcccccctcctcctcctctctccgctctcccctactccttcaggattgattttgtttaaaattttttccccaatcttgcggtgatttgggtcaccctccgggtgttatagtttttttttttttggttttgtttttatcttgttttcttggggttgccccctcttgtttgtgttgtgtgtggaaatggcgaactcggcaaatacaaacaccgtgcctaaattatacagatctgtgattgaagatgtcattaatgatgtgagagacatctttctggatgatggagtggatgaacaagtactgatggaactaaaaactttatgggaaaacaaactaatgcagtccagggcagtagatggatttcattcagaagagcagcagcttctactgcaagttcaacagcagcatcaaccccagcagcagcagcatcaccaccatcaccatcatcagcaagctcagcctcagcagacagtacctcagcaagcgcagacccagcaggttcttattcctgcatcacagcaagccacagcaccacaagttattgttccagattctaagttgatacagcatatgaatgcatcaaacatgagtgctgctgctacagctgctaccttagcactccctgcaggtgtgactcctgttcagcagatattaacaaattcaggccagcttcttcaggtggtcagagcagccaatggtgcccaatatatctttcagcctcagcagtcagtggttctacaacaacaggttataccacaaatgcagcctggtggagtacaagctcctgttatacagcaggtgctggctcctcttcctggagggatttcaccacagacaggtgtcatcatccagcctcagcaaatcttatttacaggaaataagactcaagttatacctacgacagtggcagcacctacaccagcccaagcacagataactgcaactggccagcagcaaccgcaggcccagcctgctcaaacacaagctccattggtcttacaagttgatggaactggggatacatcatctgaagaagatgaagatgaagaagaagactatgatgatgatgaggaggaagacaaagagaaagatggagctgaagatgggcaggtggaagaagagcccctcaatagtgaagatgatgtgagtgatgaggaaggacaggaactctttgacacagaaaatgttgttgtatgccaatatgataagatacacagaagtaaaaacaaatggaaatttcatctcaaggatggcattatgaatcttaatggaagagattatatattttccaaagccattggagatgcagaatggtgaagagttgctttttttcttttataaataaaagaaacttaaaaaaaatgtaaagcggacagtttgaaacttggggcatatgccaaccaaaacttcgtttctgcatgtcagaaaagtgcagtagaagcaaagctactggaacaaagatagaccttgacaacatagacactacttactggcaagccatggaactgtagcacctagggtttttgggtgggagggttggggttttgtgtaggaaaaccataattgttgattttaaatacaggtacctgccaccggtaattagcatgtaaagctttgtctatattccttcctccaacttgggttcaatcagaagatacttgttggaatgaactgaagaaacttcccttttgatagattgaactgaaactgcttattgtatgtggttatatttggtaaaagttgcgtgtgagctttttacaaaagggtaagaattgtgttgaattttaattcacttgtataagaaaacaatttaaaactctcataataggtcttaaatatttttacttgctattctccctcagtgatatatacctcttcctttccagctttatgaaacatctatttaagatttaaagttatcagtgatcatagtttggagataaaatttgacccaggaatgaatatttattttaattaggttttcatacttattaaatgtaattaaagacttgggtcttgtctgagttcagtggaattgaaaccacaactttaatttccttacagaaaaacttaatttgtttcttttagtgccacaccttaaaaagaaaccccaaactagctcctcaggaatatagttttattttgcaagcataccatctagctgaaattgtatacacatgaatatatgtagacttttcctgttgggctgaagtgtgtgcttataaatgtgtttagtttttaagctaaacattcagttaacagtctgtgcattgattagcatagggcaggtggtgaggacctggatttttattaaacagtttagtaattataaaagtttcttgtgtttactagtaaagaattttaaaaatctattctaattcaacaagtttttaaaatcaactttgtaatttgaggggaaaatttggggggaagaggtgggtgggccactaagttacctctctttcatttggtggcccttccaggccattgaaaataaagacgttggctccagtttgcacattgggaagaaagcatagaaatttgacttgtatattaaaaataatagaaatgtaatatgtatattaagaatgcataggtctgtattctgtaaggggctctgaagaacaatatggcactgctgtgttcagtgtgaattcactgcctgggagaactgcaggaatgcttgtcttcaccattgtgttcttacaacgaattcaactttccatggtttatcttgacaaaatttacatgtgtttaggttacttgtatattgatatatttttttaatcttcagtttttgtcttccttttgcctttgtgttttcagaagtaacacatgaacactttttaaagtacattacagagaagaaaactgtgagctattatatagtgtttcttttttaacacaaatcttttaactttaaaaaaaggcaaaaattttttttttctacttcccacccagcttaccaccttgatctctttaacttatgttctaaactttggtgttaatggtggtgtctagcatgctagtagttagattttatttagatgccataactggtaatacagcttttattttgactatattaatttagttttttgaggggaagtttgtttattctgtgactctcaaagcacacagaggttttaaaatatatattattaagactgagagaagaggaaatgggagggagtaacatcacagaagtgctgttgttcaactgttcttcaatatagttgctagtaggtttgtatttactcagtaaggaagtcagtgacctgaactacctataaaaattcagcagtgctgcagtgttgcttaagtgaaaccctttggctatctagtagtttttatgctactgaaacttggattactgtatgatattcagcttgtcttgggccctctatgtagacaaacattcatattcatagtagtgttgtatactggcctgtttttataactttatttttcaaatattaacaaccactgctttcagagtggttattttgttatttttgaagcaggaaataaccatttgtatttgcacctgcgtattgcatatgaattatggtatacttggcaaatgcttttcttttacctgtgaaaattctgaaagctggtccaagctacattgcataccaaattgtgctcttatatattatttgcatcgtgtcctttttaatcaaatagcatgttttagttttattatagtagcttttgctgtaagaatgtcacttgcttatcttttattgtacttgaattcttaatcatgcttttaacattgtatttaacaaatcatttcgtattaggttccattaaaatgtcattcctttgaaaaggcaagggatttccactttcagaatttgaaaatgaaagtagcatgtttatctaaaggcagaaaatagttcggacttggtattatgaaaataagtaatggtttctggagaggatttgtttagatttgcacagatggcgatggcaccttttacttaaattaacattaatcaacagtgctaaggaaaatttacacaaaattacaagataaaacatggaaatgtgtgcctttcagtatacaaactcttgcttggtggccatttgggtaatcagaccatttgaatgcctgagagcatgtttaatttctgtggagtgccacatatggctaaaacaactctttaatgtgcaattaatttctagagtaaaatgtctgttatgtgagggggatctttatgttgggcttttctattttttaaatgttcacatttctttctgttaattaaaatgccatcataatgtcacatttacactgttgcctcttttaaaagcaaagccactttcttgttctaagattacatcaagacttgagcagtgtgtagtaattaaaatgtgtgcttaatgagcataatagattctggttttaggaaataacatatagcttttatatgaatattttcttttgctataatgaaagtcacagattttttttttcctggcttttatggaggaatgaaaagagttgtctccctctaagagtatactatttttgattctcatagcaataatgtcaccattcttatcagagggtaaataccccttgtataggaaaacagacataatttcctcttgggagttctctttatgacttagcattttcttctacttgagaaaattcctgtttttccgattatttcatcttgaactttcttttttttaagcttttgtgcaatgtaatagtttgttgatccatctttgtacattttcattttatttcatgtctttctctcacctacctgtcagaatcagctatagcagattttgaattctttagttaaaaaatagttgctttacttgtttcctcatgagtttgttaaatagctttgcattttagtcctctattatgctatgaaaattattacgaagtttatattgttccctttttaagcctgccttactcttgtcttttgtcattgtctatggtttaatgaagaacacaccaaactaacatttttgtttattttgaggaacaaaaaaacttttctcttttaagggaagttactacacattgagttagtaactactctttcagtcaaggttccttaatcagtccagtctacatcaggactatgacttggggggcggggctaatcctttttgctgttctgagctactattgtcaactgctgttgtacatactgttatgtgtaatggcgtaaatatatttattatgtttgtaaaattcattgcagatcaaggttgctcttctgtgatatatgggatattatgttttaaagaccatcttggaatacaattagagaacttagtattttgatgtactaagacctattttaagtttaatattctactttgcaaaaactttaattaaagatgttatttaaaaaaaaatgttgcttgctttgcttactagtatatggcattgttatagataattgaataaaatacaatttagaaaggaaaatgctttacattgttaatgagaattccatttaacaacaacaaaaagatgctaaattctgtaccttaaagataagtagattgagatgtcaatttgaattagtaaactgtgttacaaatgattaatactagcttttaaaaagttgtattttccaggcacacaggaatttaggttgggcgaattcacactaacaaattataactaaaaattggtataattaacattgtttttcaaaataaagattactccttgtgaaatattaataattaacatattgtattaaataagtatttctactccaaagtatagattacttaggataaaaacattgttatttctctgtttagtcaaaccacttcctcttagttcagaggttataaataattgcatattaggagaattggattactgaggtttgtattgcgtattgaatatattttgtgttattttagaagataataattagcaggtattttaattttatagttaattcagctgaatcattaagaagctcgcctttttgtatttttttatcctgttaacagactatctagaaaacatgcaaattttaactattaacataatcataataaagatatcttatttattgccagcaaa

SEQ ID NO: 136840 - DNA, 1639 bp, Homo sapiens
  Payload ID: 6795
  Gene Symbol: GTF2A1L
  Gene Name: general transcription factor IIA, 1-like
  Uniprot ID: Q9UNN4
  ENST ID: ENST00000403751
  CDS Start-End: 38-1474
gcgcaggcgcaaagggccaggtgctggaggtgctgtcatggcctgcctcaacccggtgcctaaactctacagatctgtaattgaagatgtaattgaaggagttcggaatctatttgctgaagaaggtatagaggaacaagttttaaaagacttgaagcagctctgggaaaccaaggttttgcagtctaaagcaacagaagacttcttcagaaatagcatccaatcacctctgtttactcttcagttgccgcacagcttgcaccaaacattgcaatcgtcaacagcatcattagttattcctgctggtagaactcttccaagttttaccacagcagaactgggcacttcaaactccagtgcaaactttacttttcctggttatcccattcatgtaccagcaggtgtgacactacagactgtatctggtcacctttataaagtcaatgtaccaattatggtgacagagacttctggaagagcaggtattcttcagcatccaattcagcaagtatttcaacagcttggccagccttcagtaatacaaactagtgttccacaattgaatccatggtctcttcaagcaactactgaaaaatcacagagaattgaaaccgtgctacagcaacccgcaattctaccttctgggccagtagataggaaacacttagaaaatgccaccagtgatatacttgtatctcctggaaatgagcataaaatcgtgcctgaagctttgttgtgtcatcaggaaagttctcactatatcagtcttccaggtgttgtattttctccacaggtctctcaaacaaattctaatgtggagtcagtgctcagtggttcagctagcatggctcaaaatctgcatgatgagtccctctccacaagccctcatggggctctccaccagcacgtgactgatattcagcttcatattcttaaaaataggatgtatggatgtgattctgtaaagcaaccaagaaatatagaggaacccagcaacatacctgtatcagagaaggattctaattctcaggtggatttaagcattcgggttactgatgatgatattggtgaaataattcaagtagatggaagcggtgatacatcttccaatgaagaaataggaagtacaagagatgcagatgagaatgaatttctagggaatattgacgggggagatctgaaggtacctgaagaagaagctgacagtatttcaaatgaggattcagccacaaacagtagtgataatgaagaccctcaagtaaacattgtagaagaggaccctttaaattctggagatgatgttagtgaacaggatgtgccagacctgtttgacacggataatgttattgtctgtcagtatgataagattcatcgaagcaagaacaaatggaaattctatttgaaagatggtgttatgtgttttggagggagagactatgtatttgcaaaagccattggtgatgcagagtggtaaaccttgtgagctcagtacatctattttgtgaacatcagttggattatattgcatattgtgaattcatttttattttgaatatagtccagcacagagctgttcaaatttttagttcactgtatggaatttaataaaattataattcagatgcagatacaattacac

SEQ ID NO: 136841 - DNA, 1575 bp, Homo sapiens
  Payload ID: 6795
  Gene Symbol: GTF2A1L
  Gene Name: general transcription factor IIA, 1-like
  Uniprot ID: Q9UNN4
  ENST ID: ENST00000430487
  CDS Start-End: 78-1412
aaaacgtgcccagtgtttccctccgagggcactgcgtgccgcgcaggcgcaaagggccaggtgctggaggtgctgtcatggcctgcctcaacccggtgctctgggaaaccaaggttttgcagtctaaagcaacagaagacttcttcagaaatagcatccaatcacctctgtttactcttcagttgccgcacagcttgcaccaaacattgcaatcgtcaacagcatcattagttattcctgctggtagaactcttccaagttttaccacagcagaactgggcacttcaaactccagtgcaaactttacttttcctggttatcccattcatgtaccagcaggtgtgacactacagactgtatctggtcacctttataaagtcaatgtaccaattatggtgacagagacttctggaagagcaggtattcttcagcatccaattcagcaagtatttcaacagcttggccagccttcagtaatacaaactagtgttccacaattgaatccatggtctcttcaagcaactactgaaaaatcacagagaattgaaaccgtgctacagcaacccgcaattctaccttctgggccagtagataggaaacacttagaaaatgccaccagtgatatacttgtatctcctggaaatgagcataaaatcgtgcctgaagctttgttgtgtcatcaggaaagttctcactatatcagtcttccaggtgttgtattttctccacaggtctctcaaacaaattctaatgtggagtcagtgctcagtggttcagctagcatggctcaaaatctgcatgatgagtccctctccacaagccctcatggggctctccaccagcacgtgactgatattcagcttcatattcttaaaaataggatgtatggatgtgattctgtaaagcaaccaagaaatatagaggaacccagcaacatacctgtatcagagaaggattctaattctcaggtggatttaagcattcgggttactgatgatgatattggtgaaataattcaagtagatggaagcggtgatacatcttccaatgaagaaataggaagtacaagagatgcagatgagaatgaatttctagggaatattgacgggggagatctgaaggtacctgaagaagaagctgacagtatttcaaatgaggattcagccacaaacagtagtgataatgaagaccctcaagtaaacattgtagaagaggaccctttaaattctggagatgatgttagtgaacaggatgtgccagacctgtttgacacggataatgttattgtctgtcagtatgataagattcatcgaagcaagaacaaatggaaattctatttgaaagatggtgttatgtgttttggagggagagactatgtatttgcaaaagccattggtgatgcagagtggtaaaccttgtgagctcagtacatctattttgtgaacatcagttggattatattgcatattgtgaattcatttttattttgaatatagtccagcacagagctgttcaaatttttagttcactgtatggaatttaataaaattataattcagatgcagatacaattac

SEQ ID NO: 136842 - DNA, 473 bp, Homo sapiens
  Payload ID: 6795
  Gene Symbol: GTF2A1L
  Gene Name: general transcription factor IIA, 1-like
  ENST ID: ENST00000423675
  CDS Start-End: 28-195
aaagggccaggtgctggaggtgctgtcatggcctgcctcaacccggtgctctgggaaaccaaggttttgcagtctaaagcaacagaagacttcttcagaaatagcatccaatcacctctgtttactcttcagttgccgcacagcttgcaccaaacattgcaatcgtcaacaggttggataccattacatcattagttattcctgctggtagaactcttccaagttttaccacagcagaactgggcacttcaaactccagtgcaaactttacttttcctggttatcccattcatgtaccagcaggtgtgacactacagactgtatctggtcacctttataaagtcaatgtaccaattatggtgacagagacttctggaagagcaggtattcttcagcatccaattcagcaagtatttcaacagcttggccagccttcagtaatacaaactagtgttccacaattgaatccatgg

SEQ ID NO: 136843 - DNA, 1082 bp, Homo sapiens
  Payload ID: 6795
  Gene Symbol: GTF2A1L
  Gene Name: general transcription factor IIA, 1-like
  ENST ID: ENST00000437125
  CDS Start-End: 78-1082
aaaacgtgcccagtgtttccctccgagggcactgcgtgccgcgcaggcgcaaagggccaggtgctggaggtgctgtcatggcctgcctcaacccggtgcctaaactctacagatctgtaattgaagatgtaattgaaggagttcggaatctatttgctgaagaaggtatagaggaacaagttttaaaagacttgaagcagctctgggaaaccaaggttttgcagtctaaagcaacagaagacttcttcagaaatagcatccaatcacctctgtttactcttcagttgccgcacagcttgcaccaaacattgcaatcgtcaacaggttggataccattagtaaatgagtactcatcattagttattcctgctggtagaactcttccaagttttaccacagcagaactgggcacttcaaactccagtgcaaactttacttttcctggttatcccattcatgtaccagcaggtgtgacactacagactgtatctggtcacctttataaagtcaatgtaccaattatggtgacagagacttctggaagagcaggtattcttcagcatccaattcagcaagtatttcaacagcttggccagccttcagtaatacaaactagtgttccacaattgaatccatggtctcttcaagcaactactgaaaaatcacagagaattgaaaccgtgctacagcaacccgcaattctaccttctgggccagtagataggaaacacttagaaaatgccaccagtgatatacttgtatctcctggaaatgagcataaaatcgtgcctgaagctttgttgtgtcatcaggaaagttctcactatatcagtcttccaggtgttgtattttctccacaggtctctcaaacaaattctaatgtggagtcagtgctcagtggttcagctagcatggctcaaaatctgcatgatgagtccctctccacaagccctcatggggctctccaccagcacgtgactgatattcagcttcatattcttaaaaataggatgtatggatgtgattctgtaaagcaaccaagaaatatagaggaacccagcaacatacctgtatcagagaag

SEQ ID NO: 136844 - DNA, 571 bp, Homo sapiens
  Payload ID: 6795
  Gene Symbol: GTF2A1L
  Gene Name: general transcription factor IIA, 1-like
  ENST ID: ENST00000448460
  CDS Start-End: 78-571
aaaacgtgcccagtgtttccctccgagggcactgcgtgccgcgcaggcgcaaagggccaggtgctggaggtgctgtcatggcctgcctcaacccggtgctctgggaaaccaaggttttgcagtctaaagcaacagaagacttcttcagaaatagcatccaatcacctctgtttactcttcagttgccgcacagcttgcaccaaacattgcaatcgtcaacagcatcattagttattcctgctggtagaactcttccaagttttaccacagcagaactgggcacttcaaactccagtgcaaactttacttttcctggttatcccattcatgtaccagcaggtgtgacactacagactgtatctggtcacctttataaagtcaatgtaccaattatggtgacagagacttctggaagagcaggtattcttcagcatccaattcagcaagtatttcaacagcttggccagccttcagtaatacaaactagtgttccacaattgaatccatggtctcttcaagcaactactgaaaaatcacagagaattgaaaccgtgctacagcaacccgcaat

SEQ ID NO: 136845 - DNA, 532 bp, Homo sapiens
  Payload ID: 6795
  Gene Symbol: GTF2A1L
  Gene Name: general transcription factor IIA, 1-like
  ENST ID: ENST00000508440
  CDS Start-End: 1-309
agcggtgatacatcttccaatgaagaaataggaagtacaagagatgcagatgagaatgaatttctagggaatattgacgggggagatctgaaggtacctgaagaagaagctgacagtatttcaaatgaggattcagccacaaacagtagtgataatgaagaccctcaagtaaacattgtagaagaggaccctttaaattctggagatgatgttagtgaacaggatgtgccagacctgtttgacacggataatgttattgtctgtcagtatgataaggcattcccaagaaggacatcgtttaacacctaaactcatttaacaaaggatccgagaagaacagggacagtgtgggaagaaatcttcttgtgatggcatatttgcttcctatatttcttctggaatcatgttcgcttggcttcctgattaaaaacacagttttattgctctctgcactgccaaaccaataaatttacagaagagaaagctgtattccactgtaccccttgcagcatcaataaaactgacagccaaa

SEQ ID NO: 136846 - DNA, 1582 bp, Homo sapiens
  Payload ID: 6796
  Gene Symbol: GTF2A2
  Gene Name: general transcription factor IIA, 2, 12kDa
  Uniprot ID: P52657
  ENST ID: ENST00000396060
  CDS Start-End: 183-512
gagcacttccgggtcgtcagctcagttctgcggtttctgcggcggctggagaggtggtcggagaagtaggaacctcctgccgggctcgtggcggcttctgtccgctccgcggagggaagcgccttccccacaggacatcaatgcaagcttgaataagaaaaacaaattcttcctcctaagccatggcatatcagttatacagaaatactactttgggaaacagtcttcaggagagcctagatgagctcatacagtctcaacagatcaccccccaacttgcccttcaagttctacttcagtttgataaggctataaatgcagcactggctcagagggtcaggaacagagtcaatttcaggggctctctaaatacgtacagattctgcgataatgtgtggacttttgtactgaatgatgttgaattcagagaggtgacagaacttattaaagtggataaagtgaaaattgtagcctgtgatggtaaaaatactggctccaatactacagaatgaatagaaaaaatatgacttttttacaccatcttctgttattcattgcttttgaagagaagcatagaagagactttttatttattctagaattgcagaaatgactacactgtgctataccagagaattccagtagaaagaaacttgtaactctgtagcctcttacatcacctttattatacagcatgaaaaaccataacttttttttaaggacaaaagttgttgccttcctaagaaccttctttaataaactcattttaaaactctgagtaataactggtgaagctattaaggtagcaatatgaagatattagataatgcattttcccatttcctttgcaaggaacatgatgccctttcagaatgcttatttcaataaagtcatgttttgtcagttgtaactttacctgatgaaagcatcagcaggggcaaaaccaaactctggatggaattttttaagaaaatcccttgctttttaaaatacaaaaccaaagttaatcattggtataaaaaaacccaagtacaacttgattaggaaaagttagacaatcatagcaaaaacaaaaccaaaaaactttccttcttagaccaggtaacatgaggaagggggaaaaaaacccaaacaaaatagtccccccacatgacaggtgtcttcagcttgccatattgatccaaagttcatacattttatcatgtacaagatacattagacttacaataaagtctaattattagacttttatgtcagtggattgtgcttgcagaaatacagaagtaacatactgaccctaggtgaggagtttcttacatggttaactggattgacccaattggagtaaaagatttttgctgttacctcgatgctcctgcagttgttacctcagcatgccactgtagtccttgactctcacattaaaactaactttggctaggtactggtggctcacacctgtaagtaatcccagtactttaggaggctgagactggaggattacttgagtccaggagttggagaccagcctggccaatatagactgtccctacaaagaaaataaaattgtttcatcttccaa

SEQ ID NO: 136847 - DNA, 758 bp, Homo sapiens
  Payload ID: 6796
  Gene Symbol: GTF2A2
  Gene Name: general transcription factor IIA, 2, 12kDa
  Uniprot ID: P52657
  ENST ID: ENST00000396061
  CDS Start-End: 406-735
ggagaagtaggaacctcctgccgggctcgtggcggcttctgtccgctccgcggagggaagcgccttccccacaggtagtgggttagggagggcagggttagggagggaagcagggccgcgctccctgccgcccccccggagtcggagtgcgttggtggggtagtctctgagggcccttcgctcctgggatctgcccgttaccgaccgttgccggcaaggccccgcggccggcaccggagaagggcggcgaggcggcggtgatggtcgcgtcccgtggcgggaggctcgtcgttcacggggcgcccacagaacccacctaggggaggtcttcagcccaccaccgtattttcagccaggacatcaatgcaagcttgaataagaaaaacaaattcttcctcctaagccatggcatatcagttatacagaaatactactttgggaaacagtcttcaggagagcctagatgagctcatacagtctcaacagatcaccccccaacttgcccttcaagttctacttcagtttgataaggctataaatgcagcactggctcagagggtcaggaacagagtcaatttcaggggctctctaaatacgtacagattctgcgataatgtgtggacttttgtactgaatgatgttgaattcagagaggtgacagaacttattaaagtggataaagtgaaaattgtagcctgtgatggtaaaaatactggctccaatactacagaatgaatagaaaaaatatgactttttta

SEQ ID NO: 136848 - DNA, 970 bp, Homo sapiens
  Payload ID: 6796
  Gene Symbol: GTF2A2
  Gene Name: general transcription factor IIA, 2, 12kDa
  Uniprot ID: P52657
  ENST ID: ENST00000396063
  CDS Start-End: 378-707
gttctgcggtttctgcggcggctggagaggtggtcggagaagtaggaacctcctgccgggctcgtggcggcttctgtccgctccgcggagggaagcgccttccccacagcttgttgtttgaagtctgccttccaactttcttcgtgcgaactccgacaaaaggaacgaattttaaacttggtggtttaatcaaaaaatgctaggacgagttacttccgaatttgacttctaattttctgaactgcaaaacaagaagggaacaataaatttctgtggctgataccacatctaaaagattagaacacttaacaaggaatttttaaagaatgacatcaatgcaagcttgaataagaaaaacaaattcttcctcctaagccatggcatatcagttatacagaaatactactttgggaaacagtcttcaggagagcctagatgagctcatacagtctcaacagatcaccccccaacttgcccttcaagttctacttcagtttgataaggctataaatgcagcactggctcagagggtcaggaacagagtcaatttcaggggctctctaaatacgtacagattctgcgataatgtgtggacttttgtactgaatgatgttgaattcagagaggtgacagaacttattaaagtggataaagtgaaaattgtagcctgtgatggtaaaaatactggctccaatactacagaatgaatagaaaaaatatgacttttttacaccatcttctgttattcattgcttttgaagagaagcatagaagagactttttatttattctagaattgcagaaatgactacactgtgctataccagagaattccagtagaaagaaacttgtaactctgtagcctcttacatcacctttattatacagcatgaaaaaccataacttttttttaaggacaaaagttgttgccttcctaagaaccttctttaataaactcattttaaaactc

SEQ ID NO: 136849 - DNA, 633 bp, Homo sapiens
  Payload ID: 6796
  Gene Symbol: GTF2A2
  Gene Name: general transcription factor IIA, 2, 12kDa
  ENST ID: ENST00000396064
  CDS Start-End: 165-371
agctcagttctgcggtttctgcggcggctggagaggtggtcggagaagtaggaacctcctgccgggctcgtggcggcttctgtccgctccgcggagggaagcgccttccccacaggacatcaatgcaagcttgaataagaaaaacaaattcttcctcctaagccatggcatatcagttatacagaaatactactttgggaaacagtcttcaggagagcctagatgagctcatacagtctcaacagatcaccccccaacttgcccttcaagttctacttcagtttgataaggctataaatgcagcactggctcagagggtcaggaacagagtcaatttcaggatactggctccaatactacagaatgaatagaaaaaatatgacttttttacaccatcttctgttattcattgcttttgaagagaagcatagaagagactttttatttattctagaattgcagaaatgactacactgtgctataccagagaattccagtagaaagaaacttgtaactctgtagcctcttacatcacctttattatacagcatgaaaaaccataacttttttttaaggacaaaagttgttgccttcctaagaaccttctttaataaactcattttaaaactctga

SEQ ID NO: 136850 - DNA, 408 bp, Homo sapiens
  Payload ID: 6796
  Gene Symbol: GTF2A2
  Gene Name: general transcription factor IIA, 2, 12kDa
  ENST ID: ENST00000484743
  CDS Start-End: 165-389
agctcagttctgcggtttctgcggcggctggagaggtggtcggagaagtaggaacctcctgccgggctcgtggcggcttctgtccgctccgcggagggaagcgccttccccacaggacatcaatgcaagcttgaataagaaaaacaaattcttcctcctaagccatggcatatcagttatacagaaatactactttgggaaacagtcttcaggagagcctagatgagctcatacagggctctctaaatacgtacagattctgcgataatgtgtggacttttgtactgaatgatgttgaattcagagaggtgacagaacttattaaagtggataaagtgaaaattgtagcctgtgatggtaaaaatactggctccaatactacagaatgaatagaaaaaatatgacttt

SEQ ID NO: 136851 - DNA, 382 bp, Homo sapiens
  Payload ID: 6796
  Gene Symbol: GTF2A2
  Gene Name: general transcription factor IIA, 2, 12kDa
  ENST ID: ENST00000559706
  CDS Start-End: 166-382
cagctcagttctgcggtttctgcggcggctggagaggtggtcggagaagtaggaacctcctgccgggctcgtggcggcttctgtccgctccgcggagggaagcgccttccccacaggacatcaatgcaagcttgaataagaaaaacaaattcttcctcctaagccatggcatatcagttatacagaaatactactttgggaaacagtcttcaggagagcctagatgagctcatacagatcaccccccaacttgcccttcaagttctacttcagtttgataaggctataaatgcagcactggctcagagggtcaggaacagagtcaatttcaggggctctctaaatacgtacagattctgcgataatgtgtggacttttgtac

SEQ ID NO: 136852 - DNA, 1351 bp, Homo sapiens
  Payload ID: 6797
  Gene Symbol: GTF2B
  Gene Name: general transcription factor IIB
  Uniprot ID: Q00403
  ENST ID: ENST00000370500
  CDS Start-End: 120-1070
acgactgcgtgggtgagtcgtctataaaaactcatctctgcgcgtctcttcgccacattcgcttcctgctttcggtgtgtctgttgtgtcttgttgcgggcaccgcagtcgccgtgaagatggcgtctaccagccgtttggatgctcttccaagagtcacatgtccaaaccatccagatgcgattttagtggaggactacagagccggtgatatgatctgtcctgaatgtggcttggttgtaggtgaccgggttattgatgtgggatctgaatggcgaactttcagcaatgacaaagcaacaaaagatccatctcgagttggagattctcagaatcctcttctgagtgatggagatttgtctaccatgattggcaagggcacaggagctgcaagttttgacgaatttggcaattctaagtaccagaatcggagaacaatgagcagttctgatcgggcaatgatgaatgcattcaaagaaatcactaccatggcagacagaatcaatctacctcgaaatatagttgatcgaacaaataatttattcaagcaagtatatgaacagaagagcctgaagggaagagctaatgatgctatagcttctgcttgtctctatattgcctgtagacaagaaggggttcctaggacatttaaagaaatatgtgccgtatcacgaatttctaagaaagaaattggtcggtgttttaaacttattttgaaagcgctagaaaccagtgtggatttgattacaactggggacttcatgtccaggttctgttccaacctttgtcttcctaaacaagtacagatggcagctacacatatagcccgtaaagctgtggaactggacttggttcctgggaggagccccatctctgtggcagcggcagctatttacatggcctcacaggcatcagctgaaaagaggacccaaaaagaaattggagatattgctggtgttgctgatgttacaatcagacagtcctatagactgatctatcctcgagccccagatctgtttcctacagacttcaaatttgacaccccagtggacaaactaccacagctataaattgaggcagctaacgtcaaattcttgaatacaaaactttgcctgttgtacatagcctatacaaaatgctgggttgagcctttcatgaggaaaaacaaaagacatggtacgcattccagggctgaatactattgcttggcattctgtatgtatatactagtgaaacatatttaatgatttaaatttcttatcaaatttcttttgtagcaatctaggaaactgtattttggaagatatttgaaattatgtaattcttgaataaaacatttttcaaaactcaa

SEQ ID NO: 136853 - DNA, 783 bp, Homo sapiens
  Payload ID: 6797
  Gene Symbol: GTF2B
  Gene Name: general transcription factor IIB
  ENST ID: ENST00000418217
  CDS Start-End: 91-783
actcatctctgcgcgtctcttcgccacattcgcttcctgctttcggtgtgtctgttgtgtcttgttgcgggcaccgcagtcgccgtgaagatggcgtctaccagccgtttggatgctcttccaagagtcacatgtccaaaccatccagatgcgattttagtggaggactacagagccggtgatatgatctgtcctgaatgtgaccgggttattgatgtgggatctgaatggcgaactttcagcaatgacaaagcaacaaaagatccatctcgagttggagattctcagaatcctcttctgagtgatggagatttgtctaccatgattggcaagggcacaggagctgcaagttttgacgaatttggcaattctaagtaccagaatcggagaacaatgagcagttctgatcgggcaatgatgaatgcattcaaagaaatcactaccatggcagacagaatcaatctacctcgaaatatagttgatcgaacaaataatttattcaagcaagtatatgaacagaagagcctgaagggaagagctaatgatgctatagcttctgcttgtctctatattgcctgtagacaagaaggggttcctaggacatttaaagaaatatgtgccgtatcacgaatttctaagaaagaaattggtcggtgttttaaacttattttgaaagcgctagaaaccagtgtggatttgattacaactggggacttcatgtccaggttctgttccaacctttgtcttcctaaacaagtacagatggcagctacacatatagcc

SEQ ID NO: 136854 - DNA, 770 bp, Homo sapiens
  Payload ID: 6797
  Gene Symbol: GTF2B
  Gene Name: general transcription factor IIB
  ENST ID: ENST00000448623
  CDS Start-End: 1-675
gcgtctaccagccgtttggatgctcttccaagagtcacatgtccaaaccatccagatgcgattttagtggaggactacagagccggtgatatgatctgtcctgaatgtggcttggttgtaggtgaccgggttattgatgtgggatctgaatggcgaactttcagcaatgacaaagcaacaaaagatccatctcgagttggagattctcagaatcctcttctgagtgatggagatttgtctaccatgattggcaagggcacaggagctgcaagttttgacgaatttggcaattctaagtaccagaatcggagaacaatgagcagttctgatcgggcaatgatgaatgcattcaaagaaatcactaccatggcagacagaatcaatctacctcgaaatatagttgatcgaacaaataatttattcaagcaagtatatgaacagaagagcctgaagggaagagctaatgatgctatagcttctgcttgtctctatattgcctgtagacaagaaggggttcctaggacatttaaagaaatatgtgccgtatcacgaatttctaagaaagaaattggtcggtgttttaaacttattttgaaagcgctagaaaccagtgtggatttgattacaactggggacttcatgtccagaaattggagatattgctggtgttgctgatgttacaatcagacagtcctatagactgatctatcctcgagccccagatctgtttcctacagacttcaaatttgacaccccagtggacaaactac

SEQ ID NO: 136855 - DNA, 3012 bp, Homo sapiens
  Payload ID: 6798
  Gene Symbol: GTF2E1
  Gene Name: general transcription factor IIE, polypeptide 1, alpha 56kDa
  Uniprot ID: P29083
  ENST ID: ENST00000283875
  CDS Start-End: 94-1413
atttaagccggtagttgaagcgctgggggcagctgtagtgggagtgttccaggattcgccttgtatatttaaagttggagttcgttgctaaagatggcagacccagatgtcctcactgaagttccagcagcattgaagcggttagccaagtatgtgatccggggattttatggcattgagcatgccttggccttggacatcttgatcaggaactcctgtgtgaaagaggaggatatgctggagctgctcaagtttgatcggaagcaacttcgatcagttttgaataatttaaagggagacaagtttatcaaatgcagaatgagggtagagactgctgcagacgggaaaaccactcgccataactactacttcatcaattatcgtactcttgttaatgtggtaaaatataaactggaccacatgagaagaagaattgagaccgatgagagagattcgaccaaccgggcttccttcaaatgtcctgtctgtagtagtactttcacagacttagaagctaatcagctctttgatcctatgacaggaactttccgctgtactttttgccatacagaggtagaagaggatgaatcagcaatgcccaaaaaagatgcacgcacacttttggcaaggtttaatgaacaaattgagcccatttatgcattgcttcgggagacagaggatgtgaacttggcctatgaaatacttgagccagaacccacagaaatcccagccctgaaacagagcaaggaccatgcagcaactactgctggagctgctagcctagcaggtgggcaccaccgggaagcatgggccaccaaaggtccttcctatgaagacttatacactcagaatgttgtcattaacatggatgaccaagaagatcttcatcgagcctcactggaagggaaatctgccaaagagaggcctatttggttgagagaaagcactgtccaaggggcatatggttctgaagatatgaaagaagggggcatagatatggacgcatttcaggagcgtgaggaaggccatgctgggcctgatgacaacgaagaggtcatgcgagcactgctcattcacgagaaaaagacttcctctgccatggctggttcagtgggggcagctgctccagtgaccgctgccaatggcagtgactcagaaagcgagaccagtgagtcagatgatgattctccaccccgtccggcagctgtggctgtgcataaacgagaagaggatgaagaggaagatgacgagtttgaagaagtagcagatgaccccattgtcatggtggctggccgtccgttctcctacagtgaagtgagccaacggccagagctagtggcccagatgacaccagaagaaaaggaagcatatatagcaatgggacaacgcatgtttgaggacctctttgagtgagctttccctaattctttctcctttctctaatgctcagttcaaaaaggaatgtctcatctttgaagaaaagtatttaagtggctttctgcccctcttgatgtaagcaactgtccatccttgtgcaaagattgatggtagagagtttgacttttatgccagaaactttcccagcaaggtagggtgctgagaatcctacccttccttgctgtcactacagtattaatattttactgtattttcttttcttttttttttttttttggagatgaagtctcactcttgtaccccaggctggagtgcaatggcgtgatctcggctcactgcaacctctgcctcctgggttcaagcgattctcctgcctcagcctcccgagtagctgggattacaggtgcctgccaccatgcctggctaatttttgtatttttagtagaggcagggtttcaccatgttagccaggatgatctcgatctcctgacctcatgatccacccgcctcggcctcccaaagtgctgtattttcttatctgatttttttcttgccttattaagacataattttctcccttctgaaatgagtgagggaagttcataaggtaaatccttcccatccatctgtttactacaataggttacaataattcactgatcacatccattttatctgttctagccaggcattccaaacaatttcttatactgctgcccaccaaagcagcttgccaacagtcaaatcactgattgggggaaaaaatcctgaaattttgcttagaatttgagcatttcctcaaaattgagatggatcaatatgtaaggggaggtgggagcgtgtgtggaagggggagagatatacttgagtcttatgattaatgtctaaaccagaatttgtgtctttagaactgaccagactggtagattttattgtattgcttaatgtcttttggtttggatttaggatgatagaaaacagaagtataattggtaaacccttaggaagaaattagaaaaacatggacgtaagacaagaagtctctgtgaagggttgaagagtgacaagcattggtaacagtgccttagaactgtgtcagttagtctgatttggaaatcctttatgtaaagctgagactggtcctggttttgttccctttgggtacagacctcttgtcagtgctataaattgtttaatgaggccattccagcagaaatcaacagaataattgattactcttctctctctctgtcactctccctctttctaaacatcattgaaggctgtctctcttttaatttttgtcagacacagtattttagggtgcatccagtataccattgagcattgtaacctcaggaaacagtttattttgggttctgatatgtagcatggtattttccctaaggcagaactttaaaaataaagaactttcacacaagggtctgtaacaattgtatatcttacaatatttttccttgcattgtaatttttaagtatttatcattttatagtacacatgtaaagaatatatgagccttgtatggagtgatgtttcatttacctgggttgtgttaatgactgaatgttgacaataaatctgttttatactga

SEQ ID NO: 136856 - DNA, 551 bp, Homo sapiens
  Payload ID: 6798
  Gene Symbol: GTF2E1
  Gene Name: general transcription factor IIE, polypeptide 1, alpha 56kDa
  ENST ID: ENST00000492959
  CDS Start-End: 186-551
agttgaagcgctgggggcagctgtagtgggagtgttccaggattcgccttgggatccagtatttaagaatattttgggctgctctccctccctcattttctacctttttaaggactggatggtctttccttgattatcagattcaatttttcaagtatatttaaagttggagttcgttgctaaagatggcagacccagatgtcctcactgaagttccagcagcattgaagcggttagccaagtatgtgatccggggattttatggcattgagcatgccttggccttggacatcttgatcaggaactcctgtgtgaaagaggaggatatgctggagctgctcaagtttgatcggaagcaacttcgatcagttttgaataatttaaagggagacaagtttatcaaatgcagaatgagggtagagactgctgcagacgggaaaaccactcgccataactactacttcatcaattatcgtactcttgttaatgtggtaaaatataaactggaccacatgagaagaagaattgagaccgatgagagagattcgacc

SEQ ID NO: 136857 - DNA, 543 bp, Homo sapiens
  Payload ID: 6798
  Gene Symbol: GTF2E1
  Gene Name: general transcription factor IIE, polypeptide 1, alpha 56kDa
  ENST ID: ENST00000484715
  CDS Start-End: 396-543
gaactcattggctggtctggtaaaaggtagcggggtgcttccccagctggtcgcaggaatagtgcgttttctttgtcgcgcaaggggcgtggttcatttaagccggtagttgaagcgctgggggcagctgtagtgggagtgttccaggattcgccttgcccaggtttttaaagtaaactatatgccaatgtgggctttgagaagacagctttctgggtcatggtacggaaatgagatacacttagtttctgctttgtcaagggatccagtatttaagaatattttgggctgctctccctccctcattttctacctttttaaggactggatggtctttccttgattatcagattcaatttttcaagtatatttaaagttggagttcgttgctaaagatggcagacccagatgtcctcactgaagttccagcagcattgaagcggttagccaagtatgtgatccggggattttatggcattgagcatgccttggccttggacatcttgatcaggaactcctgtgtgaaagaggaggatatgctgg

SEQ ID NO: 136858 - DNA, 503 bp, Homo sapiens
  Payload ID: 6798
  Gene Symbol: GTF2E1
  Gene Name: general transcription factor IIE, polypeptide 1, alpha 56kDa
  ENST ID: ENST00000469772
  CDS Start-End: 117-503
atttaagccggtagttgaagcgctgggggcagctgtagtgggagtgttccaggattcgccttggaactttccgctgtactttttgccatacagaggtagaagaggatgaatcagcaatgcccaaaaaagatgcacgcacacttttggcaaggtttaatgaacaaattgagcccatttatgcattgcttcgggagacagaggatgtgaacttggcctatgaaatacttgagccagaacccacagaaatcccagccctgaaacagagcaaggaccatgcagcaactactgctggagctgctagcctagcaggtgggcaccaccgggaagcatgggccaccaaaggtccttcctatgaagacttatacactcagaatgttgtcattaacatggatgaccaagaagatcttcatcgagcctcactggaagggaaatctgccaaagagaggcctatttggttgagagaaagcactgtccaaggggcatatggttctgaagatatgaaa

SEQ ID NO: 136859 - DNA, 1762 bp, Homo sapiens
  Payload ID: 6799
  Gene Symbol: GTF2E2
  Gene Name: general transcription factor IIE, polypeptide 2, beta 34kDa
  Uniprot ID: P29084
  ENST ID: ENST00000355904
  CDS Start-End: 284-1159
gcggtggctgccgggactgagctcctagcacccgatcgggaagtggcgggcggagtcccgggtccagtcgccgcctcagctaccgccgctgccgccgccgccgccgccaccgccagtggtgagaccccgacctggcgggtcagcgctgggcgtgcgtgcgggcaggcgggggcgctgacgagaagcaggaagagggtgcagtgccggcgtgggcggccggccgaggcggaggcgcaggaagggggcggcgagtcgtgcgaggctgcccttctcactcagcattatggatccaagcctgttgagagaaagggagctgttcaaaaaacgagctctttctactcctgtagtagaaaaacgttcagcatcttctgagtcatcatcatcatcgtcaaagaagaagaaaacaaaggtagaacatggaggatcgtcaggctctaaacaaaattctgatcatagcaatggatcatttaacttgaaagctttgtcaggaagctctggatataagtttggtgttcttgctaagattgtgaattacatgaagacacggcatcagcgaggagatacgcatcctctaaccttagatgaaattttggatgaaacacaacatttagatattggactcaagcagaaacaatggctaatgactgaggctttagtcaacaatcccaaaattgaagtaatagatgggaagtatgctttcaagcccaagtacaacgtgagagataagaaggccctacttaggctcttagatcagcatgaccagcgaggattaggaggaattcttttagaagacatagaagaagcactgcccaattcccagaaagctgtcaaggctttgggggaccagatactatttgtaaatcgtcccgataagaagaaaatacttttcttcaatgataagagctgtcagttttctgtggatgaagaatttcagaaactgtggaggagtgtcactgtagattccatggacgaggagaaaattgaagaatatctgaagcgacagggtatttcttccatgcaggaatctggaccaaagaaagtggcccctattcagagaaggaaaaagcctgcttcacagaaaaagcgacgctttaagactcataacgaacacttggctggagtgctgaaggattactctgacattacttccagcaaatagggaacagttttgccctggaacagagttacagatacacaatcaagagtgttcttgctgatgctcggggtctgaagactgtcttcctatctgcttcttgcggctgaggagaggagcagttcagtttacaaaacaagtgcaaattaccaaactcaaagcttatttgagtagaatgggctcatgggcaatgtgatgttccctgttaaccttctgttactccctgggagaaaggcgctgagcgtggcatgcaggtgtctttgctgtgtttttctccacttctaaatggttcctggttcctttcttcctcgtttgttactttagagcaagtttgcccatagtcttgaatgcaatatttgtttattccaaaagaacatatttataataaaatcactgtagaaggatttttaagatgttagtgaattctgtttcttttcattctcggaaatggcaggaagcagctccagtctctgatttccatgggtcacgtgctggggatgtgatgaagcctgcagtctgcactgtgttgctgagcacatggatttcaccactggaacacaggtgtgctgcttgttagcaagcagagcaataaagatgtgctggatgtca

SEQ ID NO: 136860 - DNA, 768 bp, Homo sapiens
  Payload ID: 6799
  Gene Symbol: GTF2E2
  Gene Name: general transcription factor IIE, polypeptide 2, beta 34kDa
  ENST ID: ENST00000523499
  CDS Start-End: 65-286
gccgaggcggaggcgcaggaagggggcggcgagtcgtgcgaggctgcccttctcactcagcattatggatccaagcctgttgagagaaagggagctgttcaaaaaacgagctctttctactcctgtagtagaaaaacgttcagcatcttctgagtcatcatcatcatcgtcaaagaagaagaaaacaaaggtagaacatggaggatcgtcaggctctaaacaaaattctgtcttcccagttgtttatacagttgcgtgggatgtgctgaacaccttgggagaatgaactacatcatagcaatggatcatttaacttgaaagctttgtcaggaagctctggatataagtttggtgttcttgctaagattgtgaattacatgaagacacggcatcagcgaggagatacgcatcctctaaccttagatgaaattttggatgaaacacaacatttagatattggactcaagcagaaacaatggctaatgactgaggctttagtcaacaatcccaaaattgaagtaatagatgggaagtatgctttcaagcccaagtacaacgtgagagataagaaggccctacttaggctcttagatcagcatgaccagcgaggattaggaggaattcttttagaagacatagaagaagcactgcccaattcccagaaagctgtcaaggctttgggggaccagatactatttgtaaatcgtcccgataagaagaaaatacttttcttcaatgataagagctgtcagttttctgtggatgaag

SEQ ID NO: 136861 - DNA, 426 bp, Homo sapiens
  Payload ID: 6799
  Gene Symbol: GTF2E2
  Gene Name: general transcription factor IIE, polypeptide 2, beta 34kDa
  ENST ID: ENST00000518445
  CDS Start-End: 49-426
tgctcatacgcggactgctttctaggctaccttttggagatttgcattatggatccaagcctgttgagagaaagggagctgttcaaaaaacgagctctttctactcctgtagtagaaaaacgttcagcatcttctgagtcatcatcatcatcgtcaaagaagaagaaaacaaaggtagaacatggaggatcgtcaggctctaaacaaaattctgatcatagcaatggatcatttaacttgaaagctttgtcaggaagctctggatataagtttggtgttcttgctaagattgtgaattacatgaagacacggcatcagcgaggagatacgcatcctctaaccttagatgaaattttggatgaaacacaacatttagatattggactcaagcagaaacaatggctaatgactgaggctttagtcaac

SEQ ID NO: 136862 - DNA, 737 bp, Homo sapiens
  Payload ID: 6799
  Gene Symbol: GTF2E2
  Gene Name: general transcription factor IIE, polypeptide 2, beta 34kDa
  ENST ID: ENST00000518599
  CDS Start-End: 142-737
gtcaggaggtttggttcctggccctggctcttccatctgtgcgaccttaaccagacagcttcacttcagatttcacgtattaaaataggaataacactaatacctgtttgctcctagagttgcgagggtcaaatactcattatggatccaagcctgttgagagaaagggagctgttcaaaaaacgagctctttctactcctgtagtagaaaaacgttcagcatcttctgagtcatcatcatcatcgtcaaagaagaagaaaacaaaggtagaacatggaggatcgtcaggctctaaacaaaattctgatcatagcaatggatcatttaacttgaaagctttgtcaggaagctctggatataagtttggtgttcttgctaagattgtgaattacatgaagacacggcatcagcgaggagatacgcatcctctaaccttagatgaaattttggatgaaacacaacatttagatattggactcaagcagaaacaatggctaatgactgaggctttagtcaacaatcccaaaattgaagtaatagatgggaagtatgctttcaagcccaagtacaacgtgagagataagaaggccctacttaggctcttagatcagcatgaccagcgaggattaggaggaattcttttagaagacatagaagaagcactgcccaattcccagaaagctgtcaaggctttgggggaccagatactatttgtaaatcgtcccgataagaagaa

SEQ ID NO: 136863 - DNA, 2731 bp, Homo sapiens
  Payload ID: 6800
  Gene Symbol: GTF2F1
  Gene Name: general transcription factor IIF, polypeptide 1, 74kDa
  Uniprot ID: P35269
  ENST ID: ENST00000394456
  CDS Start-End: 466-2019
gggtgctgacgtcacgagagagggcggtcccccatttgatgaagttaaccgcgttatatacaagagcgccagcgacagaggcccgttagtttatctcagactcggcctaggtttgctgagtctaaaaagggaccgcggtggaccttttgaggtgaccatagccgccgaggagcataagtgactgcgcactgaggtggccacagtcgctaagaaggttgccatcgcgacgcggctgctcgagggtttcgcttccgggttaggcggccgcagaagcgtagaccgagtagcttgagcgcctcttccggttaccttttcccagcgccagaggcgcctagggttggggtcctcgctcaggcacagagacccgacaccgagcggcggcttccccgggatcgagggacgcgcacgccagaggagacgaaaggaacccgggtcggaccagatcggaaccactgaccattgcccatggcggccctaggccctagcagccagaatgtcactgaatacgtcgttcgagttcctaagaatacaaccaaaaaatataacatcatggcttttaatgcagccgacaaagtcaactttgctacgtggaatcaggctcggctggagcgggacttgagcaacaagaaaatctaccaagaggaggagatgcccgaatcgggcgcgggcagtgagttcaaccgcaagcttcgggaggaggctcggaggaagaagtacggcatcgtcctcaaggagttccggcccgaggaccagccctggctgctccgggtcaacggcaaatcaggcaggaagttcaagggcatcaagaagggaggcgtaacagagaacacgtcctactacatcttcacccagtgccccgacggggccttcgaggccttccccgtgcacaactggtacaatttcacaccgctggcccggcatcgcacgctcactgccgaggaggccgaggaggagtgggagaggaggaacaaggtgctgaaccacttcagcatcatgcagcagcggcggctcaaggatcaggaccaggacgaggatgaggaggagaaggagaaacgtggccgcaggaaggcgagcgagctgcgcatccacgacctggaggacgacctggagatgtcgtccgatgccagtgatgccagtggtgaggaggggggcagagtccccaaggccaagaagaaggcgccgctggccaagggcggcaggaaaaagaagaagaagaagggttcagacgacgaggccttcgaggacagcgatgatggggacttcgagggccaagaggtggactacatgtcagacggctccagtagctcccaagaagagcctgagagcaaggccaaggcgccgcagcaggaggaggggcccaagggtgtcgatgagcagagcgacagtagtgaggagagtgaggaggagaagccgcctgaggaggacaaggaggaggaggaggagaagaaggcacccaccccgcaggagaagaagcgcaggaaagacagcagcgaggagtcggacagctcagaggagagcgacattgacagcgaggcctcctcagccctcttcatggcgaagaagaagacgccacccaagagagagcggaagccgtcgggagggagctcaaggggcaacagccgcccaggcacgcccagcgcagagggtggcagcacctcctccaccctgcgggcggctgccagcaaactcgagcaagggaagcgggtgagcgagatgcctgcagccaagcggttgcggctggacacgggaccccagagcctgtctgggaagtcgacaccccagccaccatcaggcaagacaacacccaacagcggcgacgtgcaggtgactgaggatgccgtgcgccgctacctgacacggaagcccatgaccactaaggacctgctgaaaaagttccagaccaagaagacagggctgagcagcgagcagacagtgaacgtgttggcccagatcctcaagcgactcaaccccgagcgcaagatgatcaacgacaaaatgcacttctccctcaaggagtgaggcttggtccaatacatggctctgccccccagaacttaaggctctcactgccccttcgccatcctagagtgaggctctgtccaatacatggctctgccctccagaacttcaggctctcagtgacccttcgacatcctgcttgctccctgactcccagggccccgtagttagcaattctggaaaagttaagccatctcctcctctggcccttccttctggaatcttcagatgcctgttaggccttcttattgtcctcctcctcctggctcggcctccctcacactgaccaagggcctgtgctgcccactgggtaacttctacagttctcccttccacttccctaagtctctcttcagctgtgacttatccaccacatagcccagtaagtcttcagttttggctgggcatgatggtgagcgcctgcagtcccagctacttgggaggctaagcccagttcaaggctgcagtgaactatgatggtgccactgcattccagcctgggtgacagaatgaaatcctggcacaaaaaaaaaaaaaaagtagccaggcatggtggcgggagcctgttgtcccagctgttccgtaggctgaggcacgagattcacttgaacctgggaggtggaggttgctgtgagctgacaccacgccactgcactccagcctgggtgacagtgagactctgtctcaataaataaaaaataataataaattg

SEQ ID NO: 136864 - DNA, 1705 bp, Homo sapiens
  Payload ID: 6800
  Gene Symbol: GTF2F1
  Gene Name: general transcription factor IIF, polypeptide 1, 74kDa
  ENST ID: ENST00000593678
  CDS Start-End: 1-1302
atcatggcttttaatgcagccgacaaagtcaactttgctacgtggaatcaggctcggctggagcgggacttgagcaacaagaaaatctaccaagaggaggagatgcccgaatcgggcgcgggcagtgagttcaaccgcaagcttcgggaggaggctcggaggaagaagtacggcatcgtcctcaaggagttccggcccgaggaccagccctggctgctccgggtcaacggcaaatcaggcaggaagaggaacaaggtgctgaaccacttcagcatcatgcagcagcggcggctcaaggatcaggaccaggacgaggatgaggaggagaaggagaaacgtggccgcaggaaggcgagcgagctgcgcatccacgacctggaggacgacctggagatgtcgtccgatgccagtgatgccagtggtgaggaggggggcagagtccccaaggccaagaagaaggcgccgctggccaagggcggcaggaaaaagaagaagaagaagggttcagacgacgaggccttcgaggacagcgatgatggggacttcgagggccaagaggtggactacatgtcagacggctccagtagctcccaagaagagcctgagagcaaggccaaggcgccgcagcaggaggaggggcccaagggtgtcgatgagcagagcgacagtagtgaggagagtgaggaggagaagccgcctgaggaggacaaggaggaggaggaggagaagaaggcacccaccccgcaggagaagaagcgcaggaaagacagcagcgaggagtcggacagctcagaggagagcgacattgacagcgaggcctcctcagccctcttcatggcgaagaagaagacgccacccaagagagagcggaagccgtcgggagggagctcaaggggcaacagccgcccaggcacgcccagcgcagagggtggcagcacctcctccaccctgcgggcggctgccagcaaactcgagcaagggaagcgggtgagcgagatgcctgcagccaagcggttgcggctggacacgggaccccagagcctgtctgggaagtcgacaccccagccaccatcaggcaagacaacacccaacagcggcgacgtgcaggtgactgaggatgccgtgcgccgctacctgacacggaagcccatgaccactaaggacctgctgaaaaagttccagaccaagaagacagggctgagcagcgagcagacagtgaacgtgttggcccagatcctcaagcgactcaaccccgagcgcaagatgatcaacgacaaaatgcacttctccctcaaggagtgaggcttggtccaatacatggctctgccccccagaacttaaggctctcactgccccttcgccatcctagagtgaggctctgtccaatacatggctctgccctccagaacttcaggctctcagtgacccttcgacatcctgcttgctccctgactcccagggccccgtagttagcaattctggaaaagttaagccatctcctcctctggcccttccttctggaatcttcagatgcctgttaggccttcttattgtcctcctcctcctggctcggcctccctcacactgaccaagggcctgtgctgcccactgggtaacttctacagttctcccttccacttccctaagtctctcttcagctgtgacttatccaccacatagcccagtaagtcttcagttttggctg

SEQ ID NO: 136865 - DNA, 1382 bp, Homo sapiens
  Payload ID: 6800
  Gene Symbol: GTF2F1
  Gene Name: general transcription factor IIF, polypeptide 1, 74kDa
  ENST ID: ENST00000595047
  CDS Start-End: 239-1382
gttaggcggccgcagaagcgtagaccgagtagcttgagcgcctcttccggttaccttttcccagcgccagaggcgcctagggttggggtcctcgctcaggcacagagacccgacaccgagcggcggcttccccgggatcgagggacgcgcacgccagaggagacgaaaggaacccgggtcggaccagatcggaaccactgaccattgcccatggcggccctaggccctagcagccagaatgtcactgaatacgtcgttcgagttcctaagaaatactccctgcctgtcctccctcctccccaaggctgagttcacaataatctccacatcttgggttcccccaaatcttcgtccctccatctgctcttcttctgcctggggtcaggagaggatgggtctagcttctctggcagactgggaatccttggagtcttccgtatccagtgttgccaggcaaaacaggctgaatgaagctgggaatacaaccaaaaaatataacatcatggcttttaatgcagccgacaaagtcaactttgctacgtggaatcaggctcggctggagcgggacttgagcaacaagaaaatctaccaagaggaggagatgcccgaatcgggcgcgggcagtgagttcaaccgcaagcttcgggaggaggctcggaggaagaagtacggcatcgtcctcaaggagttccggcccgaggaccagccctggctgctccgggtcaacggcaaatcaggcaggaagttcaagggcatcaagaagggaggcgtaacagagaacacgtcctactacatcttcacccagtgccccgacggggccttcgaggccttccccgtgcacaactggtacaatttcacaccgctggcccggcatcgcacgctcactgccgaggaggccgaggaggagtgggagaggaggaacaaggtgctgaaccacttcagcatcatgcagcagcggcggctcaaggatcaggaccaggacgaggatgaggaggagaaggagaaacgtggccgcaggaaggcgagcgagctgcgcatccacgacctggaggacgacctggagatgtcgtccgatgccagtgatgccagtggtgaggaggggggcagagtccccaaggccaagaagaaggcgccgctggccaagggcggcaggaaaaagaagaagaagaagggttcagacgacgaggccttcgaggacagcgatgatggggacttcgagggccaagaggtggactacatgtcagacggctccagtagctcccaagaagagcctgagagcaaggccaaggcgccgcagcaggaggaggggcccaagggtgtcgatgagcagagcgacagtagtgaggagagtgaggaggagaagccgcctgaggaggacaagg

SEQ ID NO: 136866 - DNA, 568 bp, Homo sapiens
  Payload ID: 6800
  Gene Symbol: GTF2F1
  Gene Name: general transcription factor IIF, polypeptide 1, 74kDa
  ENST ID: ENST00000598607
  CDS Start-End: 188-568
tactgccatgattcgggggatgtgtgcatgcctggaacgggcgccagaggcgcctagggttggggtcctcgctcaggcacagagacccgacaccgagcggcggcttccccgggatcgagggacgcgcacgccagaggagacgaaaggaacccgggtcggaccagatcggaaccactgaccattgcccatggcggccctaggccctagcagccagaatgtcactgaatacgtcgttcgagttcctaagaatacaaccaaaaaatataacatcatggcttttaatgcagccgacaaagtcaactttgctacgtggaatcaggctcggctggagcgggacttgagcaacaagaaaatctaccaagaggaggagatgcccgaatcgggcgcgggcagtgagttcaaccgcaagcttcgggaggaggctcggaggaagaagtacggcatcgtcctcaaggagttccggcccgaggaccagccctggctgctccgggtcaacggcaaatcaggcaggaagttcaagggcatcaagaagggaggcgtaacagagaacacgtcctactacatcttc

SEQ ID NO: 136867 - DNA, 2239 bp, Homo sapiens
  Payload ID: 6801
  Gene Symbol: GTF2F2
  Gene Name: general transcription factor IIF, polypeptide 2, 30kDa
  Uniprot ID: P13984
  ENST ID: ENST00000340473
  CDS Start-End: 142-891
ttcccagtgttctggcaggtaaggaacgccggctcttcgcctctcagcgcggcttgtcctttgttccggacgcccgctcctcagccctgcggctcctggggtcgctgctgcatcccgcacgcctccaccggctgcagacccatggccgagcgcggggaactcgacttgaccggcgccaaacagaacacaggagtgtggctagtcaaggttcctaaatatttgtcacagcaatgggctaaagcctctggaagaggtgaagttgggaaactgcggattgccaagactcaaggaaggactgaggtgtcatttactttgaatgaggatcttgcaaatattcatgatattggtggaaaaccagcttcagtcagtgctcctagagaacatccatttgtcttgcaaagtgttggaggacagacattaacagtatttactgagagctcatcagataagctgtcattggaaggaatagtggtacaaagagctgaatgccgaccagctgccagtgaaaactacatgcgattaaaaagattgcaaatagaagagtcttccaaaccagtgaggctatcacaacagctggacaaagttgtaacaaccaattacaaacctgttgctaatcatcaatacaatatcgaatatgaaaggaaaaagaaagaagacggaaagcgagctcgagctgataaacaacatgttttagacatgctattttcagcctttgagaaacatcaatactataatcttaaggacttggtggacatcacaaagcaacctgtggtgtacctgaaggaaatcttaaaagaaattggtgttcagaatgtaaaagggatccacaaaaacacatgggagctgaagccagagtacagacactatcaaggagaagaaaagagtgactaagaagactcctagccagcatgctagtgaaacgactagcagcgatgctatgcaaaaggcgctgatactggaaggcttgaacaccgtatgttaataggggttaagtgacagtactttgatttctctcggtaaattttttaaacctgtaattcttgtaaagtttcttaactgtttttttgaggagaaagaacagatttatttatagacttaacttgtattaaaccagattattcacagtaggaataggggttggaggattaagagggtttttcttaaatattagcttttaatgtgtacaattaggaaatttttttaagtgaggactctctacccttgccgtatctaaggagctgaggtaatacagatccaaggagaattgtatagcaagaaaaaaacagtcaactacagaaactcttaaaaggaataaaaacccaaagttccttattttgaaattgtcaaagaacaaagcggtgtttttcttttaaacaggtgatcacgtttcgtgttcatactcaacgttaataaaaggagagagtttgtagtgaaatggcagtgttcatcattggcttattttaccgtagtgatgctgagatgagaaatgtgcaggatcatggtcagttgatgtttcttttatttgcttttaagataattagaaattaaatatctttccaaaatttgaagatatgtctcccccagtcagattataagcttctcaaaactggcttgcccccagaattttactgcttacccagcagacatgtattgaccatcacatggcaaatgatatcagcaaatcaaaagatgggcgtaggggtccagccgagacagaaaacgttagtttcaattcctggggcattaaaatgttgcttttctctttctctttaattaatttttaaatgaaaacaatacatgtatatgttagttttttctagcacaacacaatattatatattaagcgatccaaaatcatactgtcaagaccatcaaacaaaacaaagaagcttaagtgaactaagcacagggaaaagttgttttttcactcgttcattttgtcatctgcttctagatgctgcaatcaagaagtagcaaatgcccaagttgccatagtgtttgcaggaaaaaaagagaaaaaataataaaaataaggaaggagcaatgccaaaaattgaagaaaatattatataattaaagcaagaagatatctatccattgagaaaaacaatttttatattatttgcttttagcagcaaagcattagaattctgagattgttatagcactaagaagatttttattctgtgtacacactgaaaaataaaattctgagtaaagaaagtgttcccattcccca

SEQ ID NO: 136868 - DNA, 2982 bp, Homo sapiens
  Payload ID: 6802
  Gene Symbol: GTF2H1
  Gene Name: general transcription factor IIH, polypeptide 1, 62kDa
  Uniprot ID: P32780
  ENST ID: ENST00000265963
  CDS Start-End: 161-1807
gaccccctagtaacagaggcggtggctactgctgcggccactgggtttcggcctcttcccagcagcggctctaagaagcgcagcggaactcgaccggatccaacccagttagttacttcctgtctagagttgtagcttccacctgcaccttctagccaccatggcaacctcatctgaagaagttttgctgattgtaaagaaagtgcgtcaaaagaagcaggatggagctctgtacctcatggcagaaagaattgcttgggcacctgaaggcaaagatagatttacaatcagccatatgtatgcagatattaaatgccagaaaattagtccagaaggaaaagctaaaattcagcttcagctggtcctacatgcaggggacacaactaacttccatttttccaatgaaagcacagcagtgaaagagcgagatgcagtaaaagaccttcttcagcagctgctgcccaaattcaagaggaaagcaaataaagaactggaagagaagaacagaatgctgcaagaagatcctgttttgtttcagctttataaagaccttgttgtgagtcaagtgatcagtgctgaggaattctgggccaatcgtttaaatgtgaatgcaacagatagttcttccacatccaatcataagcaggatgttggcatttctgctgcatttctggctgatgtccggccccaaactgatggctgtaacggtctaagatataatttaacttctgatatcattgagtccatatttaggacctatccagcagtaaaaatgaaatatgcagaaaatgttccccacaacatgacagagaaggaattctggacacgttttttccagtcccattattttcacagggatcggctgaatacagggtcaaaggatctctttgcagaatgtgccaaaatagatgaaaaaggcctaaaaacaatggtttcattaggagtgaaaaacccactactagatttaacagctttggaagataaaccattagatgagggctatggcatttcctctgtgccatctgcttccaattctaaatccataaaagagaatagtaatgctgccatcatcaagagatttaaccatcacagtgccatggtcctggcagctggactcagaaaacaagaagcacaaaatgaacaaactagtgagcccagcaacatggatggaaattccggagatgcagactgctttcagccagcagtcaaaagggcgaaattacaagagtccattgaatatgaagacttggggaaaaataattctgtaaaaacgattgcactaaacctcaagaagtcagataggtattatcatggtccaactccaatccagtcactacagtatgcaacaagtcaggacattattaattcttttcaaagtattagacaagaaatggaagcttatacacccaagttaactcaggttctctcaagtagtgctgccagtagtaccatcacagcactgtcacctggaggggcacttatgcagggaggaacacagcaagccataaaccagatggtgccaaatgatattcaatctgaattgaaacacttatatgtagctgttggagaacttctacgacatttctggtcctgctttcctgttaatacgccattcctagaagaaaaggtagtgaaaatgaaaagtaatttggaacgattccaagttacgaagctctgtccattccaagaaaagattcggagacagtatttaagcacaaatttggtaagtcacatagaagagatgctccagacagcctacaacaagctccacacatggcagtcacggcgtctgatgaagaaaacgtgaggtggccatgatgcttacaggttttgtgagattgagagaactatgacctgcagcaactctggaaacctggcctgacagacaagcagatgacctcacaggagtgataagaaacatctgctccacgccaactcccagagctgatgctattgtacttgcacattggagactgaaaggaaagaagggactaaatgctggggaggtaaattaagacagaaccaaatgagctaagttgcaaatatatatatatacacacacacacatatatgtacatgtgtatgtacatatatattttaaaagactgtttactgcagttgctcaggaactgcttttgattcacattaagctgctttcagaaattaaaaaaacactttttaaagggtgcattgataaaatctgaggttttttggttgtcgtttttttctgtgtacatttttttcctaagtttatggcacagggtagaccttaagtattcctcctccatccttcattcttcaccctccattggatcctcaagttttaatgaattccaattataccttacatcagcaagttaaaaaaagtactttaaaataaagcaaagggagactgttgctcaaccatcaggaaacagttgtcagaagacatcattggttctgtgtttcctacggaaataagaaacgataaatattgcactgaatgtttgtggtttggagtccctgaataataaagagggaatatatttgcagaaagtcgcatagggttttttaatgcagaattttgtcagaagacaatggcgctgcatgtttttctttgagtgcaaatgtacattgctaagatttttttaagatggcatgtgctttgaaaagaagatattgcatttttaagagtttaaaaatcttatgagtgagaaatattaaaaaaatcttattttcacctctttagaagaaataaaagatgtttctcctatctccttttctctagtatttgactgttactgtccttggcgaatcgataatcattgcatagtgactgaaaagcctaagtgcaaaaaaaaaaaaaaaagatgttcttgtttctgaacttcgtgccatattttgttcctgatgggatcaacttaatgtttaagactttagatgtcttgtattaaaaattacacaaaaaaagtaaaactttttatacttacccttttaactcta

SEQ ID NO: 136869 - DNA, 2707 bp, Homo sapiens
  Payload ID: 6802
  Gene Symbol: GTF2H1
  Gene Name: general transcription factor IIH, polypeptide 1, 62kDa
  Uniprot ID: P32780
  ENST ID: ENST00000453096
  CDS Start-End: 669-2315
aggccgcggtcgcgattacgctctctacggcctgcgaccgcagggccgttgcgggctggagacacggcgccgactggaaccggaggagctctaggccaaatggttgggccagccaggatcccaggacccttcgccgctcgagaccggagagaggaaacgaaacaggcgggaacccgtgggggagggagggaactagcggaaggtgtcatggcggccgcgctcttgagtcacgtgcccagggcccgccttgctacttccggtcacgtgccctcagactcctcgcagccagcgatggaggcgagaccccctagtaacagaggcggtggctactgctgcggccactgggtttcggcctcttcccagcagcggctctaagaagcgcagcggaactcgaccggatccaacccagttagttacttcctgtctagagttgtagcttccacctgagttctcctgggaagaagtgtttgccactcaaggaatacactcaagaaaaacctggaaatcacagaaggcattgtaagatagctacagtgattctgttaaacctcctgaaattggtccttgaacaattaagaggtgctacagatgaccaggaaaatttaccaggcaaattagctgtgagacaattgaccatttgtgcccaatgttcgcaccttctagccaccatggcaacctcatctgaagaagttttgctgattgtaaagaaagtgcgtcaaaagaagcaggatggagctctgtacctcatggcagaaagaattgcttgggcacctgaaggcaaagatagatttacaatcagccatatgtatgcagatattaaatgccagaaaattagtccagaaggaaaagctaaaattcagcttcagctggtcctacatgcaggggacacaactaacttccatttttccaatgaaagcacagcagtgaaagagcgagatgcagtaaaagaccttcttcagcagctgctgcccaaattcaagaggaaagcaaataaagaactggaagagaagaacagaatgctgcaagaagatcctgttttgtttcagctttataaagaccttgttgtgagtcaagtgatcagtgctgaggaattctgggccaatcgtttaaatgtgaatgcaacagatagttcttccacatccaatcataagcaggatgttggcatttctgctgcatttctggctgatgtccggccccaaactgatggctgtaacggtctaagatataatttaacttctgatatcattgagtccatatttaggacctatccagcagtaaaaatgaaatatgcagaaaatgttccccacaacatgacagagaaggaattctggacacgttttttccagtcccattattttcacagggatcggctgaatacagggtcaaaggatctctttgcagaatgtgccaaaatagatgaaaaaggcctaaaaacaatggtttcattaggagtgaaaaacccactactagatttaacagctttggaagataaaccattagatgagggctatggcatttcctctgtgccatctgcttccaattctaaatccataaaagagaatagtaatgctgccatcatcaagagatttaaccatcacagtgccatggtcctggcagctggactcagaaaacaagaagcacaaaatgaacaaactagtgagcccagcaacatggatggaaattccggagatgcagactgctttcagccagcagtcaaaagggcgaaattacaagagtccattgaatatgaagacttggggaaaaataattctgtaaaaacgattgcactaaacctcaagaagtcagataggtattatcatggtccaactccaatccagtcactacagtatgcaacaagtcaggacattattaattcttttcaaagtattagacaagaaatggaagcttatacacccaagttaactcaggttctctcaagtagtgctgccagtagtaccatcacagcactgtcacctggaggggcacttatgcagggaggaacacagcaagccataaaccagatggtgccaaatgatattcaatctgaattgaaacacttatatgtagctgttggagaacttctacgacatttctggtcctgctttcctgttaatacgccattcctagaagaaaaggtagtgaaaatgaaaagtaatttggaacgattccaagttacgaagctctgtccattccaagaaaagattcggagacagtatttaagcacaaatttggtaagtcacatagaagagatgctccagacagcctacaacaagctccacacatggcagtcacggcgtctgatgaagaaaacgtgaggtggccatgatgcttacaggttttgtgagattgagagaactatgacctgcagcaactctggaaacctggcctgacagacaagcagatgacctcacaggagtgataagaaacatctgctccacgccaactcccagagctgatgctattgtacttgcacattggagactgaaaggaaagaagggactaaatgctggggaggtaaattaagacagaaccaaatgagctaagttgcaaatatatatatatacacacacacacatatatgtacatgtgtatgtacatatatattttaaaagactgtttactgcagttgctcaggaactgcttttgattcacattaagctgctttcagaaattaaaaaaacactttttaaagggtgcattgataaaa

SEQ ID NO: 136870 - DNA, 545 bp, Homo sapiens
  Payload ID: 6802
  Gene Symbol: GTF2H1
  Gene Name: general transcription factor IIH, polypeptide 1, 62kDa
  ENST ID: ENST00000525831
  CDS Start-End: 261-545
actcctcgcagccagcgatggaggcgagaccccctagtaacagaggcggtggctactgctgcggccactgggtttcggcctcttcccagcagcggctctaagaagcgcagcggaactcgaccggatccaacccagttagttacttcctgtctagagttgtagcttccacctgagttctcctgggaagaagtgtttgccactcaaggaatacactcaagaaaaacctggaaatcacagaaggcattcaccttctagccaccatggcaacctcatctgaagaagttttgctgattgtaaagaaagtgcgtcaaaagaagcaggatggagctctgtacctcatggcagaaagaattgcttgggcacctgaaggcaaagatagatttacaatcagccatatgtatgcagatattaaatgccagaaaattagtccagaaggaaaagctaaaattcagcttcagctggtcctacatgcaggggacacaactaacttccatttttccaatgaaagcacagcagtgaaagagcgagatgcagtaaaagacctt

SEQ ID NO: 136871 - DNA, 1700 bp, Homo sapiens
  Payload ID: 6802
  Gene Symbol: GTF2H1
  Gene Name: general transcription factor IIH, polypeptide 1, 62kDa
  ENST ID: ENST00000530496
  CDS Start-End: 584-1294
ggctcacacctgtaatcccagcactttgggaggccaaggtgggcggatcacttgaggtcaggagttcaagaccagtctgaccagcatggtgaaaccccatctctactaaaaatacaaaatattagccgggcgtggtggcaggcgcctgtaatcccagcttctcaggaggctgaggcaagagaatcacttgaatgcaggaggcgaaggttgcactccagcctgagcaacagagcgggactccatctcaaaaacagagagaaattcagtttaagatgtattttgtaatgctaaaacgagttagtgctatttgttaatcttttatgtgcataatgtcacttgtttttaaatgtttgttcataaatatttaatgttcgtgagaagtaataaaagtcccatcatccagcaaattttttcagctaagcgtgtcttataataagaaaagcagaacctttttaaaaaatttttaatctattatttctcacagggctatggcatttcctctgtgccatctgcttccaattctaaatccataaaagagaatagtaatgctgccatcatcaagagatttaaccatcacagtgccatggtcctggcagctggactcagaaaacaagaagcacaaaatgaacaaactagtgagcccagcaacatggatggaaattccggagatgcagactgctttcagccagcagtcaaaagggcgaaattacaagagtccattgaatatgaagacttggggaaaaataattctgtaaaaacgattgcactaaacctcaagaagtcagataggtattatcatggtccaactccaatccagtcactacagtatgcaacaagtcaggacattattaattcttttcaaagtattagacaagaaatggaagcttatacacccaagttaactcaggttctctcaagtagtgctgccagtagtaccatcacagcactgtcacctggaggggcacttatgcagggaggaacacagcaagccataaaccagatggtgccaaatgatattcaatctgaattgaaacacttatatgtagctgttggagaacttctacgacatttctggtcctgctttcctgttaatacgccattcctagaagaaaaggtagtgaaaatgaaaagtaatttggaacgattccaagttacgaagctctgtccattccaagaaaagattcggagacagtatttaagcacaaatttggtaagtcacatagaagagatgctccagacagcctacaacaagctccacacatggcagtcacggcgtctgatgaagaaaacgtgaggtggccatgatgcttacaggttttgtgagattgagagaactatgacctgcagcaactctggaaacctggcctgacagacaagcagatgacctcacaggagtgataagaaacatctgctccacgccaactcccagagctgatgctattgtacttgcacattggagactgaaaggaaagaagggactaaatgctggggaggtaaattaagacagaaccaaatgagctaagttgcaaatatatatatatacacacacacacatatatgtacatgtgtatgtacatatatattttaaaagactgtttactgcagttgctcaggaactgcttttgattcacattaagctgctttcagaaattaaaaaaacactttttaaagggtgcattgataaaatctgaggttttttg

SEQ ID NO: 136872 - DNA, 2587 bp, Homo sapiens
  Payload ID: 6802
  Gene Symbol: GTF2H1
  Gene Name: general transcription factor IIH, polypeptide 1, 62kDa
  Uniprot ID: P32780
  ENST ID: ENST00000534641
  CDS Start-End: 345-1643
agactcctcgcagccagcgatggaggcgagaccccctagtaacagaggcggtggctactgctgcggccactgggtttcggcctcttcccagcagcggctctaagaagcgcagcggaactcgaccggatccaacccagttagttacttcctgtctagagttgtagcttccacctgcaccttctagccaccatggcaacctcatctgaagaagttttgctgattgtaaagaaagtgcgtcaaaagaagcaggatggagctctgtacctcatggcagaaagaattgcttgggcacctgaaggcaaagatagatttacaatcagccatatgtatgcagatattaaataatgctgcaagaagatcctgttttgtttcagctttataaagaccttgttgtgagtcaagtgatcagtgctgaggaattctgggccaatcgtttaaatgtgaatgcaacagatagttcttccacatccaatcataagcaggatgttggcatttctgctgcatttctggctgatgtccggccccaaactgatggctgtaacggtctaagatataatttaacttctgatatcattgagtccatatttaggacctatccagcagtaaaaatgaaatatgcagaaaatgttccccacaacatgacagagaaggaattctggacacgttttttccagtcccattattttcacagggatcggctgaatacagggtcaaaggatctctttgcagaatgtgccaaaatagatgaaaaaggcctaaaaacaatggtttcattaggagtgaaaaacccactactagatttaacagctttggaagataaaccattagatgagggctatggcatttcctctgtgccatctgcttccaattctaaatccataaaagagaatagtaatgctgccatcatcaagagatttaaccatcacagtgccatggtcctggcagctggactcagaaaacaagaagcacaaaatgaacaaactagtgagcccagcaacatggatggaaattccggagatgcagactgctttcagccagcagtcaaaagggcgaaattacaagagtccattgaatatgaagacttggggaaaaataattctgtaaaaacgattgcactaaacctcaagaagtcagataggtattatcatggtccaactccaatccagtcactacagtatgcaacaagtcaggacattattaattcttttcaaagtattagacaagaaatggaagcttatacacccaagttaactcaggttctctcaagtagtgctgccagtagtaccatcacagcactgtcacctggaggggcacttatgcagggaggaacacagcaagccataaaccagatggtgccaaatgatattcaatctgaattgaaacacttatatgtagctgttggagaacttctacgacatttctggtcctgctttcctgttaatacgccattcctagaagaaaaggtagtgaaaatgaaaagtaatttggaacgattccaagttacgaagctctgtccattccaagaaaagattcggagacagtatttaagcacaaatttggtaagtcacatagaagagatgctccagacagcctacaacaagctccacacatggcagtcacggcgtctgatgaagaaaacgtgaggtggccatgatgcttacaggttttgtgagattgagagaactatgacctgcagcaactctggaaacctggcctgacagacaagcagatgacctcacaggagtgataagaaacatctgctccacgccaactcccagagctgatgctattgtacttgcacattggagactgaaaggaaagaagggactaaatgctggggaggtaaattaagacagaaccaaatgagctaagttgcaaatatatatatatacacacacacacatatatgtacatgtgtatgtacatatatattttaaaagactgtttactgcagttgctcaggaactgcttttgattcacattaagctgctttcagaaattaaaaaaacactttttaaagggtgcattgataaaatctgaggttttttggttgtcgtttttttctgtgtacatttttttcctaagtttatggcacagggtagaccttaagtattcctcctccatccttcattcttcaccctccattggatcctcaagttttaatgaattccaattataccttacatcagcaagttaaaaaaagtactttaaaataaagcaaagggagactgttgctcaaccatcaggaaacagttgtcagaagacatcattggttctgtgtttcctacggaaataagaaacgataaatattgcactgaatgtttgtggtttggagtccctgaataataaagagggaatatatttgcagaaagtcgcatagggttttttaatgcagaattttgtcagaagacaatggcgctgcatgtttttctttgagtgcaaatgtacattgctaagatttttttaagatggcatgtgctttgaaaagaagatattgcatttttaagagtttaaaaatcttatgagtgagaaatattaaaaaaatcttattttcacctctttagaagaaataaaagatgtttctcct

SEQ ID NO: 136873 - DNA, 1510 bp, Homo sapiens
  Payload ID: 6802
  Gene Symbol: GTF2H1
  Gene Name: general transcription factor IIH, polypeptide 1, 62kDa
  ENST ID: ENST00000524753
  CDS Start-End: 158-703
agatagttcttccacatccaatcataagcaggatgttggcatttctgctgcatttctggctgatgtccggccccaaactgatggctgtaacggtctaagatataatttaacttctgatatcattgagtccatatttaggacctatccagcagtaaaaatgaaatatgcagaaaatgttccccacaacatgacagagaaggaattctggacacgttttttccagtcccattattttcacagggatcggctgaatacagggtcaaaggatctctttgcagaatgtgccaaaatagatgaaaaaggcctaaaaacaatggtttcattaggagtgaaaaacccactactagatttaacagctttggaagataaaccattagatgagggctatggcatttcctctgtgccatctgcttccaattctaaatccataaaagagaatagtaatgctgccatcatcaagagatttaaccatcacagtgccatggtcctggcagctggactcagaaaacaagaagcacaaaatgaacaaactagtgagcccagcaacatggatggaaattccggagatgcagactgctttcagccagcagtcaaaagggtatgggcaaaaaaatatgaaccatttggggctcaagtttctccaaatactttatgtgactgcaagtactgtatacgcttatttcctgtgactcagttcttctaactaagatgttaagcatttggcttaaagtgtatagcattacaaagagtatttccccagctttggcttgccagccaactttccattgactctagcctgttagccatttttattgttttttgtttgtttgtttgtttgttttcctcacatgtacacatacatacagattgttcttatatgtgattttgttctctgggaataaaatcttcattcaacagaggcaatatgacagaaaaaccgaagtttcatgtatatgatttttcaaagaaagtgaattggccctcatgttaaacctagcatttcagagctgaaagtgtcttctcattaaatattgaagaaatcatttgagggtgtggagaaggatggacagaattagctgcttgtgtatttattcttctcctgcaactttgccacgctattttgtacctcccttcctaattatgataaagctttcttagagagcagtcaggcaatgtgtattaaatgtttaaagctttacacccttagttctacttgtggacatttatttcttaagaaagatgtatactaagatttagatagaaatattcattacagtatcataataaagacagtagcaaggattctgttatctgtgttgcattaatacaatagagattgatgcaactgttcattattttgaaagcattaatgataatattgcatcaaagagttcactgaacagattgtacagtacagttttacacacaaaaaaaatagtttgtgagctttaaaagggccttcaaatgaatatgctaaacggttatctttcaataaagagagtatgggtaa

SEQ ID NO: 136874 - DNA, 932 bp, Homo sapiens
  Payload ID: 6802
  Gene Symbol: GTF2H1
  Gene Name: general transcription factor IIH, polypeptide 1, 62kDa
  ENST ID: ENST00000526630
  CDS Start-End: 487-903
atagtggagagcataacagatcattcatttggggaaaaaataataaaatgtaaactttcacctaccagattggcaaaagtaaaaagttcaataatacttcatgtggtcagagtgtaagaaaactagtattcttaagtagttgttgagaaaattggttcagccatttgtaggacagtcatctctaggaagagaagctcatggtgggaagacttcattttttaccctctgtacagttttgttttttcagtcatgtttattgtgtaagagaaagttgtgacaaaataaaaagtactgtgttaataattataggcgaaattacaagagtccattgaatatgaagacttggggaaaaataattctgtaaaaacgattgcactaaacctcaagaagtcagataggtattatcatggtccaactccaatccagtcactacagtatgcaacaagtcaggacattattaattcttttcaaagtattagacaagaaatggaagcttatacacccaagttaactcaggttctctcaagtagtgctgccagtagtaccatcacagcactgtcacctggaggggcacttatgcagggaggaacacagcaagccataaaccagatggtgccaaatgatattcaatctgaattgaaacacttatatgtagctgttggagaacttctacgacatttctggtcctgctttcctgttaatacgccattcctagaagaaaaggtagtgaaaatgaaaagtaatttggaacgattccaagttacgaagctctgtccattccaagaaaagattcggagacagtatttaagcacaaatttggtaagtcacatagaagagatgctccagacagcctacaacaagctccacacatggcagtcacggcgtctgatgaagaaaacgtgaggtggccatgatgcttacaggttttgtga

SEQ ID NO: 136875 - DNA, 4336 bp, Homo sapiens
  Payload ID: 6803
  Gene Symbol: GTF2H2
  Gene Name: general transcription factor IIH, polypeptide 2, 44kDa
  Uniprot ID: Q13888
  ENST ID: ENST00000274400
  CDS Start-End: 142-1329
ctagctaggcggctgggagcgttttcgtggcggggaacggaggttgaattgccctgcctgggctcatagggaaggaggatgtgaaggagcttgtgaaggcagaggaagattattgaataataaaatacagttttgaaaaaaatggatgaagaacctgaaagaactaagcgatgggaaggaggctatgaaagaacatgggagattcttaaagaagatgaatctggatcacttaaagctacaatagaagacattctattcaaggcaaagagaaaaagagtatttgagcaccatggacaagttcgacttggaatgatgcgccacctttatgtggtagtagatggatcaagaacaatggaagaccaagatttaaagcctaatagactgacgtgtactttaaagttgttggaatactttgtagaggaatattttgatcaaaatcctattagtcagattggaataattgtaactaagagtaaaagagctgaaaaattgactgaactttcaggaaacccaagaaaacatataacgtctttgaagaaagctgtggatatgacctgccatggagagccatctctttataattccctaagcatagctatgcagactctaaaacacatgcctggacatacaagtcgagaagtactaatcatctttagcagccttacaacttgcgatccatctaatatttatgatctaatcaagaccctaaaggcagctaaaattagagtatctgttattggattgtctgcagaagttcgcgtttgcactgtacttgctcgtgaaactggtggcacgtaccatgttattttagatgaaagccattacaaagagttgctcacacatcatgttagtcctcctcctgctagctcaagttctgaatgctcacttattcgtatgggatttcctcagcacaccattgcttctttatctgaccaggatgcaaaaccctctttcagcatggcgcatttggatggcaatactgagccagggcttacattaggaggctatttctgcccacagtgtcgggcaaagtactgtgagctacctgttgagtgtaaaatctgtggtcttactttggtgtctgctccccacttggcacggtcttaccatcatttgtttcctttggatgcttttcaagaaattcccctagaagaatataatggagaaagattttgttatggatgtcagggggaattgaaagaccaacatgtttatgtttgtgctgtgtgccaaaatgttttctgtgtggactgtgatgtttttgttcatgattctctacactgttgccctggctgtattcataagattccagctccttcaggtgtttgattccagcatgtagtatacattgtatgtgttaaaaagaaatttgcaactgtgaataaaaggacttctttagaagaagcttcatttaaaacatgaaaggataatctgacttaagaaactttttgctaagaaaaggtaatattttattaaattttaaatttgtgttgtcacagaaatacctgaaattcagtagtacttcattcaattaattttgttttctattattttgagttatactgttttcaaagtcattatgcagtatgtataaacttataagaattaaattgatgtgataattttatgtttttataattaaatatagaatctttatgatttatgttaattcattaatttagtgtaagaagaaagttaagtctgaatgtaaattcagtgtaagatgaaaatttatcaatacttatgaaattaggctgggcgctgtggctcacacctgtaatcccaacactttgggaggctgaggtgggcagatcacctgaggtcaggagttcgagaccagcctggccaacatggtgaaaccccgtcactactaaaaatacaaaaaataattagccgggcatggtggttcacgcctggagtcccagctacttgggaggctgaggcaggagaatcgcttgaacccaggaggcggaggttgcagtgagccaagattgtgccactgcactccaccctagagtgagactccatctcaaaaaaaaaaaaagttatgaaattaatacatatgaaatgatgtactgctacatccaccagagaggtctttttaggtttaaccaaacatctggaatatgtttatcaagttagtacatctgaaattatttgtggctatgaccaacagaagtcactttacattaaacattcaaactcacaagactgccatggccatacttggtacccgcttactcagaaggatattaaacagaaacaacagcctgccagcacagcatcaagcagtcctcattagcagtggaagtccttgtagcagtccactagtacaatttgggtgcaaggagataagatcctccacaggcatcaaggaaccaatatctcttaacaattccataaacacagcttccaggtatccacaagggatgtgtcaatttcaagagtcactacactcaggaaagcctaaagcttgaagactccatttatttatagtgcatcccaatccagatacgtaacaattaacgagttatttttactataagcaaagttgcctaaaatcatagttgatactaatcatggttaacagagctctaaagtttgacagaaagtgagattcaaatcctttcactctcatatgctaaaccttttgccttactctgggtcatcagagaaatttaggtgagaatgtatgatgaagtctgtgttttagattcaatgcagatatatcattgtgcgcagaactctttctggttatatccagttaagagtaaatcaggctttcagccgggcgcggtggctcacgcctgtaatcctagcactttgggaggccgaggcgggcagatcacgaggtcaggagatcgagaccatcctggctaacacggtgaaaccccgtctctactaaacatacaaaaaattagctgggcctggtggcgggcgcctgtagtcccagctattcggaaggctggggcaggagaatggtgtgaacccaggaggcggagcttgcagtgagccgagatcgctccactgccctccagcctgggcgacagagctagactctgtctcaagaaaaaaaaaaaaagagtaaatcaggctttcatagcaaaggtatgtctattttatgtatataaacttcaggtactctaacttgagtttcactatgaaatttgtgattttttttttttttttttttgagatggagtcttgctccatcgcccaggctggagtgcagtggcctgctgttggctcactgcaacctccgcctcccaggctcaagccattctcctgtctcagcctcctgagtagctgggactacaggcgcctgccaccacgcctggctaatttttgcatttttggtagagacggggtttcaccttgttgatcaggctgatctccaactcctgacctcaggtcatccacccacctccgccaccgtgcccggccgaaatttgtgattttataactaagaatttttagttaagaacattatcagtaaagacaacgtaatcccaccctggagagtttattgggagcccaggaatattcatttttaatacacacacacacacacacacacacacacacacacacactgatcagagtaacaggagtttctctcaggagtcatactccatgagcctggacccagtggttctttacgtggaaacaaatttcacctataggtaacctggtaactgctattttcttctgtgtgctctgtcaacaaagttatcagtggcttgcaagagatgcctttaatactcagagcattctatctccccctatctggtttagaaggaaggccttcattagttaccttttgagaagttactagaactctctattagagacttaccctcctgacctgataaaaagggatacccatgtctctattaacagctttatctctttctacagttttgggtatttgataaggttaaggcaaaattttagttatgcttaaggaggagttcttttttcacaattacagagaaaattttggtttgttgaagattgcagaaacagcaatggtaatgtaagacagttttggcctttaatttttttcttgaaactctacagtatactacaatagtgaaggaaactattaacatgagagatccttctgaataggatgtctttctgagttccactattcagttacaaaactccttaatgcttaaaattcattatgaaaattagatttattttaaatactttcaagtgtatacatttttatttcataatttttattgtcttttaactaaagcatttagttcatttatatttactgtgtaccttttatatttaataaatatatttacttattaaaagatta

SEQ ID NO: 136876 - DNA, 2077 bp, Homo sapiens
  Payload ID: 6803
  Gene Symbol: GTF2H2
  Gene Name: general transcription factor IIH, polypeptide 2, 44kDa
  Uniprot ID: Q13888
  ENST ID: ENST00000330280
  CDS Start-End: 289-1476
gtccgcgtgtggaagtctgtgaggcgcagaggtggggcaggccgtctggctagctaggcggctgggagcgttttcgtggcggggaacggaggttgaattgccctgcctgggctcatagggaaggaggatgtgaaggagcttgtgaaggcagaggaaggctggagtgcagtggcacaaccttggctcgctccagtgtctacctgccaggttcaagtgattctcctgcctcagcctcccgagtagctgggattacagattattgaataataaaatacagttttgaaaaaaatggatgaagaacctgaaagaactaagcgatgggaaggaggctatgaaagaacatgggagattcttaaagaagatgaatctggatcacttaaagctacaatagaagacattctattcaaggcaaagagaaaaagagtatttgagcaccatggacaagttcgacttggaatgatgcgccacctttatgtggtagtagatggatcaagaacaatggaagaccaagatttaaagcctaatagactgacgtgtactttaaagttgttggaatactttgtagaggaatattttgatcaaaatcctattagtcagattggaataattgtaactaagagtaaaagagctgaaaaattgactgaactttcaggaaacccaagaaaacatataacgtctttgaagaaagctgtggatatgacctgccatggagagccatctctttataattccctaagcatagctatgcagactctaaaacacatgcctggacatacaagtcgagaagtactaatcatctttagcagccttacaacttgcgatccatctaatatttatgatctaatcaagaccctaaaggcagctaaaattagagtatctgttattggattgtctgcagaagttcgcgtttgcactgtacttgctcgtgaaactggtggcacgtaccatgttattttagatgaaagccattacaaagagttgctcacacatcatgttagtcctcctcctgctagctcaagttctgaatgctcacttattcgtatgggatttcctcagcacaccattgcttctttatctgaccaggatgcaaaaccctctttcagcatggcgcatttggatggcaatactgagccagggcttacattaggaggctatttctgcccacagtgtcgggcaaagtactgtgagctacctgttgagtgtaaaatctgtggtcttactttggtgtctgctccccacttggcacggtcttaccatcatttgtttcctttggatgcttttcaagaaattcccctagaagaatataatggagaaagattttgttatggatgtcagggggaattgaaagaccaacatgtttatgtttgtgctgtgtgccaaaatgttttctgtgtggactgtgatgtttttgttcatgattctctacactgttgccctggctgtattcataagattccagctccttcaggtgtttgattccagcatgtagtatacattgtatgtgttaaaaagaaatttgcaactgtgaataaaaggacttctttagaagaagcttcatttaaaacatgaaaggataatctgacttaagaaactttttgctaagaaaaggtaatattttattaaattttaaatttgtgttgtcacagaaatacctgaaattcagtagtacttcattcaattaattttgttttctattattttgagttatactgttttcaaagtcattatgcagtatgtataaacttataagaattaaattgatgtgataattttatgtttttataattaaatatagaatctttatgatttatgttaattcattaatttagtgtaagaagaaagttaagtctgaatgtaaattcagtgtaagatgaaaatttatcaatacttatgaaattaggctgggcgctgtggctcacacctgtaatcccaacactttgggaggctgaggtgggcagatcacctgaggtcaggagttcgagaccagcctggccaacatggtgaaaccccgtcactactaaaaatacaaaaaataattagccgggcatggtggttcacgcctggagtcccagctact

SEQ ID NO: 136877 - DNA, 1950 bp, Homo sapiens
  Payload ID: 6803
  Gene Symbol: GTF2H2
  Gene Name: general transcription factor IIH, polypeptide 2, 44kDa
  ENST ID: ENST00000425596
  CDS Start-End: 142-297
ctagctaggcggctgggagcgttttcgtggcggggaacggaggttgaattgccctgcctgggctcatagggaaggaggatgtgaaggagcttgtgaaggcagaggaagattattgaataataaaatacagttttgaaaaaaatggatgaagaacctgaaagaactaagcgatgggaaggaggctatgaaagaacatgggagattcttaaagaagatgaatctggatcacttaaagctacaatagaagacattctattcaaggcaaagagaaaaagatgcgccacctttatgtggtagtagatggatcaagaacaatggaagaccaagatttaaagcctaatagactgacgtgtactttaaagttgttggaatactttgtagaggaatattttgatcaaaatcctattagtcagattggaataattgtaactaagagtaaaagagctgaaaaattgactgaactttcaggaaacccaagaaaacatataacgtctttgaagaaagctgtggatatgacctgccatggagagccatctctttataattccctaagcatagctatgcagactctaaaacacatgcctggacatacaagtcgagaagtactaatcatctttagcagccttacaacttgcgatccatctaatatttatgatctaatcaagaccctaaaggcagctaaaattagagtatctgttattggattgtctgcagaagttcgcgtttgcactgtacttgctcgtgaaactggtggcacgtaccatgttattttagatgaaagccattacaaagagttgctcacacatcatgttagtcctcctcctgctagctcaagttctgaatgctcacttattcgtatgggatttcctcagcacaccattgcttctttatctgaccaggatgcaaaaccctctttcagcatggcgcatttggatggcaatactgagccagggcttacattaggaggctatttctgcccacagtgtcgggcaaagtactgtgagctacctgttgaatgtaaaatctgtggtcttactttggtgtctgctccccacttggcacggtcttaccatcatttgtttcctttggatgcttttcaagaaattcccctagaagaatataatggagaaagattttgttatggatgtcagggggaattgaaagaccaacatgtttatgtttgtgctgtgtgccaaaatgttttctgtgtggactgtgatgtttttgttcatgattctctacactgttgccctggctgtattcataagattccagctccttcaggtgtttgattccagcatgtagtatacattgtatgtgttaaaaagaaatttgcaactgtgaataaaaggacttctttagaagaagcttcatttaaaacatgaaaggataatctgacttaagaaactttttgctaagaaaaggtaatattttattaaattttaaatttgtgttgtcacagaaatacctgaaattcagtagtacttcattcaattaattttgttttctattattttgagttatactgttttcaaagtcattatgcagtatgtataaacttataagaattaaattgatgtgataattttatgtttttataattaaatatagaatctttatgatttatgttaattcattaatttagtgtaagaagaaagttaagtctgaatgtaaattcagtgtaagatgaaaatttatcaatacttatgaaattaggctgggcgctgtggctcacacctgtaatcccaacactttgggaggctgaggtgggcagatcacttgaggtcaggagttcgagaccagcctggccaacatggtgaaaccccgtcactactaaaaatacaaaaaataattagccgggcatggtggttcacgcctggagtcccagctacttgggaggctgaggcaggagaatcgcttgaacccaggaggcggaggttgcagggagcc

SEQ ID NO: 136878 - DNA, 1953 bp, Homo sapiens
  Payload ID: 6803
  Gene Symbol: GTF2H2
  Gene Name: general transcription factor IIH, polypeptide 2, 44kDa
  ENST ID: ENST00000519783
  CDS Start-End: 142-297
ctagctaggcggctgggagcgttttcgtggcggggaacggaggttgaattgccctgcctgggctcatagggaaggaggatgtgaaggagcttgtgaaggcagaggaagattattgaataataaaatacagttttgaaaaaaatggatgaagaacctgaaagaactaagcgatgggaaggaggctatgaaagaacatgggagattcttaaagaagatgaatctggatcacttaaagctacaatagaagacattctattcaaggcaaagagaaaaagatgcgccacctttatgtggtagtagatggatcaagaacaatggaagaccaagatttaaagcctaatagactgacgtgtactttaaagttgttggaatactttgtagaggaatattttgatcaaaatcctattagtcagattggaataattgtaactaagagtaaaagagctgaaaaattgactgaactttcaggaaacccaagaaaacatataacgtctttgaagaaagctgtggatatgacctgccatggagagccatctctttataattccctaagcatagctatgcagactctaaaacacatgcctggacatacaagtcgagaagtactaatcatctttagcagccttacaacttgcgatccatctaatatttatgatctaatcaagaccctaaaggcagctaaaattagagtatctgttattggattgtctgcagaagttcgcgtttgcactgtacttgctcgtgaaactggtggcacgtaccatgttattttagatgaaagccattacaaagagttgctcacacatcatgttagtcctcctcctgctagctcaagttctgaatgctcacttattcgtatgggatttcctcagcacaccattgcttctttatctgaccaggatgcaaaaccctctttcagcatggcgcatttggatggcaatactgagccagggcttacattaggaggctatttctgcccacagtgtcgggcaaagtactgtgagctacctgttgagtgtaaaatctgtggtcttactttggtgtctgctccccacttggcacggtcttaccatcatttgtttcctttggatgcttttcaagaaattcccctagaagaatataatggagaaagattttgttatggatgtcagggggaattgaaagaccaacatgtttatgtttgtgctgtgtgccaaaatgttttctgtgtggactgtgatgtttttgttcatgattctctacactgttgccctggctgtattcataagattccagctccttcaggtgtttgattccagcatgtagtatacattgtatgtgttaaaaagaaatttgcaactgtgaataaaaggacttctttagaagaagcttcatttaaaacatgaaaggataatctgacttaagaaactttttgctaagaaaaggtaatattttattaaattttaaatttgtgttgtcacagaaatacctgaaattcagtagtacttcattcaattaattttgttttctattattttgagttatactgttttcaaagtcattatgcagtatgtataaacttataagaattaaattgatgtgataattttatgtttttataattaaatatagaatctttatgatttatgttaattcattaatttagtgtaagaagaaagttaagtctgaatgtaaattcagtgtaagatgaaaatttatcaatacttatgaaattaggctgggcgctgtggctcacacctgtaatcccaacactttgggaggctgaggtgggcagatcacctgaggtcaggagttcgagaccagcctggccaacatggtgaaaccccgtcactactaaaaatacaaaaaataattagccgggcatggtggttcacgcctggagtcccagctacttgggaggctgaggcaggagaatcgcttgaacccaggaggcggaggttgcagtgagccaag

SEQ ID NO: 136879 - DNA, 659 bp, Homo sapiens
  Payload ID: 6803
  Gene Symbol: GTF2H2
  Gene Name: general transcription factor IIH, polypeptide 2, 44kDa
  ENST ID: ENST00000517900
  CDS Start-End: 193-564
gagtccgcgtgtggaagtctgtgaggcgcagaggtggggcaggccgtctggctagctaggcggctgggagcgttttcgtggcggggaacggaggttgaattgccctgcctgggctcatagggaaggaggatgtgaaggagcttgtgaaggcagaggaagattattgaataataaaatacagttttgaaaaaaatggatgaagaacctgaaagaactaagcgatgggaaggaggctatgaaagaacatgggagattcttaaagaagatgaatctggatcacttaaagctacaatagaagacattctattcaaggcaaagagaaaaagagtatttgagcaccatggacaagttcgacttggaatgatgcgccacctttatgtggtagtagatggatcaagaacaatggaagaccaagatttaaagcctaatagactgacgtgtactttaaagttgttggaatactttgtagaggaatattttgatcaaaatcctattagtcagattggaataattgtaactaagagtaaaagagctgaaaaattgactgaactttcaggtgtttgattccagcatgtagtatacattgtatgtgttaaaaagaaatttgcaactgtgaataaaaggacttctttagaagaagcttcatttaaaacatgaaa

SEQ ID NO: 136880 - DNA, 1569 bp, Homo sapiens
  Payload ID: 6803
  Gene Symbol: GTF2H2
  Gene Name: general transcription factor IIH, polypeptide 2, 44kDa
  ENST ID: ENST00000518898
  CDS Start-End: 1-457
ggagattcttaaagaagatgaatctggatcacttaaagctacaatagaagacattctattcaaggcaaagagaaaaagagtatttgagcaccatggacaagttcgacttggaatgatgcgccacctttatgtggtagtagatggatcaagaacaatggaagaccaagatttaaagcctaatagactgacgtgtactttaaagttgttggaatactttgtagaggaatattttgatcaaaatcctattagtcagattggaataattgtaactaagagtaaaagagctgaaaaattgactgaactttcaggaaacccaagaaaacatataacgtctttgaagaaagctgtggatatgacctgccatggagagccatctctttataattccctaagcatagctatgcagactctaaaacggggtttcaccgtgttagccaggatggtctcgatctcctgacctcgtgatgtgcccgcttcagcctcccaaagtgctgggaatacagacacatgcctggacatacaagtcgagaagtactaatcatctttagcagccttacaacttgcgatccatctaatatttatgatctaatcaagaccctaaaggcagctaaaattagagtatctgttattggattgtctgcagaagttcgcgtttgcactgtacttgctcgtgaaactggtggcacgtaccatgttattttagatgaaagccattacaaagagttgctcacacatcatgttagtcctcctcctgctagctcaagttctgaatgctcacttattcgtatgggatttcctcagcacaccattgcttctttatctgaccaggatgcaaaaccctctttcagcatggcgcatttggatggcaatactgagccagggcttacattaggaggctatttctgcccacagtgtcgggcaaagtactgtgagctacctgttgagtgtaaaatctgtggtcttactttggtgtctgctccccacttggcacggtcttaccatcatttgtttcctttggatgcttttcaagaaattcccctagaagaatataatggagaaagattttgttatggatgtcagggggaattgaaagaccaacatgtttatgtttgtgctgtgtgccaaaatgttttctgtgtggactgtgatgtttttgttcatgattctctacactgttgccctggctgtattcataagattccagctccttcaggtgtttgattccagcatgtagtatacattgtatgtgttaaaaagaaatttgcaactgtgaataaaaggacttctttagaagaagcttcatttaaaacatgaaaggataatctgacttaagaaactttttgctaagaaaaggtaatattttattaaattttaaatttgtgttgtcacagaaatacctgaaattcagtagtacttcattcaattaattttgttttctattattttgagttatactgttttcaaagtcattatgcagtatgtataaacttataagaattaaattgatgtgataattttatgtttttataattaaatatagaatctttatgatttatgttaattcattaa

SEQ ID NO: 136881 - DNA, 457 bp, Homo sapiens
  Payload ID: 6803
  Gene Symbol: GTF2H2
  Gene Name: general transcription factor IIH, polypeptide 2, 44kDa
  ENST ID: ENST00000521602
  CDS Start-End: 387-457
ccgcgtgtggaagtctgtgaggcgcagaggtggggcaggccgtctggctagctaggcggctgggagcgttttcgtggcggggaacggaggttgaattgccctgcctgggctcatagggaaggaggatgtgaaggagcttgtgaaggcagaggaaggtaactttcgtctggggagccgcagagtagggagggaagctgcaggccgtctctccctaagtaaaagcgcgacttttagaaatgatggttcagggttcgagtttgtgacccgcttgagaaagtgaccaacctctgagcctgaatcccatacctgaaaaacaaggacagtaatcacccttgccagtttcacatagcttgattattgaataataaaatacagttttgaaaaaaatggatgaagaacctgaaagaactaagcgatgggaaggaggctatgaaagaacatgggagattcttaaaga

SEQ ID NO: 136882 - DNA, 1803 bp, Homo sapiens
  Payload ID: 6803
  Gene Symbol: GTF2H2
  Gene Name: general transcription factor IIH, polypeptide 2, 44kDa
  Uniprot ID: Q13888
  ENST ID: ENST00000619997
  CDS Start-End: 289-1476
gtccgcgtgtggaagtctgtgaggcgcagaggtggggcaggccgtctggctagctaggcggctgggagcgttttcgtggcggggaacggaggttgaattgccctgcctgggctcatagggaaggaggatgtgaaggagcttgtgaaggcagaggaaggctggagtgcagtggcacaaccttggctcgctccagtgtctacctgccaggttcaagtgattctcctgcctcagcctcccgagtagctgggattacagattattgaataataaaatacagttttgaaaaaaatggatgaagaacctgaaagaactaagcgatgggaaggaggctatgaaagaacatgggagattcttaaagaagatgaatctggatcacttaaagctacaatagaagacattctattcaaggcaaagagaaaaagagtatttgagcaccatggacaagttcgacttggaatgatgcgccacctttatgtggtagtagatggatcaagaacaatggaagaccaagatttaaagcctaatagactgacgtgtactttaaagttgttggaatactttgtagaggaatattttgatcaaaatcctattagtcagattggaataattgtaactaagagtaaaagagctgaaaaattgactgaactttcaggaaacccaagaaaacatataacgtctttgaagaaagctgtggatatgacctgccatggagagccatctctttataattccctaagcatagctatgcagactctaaaacacatgcctggacatacaagtcgagaagtactaatcatctttagcagccttacaacttgcgatccatctaatatttatgatctaatcaagaccctaaaggcagctaaaattagagtatctgttattggattgtctgcagaagttcgcgtttgcactgtacttgctcgtgaaactggtggcacgtaccatgttattttagatgaaagccattacaaagagttgctcacacatcatgttagtcctcctcctgctagctcaagttctgaatgctcacttattcgtatgggatttcctcagcacaccattgcttctttatctgaccaggatgcaaaaccctctttcagcatggcgcatttggatggcaatactgagccagggcttacattaggaggctatttctgcccacagtgtcgggcaaagtactgtgagctacctgttgaatgtaaaatctgtggtcttactttggtgtctgctccccacttggcacggtcttaccatcatttgtttcctttggatgcttttcaagaaattcccctagaagaatataatggagaaagattttgttatggatgtcagggggaattgaaagaccaacatgtttatgtttgtgctgtgtgccaaaatgttttctgtgtggactgtgatgtttttgttcatgattctctacactgttgccctggctgtattcataagattccagctccttcaggtgtttgattccagcatgtagtatacattgtatgtgttaaaaagaaatttgcaactgtgaataaaaggacttctttagaagaagcttcatttaaaacatgaaaggataatctgacttaagaaactttttgctaagaaaaggtaatattttattaaattttaaatttgtgttgtcacagaaatacctgaaattcagtagtacttcattcaattaattttgttttctattattttgagttatactgttttcaaagtcattatgcagtatgtataaacttataagaattaaattgatgtgataattttatgtttttataattaaatatagaatcttta

SEQ ID NO: 136883 - DNA, 1958 bp, Homo sapiens
  Payload ID: 6803
  Gene Symbol: GTF2H2
  Gene Name: general transcription factor IIH, polypeptide 2, 44kDa
  Uniprot ID: Q13888
  ENST ID: ENST00000617228
  CDS Start-End: 196-1383
ggtgagtccgcgtgtggaagtctgtgaggcgcagaggtggggcaggccgtctggctagctaggcggctgggagcgttttcgtggcggggaacggaggttgaattgccctgcctgggctcatagggaaggaggatgtgaaggagcttgtgaaggcagaggaagattattgaataataaaatacagttttgaaaaaaatggatgaagaacctgaaagaactaagcgatgggaaggaggctatgaaagaacatgggagattcttaaagaagatgaatctggatcacttaaagctacaatagaagacattctattcaaggcaaagagaaaaagagtatttgagcaccatggacaagttcgacttggaatgatgcgccacctttatgtggtagtagatggatcaagaacaatggaagaccaagatttaaagcctaatagactgacgtgtactttaaagttgttggaatactttgtagaggaatattttgatcaaaatcctattagtcagattggaataattgtaactaagagtaaaagagctgaaaaattgactgaactttcaggaaacccaagaaaacatataacgtctttgaagaaagctgtggatatgacctgccatggagagccatctctttataattccctaagcatagctatgcagactctaaaacacatgcctggacatacaagtcgagaagtactaatcatctttagcagccttacaacttgcgatccatctaatatttatgatctaatcaagaccctaaaggcagctaaaattagagtatctgttattggattgtctgcagaagttcgcgtttgcactgtacttgctcgtgaaactggtggcacgtaccatgttattttagatgaaagccattacaaagagttgctcacacatcatgttagtcctcctcctgctagctcaagttctgaatgctcacttattcgtatgggatttcctcagcacaccattgcttctttatctgaccaggatgcaaaaccctctttcagcatggcgcatttggatggcaatactgagccagggcttacattaggaggctatttctgcccacagtgtcgggcaaagtactgtgagctacctgttgaatgtaaaatctgtggtcttactttggtgtctgctccccacttggcacggtcttaccatcatttgtttcctttggatgcttttcaagaaattcccctagaagaatataatggagaaagattttgttatggatgtcagggggaattgaaagaccaacatgtttatgtttgtgctgtgtgccaaaatgttttctgtgtggactgtgatgtttttgttcatgattctctacactgttgccctggctgtattcataagattccagctccttcaggtgtttgattccagcatgtagtatacattgtatgtgttaaaaagaaatttgcaactgtgaataaaaggacttctttagaagaagcttcatttaaaacatgaaaggataatctgacttaagaaactttttgctaagaaaaggtaatattttattaaattttaaatttgtgttgtcacagaaatacctgaaattcagtagtacttcattcaattaattttgttttctattattttgagttatactgttttcaaagtcattatgcagtatgtataaacttataagaattaaattgatgtgataattttatgtttttataattaaatatagaatctttatgatttatgttaattcattaatttagtgtaagaagaaagttaagtctgaatgtaaattcagtgtaagatgaaaatttatcaatacttatgaaattaggctgggcgctgtggctcacacctgtaatcccaacactttgggaggctgaggtgggcagatcacttgaggtcaggagttcgagaccagcctggccaacatggtgaaaccccgtcactactaaaaatacaaaaaataattagccgggcatggt

SEQ ID NO: 136884 - DNA, 486 bp, Homo sapiens
  Payload ID: 6803
  Gene Symbol: GTF2H2
  Gene Name: general transcription factor IIH, polypeptide 2, 44kDa
  ENST ID: ENST00000615242
  CDS Start-End: 475-486
aagtctgtgaggcgcagaggtggggcaggccgtctggctagctaggcggctgggagcgttttcgtggcggggaacggaggttgaattgccctgcctgggctcatagggaaggaggatgtgaaggagcttgtgaaggcagaggaaggtaactttcgtctggggagccgcagagtagggagggaagctgcaggccgtctctccctaagtaaaagcgcgacttttagaaatgatggttcagggttcgagtttgtgacccgcttgagaaagtgaccaacctctgagcctgaatcccatacctgaaaaacaaggacagtaatcacccttgccagtttcacatagcttggctggagtgcagtggcacaaccttggctcgctccagtgtctacctgccaggttcaagtgattctcctgcctcagcctcccgagtagctgggattacagattattgaataataaaatacagttttgaaaaaaatggatgaagaa

SEQ ID NO: 136885 - DNA, 1954 bp, Homo sapiens
  Payload ID: 6803
  Gene Symbol: GTF2H2
  Gene Name: general transcription factor IIH, polypeptide 2, 44kDa
  ENST ID: ENST00000616846
  CDS Start-End: 142-297
ctagctaggcggctgggagcgttttcgtggcggggaacggaggttgaattgccctgcctgggctcatagggaaggaggatgtgaaggagcttgtgaaggcagaggaagattattgaataataaaatacagttttgaaaaaaatggatgaagaacctgaaagaactaagcgatgggaaggaggctatgaaagaacatgggagattcttaaagaagatgaatctggatcacttaaagctacaatagaagacattctattcaaggcaaagagaaaaagatgcgccacctttatgtggtagtagatggatcaagaacaatggaagaccaagatttaaagcctaatagactgacgtgtactttaaagttgttggaatactttgtagaggaatattttgatcaaaatcctattagtcagattggaataattgtaactaagagtaaaagagctgaaaaattgactgaactttcaggaaacccaagaaaacatataacgtctttgaagaaagctgtggatatgacctgccatggagagccatctctttataattccctaagcatagctatgcagactctaaaacacatgcctggacatacaagtcgagaagtactaatcatctttagcagccttacaacttgcgatccatctaatatttatgatctaatcaagaccctaaaggcagctaaaattagagtatctgttattggattgtctgcagaagttcgcgtttgcactgtacttgctcgtgaaactggtggcacgtaccatgttattttagatgaaagccattacaaagagttgctcacacatcatgttagtcctcctcctgctagctcaagttctgaatgctcacttattcgtatgggatttcctcagcacaccattgcttctttatctgaccaggatgcaaaaccctctttcagcatggcgcatttggatggcaatactgagccagggcttacattaggaggctatttctgcccacagtgtcgggcaaagtactgtgagctacctgttgaatgtaaaatctgtggtcttactttggtgtctgctccccacttggcacggtcttaccatcatttgtttcctttggatgcttttcaagaaattcccctagaagaatataatggagaaagattttgttatggatgtcagggggaattgaaagaccaacatgtttatgtttgtgctgtgtgccaaaatgttttctgtgtggactgtgatgtttttgttcatgattctctacactgttgccctggctgtattcataagattccagctccttcaggtgtttgattccagcatgtagtatacattgtatgtgttaaaaagaaatttgcaactgtgaataaaaggacttctttagaagaagcttcatttaaaacatgaaaggataatctgacttaagaaactttttgctaagaaaaggtaatattttattaaattttaaatttgtgttgtcacagaaatacctgaaattcagtagtacttcattcaattaattttgttttctattattttgagttatactgttttcaaagtcattatgcagtatgtataaacttataagaattaaattgatgtgataattttatgtttttataattaaatatagaatctttatgatttatgttaattcattaatttagtgtaagaagaaagttaagtctgaatgtaaattcagtgtaagatgaaaatttatcaatacttatgaaattaggctgggcgctgtggctcacacctgtaatcccaacactttgggaggctgaggtgggcagatcacttgaggtcaggagttcgagaccagcctggccaacatggtgaaaccccgtcactactaaaaatacaaaaaataattagccgggcatggtggttcacgcctggagtcccagctacttgggaggctgaggcaggagaatcgcttgaacccaggaggcggaggttgcagggagccgaga

SEQ ID NO: 136886 - DNA, 2077 bp, Homo sapiens
  Payload ID: 6803
  Gene Symbol: GTF2H2
  Gene Name: general transcription factor IIH, polypeptide 2, 44kDa
  Uniprot ID: Q13888
  ENST ID: ENST00000612581
  CDS Start-End: 289-1476
gtccgcgtgtggaagtctgtgaggcgcagaggtggggcaggccgtctggctagctaggcggctgggagcgttttcgtggcggggaacggaggttgaattgccctgcctgggctcatagggaaggaggatgtgaaggagcttgtgaaggcagaggaaggctggagtgcagtggcacaaccttggctcgctccagtgtctacctgccaggttcaagtgattctcctgcctcagcctcccgagtagctgggattacagattattgaataataaaatacagttttgaaaaaaatggatgaagaacctgaaagaactaagcgatgggaaggaggctatgaaagaacatgggagattcttaaagaagatgaatctggatcacttaaagctacaatagaagacattctattcaaggcaaagagaaaaagagtatttgagcaccatggacaagttcgacttggaatgatgcgccacctttatgtggtagtagatggatcaagaacaatggaagaccaagatttaaagcctaatagactgacgtgtactttaaagttgttggaatactttgtagaggaatattttgatcaaaatcctattagtcagattggaataattgtaactaagagtaaaagagctgaaaaattgactgaactttcaggaaacccaagaaaacatataacgtctttgaagaaagctgtggatatgacctgccatggagagccatctctttataattccctaagcatagctatgcagactctaaaacacatgcctggacatacaagtcgagaagtactaatcatctttagcagccttacaacttgcgatccatctaatatttatgatctaatcaagaccctaaaggcagctaaaattagagtatctgttattggattgtctgcagaagttcgcgtttgcactgtacttgctcgtgaaactggtggcacgtaccatgttattttagatgaaagccattacaaagagttgctcacacatcatgttagtcctcctcctgctagctcaagttctgaatgctcacttattcgtatgggatttcctcagcacaccattgcttctttatctgaccaggatgcaaaaccctctttcagcatggcgcatttggatggcaatactgagccagggcttacattaggaggctatttctgcccacagtgtcgggcaaagtactgtgagctacctgttgaatgtaaaatctgtggtcttactttggtgtctgctccccacttggcacggtcttaccatcatttgtttcctttggatgcttttcaagaaattcccctagaagaatataatggagaaagattttgttatggatgtcagggggaattgaaagaccaacatgtttatgtttgtgctgtgtgccaaaatgttttctgtgtggactgtgatgtttttgttcatgattctctacactgttgccctggctgtattcataagattccagctccttcaggtgtttgattccagcatgtagtatacattgtatgtgttaaaaagaaatttgcaactgtgaataaaaggacttctttagaagaagcttcatttaaaacatgaaaggataatctgacttaagaaactttttgctaagaaaaggtaatattttattaaattttaaatttgtgttgtcacagaaatacctgaaattcagtagtacttcattcaattaattttgttttctattattttgagttatactgttttcaaagtcattatgcagtatgtataaacttataagaattaaattgatgtgataattttatgtttttataattaaatatagaatctttatgatttatgttaattcattaatttagtgtaagaagaaagttaagtctgaatgtaaattcagtgtaagatgaaaatttatcaatacttatgaaattaggctgggcgctgtggctcacacctgtaatcccaacactttgggaggctgaggtgggcagatcacttgaggtcaggagttcgagaccagcctggccaacatggtgaaaccccgtcactactaaaaatacaaaaaataattagccgggcatggtggttcacgcctggagtcccagctact

SEQ ID NO: 136887 - DNA, 395 bp, Homo sapiens
  Payload ID: 6803
  Gene Symbol: GTF2H2
  Gene Name: general transcription factor IIH, polypeptide 2, 44kDa
  ENST ID: ENST00000621171
  CDS Start-End: 387-395
ccgcgtgtggaagtctgtgaggcgcagaggtggggcaggccgtctggctagctaggcggctgggagcgttttcgtggcggggaacggaggttgaattgccctgcctgggctcatagggaaggaggatgtgaaggagcttgtgaaggcagaggaaggtaactttcgtctggggagccgcagagtagggagggaagctgcaggccgtctctccctaagtaaaagcgcgacttttagaaatgatggttcagggttcgagtttgtgacccgcttgagaaagtgaccaacctctgagcctgaatcccatacctgaaaaacaaggacagtaatcacccttgccagtttcacatagcttgattattgaataataaaatacagttttgaaaaaaatggatgaa

SEQ ID NO: 136888 - DNA, 612 bp, Homo sapiens
  Payload ID: 6803
  Gene Symbol: GTF2H2
  Gene Name: general transcription factor IIH, polypeptide 2, 44kDa
  ENST ID: ENST00000621491
  CDS Start-End: 193-564
gagtccgcgtgtggaagtctgtgaggcgcagaggtggggcaggccgtctggctagctaggcggctgggagcgttttcgtggcggggaacggaggttgaattgccctgcctgggctcatagggaaggaggatgtgaaggagcttgtgaaggcagaggaagattattgaataataaaatacagttttgaaaaaaatggatgaagaacctgaaagaactaagcgatgggaaggaggctatgaaagaacatgggagattcttaaagaagatgaatctggatcacttaaagctacaatagaagacattctattcaaggcaaagagaaaaagagtatttgagcaccatggacaagttcgacttggaatgatgcgccacctttatgtggtagtagatggatcaagaacaatggaagaccaagatttaaagcctaatagactgacgtgtactttaaagttgttggaatactttgtagaggaatattttgatcaaaatcctattagtcagattggaataattgtaactaagagtaaaagagctgaaaaattgactgaactttcaggtgtttgattccagcatgtagtatacattgtatgtgttaaaaagaaatttgcaact

SEQ ID NO: 136889 - DNA, 457 bp, Homo sapiens; identical to SEQ ID NO: 136881
  Payload ID: 6803
  Gene Symbol: GTF2H2
  Gene Name: general transcription factor IIH, polypeptide 2, 44kDa
  ENST ID: ENST00000626970
  CDS Start-End: 387-457

SEQ ID NO: 136890 - DNA, 4340 bp, Homo sapiens
  Payload ID: 6803
  Gene Symbol: GTF2H2
  Gene Name: general transcription factor IIH, polypeptide 2, 44kDa
  Uniprot ID: Q13888
  ENST ID: ENST00000628423
  CDS Start-End: 142-1329
ctagctaggcggctgggagcgttttcgtggcggggaacggaggttgaattgccctgcctgggctcatagggaaggaggatgtgaaggagcttgtgaaggcagaggaagattattgaataataaaatacagttttgaaaaaaatggatgaagaacctgaaagaactaagcgatgggaaggaggctatgaaagaacatgggagattcttaaagaagatgaatctggatcacttaaagctacaatagaagacattctattcaaggcaaagagaaaaagagtatttgagcaccatggacaagttcgacttggaatgatgcgccacctttatgtggtagtagatggatcaagaacaatggaagaccaagatttaaagcctaatagactgacgtgtactttaaagttgttggaatactttgtagaggaatattttgatcaaaatcctattagtcagattggaataattgtaactaagagtaaaagagctgaaaaattgactgaactttcaggaaacccaagaaaacatataacgtctttgaagaaagctgtggatatgacctgccatggagagccatctctttataattccctaagcatagctatgcagactctaaaacacatgcctggacatacaagtcgagaagtactaatcatctttagcagccttacaacttgcgatccatctaatatttatgatctaatcaagaccctaaaggcagctaaaattagagtatctgttattggattgtctgcagaagttcgcgtttgcactgtacttgctcgtgaaactggtggcacgtaccatgttattttagatgaaagccattacaaagagttgctcacacatcatgttagtcctcctcctgctagctcaagttctgaatgctcacttattcgtatgggatttcctcagcacaccattgcttctttatctgaccaggatgcaaaaccctctttcagcatggcgcatttggatggcaatactgagccagggcttacattaggaggctatttctgcccacagtgtcgggcaaagtactgtgagctacctgttgaatgtaaaatctgtggtcttactttggtgtctgctccccacttggcacggtcttaccatcatttgtttcctttggatgcttttcaagaaattcccctagaagaatataatggagaaagattttgttatggatgtcagggggaattgaaagaccaacatgtttatgtttgtgctgtgtgccaaaatgttttctgtgtggactgtgatgtttttgttcatgattctctacactgttgccctggctgtattcataagattccagctccttcaggtgtttgattccagcatgtagtatacattgtatgtgttaaaaagaaatttgcaactgtgaataaaaggacttctttagaagaagcttcatttaaaacatgaaaggataatctgacttaagaaactttttgctaagaaaaggtaatattttattaaattttaaatttgtgttgtcacagaaatacctgaaattcagtagtacttcattcaattaattttgttttctattattttgagttatactgttttcaaagtcattatgcagtatgtataaacttataagaattaaattgatgtgataattttatgtttttataattaaatatagaatctttatgatttatgttaattcattaatttagtgtaagaagaaagttaagtctgaatgtaaattcagtgtaagatgaaaatttatcaatacttatgaaattaggctgggcgctgtggctcacacctgtaatcccaacactttgggaggctgaggtgggcagatcacttgaggtcaggagttcgagaccagcctggccaacatggtgaaaccccgtcactactaaaaatacaaaaaataattagccgggcatggtggttcacgcctggagtcccagctacttgggaggctgaggcaggagaatcgcttgaacccaggaggcggaggttgcagggagccgagattgtgccactgcactccaccctagagtgagactccctctcaaaaaaaaaaaaagttatgaaattaatacatatgaaatgatgtactgctacatccaccagagaggtctttttaggtttaaccaaacatctggaatatgtttatcaagttagtacatctgaaattatttgtggctatgaccaacagaagtcactttacattaaacattcaaactcacaagactgccatggccatacttggtacccgcttactcagaaggatattaaacagaaacaacagcctgccagcacagcatcaagcagtcctcattagcagtggaagtccttgtagcagtccactagtacaatttgggtgcaaggagataagatcctccacaggcatcaaggaaccaatatctcttaacaattccataaacacagcttccaggtatccacaagggatgtgtcaatttcaagagtcactacactcaggaaagcctaaagcttgaagactccatttatttatagtgcatcccaatccagatacgtaacaattaacgagttatttttactataagcaaagttgcctaaaatcatagttgatactaaccatggttaacagagctctaaagtttgacagaaagtgagattcaaatcctttcactctcatatgctaaaccttttgccttactctgggtcatcagagaaatttaggtgagaatgtatgatgaagtctgtgttttagattcaatgcagatatatcattgtgggcagaactctttctggttatatccagttaagagtaaatcaggctttcagccgggcgcggtggctcacgcctgtaatcctagcactttgggaggccgaggcgggcagatcacgaggtcaggagatcgagaccatcctggctaacacggtgaaaccccgtctctactaaacatacaaaaaattagctgggcctggtggcgggcgcctgtagtcccagctattcggaaggctggggcaggagaatggtgtgaacccaggaggcggagcttgcagtgaaccgagatcgctccactgcactccagcctgggcgacagagctagactctgtctcaagaaaaaaaaaaaaaaaaagagtaaatcaggctttcatagcaaaggtatgtctattttatgtatataaacttcaggtactctaacttgagtttcactatgaaatttgtgattttttttttttttttttgagatggagtcttgctccatcgcccaggctggagtgcagtggcctgctgttggctcactgcaacctccgcctcccaggctcaagccattctcctgtctcagcctcctgagtagctgggactacaggcgcctgccaccacgcctggctaatttttgcatttttggtagagacggggtttcaccttgttgatcagtctgatctccaactcctgacctcaggtcatccacccacctccgccaccgtgcccggccgaaatttgtgattttataactaagaatttttagttaagaacattatcagtaaagacaacgtaatcccaccctggagagtttattgggagcccaggaatattcatttttaatacacacacacacacacacacacacacacacacacacacactgatcagagtaacgggagtttctctcaggagtcatactccatgagcctggacccagtggttctttatgtggaaacaaatttcacctataggtaacctggtaactgctattttcttctgtgtgctctgtcaacaaaggtatcagtggcttgcaggagatgcctttaatactcagagcattctatctccccctatctggtttagaaggaaggccttcattagttaccttttgagaagttactagaactctctattagagacttaccctcctgacctgataaaaagggatacccatgtctctattaacagctttatctctttctacagttttgggtatttgataaggttaaggcaaaattttagttatgcttaaggaggagttcttttttcacaattacagagaaaattttggtttgttgaagattgcagaaacagcaatggtaatgtaagacagttttggcctttaatttttttcttgaaactctacagtatactacaatagtgaaggaaactattatcatgagagatccttctgaataggatgtctttctgagttccactattcagttacaaaactccttaatgcttaaaattcattatgaaaattagatttattttaaatactttcaagtgtatacatttttatttcataatttttattgtcttttaactaaagcatttagttcatttatatttactgtgtaccttttatatttaataaatatatttacttattaaaagatta

SEQ ID NO: 136891 - DNA, 659 bp, Homo sapiens; identical to SEQ ID NO: 136879
  Payload ID: 6803
  Gene Symbol: GTF2H2
  Gene Name: general transcription factor IIH, polypeptide 2, 44kDa
  ENST ID: ENST00000630141
  CDS Start-End: 193-564

SEQ ID NO: 136892 - DNA, 1569 bp, Homo sapiens
  Payload ID: 6803
  Gene Symbol: GTF2H2
  Gene Name: general transcription factor IIH, polypeptide 2, 44kDa
  ENST ID: ENST00000630101
  CDS Start-End: 1-457
ggagattcttaaagaagatgaatctggatcacttaaagctacaatagaagacattctattcaaggcaaagagaaaaagagtatttgagcaccatggacaagttcgacttggaatgatgcgccacctttatgtggtagtagatggatcaagaacaatggaagaccaagatttaaagcctaatagactgacgtgtactttaaagttgttggaatactttgtagaggaatattttgatcaaaatcctattagtcagattggaataattgtaactaagagtaaaagagctgaaaaattgactgaactttcaggaaacccaagaaaacatataacgtctttgaagaaagctgtggatatgacctgccatggagagccatctctttataattccctaagcatagctatgcagactctaaaacggggtttcaccgtgttagccaggatggtctcgatctcctgacctcgtgatgtgcccgcttcagcctcccaaagtgctgggaatacagacacatgcctggacatacaagtcgagaagtactaatcatctttagcagccttacaacttgcgatccatctaatatttatgatctaatcaagaccctaaaggcagctaaaattagagtatctgttattggattgtctgcagaagttcgcgtttgcactgtacttgctcgtgaaactggtggcacgtaccatgttattttagatgaaagccattacaaagagttgctcacacatcatgttagtcctcctcctgctagctcaagttctgaatgctcacttattcgtatgggatttcctcagcacaccattgcttctttatctgaccaggatgcaaaaccctctttcagcatggcgcatttggatggcaatactgagccagggcttacattaggaggctatttctgcccacagtgtcgggcaaagtactgtgagctacctgttgaatgtaaaatctgtggtcttactttggtgtctgctccccacttggcacggtcttaccatcatttgtttcctttggatgcttttcaagaaattcccctagaagaatataatggagaaagattttgttatggatgtcagggggaattgaaagaccaacatgtttatgtttgtgctgtgtgccaaaatgttttctgtgtggactgtgatgtttttgttcatgattctctacactgttgccctggctgtattcataagattccagctccttcaggtgtttgattccagcatgtagtatacattgtatgtgttaaaaagaaatttgcaactgtgaataaaaggacttctttagaagaagcttcatttaaaacatgaaaggataatctgacttaagaaactttttgctaagaaaaggtaatattttattaaattttaaatttgtgttgtcacagaaatacctgaaattcagtagtacttcattcaattaattttgttttctattattttgagttatactgttttcaaagtcattatgcagtatgtataaacttataagaattaaattgatgtgataattttatgtttttataattaaatatagaatctttatgatttatgttaattcattaa

SEQ ID NO: 136893 - DNA, 1472 bp, Homo sapiens
  Payload ID: 6804
  Gene Symbol: GTF2H3
  Gene Name: general transcription factor IIH, polypeptide 3, 34kDa
  Uniprot ID: Q13889
  ENST ID: ENST00000228955
  CDS Start-End: 75-878
acttgctctgcgctgaggtgctgggacagccatggtttcagacgttcactttatccaaatgcatagatgccgtgatggtgctgggaaattcgcatttattcatgaatcgttccaacaaacttgctgtgatagcaagtcacattcaagaaagccgattcttatatcctggaaagaatggcagacttggagacttcttcggagaccctggcaaccctcctgaatttaatccctctgggagtaaagatggaaaatacgaacttttaacctcagcaaatgaagttattgttgaagagattaaagatctaatgaccaaaagtgacataaagggtcaacatacagaaactttgctggcaggatccctggccaaagccctttgctacattcatagaatgaacaaggaagttaaagacaatcaggaaatgaaatcaaggatattggtgattaaggctgcagaagacagtgcgttgcagtatatgaacttcatgaatgtcatctttgcagcacagaaacagaatattttgattgatgcctgtgttttagactccgactcagggctcctccaacaggcttgtgacatcacgggaggactgtacctgaaggtgcctcagatgccttctcttctgcagtatttgctgtgggtgtttcttcccgatcaagatcagagatctcagttaatcctcccacccccagttcatgttgactacagggctgcttgcttctgtcatcgaaatctcattgaaattggttatgtctgttctgtgtgtttgtcaatattctgcaatttcagccccatttgtactacgtgcgagacagcctttaaaatttctctgcctccagtgctgaaagccaagaaaaagaaactgaaagtgtctgcctgaggataaaatattttccccatcttttagagctgttaatagaaattatatagcagattctttgttgggaagactgaaaaaaataaagataggtataggataatttttaatatggtgaccttacagaaaatatttcccaaacatccttttcatcctgtgcttctggaggactgatttgtttgagggaatcattctatgcattatatcctaaaatattctatgactggtttctgtccatgtttgtggctttcatttttttaatgggatgactattagtcaaagtcagcttgtcatgactcatcataggctttctaacctactccctgaatccgggtcctcattgtgaaatgcatgccatacgaaatttgaacgtagctttggaaaaagggactatttgtggagtaatggcattaatcaacatagaacatcttatttgaatcaacagttaacttcagtagtcatgtgaataaaattcttattgtctaaattgagacagcctcagatatttgcagatatttactttttgtctgatatcagtacatatttggacaaagtcatctaaataatagtttgtcaccaaataactacaaaatctca

SEQ ID NO: 136894 - DNA, 582 bp, Homo sapiens
  Payload ID: 6804
  Gene Symbol: GTF2H3
  Gene Name: general transcription factor IIH, polypeptide 3, 34kDa
  ENST ID: ENST00000543154
  CDS Start-End: 1-582
aaagatggaaaatacgaacttttaacctcagcaaatgaagttattgttgaagagattaaagatctaatgaccaaaagtgacataaagggtcaacatacagaaactttgctggcaggatccctggccaaagccctttgctacattcatagaatgaacaaggaagttaaagacaatcaggaaatgaaatcaaggatattggtgattaaggctgcagaagacagtgcgttgcagtatatgaacttcatgaatgtcatctttgcagcacagaaacaggcttgtgacatcacgggaggactgtacctgaaggtgcctcagatgccttctcttctgcagtatttgctgtgggtgtttcttcccgatcaagatcagagatctcagttaatcctcccacccccagttcatgttgactacagggctgcttgcttctgtcatcgaaatctcattgaaattggttatgtctgttctgtgtgtttgtcaatattctgcaatttcagccccatttgtactacgtgcgagacagcctttaaaatttctctgcctccagtgctgaaagccaagaaaaagaaactgaaagtgtctgcc

SEQ ID NO: 136895 - DNA, 552 bp, Homo sapiens
  Payload ID: 6804
  Gene Symbol: GTF2H3
  Gene Name: general transcription factor IIH, polypeptide 3, 34kDa
  ENST ID: ENST00000542279
  CDS Start-End: 33-236
cacttgctctgcgctgaggtgctgggacagccatggtttcagacgaagatgaattgaatcttctggttattgtagttgatgccaacccaatttggtggggaaagcaagcattaaaggaatctcagttcactttatccaaatgcatagatgccgtgatggtgctgggaaattcgcatttattcatgaatcgttccaacaaacttgctgtgatagcaagtcacattcaagaaaggtgacataaagggtcaacatacagaaactttgctggcaggatccctggccaaagccctttgctacattcatagaatgaacaaggaagttaaagacaatcaggaaatgaaatcaaggatattggtgattaaggctgcagaagacagtgcgttgcagtatatgaacttcatgaatgtcatctttgcagcacagaaacagaatattttgattgatgcctgtgttttagactccgactcagggctcctccaacaggcttgtgacatcacgggaggactgtacctgaaggtgcctcagatgccttctcttctgcagtatttgctg

SEQ ID NO: 136896 - DNA, 907 bp, Homo sapiens
  Payload ID: 6804
  Gene Symbol: GTF2H3
  Gene Name: general transcription factor IIH, polypeptide 3, 34kDa
  ENST ID: ENST00000543415
  CDS Start-End: 112-714
gaagatgaattgaatcttctggttattgtagttgatgccaacccaatttggtggggaaagcaagcattaaaggaatctcagttcactttatccaaatgcatagatgccgtgatggtgctgggaaattcgcatttattcatgaatcgttccaacaaacttgctgtgatagcaagtcacattcaagaaagccgattcttatatcctggaaagaatggcagacttggagacttcttcggagaccctggcaaccctcctgaatttaatccctctgggagtaaagatggaaaatacgaacttttaacctcagcaaatgaagttattgttgaagagattaaagatctaatgaccaaaagtgacataaagggtcaacatacagaaactttgctggcaggatccctggccaaagccctttgctacattcatagaatgaacaaggaagttaaagacaatcaggaaatgaaatcaaggatattggtgattaaggctgcagaagacagtgcgttgcagtatatgaacttcatgaatgtcatctttgcagcacagaaacagaatattttgattgatgcctgtgttttagactccgactcagggctcctccaacaggcccaaggcattgctcatgagaacctcattcctctggaaaccctagtgggtgtttcttcccgatcaagatcagagatctcagttaatcctcccacccccagttcatgttgactacagggctgcttgcttctgtcatcgaaatctcattgaaattggttatgtctgttctgtgtgtttgtcaatattctgcaatttcagccccatttgtactacgtgcgagacagcctttaaaatttctctgcctccagtgctgaaagccaagaaaaagaaactgaaagtgtctgcctgaggataaaatattttc

SEQ ID NO: 136897 - DNA, 790 bp, Homo sapiens
  Payload ID: 6804
  Gene Symbol: GTF2H3
  Gene Name: general transcription factor IIH, polypeptide 3, 34kDa
  ENST ID: ENST00000536375
  CDS Start-End: 16-790
ggtgctgggacagccatggtttcagacgaagatgaattgaatcttctggttattgtagttgatgccaacccaatttggtggggaaagcaagcattaaaggaatctcagttcactttatccaaatgcatagatgccgtgatggtgctgggaaattcgcatttattcatgaatcgttccaacaaacttgctgtgatagcaagtcacattcaagaaagccgattcttatatcctggaaagaatggcagacttggagacttcttcggagaccctggcaaccctcctgaatttaatccctctgggagtaaagatggaaaatacgaacttttaacctcagcaaatgaagttattgttgaagagattaaagatctaatgaccaaaagtgacataaagggtcaacatacagaaactttgctggcaggatccctggccaaagccctttgctacattcatagaatgaacaaggaagttaaagacaatcaggaaatgaaatcaaggatattggcttgtgacatcacgggaggactgtacctgaaggtgcctcagatgccttctcttctgcagtatttgctgtgggtgtttcttcccgatcaagatcagagatctcagttaatcctcccacccccagttcatgttgactacagggctgcttgcttctgtcatcgaaatctcattgaaattggttatgtctgttctgtgtgtttgtcaatattctgcaatttcagccccatttgtactacgtgcgagacagcctttaaaatttctctgcctccagtgctgaaagccaagaaaa

SEQ ID NO: 136898 - DNA, 555 bp, Homo sapiens
  Payload ID: 6804
  Gene Symbol: GTF2H3
  Gene Name: general transcription factor IIH, polypeptide 3, 34kDa
  ENST ID: ENST00000538533
  CDS Start-End: 111-555
aagatgaattgaatcttctggttattgtagttgatgccaacccaatttggtggggaaagcaagcattaaaggaatctcagttcactttatccaaatgcatagatgccgtgatggtgctgggaaattcgcatttattcatgaatcgttccaacaaacttgctgtgatagcaagtcacattcaagaaagccgattcttatatcctggaaagaatggcagacttggagacttcttcggagaccctggcaaccctcctgaatttaatccctctgggagtaaagatggaaaatacgaacttttaacctcagcaaatgaagttattgttgaagagattaaagatctaatgaccaaaagtgacataaagggtcaacatacagaaactttgctggcaggatccctggccaaagccctttgctacattcatagaatgaacaaggaagttaaagacaatcaggaaatgaaatcaaggatattggcccaaggcattgctcatgagaacctcattcctctggaaaccctagtgggtgtttcttcccgatcaagatcagagatctcag

SEQ ID NO: 136899 - DNA, 3329 bp, Homo sapiens
  Payload ID: 6804
  Gene Symbol: GTF2H3
  Gene Name: general transcription factor IIH, polypeptide 3, 34kDa
  Uniprot ID: Q13889
  ENST ID: ENST00000543341
  CDS Start-End: 32-958
acttgctctgcgctgaggtgctgggacagccatggtttcagacgaagatgaattgaatcttctggttattgtagttgatgccaacccaatttggtggggaaagcaagcattaaaggaatctcagttcactttatccaaatgcatagatgccgtgatggtgctgggaaattcgcatttattcatgaatcgttccaacaaacttgctgtgatagcaagtcacattcaagaaagccgattcttatatcctggaaagaatggcagacttggagacttcttcggagaccctggcaaccctcctgaatttaatccctctgggagtaaagatggaaaatacgaacttttaacctcagcaaatgaagttattgttgaagagattaaagatctaatgaccaaaagtgacataaagggtcaacatacagaaactttgctggcaggatccctggccaaagccctttgctacattcatagaatgaacaaggaagttaaagacaatcaggaaatgaaatcaaggatattggtgattaaggctgcagaagacagtgcgttgcagtatatgaacttcatgaatgtcatctttgcagcacagaaacagaatattttgattgatgcctgtgttttagactccgactcagggctcctccaacaggcttgtgacatcacgggaggactgtacctgaaggtgcctcagatgccttctcttctgcagtatttgctgtgggtgtttcttcccgatcaagatcagagatctcagttaatcctcccacccccagttcatgttgactacagggctgcttgcttctgtcatcgaaatctcattgaaattggttatgtctgttctgtgtgtttgtcaatattctgcaatttcagccccatttgtactacgtgcgagacagcctttaaaatttctctgcctccagtgctgaaagccaagaaaaagaaactgaaagtgtctgcctgaggataaaatattttccccatcttttagagctgttaatagaaattatatagcagattctttgttgggaagactgaaaaaaataaagataggtataggataatttttaatatggtgaccttacagaaaatatttcccaaacatccttttcatcctgtgcttctggaggactgatttgtttgagggaatcattctatgcattatatcctaaaatattctatgactggtttctgtccatgtttgtggctttcatttttttaatgggatgactattagtcaaagtcagcttgtcatgactcatcataggctttctaacctactccctgaatccgggtcctcattgtgaaatgcatgccatacgaaatttgaacgtagctttggaaaaagggactatttgtggagtaatggcattaatcaacatagaacatcttatttgaatcaacagttaacttcagtagtcatgtgaataaaattcttattgtctaaattgagacagcctcagatatttgcagatatttactttttgtctgatatcagtacatatttggacaaagtcatctaaataatagtttgtcaccaaataactacaaaatctcattttaaatgagtaaggagaacgtgtacagaagcaaattttcttcaaaatagttgtgggaagagcttatatgtgaaagcttatgactggttttgagggagaacttactggagaaaatggactctatgttaagtatggttttcagatagaattctttccttttttaatgaggaaaaaaaatccacattaatattgaaactgcacctgtaatcccagcactttgggaggctgaggacagaggattgcttgagcccaggagttcgagagcagcctgggcagcaaagtgagaccccatctctactaaaaatttaaatgtatttattaaaactgttctctagaagctttggactgaatcccaaaagtgtttataagttcaaaagcaaaagtatttgtaatttcaacaacaaaaaatgtatttctttatgtaatcttgaaattattaaaagtccttttagcttctagcacatatttgtacaaagagtttaaggaatggtggctggtttggtttgttttttaaaaatgtttactgacgaggccgggcgtggtggctcacccctgcaatcccagcactttgggaggccgaggcaggcagatcacaaggtcaggagttcaagatcagcctggccagtatggtgaaaccctgtctctactaaaaatagaaaaattagccatgcgaagtagcaggtgcctgtagttccagctactcgggaggctgaggcaagagaattgcttgaatccaggaggcagaggttgcagtgagccaagatagcgcctctgtactccagcctgggtgacagagcgagactctgtatcaaaaaaaaaaaagatcgggcacgttggctcacgcctgtaatcccagcactttgggaggccaaggtgggtggatcacgaggtcaggagtgatcaggctgggtttctgttttgttttgttttgtgagacagagtctcgctctgttgcccaggctggggtgcagtggtgcaagctcggctctctgcaagctctgtctcctgggttcacgccattctcctgcctcagcctcccaagtagctgggattactactctactgaacccatgaggcagaaatttgagaccatcctgcccaacgtggtgaaaacatggtgaaaccctgtctctactaaaaatacaaaaattagctgggcgtggtggcaggtgcctgtaatcccagctactcaggagactgaggcaggagaattgcttgaacccaggaggtggaggttgcagtgagccaagatcaagattgcgccattgcactccagcctgggcgacaagaacaaaactctgtctcaaaaaaaaaaaaaaaaaaaaagtctgtactgataaaacccattgtgtacaaaactttgtatgtaaggaagattttaattttctctttatacaagctgagtcatatttaaataatttgatgttggcttagataatttcagatagattttatattctggatttgtgtttttgttaacaaatatacaaagactttggtgatcactttgcaaatatttgttaatccttgagtttgagaacctgtcttttaaaaataatattttgtatactaattaagtgtaatggaaatcacaattttaagtctaggaaataaagtattatatatactttcaaacaagctagcaaggcttttattattacttttttatttgaaatatcttatatatttggttagttctgtttaacttgtttttaactgttgcccttatgagttattttatataaatttttacaataaaataatttgattttcata

SEQ ID NO: 136900 - DNA, 663 bp, Homo sapiens
  Payload ID: 6804
  Gene Symbol: GTF2H3
  Gene Name: general transcription factor IIH, polypeptide 3, 34kDa
  ENST ID: ENST00000538845
  CDS Start-End: 32-663
acttgctctgcgctgaggtgctgggacagccatggtttcagacgaagatgaattgaatcttctggttattgtagttgatgccaacccaatttggtggggaaagcaagcattaaaggaatctcagcaccaccatctcatgcctcagcctcccgagtacttgggactacagttcactttatccaaatgcatagatgccgtgatggtgctgggaaattcgcatttattcatgaatcgttccaacaaacttgctgtgatagcaagtcacattcaagaaagccgattcttatatcctggaaagaatggcagacttggagacttcttcggagaccctggcaaccctcctgaatttaatccctctgggagtaaagatggaaaatacgaacttttaacctcagcaaatgaagttattgttgaagagattaaagatctaatgaccaaaagtgacataaagggtcaacatacagaaactttgctggcaggatccctggccaaagccctttgctacattcatagaatgaacaaggaagttaaagacaatcaggaaatgaaatcaaggatattggtgattaaggctgcagaagacagtgcgttgcagtatatgaacttcatgaatgtcatctttgcagcacagaaacagaatattttgattgatgcctgtgtttt

SEQ ID NO: 136901 - DNA, 562 bp, Homo sapiens
  Payload ID: 6804
  Gene Symbol: GTF2H3
  Gene Name: general transcription factor IIH, polypeptide 3, 34kDa
  ENST ID: ENST00000539994
  CDS Start-End: 32-562
acttgctctgcgctgaggtgctgggacagccatggtttcagacgttgatgccaacccaatttggtggggaaagcaagcattaaaggaatctcagttcactttatccaaatgcatagatgccgtgatggtgctgggaaattcgcatttattcatgaatcgttccaacaaacttgctgtgatagcaagtcacattcaagaaagccgattcttatatcctggaaagaatggcagacttggagacttcttcggagaccctggcaaccctcctgaatttaatccctctgggagtaaagatggaaaatacgaacttttaacctcagcaaatgaagttattgttgaagagattaaagatctaatgaccaaaagtgacataaagggtcaacatacagaaactttgctggcaggatccctggccaaagccctttgctacattcatagaatgaacaaggaagttaaagacaatcaggaaatgaaatcaaggatattggtgattaaggctgcagaagacagtgcgttgcagtatatgaacttcatgaatgtcatctttgcagcacagaaacag

SEQ ID NO: 136902 - DNA, 3252 bp, Homo sapiens
  Payload ID: 6804
  Gene Symbol: GTF2H3
  Gene Name: general transcription factor IIH, polypeptide 3, 34kDa
  ENST ID: ENST00000618160
  CDS Start-End: 396-884
gggggctggcacgagtcacagcacctcgtgcgtcacttggcggcgccggacgttgggctgcgcaggatttgagacgctcccctgaccaccacttgctctgcgctgaggtgctgggacagccatggtttcagacgaagatgaattgaatcttctggttattgtagttgatgccaacccaatttggtggggaaagcaagcattaaaggaatctcagttcactttatccaaatgcatagatgccgtgatggtgctgggaaattcgcatttattcatgaatcgttccaacaaacttgctgtgatagcaagtcacattcaagaaaggtgacataaagggtcaacatacagaaactttgctggcaggatccctggccaaagccctttgctacattcatagaatgaacaaggaagttaaagacaatcaggaaatgaaatcaaggatattggtgattaaggctgcagaagacagtgcgttgcagtatatgaacttcatgaatgtcatctttgcagcacagaaacagaatattttgattgatgcctgtgttttagactccgactcagggctcctccaacaggcttgtgacatcacgggaggactgtacctgaaggtgcctcagatgccttctcttctgcagtatttgctgtgggtgtttcttcccgatcaagatcagagatctcagttaatcctcccacccccagttcatgttgactacagggctgcttgcttctgtcatcgaaatctcattgaaattggttatgtctgttctgtgtgtttgtcaatattctgcaatttcagccccatttgtactacgtgcgagacagcctttaaaatttctctgcctccagtgctgaaagccaagaaaaagaaactgaaagtgtctgcctgaggataaaatattttccccatcttttagagctgttaatagaaattatatagcagattctttgttgggaagactgaaaaaaataaagataggtataggataatttttaatatggtgaccttacagaaaatatttcccaaacatccttttcatcctgtgcttctggaggactgatttgtttgagggaatcattctatgcattatatcctaaaatattctatgactggtttctgtccatgtttgtggctttcatttttttaatgggatgactattagtcaaagtcagcttgtcatgactcatcataggctttctaacctactccctgaatccgggtcctcattgtgaaatgcatgccatacgaaatttgaacgtagctttggaaaaagggactatttgtggagtaatggcattaatcaacatagaacatcttatttgaatcaacagttaacttcagtagtcatgtgaataaaattcttattgtctaaattgagacagcctcagatatttgcagatatttactttttgtctgatatcagtacatatttggacaaagtcatctaaataatagtttgtcaccaaataactacaaaatctcattttaaatgagtaaggagaacgtgtacagaagcaaattttcttcaaaatagttgtgggaagagcttatatgtgaaagcttatgactggttttgagggagaacttactggagaaaatggactctatgttaagtatggttttcagatagaattctttccttttttaatgaggaaaaaaaatccacattaatattgaaactgcacctgtaatcccagcactttgggaggctgaggacagaggattgcttgagcccaggagttcgagagcagcctgggcagcaaagtgagaccccatctctactaaaaatttaaatgtatttattaaaactgttctctagaagctttggactgaatcccaaaagtgtttataagttcaaaagcaaaagtatttgtaatttcaacaacaaaaaatgtatttctttatgtaatcttgaaattattaaaagtccttttagcttctagcacatatttgtacaaagagtttaaggaatggtggctggtttggtttgttttttaaaaatgtttactgacgaggccgggcgtggtggctcacccctgcaatcccagcactttgggaggccgaggcaggcagatcacaaggtcaggagttcaagatcagcctggccagtatggtgaaaccctgtctctactaaaaatagaaaaattagccatgcgaagtagcaggtgcctgtagttccagctactcgggaggctgaggcaagagaattgcttgaatccaggaggcagaggttgcagtgagccaagatagcgcctctgtactccagcctgggtgacagagcgagactctgtatcaaaaaaaaaaaagatcgggcacgttggctcacgcctgtaatcccagcactttgggaggccaaggtgggtggatcacgaggtcaggagtgatcaggctgggtttctgttttgttttgttttgtgagacagagtctcgctctgttgcccaggctggggtgcagtggtgcaagctcggctctctgcaagctctgtctcctgggttcacgccattctcctgcctcagcctcccaagtagctgggattactactctactgaacccatgaggcagaaatttgagaccatcctgcccaacgtggtgaaaacatggtgaaaccctgtctctactaaaaatacaaaaattagctgggcgtggtggcaggtgcctgtaatcccagctactcaggagactgaggcaggagaattgcttgaacccaggaggtggaggttgcagtgagccaagatcaagattgcgccattgcactccagcctgggcgacaagaacaaaactctgtctcaaaaaaaaaaaaaaaaaaaaagtctgtactgataaaacccattgtgtacaaaactttgtatgtaaggaagattttaattttctctttatacaagctgagtcatatttaaataatttgatgttggcttagataatttcagatagattttatattctggatttgtgtttttgttaacaaatatacaaagactttggtgatcactttgcaaatatttgttaatccttgagtttgagaacctgtcttttaaaaataatattttgtatactaattaagtgtaatggaaatcacaattttaagtctaggaaataaagtattatatatactttcaaacaagctagcaaggcttttattattacttttttatttgaaatatcttatatatttggttagttctgtttaacttgtttttaactgttgcccttatgagttattttatataaatttttacaataaaataatttgattttc

SEQ ID NO: 136903 - DNA, 1735 bp, Homo sapiens
  Payload ID: 6805
  Gene Symbol: GTF2H4
  Gene Name: general transcription factor IIH, polypeptide 4, 52kDa
  Uniprot ID: Q92759
  ENST ID: ENST00000259895
  CDS Start-End: 224-1612
attctcatcctcttcacttttccactcctccccttacctcccttctcttctgaattctccattctgggctcttgcctgtgaaatctttctttgctttccccatcttttcctcgcattttttcaccatctttccctcaatctccaggagccaatgcgagactttggctccgattaagcgacggcccgagactcggggtgcgcgaggaggatcgacagagtggtgatggagagcaccccttcaaggggactgaaccgagtacacctacaatgcaggaatctgcaggaattcttagggggcctgagccctggggtattggaccgattgtatgggcaccctgccacatgtctggctgtcttcagggagctcccatccttggctaagaactgggtgatgcggatgctctttctggagcagcctttgccacaggctgctgtagctctgtgggtaaagaaggaattcagcaaggctcaggaggaaagtacagggctgctgagcggcctccggatctggcacacacagctgctcccaggcgggctccagggcctcatcctcaaccccattttccgccagaacctccgcattgcccttctgggtggggggaaggcctggtctgatgacacaagtcagctgggaccagacaagcatgcccgggacgttccctcccttgacaagtacgccgaggagcgatgggaggtggtcttgcacttcatggtgggctcccccagtgcagctgtcagccaggacttggctcagctcctcagccaggctgggctcatgaagagtactgaacctggagagccgccctgcattacttccgctggcttccagttcctgttgctggacaccccggctcagctctggtactttatgttgcagtatttgcagacagcccagagccggggcatggacctggtagagattctctccttcctcttccagctcagcttctctactctgggcaaggattactctgtggaaggtatgagtgattctctgttgaacttcctgcaacatctgcgtgagtttgggcttgttttccagaggaagaggaaatctcggcgttactaccccacacgcctggccatcaatctctcatcaggtgtctctggagctgggggcactgtgcatcagccaggtttcattgtcgtggaaaccaattaccgactgtatgcctacacggagtcggagctgcagattgccctcattgccctcttctctgagatgctctatcggttccccaacatggtggtggcgcaggtgacccgggagagtgtgcagcaggcaatcgccagtggcatcacagcccagcagataatccatttcctaaggacaagagcccacccagtgatgctcaaacagacacctgtgctgccccccaccatcaccgaccagatccggctctgggagctggaaagggacagactccggttcactgagggtgtcctgtataaccagttcctgtcgcaagtggactttgagctgctgctggcccacgcgcgggagctgggcgtgctcgtgttcgagaactcggccaagcggctcatggtggtgaccccggccgggcacagcgacgtcaagcgcttttggaagcggcagaaacatagctcctgagagcgcgggacttggacacggacctcggcgggcgggactgggcggggcggggcatcagaactcaggtgttttttatttacgcgtcagggcttttcttgtttaataaagttatgatagctagca

SEQ ID NO: 136904 - DNA, 1673 bp, Homo sapiens
  Payload ID: 6805
  Gene Symbol: GTF2H4
  Gene Name: general transcription factor IIH, polypeptide 4, 52kDa
  Uniprot ID: Q92759
  ENST ID: ENST00000376316
  CDS Start-End: 162-1550
ctcccttctcttctgaattctccattctgggctcttgcctgtgaaatctttctttgctttccccatcttttcctcgcattttttcaccatctttccctcaatctccaggagccaatgcgagactttggctccgattaagcgacggcccgagactcggggtgatggagagcaccccttcaaggggactgaaccgagtacacctacaatgcaggaatctgcaggaattcttagggggcctgagccctggggtattggaccgattgtatgggcaccctgccacatgtctggctgtcttcagggagctcccatccttggctaagaactgggtgatgcggatgctctttctggagcagcctttgccacaggctgctgtagctctgtgggtaaagaaggaattcagcaaggctcaggaggaaagtacagggctgctgagcggcctccggatctggcacacacagctgctcccaggcgggctccagggcctcatcctcaaccccattttccgccagaacctccgcattgcccttctgggtggggggaaggcctggtctgatgacacaagtcagctgggaccagacaagcatgcccgggacgttccctcccttgacaagtacgccgaggagcgatgggaggtggtcttgcacttcatggtgggctcccccagtgcagctgtcagccaggacttggctcagctcctcagccaggctgggctcatgaagagtactgaacctggagagccgccctgcattacttccgctggcttccagttcctgttgctggacaccccggctcagctctggtactttatgttgcagtatttgcagacagcccagagccggggcatggacctggtagagattctctccttcctcttccagctcagcttctctactctgggcaaggattactctgtggaaggtatgagtgattctctgttgaacttcctgcaacatctgcgtgagtttgggcttgttttccagaggaagaggaaatctcggcgttactaccccacacgcctggccatcaatctctcatcaggtgtctctggagctgggggcactgtgcatcagccaggtttcattgtcgtggaaaccaattaccgactgtatgcctacacggagtcggagctgcagattgccctcattgccctcttctctgagatgctctatcggttccccaacatggtggtggcgcaggtgacccgggagagtgtgcagcaggcaatcgccagtggcatcacagcccagcagataatccatttcctaaggacaagagcccacccagtgatgctcaaacagacacctgtgctgccccccaccatcaccgaccagatccggctctgggagctggaaagggacagactccggttcactgagggtgtcctgtataaccagttcctgtcgcaagtggactttgagctgctgctggcccacgcgcgggagctgggcgtgctcgtgttcgagaactcggccaagcggctcatggtggtgaccccggccgggcacagcgacgtcaagcgcttttggaagcggcagaaacatagctcctgagagcgcgggacttggacacggacctcggcgggcgggactgggcggggcggggcatcagaactcaggtgttttttatttacgcgtcagggcttttcttgtttaataaagttatgatagctagca

SEQ ID NO: 136905 - DNA, 1735 bp, Homo sapiens; identical to SEQ ID NO: 136903
  Payload ID: 6805
  Gene Symbol: GTF2H4
  Gene Name: general transcription factor IIH, polypeptide 4, 52kDa
  Uniprot ID: Q92759
  ENST ID: ENST00000376326
  CDS Start-End: 224-1612

SEQ ID NO: 136906 - DNA, 1673 bp, Homo sapiens; identical to SEQ ID NO: 136904
  Payload ID: 6805
  Gene Symbol: GTF2H4
  Gene Name: general transcription factor IIH, polypeptide 4, 52kDa
  Uniprot ID: Q92759
  ENST ID: ENST00000400450
  CDS Start-End: 162-1550

SEQ ID NO: 136907 - DNA, 1673 bp, Homo sapiens
  Payload ID: 6805
  Gene Symbol: GTF2H4
  Gene Name: general transcription factor IIH, polypeptide 4, 52kDa
  Uniprot ID: Q92759
  ENST ID: ENST00000438348
  CDS Start-End: 162-1550
ctcccttctcttctgaattctccattctgggctctttcctgtgaaatctttctttgctttccccatcttttcctcgcattttttcaccatctttccctcaatctccaggagccaatgcgagactttggctccgattaagcgacggcccgagacttggggtgatggagagcaccccttcaaggggactgaaccgagtacacctacaatgcaggaatctgcaggaattcttagggggcctgagccctggggtattggaccgattgtatgggcaccctgccacatgtctggctgtcttcagggagctcccatccttggctaagaactgggtgatgcggatgctctttctggagcagcctttgccacaggctgctgtagctctgtgggtaaagaaggaattcagcaaggctcaggaggaaagtacagggctgctgagcggcctccggatctggcacacccagctgctcccaggcgggctccagggcctcatcctcaaccccattttccgccagaacctccgcattgcccttctgggtggggggaaggcctggtctgatgacacaagtcagctgggaccagacaagcatgcccgggacgttccctcccttgacaagtacgccgaggagcgatgggaggtggtcttgcacttcatggtgggctcccccagtgcagctgtcagccaggacttggctcagctcctcagccaggctgggctcatgaagagtactgaacctggagagccgccctgcattacttccgctggcttccagttcctgttgctggacaccccggctcagctctggtactttatgttgcagtatttgcagacagcccagagccggggcatggacctggtagagattctctccttcctcttccagctcagcttctctactctgggcaaggattactctgtggaaggtatgagtgattctctgttgaacttcctgcaacatctgcgtgagtttgggcttgttttccagaggaagaggaaatctcggcgttactaccccacacgcctggccatcaatctctcatcaggtgtctctggagctgggggcactgtgcatcagccaggtttcattgtcgtggaaaccaattaccgactgtatgcctacacggagtcggagctgcagattgccctcattgccctcttctctgagatgctctatcggttccccaacatggtggtggcgcaggtgacccgggagagtgtgcagcaggcaatcgccagtggcatcacagcccagcagataatccatttcctaaggacaagagcccacccagtgatgctcaaacagacacctgtgctgccccccaccatcaccgaccagatccggctctgggagctggaaagggacagactccggttcactgagggtgtcctgtataaccagttcctgtcgcaagtggactttgagctgctgctggcccacgcgcgggagctgggcgtgctcgtgttcgagaactcggccaagcggctcatggtggtgaccccggccgggcacagcgacgtcaagcgcttttggaagcggcagaaacatagctcctgagagcgcgggacttggacacggacctcggcgggcgggactgggcggggcggggcatcagaactcaggtgttttttatttacgcgtcagggcttttcttgtttaataaagttatgatagctagca

SEQ ID NO: 136908 - DNA, 1673 bp, Homo sapiens; identical to SEQ ID NO: 136904
  Payload ID: 6805
  Gene Symbol: GTF2H4
  Gene Name: general transcription factor IIH, polypeptide 4, 52kDa
  Uniprot ID: Q92759
  ENST ID: ENST00000435498
  CDS Start-End: 162-1550

SEQ ID NO: 136909 - DNA, 598 bp, Homo sapiens
  Payload ID: 6805
  Gene Symbol: GTF2H4
  Gene Name: general transcription factor IIH, polypeptide 4, 52kDa
  ENST ID: ENST00000430576
  CDS Start-End: 185-598
cccttctcttctgaattctccattctgggctctttcctgtgaaatctttctttgctttccccatcttttcctcgcattttttcaccatctttccctcaatctccaggagccaatgcgagactttggctccgattaagcgacggcccgagacttggggtgcgcgaggaggatcgacagagtggtgatggagagcaccccttcaaggggactgaaccgagtacacctacaatgcaggaatctgcaggaattcttagggggcctgagccctggggtattggaccgattgtatgggcaccctgccacatgtctggctgtcttcagggagctcccatccttggctaagaactgggtgatgcggatgctctttctggagcagcctttgccacaggctgctgtagctctgtgggtaaagaaggaattcagcaaggctcaggaggaaagtacagggctgctgagcggcctccggatctggcacacccagctgctcccaggcgggctccagggcctcatcctcaaccccattttccgccagaacctccgcattgcccttctgggtggtacagggattacaggtgtgagccactgcgcctggccaggg

SEQ ID NO: 136910 - DNA, 598 bp, Homo sapiens
  Payload ID: 6805
  Gene Symbol: GTF2H4
  Gene Name: general transcription factor IIH, polypeptide 4, 52kDa
  ENST ID: ENST00000456195
  CDS Start-End: 185-598
cccttctcttctgaattctccattctgggctcttgcctgtgaaatctttctttgctttccccatcttttcctcgcattttttcaccatctttccctcaatctccaggagccaatgcgagactttggctccgattaagcgacggcccgagactcggggtgcgcgaggaggatcgacagagtggtgatggagagcaccccttcaaggggactgaaccgagtacacctacaatgcaggaatctgcaggaattcttagggggcctgagccctggggtattggaccgattgtatgggcaccctgccacatgtctggctgtcttcagggagctcccatccttggctaagaactgggtgatgcggatgctctttctggagcagcctttgccacaggctgctgtagctctgtgggtaaagaaggaattcagcaaggctcaggaggaaagtacagggctgctgagcggcctccggatctggcacacacagctgctcccaggcgggctccagggcctcatcctcaaccccattttccgccagaacctccgcattgcccttctgggtggtacagggattacaggtgtgagccactgcgcctggccaggg

SEQ ID NO: 136911 - DNA, 1735 bp, Homo sapiens; identical to SEQ ID NO: 136903
  Payload ID: 6805
  Gene Symbol: GTF2H4
  Gene Name: general transcription factor IIH, polypeptide 4, 52kDa
  Uniprot ID: Q92759
  ENST ID: ENST00000456968
  CDS Start-End: 224-1612

SEQ ID NO: 136912 - DNA, 1735 bp, Homo sapiens; identical to SEQ ID NO: 136903
  Payload ID: 6805
  Gene Symbol: GTF2H4
  Gene Name: general transcription factor IIH, polypeptide 4, 52kDa
  Uniprot ID: Q92759
  ENST ID: ENST00000413314
  CDS Start-End: 224-1612

SEQ ID NO: 136913 - DNA, 598 bp, Homo sapiens
  Payload ID: 6805
  Gene Symbol: GTF2H4
  Gene Name: general transcription factor IIH, polypeptide 4, 52kDa
  ENST ID: ENST00000454718
  CDS Start-End: 185-598
cccttctcttctgaattttccattctgggctcttgcctgtgaaatctttctttgctttccccatcttttcctcgcattttttcaccatctttccctcaatctccaggagccaatgcgagactttggctccgattaagcgacggcccgagactcggggtgcgcgaggaggatcgacagagtggtgatggagagcaccccttcaaggggactgaaccgagtacacctacaatgcaggaatctgcaggaattcttagggggcctgagccctggggtattggaccgattgtatgggcaccctgccacatgtctggctgtcttcagggagctcccatccttggctaagaactgggtgatgcggatgctctttctggagcagcctttgccacaggctgctgtagctctgtgggtaaagaaggaattcagcaaggctcaggaggaaagtacagggctgctgagcggcctccggatctggcacacacagctgctcccaggcgggctccagggcctcatcctcaaccccattttccgccagaacctccgcattgcccttctgggtggtacagggattacaggtgtgagccactgcgcctggccaggg

SEQ ID NO: 136914 - DNA, 598 bp, Homo sapiens; identical to SEQ ID NO: 136910
  Payload ID: 6805
  Gene Symbol: GTF2H4
  Gene Name: general transcription factor IIH, polypeptide 4, 52kDa
  ENST ID: ENST00000423849
  CDS Start-End: 185-598

SEQ ID NO: 136915 - DNA, 1673 bp, Homo sapiens
  Payload ID: 6805
  Gene Symbol: GTF2H4
  Gene Name: general transcription factor IIH, polypeptide 4, 52kDa
  Uniprot ID: Q92759
  ENST ID: ENST00000416773
  CDS Start-End: 162-1550
ctcccttctcttctgaattttccattctgggctcttgcctgtgaaatctttctttgctttccccatcttttcctcgcattttttcaccatctttccctcaatctccaggagccaatgcgagactttggctccgattaagcgacggcccgagactcggggtgatggagagcaccccttcaaggggactgaaccgagtacacctacaatgcaggaatctgcaggaattcttagggggcctgagccctggggtattggaccgattgtatgggcaccctgccacatgtctggctgtcttcagggagctcccatccttggctaagaactgggtgatgcggatgctctttctggagcagcctttgccacaggctgctgtagctctgtgggtaaagaaggaattcagcaaggctcaggaggaaagtacagggctgctgagcggcctccggatctggcacacacagctgctcccaggcgggctccagggcctcatcctcaaccccattttccgccagaacctccgcattgcccttctgggtggggggaaggcctggtctgatgacacaagtcagctgggaccagacaagcatgcccgggacgttccctcccttgacaagtacgccgaggagcgatgggaggtggtcttgcacttcatggtgggctcccccagtgcagctgtcagccaggacttggctcagctcctcagccaggctgggctcatgaagagtactgaacctggagagccgccctgcattacttccgctggcttccagttcctgttgctggacaccccggctcagctctggtactttatgttgcagtatttgcagacagcccagagccggggcatggacctggtagagattctctccttcctcttccagctcagcttctctactctgggcaaggattactctgtggaaggtatgagtgattctctgttgaacttcctgcaacatctgcgtgagtttgggcttgttttccagaggaagaggaaatctcggcgttactaccccacacgcctggccatcaatctctcatcaggtgtctctggagctgggggcactgtgcatcagccaggtttcattgtcgtggaaaccaattaccgactgtatgcctacacggagtcggagctgcagattgccctcattgccctcttctctgagatgctctatcggttccccaacatggtggtggcgcaggtgacccgggagagtgtgcagcaggcaatcgccagtggcatcacagcccagcagataatccatttcctaaggacaagagcccacccagtgatgctcaaacagacacctgtgctgccccccaccatcaccgaccagatccggctctgggagctggaaagggacagactccggttcactgagggtgtcctgtataaccagttcctgtcgcaagtggactttgagctgctgctggcccacgcgcgggagctgggcgtgctcgtgttcgagaactcggccaagcggctcatggtggtgaccccggccgggcacagcgacgtcaagcgcttttggaagcggcagaaacatagctcctgagagcgcgggacttggacacggacctcggcgggcgggactgggcggggcggggcatcagaactcaggtgttttttatttacgcgtcagggcttttcttgtttaataaagttatgatagctagca

SEQ ID NO: 136916 - DNA, 1735 bp, Homo sapiens
  Payload ID: 6805
  Gene Symbol: GTF2H4
  Gene Name: general transcription factor IIH, polypeptide 4, 52kDa
  Uniprot ID: Q92759
  ENST ID: ENST00000440824
  CDS Start-End: 224-1612
attctcatcctcttcacttttccactcctccccttacctcccttctcttctgaattctccattctgggctctttcctgtgaaatctttctttgctttccccatcttttcctcgcattttttcaccatctttccctcaatctccaggagccaatgcgagactttggctccgattaagcgacggcccgagacttggggtgcgcgaggaggatcgacagagtggtgatggagagcaccccttcaaggggactgaaccgagtacacctacaatgcaggaatctgcaggaattcttagggggcctgagccctggggtattggaccgattgtatgggcaccctgccacatgtctggctgtcttcagggagctcccatccttggctaagaactgggtgatgcggatgctctttctggagcagcctttgccacaggctgctgtagctctgtgggtaaagaaggaattcagcaaggctcaggaggaaagtacagggctgctgagcggcctccggatctggcacacccagctgctcccaggcgggctccagggcctcatcctcaaccccattttccgccagaacctccgcattgcccttctgggtggggggaaggcctggtctgatgacacaagtcagctgggaccagacaagcatgcccgggacgttccctcccttgacaagtacgccgaggagcgatgggaggtggtcttgcacttcatggtgggctcccccagtgcagctgtcagccaggacttggctcagctcctcagccaggctgggctcatgaagagtactgaacctggagagccgccctgcattacttccgctggcttccagttcctgttgctggacaccccggctcagctctggtactttatgttgcagtatttgcagacagcccagagccggggcatggacctggtagagattctctccttcctcttccagctcagcttctctactctgggcaaggattactctgtggaaggtatgagtgattctctgttgaacttcctgcaacatctgcgtgagtttgggcttgttttccagaggaagaggaaatctcggcgttactaccccacacgcctggccatcaatctctcatcaggtgtctctggagctgggggcactgtgcatcagccaggtttcattgtcgtggaaaccaattaccgactgtatgcctacacggagtcggagctgcagattgccctcattgccctcttctctgagatgctctatcggttccccaacatggtggtggcgcaggtgacccgggagagtgtgcagcaggcaatcgccagtggcatcacagcccagcagataatccatttcctaaggacaagagcccacccagtgatgctcaaacagacacctgtgctgccccccaccatcaccgaccagatccggctctgggagctggaaagggacagactccggttcactgagggtgtcctgtataaccagttcctgtcgcaagtggactttgagctgctgctggcccacgcgcgggagctgggcgtgctcgtgttcgagaactcggccaagcggctcatggtggtgaccccggccgggcacagcgacgtcaagcgcttttggaagcggcagaaacatagctcctgagagcgcgggacttggacacggacctcggcgggcgggactgggcggggcggggcatcagaactcaggtgttttttatttacgcgtcagggcttttcttgtttaataaagttatgatagctagca

SEQ ID NO: 136917 - DNA, 1735 bp, Homo sapiens
  Payload ID: 6805
  Gene Symbol: GTF2H4
  Gene Name: general transcription factor IIH, polypeptide 4, 52kDa
  Uniprot ID: Q92759
  ENST ID: ENST00000434226
  CDS Start-End: 224-1612
attctcatcctcttcacttttccactcctccccttacctcccttctcttctgaattttccattctgggctcttgcctgtgaaatctttctttgctttccccatcttttcctcgcattttttcaccatctttccctcaatctccaggagccaatgcgagactttggctccgattaagcgacggcccgagactcggggtgcgcgaggaggatcgacagagtggtgatggagagcaccccttcaaggggactgaaccgagtacacctacaatgcaggaatctgcaggaattcttagggggcctgagccctggggtattggaccgattgtatgggcaccctgccacatgtctggctgtcttcagggagctcccatccttggctaagaactgggtgatgcggatgctctttctggagcagcctttgccacaggctgctgtagctctgtgggtaaagaaggaattcagcaaggctcaggaggaaagtacagggctgctgagcggcctccggatctggcacacacagctgctcccaggcgggctccagggcctcatcctcaaccccattttccgccagaacctccgcattgcccttctgggtggggggaaggcctggtctgatgacacaagtcagctgggaccagacaagcatgcccgggacgttccctcccttgacaagtacgccgaggagcgatgggaggtggtcttgcacttcatggtgggctcccccagtgcagctgtcagccaggacttggctcagctcctcagccaggctgggctcatgaagagtactgaacctggagagccgccctgcattacttccgctggcttccagttcctgttgctggacaccccggctcagctctggtactttatgttgcagtatttgcagacagcccagagccggggcatggacctggtagagattctctccttcctcttccagctcagcttctctactctgggcaaggattactctgtggaaggtatgagtgattctctgttgaacttcctgcaacatctgcgtgagtttgggcttgttttccagaggaagaggaaatctcggcgttactaccccacacgcctggccatcaatctctcatcaggtgtctctggagctgggggcactgtgcatcagccaggtttcattgtcgtggaaaccaattaccgactgtatgcctacacggagtcggagctgcagattgccctcattgccctcttctctgagatgctctatcggttccccaacatggtggtggcgcaggtgacccgggagagtgtgcagcaggcaatcgccagtggcatcacagcccagcagataatccatttcctaaggacaagagcccacccagtgatgctcaaacagacacctgtgctgccccccaccatcaccgaccagatccggctctgggagctggaaagggacagactccggttcactgagggtgtcctgtataaccagttcctgtcgcaagtggactttgagctgctgctggcccacgcgcgggagctgggcgtgctcgtgttcgagaactcggccaagcggctcatggtggtgaccccggccgggcacagcgacgtcaagcgcttttggaagcggcagaaacatagctcctgagagcgcgggacttggacacggacctcggcgggcgggactgggcggggcggggcatcagaactcaggtgttttttatttacgcgtcagggcttttcttgtttaataaagttatgatagctagca

SEQ ID NO: 136918 - DNA, 1673 bp, Homo sapiens; identical to SEQ ID NO: 136904
  Payload ID: 6805
  Gene Symbol: GTF2H4
  Gene Name: general transcription factor IIH, polypeptide 4, 52kDa
  Uniprot ID: Q92759
  ENST ID: ENST00000423881
  CDS Start-End: 162-1550

SEQ ID NO: 136919 - DNA, 598 bp, Homo sapiens; identical to SEQ ID NO: 136910
  Payload ID: 6805
  Gene Symbol: GTF2H4
  Gene Name: general transcription factor IIH, polypeptide 4, 52kDa
  ENST ID: ENST00000416161
  CDS Start-End: 185-598

SEQ ID NO: 136920 - DNA, 7481 bp, Homo sapiens
  Payload ID: 6806
  Gene Symbol: GTF2H5
  Gene Name: general transcription factor IIH, polypeptide 5
  Uniprot ID: Q6ZYL4
  ENST ID: ENST00000607778
  CDS Start-End: 79-294
actctgccggcaacgccgaggcgcttctgcatctgtgggccgagcattcttcaggtcatctgaaccttctgagaaaacatggtcaacgtcttgaaaggagtgcttatagaatgtgatcctgccatgaagcagtttctgctgtacttggatgagtccaatgccctggggaagaagttcatcattcaagacattgatgacactcacgtctttgtaatagcagaattggttaatgtcctccaggagcgagtgggtgaattaatggaccaaaatgctttttcccttacccagaaatgaaaatactcaatatggaccatttaggaattataagcagcaactgtgaaagacttgccactcaatatcttaggtgactgattagacatagagggttgttttaggagcatgccacgggaaagactgagggatcatgatcatttgttcagaaaaaaagcccctgaactgattttgttaccatagaatttaaaaaaaaaaaaagctttaacagttggctgtaatttggcttttattatcctttattaaaatacaaatgtcaatgcttttcctgcctttttaataccatgtcagtgtaacataggtatttattttgctcatccctgtgatctgtgcatttttgctgcgtggatgtgattgtttggtttcagttagaaacgtcatagatttgctgtttgaatatgccaaggtggggacttagacattatgtacgtctcacaaatcctacctgcataccagtcagctctattgaggaagacaatgtaaaactaatgtaaactacagtttgcatttccctgaaaacagaatattgtttttaagagggttagaaacaaccagtgggaaaggcacatgctgctttgtttagtttttccttgttcaaactttgttggtcacattttcccatctgtattcttttttattaagaaaacagcttagggaggctgaggtgggaggattgcttgagcccaggagtccgaggttgctacaaaaacaccattgcactctggcctggacaacagagagaccctgcctcaaaaaaaaaaaaaaaaaaaaaaaaaattctacttgtaccttattccctatgagaatacttatcaaacttatctaaaaaagaaaaataggaacagccatatgcaaagtcagcccaacaggaaaggacatattagattaaaatacattgcggcctgggcttagtggctcacacctgtaatcccagcactttgggaggctgaggcaggcagatcgcttgagtccaggagtcgaaaccctgtctctacaaaaaaaaaaatacaaaaatctgcctgttgtcccagccactggggaggctgaggtaggaggtcaaggctgcagtgaaccttgatcattgctactgccactccagcctaggtgacagagtgagaccctgtctccaaaaaaaaaagtgtatatgtatgtgtgtatatatagcaagagagagttctgtgatcaattgaaggcaaaaacagtaacactgagaggggctttgcttcccttcctgaagatcatgtcattggggtgggttcctgtaaagggaattttccaagagaaaagagaattttcatgacctgtagactcttacaaatccattttacctgcttccttatggtatgtttattcaaagcacctgtgtaccatatttattcacttacacagcattactgaatctggaaattttcagttaggtatattttacataattcccacccatataactcagtccatacagttcacagttttcattccctcatagcaatgcaaaaaattttgatgagttactactactaaaactagttaagtaaaagatgattcttaagaatttccaggctgggcacggtggctcacgcctgtaatcccagcactttgggaggctgaggcaggcagctcacgaggtcaggagatcgagaccatcctgctcggtgaaaccccatctctattaaaaatacaaaaaattagccgggcctggtggcgggtgcctgtagtcccatctactcaggaggctgaggcaggagaatggcgtgaacccgggaggcggagcttgcagtaagctgagattgtgccactgcactccagcctgggcgacagagggagactccatctcaaaaaaaaaaaaaaaaaaaaatgaatttccagctataccaaaatgttactaatgtatcttatatttcaggcatgtctaaatcaacttttagtatgcctcaggcatttgtcaccaaccttttatattaacatgaaacttagaaaatttttgatagaatcccagagttcaaaaggtattaggatttttgccactgaagtaaaaaagagaaaaaaagatatttatgagaaaactattgaacagtgactgtgttgtacccgagcaagttagaggaacgccacactttgagacgaatttaaaagtcctttatttagctggcagccaagaggtggctcacacttggaattctctcagctccgaggaaggggcttgattttcctttatactttggtttaggaaggggacgggagctcagttgcaacaattctacagaagtaaaaacatgcaaaaaattaaaaagacaaatggttacagagaaacaaacagttccaggtgcaggggctctaaatctatcataagatgtcaggtgtgggggctctgccagacacaaactcaaggctttatggtgtatctcttgagcgaaatcctgggaacttcgtacattgcttgcttcagtaccttatgagttaattggactctttgatatgttgagagtcagcttacacaagttaactccttgaggaaagggggtgggtaaggagtccttgatgtcctgtaaatgaaggaaccaaatggagttcctccggctttctcagctaagggagagcttattcacatggaaacaaggctaggtgattaagggagaaagggacagtctgaaaacaaggttagtaaaaacaaggttaggtattagaactgcaaagagtattaagtgaaataagtgaaggaaaatatgagctcttatttttaaaaagttgtgttggggcaaatgttaaatatctttctttctctggacattattaagaaagatagagtgatgtgaatgataggaagcccacctgtaaccacttagctgacatgtccaactatgggtgaacaggaaataagcgacattcacctaggctgtttattggaatctgactagcattatttgatttggcatactttacatgtccagaacaaggctgttggtgcttggcaccaagaaatttatgactttttttttttttttaaataaagtcctaaaggtagcattaaaatgacttaactggaggcaggaggatcactgaagcccaggagtttgaagctgcagtaagctaagaaggtgccactgcactgcagcctggatgacagagtgaaactttgtctcttaatagaactatggactgaagttgtgatattgagtgttatatttctcaataaaggttttttcttttaatactgtattaggtcaaattcaaggtcttaattccttgaattccaatttccttgtgaaatttcatgtgattaatttaaaattccagggatcctatctaacatcacagttgatggatataacaatgtattttgagaaatcagttttggtgaacagtaacagcattactgataataggcaacaaacactactgcattttatttctgataggcattataggtggtaatccaaatgattaatgattttattgctctttacattttctagaacaggtgatttgacataattgtacttttttctgagaagttggtagtgtacttactactctattttgcagttatacaataaatcttacttagctgacaactaggagtaaaagctctgacaaaaagcctctgctgtaactaaaatactgagatcattctatcttaacaaacttaacagatggggaaggggtatattttaaagatggagaaatgatgcagtttgcaaatatagtcaataaatattctcaagtgtacgtagctcaatttcatttgcagcaaagataacactgaaatgtctatggatgagattattggataaacttttttaaaaacactgttctcaagataggcaagtgattaagagcactgactgggccgggcgcggtggctcacgtctataatcctagcactttgggaggccgaggcgggcaaatcacaaggtcaggagatcaaaacaatcctggctaacaaggtgaaaccccgtctctactaaaaatacaaaaaaattagctgggcatggtggtggacgcctgtagtcccagctactcgggaggctgaggcaggagaatggtgtaatcccgggaggtggaggttgcagtgagccgagatcgtgccactgcactccagccggggtgacagagcgagactcccacccatctcaaaaaaaataaaaatgaaaagcactgattgaatctagattccttgagtccaagtgtcagatctctgcttactagctctgggatctcagatgtttcgttgattggatttctttgtgctcatttgtgtaaacaggaatgcccgtctttaaagactattaaaatgaatgtgagttaacacacaagaggtcttcaaaaagttgatggaaaatgcatattatgaaaaaaattatgcatagatttcaaaaatctttgcagcaaaataaactcatcattataacatgtctgaacaggatctagtttgaggcactaagaaggatatcagtttaaatagagcccctgtcagaacaatatgaattctgctaaaactgaagcaagaacaaacatcaaatttatggcaaagcttaggtggaagaatggtgcaatcattgatgctttgcaaaaagtttatgggaacaacgccccaaggaaatcagtttacaaatggataattcattttaagaaaggacaagacaatgttgaagatgaaacctacagcagcagaccatgccacttcgtgaggaaaaaattatctcattcatgccctacttgaagaggaccaatgattaacagcagaaacgatagccaacacaatatgctcctcagttggttcagcttttataaatctgactgaaaaattaaagttgagcacactttccactcaatggataccaaaaccatccagcccaggtcagctgcagacaaaagcagagctttcgatggaaatgtcaaacaagtgagatcaagatcctgaagcatttcttcaaagaattgtagcaaaaacagacttttaaaaccttgaattcagagacaggtataaagactgcttggtgattttgaaaggactgagatcattttgggagagatcatcttcagaaaatgaccagatacaacaagaatttaacatggcagccaaaccaacccactaacacacatttaaataagatacccaaatgcagaaagaaaagcacagtcgtcatgcaaaatagtcactactcattcaaaaactctatagttgtctgagtcgttatgctcaaaatatccaataatatttcttttgctgagctgtaaaataattattttgcaaacataaaagaaaaaaaaaagaattgtaacagaaacatggctttaccagtatgaccctcaagacaaaatacaaaacaatggctaccaagaggtggaagtggcccagtcacagcaagagcagattgatcaagagcaaaggtcatggtaacagttttttggatcctcaagtcattttgcttgttgactttttggagggccaaataaagatatcatctgcttattatgagagtgtttcgagagaaatccaaagcttagcagagaaacgcctgggaaagcttcaccagagggtcttccaccgtgacagttcccctgcgcattcctctcataaagcaagggcagtttagctagaatttctatcaaaaatcattaggtatccatctcccagtcctgatttggctccttctgacttctttttgtttcccaatcttaaaaaaatccctgaagggcacctgtttttcttcagctaataaaaaagacatggttaatttcccaggaccctcagttctttagggatagactgaatggctggtatcattgcttgaacttaatggagcttatgttgagaaataaaagaaattatattttatttttatcttttaattctatttttccatgaactttttgaagtcccctcagatataaagcagaacgttatgaaactgagttaccttgaatctagaagagtacaatgataaaggggaagatagaaacacacacatatgcgttgttttccccactttcacaatgccgtgcagaaactaacagatgaaggaggagaatccctaaaaacagagcattgggtagctagtccaccagcggtctgatgctttcattgatctcaaaactgtctctgagtaactctaccaggaaagttgtctggagggttaacatttctgaaaccatttttatctttgccttcattcttgaatgataattagtctcgaatgtttggatcacaatccattgaaagactaggctattttttcactgtcctcagacatttactgagtccagtttggactttattttattttattttttttgaaacaagatctcgctctgttgctcaggctgaagtgcaatagcgcaaactcggctcactgcaacctcccaggttcaagcaattctcgtgcctcagccatccctataggcatgcgccaccacactttgctaatcttgtatttttggtagagacggggtttgcaccatgttggccaggctggtctcgaactcccaacctcaagtaatctggcctcccaaagtggtgggattacaggcgtgagccagcgcgcccggcctggacttaacttctgaagaactctttctgtttagattgcaggagcgttctctcggctcatctcttgttttctcacccagctgttcttcttctagttggccatcattcttcatccctccctccctttcctgcagttaattatttctttgaaattttaaaacttcttaatgttgcctggaatacatgagtcttcctgatctcttcaaacggggtttgttttgttttgctttggggagaattcttttgacgtttttgaataagctgttaacaactttaatacctgtcttgtttgttttcttcagaaatttgttaattctccatgattagcacctttatgtggttatctcattattttcattcctttttaattctctgttttaggaatgcttgtcaaattcgtcactaaaattgatttactttcttgaaaacctgtttctgctgctcccaacatgatttaatcttggctactgagcttttggttacgttgcactccctttaaaattactccgtttaagtacagtgttcactctttgggtaatgtgtacaatagaagcccaatccccacctatacccaatatatccatgggacaagcatgtacatgcaccccctgagtctaaaataaaaattttaaaaaaacta

SEQ ID NO: 136921 - DNA, 979 bp, Homo sapiens
  Payload ID: 6807
  Gene Symbol: GTF2I
  Gene Name: general transcription factor IIi
  Uniprot ID: P78347
  ENST ID: ENST00000443166
  CDS Start-End: 44-868
ccccggccccggagctgcctggaggcggccgcactcggggatcatggcccaagttgcaatgtccaccctccccgttgaagatgaggagtcctcggagagcaggatggtggtgacattcctcatgtcagctctcgagtccatgtgtaaagaactggccaagtccaaagccgaagtggcctgcattgcagtgtatgaaacagacgtgtttgtcgtcggaactgaaagaggacgtgcttttgtcaataccagaaaggattttcaaaaagattttgtaaaatattgtgttgaagaagaagaaaaagctgcagagatgcataaaatgaaatctacaacccaggcaaatcggatgagtgtagatgctgtagaaattgaaacactcagaaaaacagttgaggactatttctgcttttgctatgggaaagctttaggcaaatccacagtggtacctgtaccatatgagaagatgctgcgagaccagtcggctgtggtagtgcaggggcttccggaaggtgttgcctttaaacaccccgagaactatgatcttgcaaccctgaaatggattttggagaacaaagcagggatttcattcatcattaagagaccttttttagagccaaagaagcatgtaggtggtcgtgtgatggtaacagatgctgacaggtcaatactatctccaggtggaagttgtggccccatcaaagtgaaaactgaacccacagaagattctggcatttccctggaaatggcagctgtgacagtaaaggaagaatcagaagatcctgattattatcaatataacattcaaggaagccaccattcttcagagggcaatgaaggcacagaaatggaagtaccagcagaaggttaggagaaaaagagattgcatattttccactatttgttgtatgtttattctattttatagattctattatccttaaaacaccttatttggaaataaaaggtgattcccttggta

SEQ ID NO: 136922 - DNA, 572 bp, Homo sapiens
  Payload ID: 6807
  Gene Symbol: GTF2I
  Gene Name: general transcription factor IIi
  ENST ID: ENST00000432143
  CDS Start-End: 254-572
atttccagagagcaggaagcacagagaaggcccgtgggtcgcccttggggtgctttccatcctgcagggctcgctgcctgccctgaaagttctgataaagacataggaccttcatcaccaggggcgccccgtgggctgttgctgtagcgtctgtcccccatttcttacacacattgagtgtgattgttaccagtggagggtgtccaatggaagaagcaccaaaagccgagatttattgaaagtggaagggatcatggcccaagttgcaatgtccaccctccccgttgaagatgaggagtcctcggagagcaggatggtggtgacattcctcatgtcagctctcgagtccatgtgtaaagaactggccaagtccaaagccgaagtggcctgcattgcagtgtatgaaacagacgtgtttgtcgtcggaactgaaagaggacgtgcttttgtcaataccagaaaggattttcaaaaagattttgtaaaatattgtgttgaagaagaagaaaaagctgcagagatgcataaaatgaaatctacaacccaggcaaatcggatgagtgtagatgctg

SEQ ID NO: 136923 - DNA, 4548 bp, Homo sapiens
  Payload ID: 6807
  Gene Symbol: GTF2I
  Gene Name: general transcription factor IIi
  Uniprot ID: P78347
  ENST ID: ENST00000573035
  CDS Start-End: 390-3386
aaagaaaaaaaaaaggaggaggaggaggagggtgagagagaagctgggagagcagagaaaaggggccaccggtcgcccccccgcttccccgcacgcgctctccagccgcggccgcccgcctgccgcggtcaccccggcctctgcctctgtcccccagtgatcggatcaaggcgctgagcgaggccctgcctgcggggcggccatgcggcggtgacaggagcgcgaccgacacgcacgggcccctcgccccctctcgcctcccgtccgctcgccagctcccctcagccgaggctgctccgcggcggccgcagcccgcgcgcggcccacactcgcctcccctcggcacccccggccccggagctgcctggaggcggccgcactcggggatcatggcccaagttgcaatgtccaccctccccgttgaagatgaggagtcctcggagagcaggatggtggtgacattcctcatgtcagctctcgagtccatgtgtaaagaactggccaagtccaaagccgaagtggcctgcattgcagtgtatgaaacagacgtgtttgtcgtcggaactgaaagaggacgtgcttttgtcaataccagaaaggattttcaaaaagattttgtaaaatattgtgttgaagaagaagaaaaagctgcagagatgcataaaatgaaatctacaacccaggcaaatcggatgagtgtagatgctgtagaaattgaaacactcagaaaaacagttgaggactatttctgcttttgctatgggaaagctttaggcaaatccacagtggtacctgtaccatatgagaagatgctgcgagaccagtcggctgtggtagtgcaggggcttccggaaggtgttgcctttaaacaccccgagaactatgatcttgcaaccctgaaatggattttggagaacaaagcagggatttcattcatcattaagagaccttttttagagccaaagaagcatgtaggtggtcgtgtgatggtaacagatgctgacaggtcaatactatctccaggtggaagttgtggccccatcaaagtgaaaactgaacccacagaagattctggcatttccctggaaatggcagctgtgacagtaaaggaagaatcagaagatcctgattattatcaatataacattcaagcaggcccttctgaaactgatgatgttgatgaaaaacagcccctatcgaagcctttgcaaggaagccaccattcttcagagggcaatgaaggcacagaaatggaagtaccagcagaagattctactcaacatgtcccttcagaaacaagtgaggaccctgaagttgaggtgactattgaagatgatgattattctccaccgtctaagagaccaaaggccaatgagctaccgcagccaccagtcccggaacccgccaatgctgggaagcggaaagtgagggagttcaacttcgagaaatggaatgctcgcatcactgatctacgtaaacaagttgaagaattgtttgaaaggaaatatgctcaagccataaaagccaaaggtccggtgacgatcccgtaccctcttttccagtctcatgttgaagatctttatgtagaaggacttcctgaaggaattccttttagaaggccatctacttacggaattcctcgcctggagaggatattacttgcaaaggaaaggattcgttttgtgattaagaaacatgagcttctgaattcaacacgtgaagatttacagcttgataagccagcttcaggagtaaaggaagaatggtatgccagaatcactaaattaagaaagatggtggatcagcttttctgcaaaaaatttgcggaagccttggggagcactgaagccaaggctgtaccgtaccaaaaatttgaggcacacccgaatgatctgtacgtggaaggactgccagaaaacattcctttccgaagtccctcatggtatggaatcccaaggctggaaaaaatcattcaagtgggcaatcgaattaaatttgttattaaaagaccagaacttctgactcacagtaccactgaagttactcagccaagaacgaatacaccagtcaaagaagattggaatgtcagaattaccaagctacggaagcaagtggaagagatttttaatttgaaatttgctcaagctcttggactcaccgaggcagtaaaagtaccatatcctgtgtttgaatcaaacccggagttcttgtatgtggaaggcttgccagaggggattcccttccgaagccctacctggtttggaattccacgacttgaaaggatcgtccgcgggagtaataaaatcaagttcgttgttaaaaaacctgaactagttatttcctacttgcctcctgggatggctagtaaaataaacactaaagctttgcagtcccccaaaagaccacgaagtcctgggagtaattcaaaggttcctgaaattgaggtcaccgtggaaggccctaataacaacaatcctcaaacctcagctgttcgaaccccgacccagactaacggttctaacgttcccttcaagccacgagggagagagttttcctttgaggcctggaatgccaaaatcacggacctaaaacagaaagttgaaaatctcttcaatgagaaatgtggggaagctcttggccttaaacaagctgtgaaggtgccgttcgcgttatttgagtctttcccggaagacttttatgtggaaggcttacctgagggtgtgccattccgaagaccatcgacttttggcattccgaggctggagaagatactcagaaacaaagccaaaattaagttcatcattaaaaagcccgaaatgtttgagacggcgattaaggagagcacctcctctaagagccctcccagaaaaataaattcatcacccaatgttaatactactgcatcaggtgttgaagaccttaacatcattcaggtgacaattccagatgatgataatgaaagactctcgaaagttgaaaaagctagacagctaagagaacaagtgaatgacctctttagtcggaaatttggtgaagctattggtatgggttttcctgtgaaagttccctacaggaaaatcacaattaaccctggctgtgtggtagttgatggcatgcccccgggggtgtccttcaaagcccccagctacctggaaatcagctccatgagaaggatcttagactctgccgagtttatcaaattcacggtcattagaccatttccaggacttgtgattaataaccagctggttgatcagagtgagtcagaaggccccgtgatacaagaatcagctgaaccaagccagttggaagttccagccacagaagaaataaaagagactgatggaagctctcagatcaagcaagaaccagaccccacgtggtagacctcttccctcctaggcttaaagtatcagtggttgagaagagcttttcggacctgttactaccccaagctgtgtaatatacttgtataacagaaataccttctatacaaacctttttttctacttttagatagaaatgtctactttttcagcagttctgtgaattaaagagcagagtgactgtgggtctggaatggctggtgtacttgggaatgtactatcaggattttacagcaatgctgggaaatgacagggaaaatgacaggaatgaatctcaccagattttttatgtactcagcagagccttgagttacggtgtttattttccaatcaagtgaagatatctcctacttctcctactggaacatctcagcttctgcagtgaagaaaaattcctgtgatagttcagttctttagtttttctatttgaaaaaaaaaaatcatttaaatgatcctttgttcacggctctccttaatgactgagtgaacagttcctatctgtatatttgactaaaccttttcctaagctatctctcatggttcctatgtttttttatcataattaaaagcaaaaccatctggatcacctaacagtcagaggtcagtatctcagcgtgtgaattatagaggaaatacagagagaacctcttccacttttacttttcgtccaaataaaatgcatggtgtaccagaagttgaagatcgggttgaggattggggctagctcgatgacactaaggccccaacatcgcgggacctgctgtggcgcggattcttaggaacgctgttctagccggccccctctccaggggtcgccgtggccggcattatttcctagttcttcttgtaaccctgaggtgccagcgcggggagtgaggaggggtcagggggctaaggatgcaacctctgacgttctgcgccttcctaggagagtcttacatgtgttgagatttcacaagcaatgcgagttgtaaaataccagctctacaagaagctaggctctgtgacggcatagttttcagtagctttatcacaatattcacaatggagaattatatgacatggtagcagaaataggcccttttatgtgttgcttctattttacctcaaattgtagatatagggtaatcaataaaatccatccatgcctttcacacactaa

SEQ ID NO: 136924 - DNA, 4352 bp, Homo sapiens
  Payload ID: 6807
  Gene Symbol: GTF2I
  Gene Name: general transcription factor IIi
  Uniprot ID: P78347
  ENST ID: ENST00000620879
  CDS Start-End: 317-3190
cgcccccccgcttccccgcacgcgctctccagccgcggccgcccgcctgccgcggtcaccccggcctctgcctctgtcccccagtgatcggatcaaggcgctgagcgaggccctgcctgcggggcggccatgcggcggtgacaggagcgcgaccgacacgcacgggcccctcgccccctctcgcctcccgtccgctcgccagctcccctcagccgaggctgctccgcggcggccgcagcccgcgcgcggcccacactcgcctcccctcggcacccccggccccggagctgcctggaggcggccgcactcggggatcatggcccaagttgcaatgtccaccctccccgttgaagatgaggagtcctcggagagcaggatggtggtgacattcctcatgtcagctctcgagtccatgtgtaaagaactggccaagtccaaagccgaagtggcctgcattgcagtgtatgaaacagacgtgtttgtcgtcggaactgaaagaggacgtgcttttgtcaataccagaaaggattttcaaaaagattttgtaaaatattgtgttgaagaagaagaaaaagctgcagagatgcataaaatgaaatctacaacccaggcaaatcggatgagtgtagatgctgtagaaattgaaacactcagaaaaacagttgaggactatttctgcttttgctatgggaaagctttaggcaaatccacagtggtacctgtaccatatgagaagatgctgcgagaccagtcggctgtggtagtgcaggggcttccggaaggtgttgcctttaaacaccccgagaactatgatcttgcaaccctgaaatggattttggagaacaaagcagggatttcattcatcattaagagaccttttttagagccaaagaagcatgtaggtggtcgtgtgatggtaacagatgctgacaggtcaatactatctccaggtggaagttgtggccccatcaaagtgaaaactgaacccacagaagattctggcatttccctggaaatggcagctgtgacagtaaaggaagaatcagaagatcctgattattatcaatataacattcaaggaagccaccattcttcagagggcaatgaaggcacagaaatggaagtaccagcagaagatgatgattattctccaccgtctaagagaccaaaggccaatgagctaccgcagccaccagtcccggaacccgccaatgctgggaagcggaaagtgagggagttcaacttcgagaaatggaatgctcgcatcactgatctacgtaaacaagttgaagaattgtttgaaaggaaatatgctcaagccataaaagccaaaggtccggtgacgatcccgtaccctcttttccagtctcatgttgaagatctttatgtagaaggacttcctgaaggaattccttttagaaggccatctacttacggaattcctcgcctggagaggatattacttgcaaaggaaaggattcgttttgtgattaagaaacatgagcttctgaattcaacacgtgaagatttacagcttgataagccagcttcaggagtaaaggaagaatggtatgccagaatcactaaattaagaaagatggtggatcagcttttctgcaaaaaatttgcggaagccttggggagcactgaagccaaggctgtaccgtaccaaaaatttgaggcacacccgaatgatctgtacgtggaaggactgccagaaaacattcctttccgaagtccctcatggtatggaatcccaaggctggaaaaaatcattcaagtgggcaatcgaattaaatttgttattaaaagaccagaacttctgactcacagtaccactgaagttactcagccaagaacgaatacaccagtcaaagaagattggaatgtcagaattaccaagctacggaagcaagtggaagagatttttaatttgaaatttgctcaagctcttggactcaccgaggcagtaaaagtaccatatcctgtgtttgaatcaaacccggagttcttgtatgtggaaggcttgccagaggggattcccttccgaagccctacctggtttggaattccacgacttgaaaggatcgtccgcgggagtaataaaatcaagttcgttgttaaaaaacctgaactagttatttcctacttgcctcctgggatggctagtaaaataaacactaaagctttgcagtcccccaaaagaccacgaagtcctgggagtaattcaaaggttcctgaaattgaggtcaccgtggaaggccctaataacaacaatcctcaaacctcagctgttcgaaccccgacccagactaacggttctaacgttcccttcaagccacgagggagagagttttcctttgaggcctggaatgccaaaatcacggacctaaaacagaaagttgaaaatctcttcaatgagaaatgtggggaagctcttggccttaaacaagctgtgaaggtgccgttcgcgttatttgagtctttcccggaagacttttatgtggaaggcttacctgagggtgtgccattccgaagaccatcgacttttggcattccgaggctggagaagatactcagaaacaaagccaaaattaagttcatcattaaaaagcccgaaatgtttgagacggcgattaaggagagcacctcctctaagagccctcccagaaaaataaattcatcacccaatgttaatactactgcatcaggtgttgaagaccttaacatcattcaggtgacaattccagatgatgataatgaaagactctcgaaagttgaaaaagctagacagctaagagaacaagtgaatgacctctttagtcggaaatttggtgaagctattggtatgggttttcctgtgaaagttccctacaggaaaatcacaattaaccctggctgtgtggtagttgatggcatgcccccgggggtgtccttcaaagcccccagctacctggaaatcagctccatgagaaggatcttagactctgccgagtttatcaaattcacggtcattagaccatttccaggacttgtgattaataaccagctggttgatcagagtgagtcagaaggccccgtgatacaagaatcagctgaaccaagccagttggaagttccagccacagaagaaataaaagagactgatggaagctctcagatcaagcaagaaccagaccccacgtggtagacctcttccctcctaggcttaaagtatcagtggttgagaagagcttttcggacctgttactaccccaagctgtgtaatatacttgtataacagaaataccttctatacaaacctttttttctacttttagatagaaatgtctactttttcagcagttctgtgaattaaagagcagagtgactgtgggtctggaatggctggtgtacttgggaatgtactatcaggattttacagcaatgctgggaaatgacagggaaaatgacaggaatgaatctcaccagattttttatgtactcagcagagccttgagttacggtgtttattttccaatcaagtgaagatatctcctacttctcctactggaacatctcagcttctgcagtgaagaaaaattcctgtgatagttcagttctttagtttttctatttgaaaaaaaaaaatcatttaaatgatcctttgttcacggctctccttaatgactgagtgaacagttcctatctgtatatttgactaaaccttttcctaagctatctctcatggttcctatgtttttttatcataattaaaagcaaaaccatctggatcacctaacagtcagaggtcagtatctcagcgtgtgaattatagaggaaatacagagagaacctcttccacttttacttttcgtccaaataaaatgcatggtgtaccagaagttgaagatcgggttgaggattggggctagctcgatgacactaaggccccaacatcgcgggacctgctgtggcgcggattcttaggaacgctgttctagccggccccctctccaggggtcgccgtggccggcattatttcctagttcttcttgtaaccctgaggtgccagcgcggggagtgaggaggggtcagggggctaaggatgcaacctctgacgttctgcgccttcctaggagagtcttacatgtgttgagatttcacaagcaatgcgagttgtaaaataccagctctacaagaagctaggctctgtgacggcatagttttcagtagctttatcacaatattcacaatggagaattatatgacatggtagcagaaataggcccttttatgtgttgcttctattttacctcaaattgtagatatagggtaatcaataaaatccatccatgcctttcacacactaa

SEQ ID NO: 136925 - DNA, 4412 bp, Homo sapiens
  Payload ID: 6807
  Gene Symbol: GTF2I
  Gene Name: general transcription factor IIi
  Uniprot ID: P78347
  ENST ID: ENST00000621734
  CDS Start-End: 317-3250
cgcccccccgcttccccgcacgcgctctccagccgcggccgcccgcctgccgcggtcaccccggcctctgcctctgtcccccagtgatcggatcaaggcgctgagcgaggccctgcctgcggggcggccatgcggcggtgacaggagcgcgaccgacacgcacgggcccctcgccccctctcgcctcccgtccgctcgccagctcccctcagccgaggctgctccgcggcggccgcagcccgcgcgcggcccacactcgcctcccctcggcacccccggccccggagctgcctggaggcggccgcactcggggatcatggcccaagttgcaatgtccaccctccccgttgaagatgaggagtcctcggagagcaggatggtggtgacattcctcatgtcagctctcgagtccatgtgtaaagaactggccaagtccaaagccgaagtggcctgcattgcagtgtatgaaacagacgtgtttgtcgtcggaactgaaagaggacgtgcttttgtcaataccagaaaggattttcaaaaagattttgtaaaatattgtgttgaagaagaagaaaaagctgcagagatgcataaaatgaaatctacaacccaggcaaatcggatgagtgtagatgctgtagaaattgaaacactcagaaaaacagttgaggactatttctgcttttgctatgggaaagctttaggcaaatccacagtggtacctgtaccatatgagaagatgctgcgagaccagtcggctgtggtagtgcaggggcttccggaaggtgttgcctttaaacaccccgagaactatgatcttgcaaccctgaaatggattttggagaacaaagcagggatttcattcatcattaagagaccttttttagagccaaagaagcatgtaggtggtcgtgtgatggtaacagatgctgacaggtcaatactatctccaggtggaagttgtggccccatcaaagtgaaaactgaacccacagaagattctggcatttccctggaaatggcagctgtgacagtaaaggaagaatcagaagatcctgattattatcaatataacattcaagcaggcccttctgaaactgatgatgttgatgaaaaacagcccctatcgaagcctttgcaaggaagccaccattcttcagagggcaatgaaggcacagaaatggaagtaccagcagaagatgatgattattctccaccgtctaagagaccaaaggccaatgagctaccgcagccaccagtcccggaacccgccaatgctgggaagcggaaagtgagggagttcaacttcgagaaatggaatgctcgcatcactgatctacgtaaacaagttgaagaattgtttgaaaggaaatatgctcaagccataaaagccaaaggtccggtgacgatcccgtaccctcttttccagtctcatgttgaagatctttatgtagaaggacttcctgaaggaattccttttagaaggccatctacttacggaattcctcgcctggagaggatattacttgcaaaggaaaggattcgttttgtgattaagaaacatgagcttctgaattcaacacgtgaagatttacagcttgataagccagcttcaggagtaaaggaagaatggtatgccagaatcactaaattaagaaagatggtggatcagcttttctgcaaaaaatttgcggaagccttggggagcactgaagccaaggctgtaccgtaccaaaaatttgaggcacacccgaatgatctgtacgtggaaggactgccagaaaacattcctttccgaagtccctcatggtatggaatcccaaggctggaaaaaatcattcaagtgggcaatcgaattaaatttgttattaaaagaccagaacttctgactcacagtaccactgaagttactcagccaagaacgaatacaccagtcaaagaagattggaatgtcagaattaccaagctacggaagcaagtggaagagatttttaatttgaaatttgctcaagctcttggactcaccgaggcagtaaaagtaccatatcctgtgtttgaatcaaacccggagttcttgtatgtggaaggcttgccagaggggattcccttccgaagccctacctggtttggaattccacgacttgaaaggatcgtccgcgggagtaataaaatcaagttcgttgttaaaaaacctgaactagttatttcctacttgcctcctgggatggctagtaaaataaacactaaagctttgcagtcccccaaaagaccacgaagtcctgggagtaattcaaaggttcctgaaattgaggtcaccgtggaaggccctaataacaacaatcctcaaacctcagctgttcgaaccccgacccagactaacggttctaacgttcccttcaagccacgagggagagagttttcctttgaggcctggaatgccaaaatcacggacctaaaacagaaagttgaaaatctcttcaatgagaaatgtggggaagctcttggccttaaacaagctgtgaaggtgccgttcgcgttatttgagtctttcccggaagacttttatgtggaaggcttacctgagggtgtgccattccgaagaccatcgacttttggcattccgaggctggagaagatactcagaaacaaagccaaaattaagttcatcattaaaaagcccgaaatgtttgagacggcgattaaggagagcacctcctctaagagccctcccagaaaaataaattcatcacccaatgttaatactactgcatcaggtgttgaagaccttaacatcattcaggtgacaattccagatgatgataatgaaagactctcgaaagttgaaaaagctagacagctaagagaacaagtgaatgacctctttagtcggaaatttggtgaagctattggtatgggttttcctgtgaaagttccctacaggaaaatcacaattaaccctggctgtgtggtagttgatggcatgcccccgggggtgtccttcaaagcccccagctacctggaaatcagctccatgagaaggatcttagactctgccgagtttatcaaattcacggtcattagaccatttccaggacttgtgattaataaccagctggttgatcagagtgagtcagaaggccccgtgatacaagaatcagctgaaccaagccagttggaagttccagccacagaagaaataaaagagactgatggaagctctcagatcaagcaagaaccagaccccacgtggtagacctcttccctcctaggcttaaagtatcagtggttgagaagagcttttcggacctgttactaccccaagctgtgtaatatacttgtataacagaaataccttctatacaaacctttttttctacttttagatagaaatgtctactttttcagcagttctgtgaattaaagagcagagtgactgtgggtctggaatggctggtgtacttgggaatgtactatcaggattttacagcaatgctgggaaatgacagggaaaatgacaggaatgaatctcaccagattttttatgtactcagcagagccttgagttacggtgtttattttccaatcaagtgaagatatctcctacttctcctactggaacatctcagcttctgcagtgaagaaaaattcctgtgatagttcagttctttagtttttctatttgaaaaaaaaaaatcatttaaatgatcctttgttcacggctctccttaatgactgagtgaacagttcctatctgtatatttgactaaaccttttcctaagctatctctcatggttcctatgtttttttatcataattaaaagcaaaaccatctggatcacctaacagtcagaggtcagtatctcagcgtgtgaattatagaggaaatacagagagaacctcttccacttttacttttcgtccaaataaaatgcatggtgtaccagaagttgaagatcgggttgaggattggggctagctcgatgacactaaggccccaacatcgcgggacctgctgtggcgcggattcttaggaacgctgttctagccggccccctctccaggggtcgccgtggccggcattatttcctagttcttcttgtaaccctgaggtgccagcgcggggagtgaggaggggtcagggggctaaggatgcaacctctgacgttctgcgccttcctaggagagtcttacatgtgttgagatttcacaagcaatgcgagttgtaaaataccagctctacaagaagctaggctctgtgacggcatagttttcagtagctttatcacaatattcacaatggagaattatatgacatggtagcagaaataggcccttttatgtgttgcttctattttacctcaaattgtagatatagggtaatcaataaaatccatccatgcctttcacacactaa

SEQ ID NO: 136926 - DNA, 4415 bp, Homo sapiens
  Payload ID: 6807
  Gene Symbol: GTF2I
  Gene Name: general transcription factor IIi
  Uniprot ID: P78347
  ENST ID: ENST00000614986
  CDS Start-End: 317-3253
cgcccccccgcttccccgcacgcgctctccagccgcggccgcccgcctgccgcggtcaccccggcctctgcctctgtcccccagtgatcggatcaaggcgctgagcgaggccctgcctgcggggcggccatgcggcggtgacaggagcgcgaccgacacgcacgggcccctcgccccctctcgcctcccgtccgctcgccagctcccctcagccgaggctgctccgcggcggccgcagcccgcgcgcggcccacactcgcctcccctcggcacccccggccccggagctgcctggaggcggccgcactcggggatcatggcccaagttgcaatgtccaccctccccgttgaagatgaggagtcctcggagagcaggatggtggtgacattcctcatgtcagctctcgagtccatgtgtaaagaactggccaagtccaaagccgaagtggcctgcattgcagtgtatgaaacagacgtgtttgtcgtcggaactgaaagaggacgtgcttttgtcaataccagaaaggattttcaaaaagattttgtaaaatattgtgttgaagaagaagaaaaagctgcagagatgcataaaatgaaatctacaacccaggcaaatcggatgagtgtagatgctgtagaaattgaaacactcagaaaaacagttgaggactatttctgcttttgctatgggaaagctttaggcaaatccacagtggtacctgtaccatatgagaagatgctgcgagaccagtcggctgtggtagtgcaggggcttccggaaggtgttgcctttaaacaccccgagaactatgatcttgcaaccctgaaatggattttggagaacaaagcagggatttcattcatcattaagagaccttttttagagccaaagaagcatgtaggtggtcgtgtgatggtaacagatgctgacaggtcaatactatctccaggtggaagttgtggccccatcaaagtgaaaactgaacccacagaagattctggcatttccctggaaatggcagctgtgacagtaaaggaagaatcagaagatcctgattattatcaatataacattcaaggaagccaccattcttcagagggcaatgaaggcacagaaatggaagtaccagcagaagattctactcaacatgtcccttcagaaacaagtgaggaccctgaagttgaggtgactattgaagatgatgattattctccaccgtctaagagaccaaaggccaatgagctaccgcagccaccagtcccggaacccgccaatgctgggaagcggaaagtgagggagttcaacttcgagaaatggaatgctcgcatcactgatctacgtaaacaagttgaagaattgtttgaaaggaaatatgctcaagccataaaagccaaaggtccggtgacgatcccgtaccctcttttccagtctcatgttgaagatctttatgtagaaggacttcctgaaggaattccttttagaaggccatctacttacggaattcctcgcctggagaggatattacttgcaaaggaaaggattcgttttgtgattaagaaacatgagcttctgaattcaacacgtgaagatttacagcttgataagccagcttcaggagtaaaggaagaatggtatgccagaatcactaaattaagaaagatggtggatcagcttttctgcaaaaaatttgcggaagccttggggagcactgaagccaaggctgtaccgtaccaaaaatttgaggcacacccgaatgatctgtacgtggaaggactgccagaaaacattcctttccgaagtccctcatggtatggaatcccaaggctggaaaaaatcattcaagtgggcaatcgaattaaatttgttattaaaagaccagaacttctgactcacagtaccactgaagttactcagccaagaacgaatacaccagtcaaagaagattggaatgtcagaattaccaagctacggaagcaagtggaagagatttttaatttgaaatttgctcaagctcttggactcaccgaggcagtaaaagtaccatatcctgtgtttgaatcaaacccggagttcttgtatgtggaaggcttgccagaggggattcccttccgaagccctacctggtttggaattccacgacttgaaaggatcgtccgcgggagtaataaaatcaagttcgttgttaaaaaacctgaactagttatttcctacttgcctcctgggatggctagtaaaataaacactaaagctttgcagtcccccaaaagaccacgaagtcctgggagtaattcaaaggttcctgaaattgaggtcaccgtggaaggccctaataacaacaatcctcaaacctcagctgttcgaaccccgacccagactaacggttctaacgttcccttcaagccacgagggagagagttttcctttgaggcctggaatgccaaaatcacggacctaaaacagaaagttgaaaatctcttcaatgagaaatgtggggaagctcttggccttaaacaagctgtgaaggtgccgttcgcgttatttgagtctttcccggaagacttttatgtggaaggcttacctgagggtgtgccattccgaagaccatcgacttttggcattccgaggctggagaagatactcagaaacaaagccaaaattaagttcatcattaaaaagcccgaaatgtttgagacggcgattaaggagagcacctcctctaagagccctcccagaaaaataaattcatcacccaatgttaatactactgcatcaggtgttgaagaccttaacatcattcaggtgacaattccagatgatgataatgaaagactctcgaaagttgaaaaagctagacagctaagagaacaagtgaatgacctctttagtcggaaatttggtgaagctattggtatgggttttcctgtgaaagttccctacaggaaaatcacaattaaccctggctgtgtggtagttgatggcatgcccccgggggtgtccttcaaagcccccagctacctggaaatcagctccatgagaaggatcttagactctgccgagtttatcaaattcacggtcattagaccatttccaggacttgtgattaataaccagctggttgatcagagtgagtcagaaggccccgtgatacaagaatcagctgaaccaagccagttggaagttccagccacagaagaaataaaagagactgatggaagctctcagatcaagcaagaaccagaccccacgtggtagacctcttccctcctaggcttaaagtatcagtggttgagaagagcttttcggacctgttactaccccaagctgtgtaatatacttgtataacagaaataccttctatacaaacctttttttctacttttagatagaaatgtctactttttcagcagttctgtgaattaaagagcagagtgactgtgggtctggaatggctggtgtacttgggaatgtactatcaggattttacagcaatgctgggaaatgacagggaaaatgacaggaatgaatctcaccagattttttatgtactcagcagagccttgagttacggtgtttattttccaatcaagtgaagatatctcctacttctcctactggaacatctcagcttctgcagtgaagaaaaattcctgtgatagttcagttctttagtttttctatttgaaaaaaaaaaatcatttaaatgatcctttgttcacggctctccttaatgactgagtgaacagttcctatctgtatatttgactaaaccttttcctaagctatctctcatggttcctatgtttttttatcataattaaaagcaaaaccatctggatcacctaacagtcagaggtcagtatctcagcgtgtgaattatagaggaaatacagagagaacctcttccacttttacttttcgtccaaataaaatgcatggtgtaccagaagttgaagatcgggttgaggattggggctagctcgatgacactaaggccccaacatcgcgggacctgctgtggcgcggattcttaggaacgctgttctagccggccccctctccaggggtcgccgtggccggcattatttcctagttcttcttgtaaccctgaggtgccagcgcggggagtgaggaggggtcagggggctaaggatgcaacctctgacgttctgcgccttcctaggagagtcttacatgtgttgagatttcacaagcaatgcgagttgtaaaataccagctctacaagaagctaggctctgtgacggcatagttttcagtagctttatcacaatattcacaatggagaattatatgacatggtagcagaaataggcccttttatgtgttgcttctattttacctcaaattgtagatatagggtaatcaataaaatccatccatgcctttcacacactaa

SEQ ID NO: 136927 - DNA, 1383 bp, Homo sapiens
  Payload ID: 6808
  Gene Symbol: GTF3A
  Gene Name: general transcription factor IIIA
  Uniprot ID: Q92664
  ENST ID: ENST00000381140
  CDS Start-End: 195-1292
atgcgcgatctcccggagcatgcgcagcagcggcgccgacgcggggcggtgcctggtgaccgcgcgcgctcccggaagtgtgccggcgtcgcgcgaaggttcagcagggagccgtgggccgggcgcgccggttcccggcacgtgtctcggcacgtggcagcgcgcctggccctgggcttggaggcgccggcgccctggatccgccggccgtggtcgccgagtcggtgtcgtccttgaccatcgccgacgcgttcattgcagccggcgagagctcagctccgaccccgccgcgccccgcgcttcccaggaggttcatctgctccttccctgactgcagcgccaattacagcaaagcctggaagcttgacgcgcacctgtgcaagcacacgggggagagaccatttgtttgtgactatgaagggtgtggcaaggccttcatcagggactaccatctgagccgccacattctgactcacacaggagaaaagccgtttgtttgtgcagccaatggctgtgatcaaaaattcaacacaaaatcaaacttgaagaaacattttgaacgcaaacatgaaaatcaacaaaaacaatatatatgcagttttgaagactgtaagaagacctttaagaaacatcagcagctgaaaatccatcagtgccagcataccaatgaacctctattcaagtgtacccaggaaggatgtgggaaacactttgcatcacccagcaagctgaaacgacatgccaaggcccacgagggctatgtatgtcaaaaaggatgttcctttgtggcaaaaacatggacggaacttctgaaacatgtgagagaaacccataaagaggaaatactatgtgaagtatgccggaaaacatttaaacgcaaagattaccttaagcaacacatgaaaactcatgccccagaaagggatgtatgtcgctgtccaagagaaggctgtggaagaacctatacaactgtgtttaatctccaaagccatatcctctccttccatgaggaaagccgcccttttgtgtgtgaacatgctggctgtggcaaaacatttgcaatgaaacaaagtctcactaggcatgctgttgtacatgatcctgacaagaagaaaatgaagctcaaagtcaaaaaatctcgtgaaaaacggagtttggcctctcatctcagtggatatatccctcccaaaaggaaacaagggcaaggcttatctttgtgtcaaaacggagagtcacccaactgtgtggaagacaagatgctctcgacagttgcagtacttacccttggctaagaactgcactgctttgtttaaaggactgcagaccaaggagcgagctttctctcagagcatgcttttctttattaaaattactgatgcagaa

SEQ ID NO: 136928 - DNA, 792 bp, Homo sapiens
  Payload ID: 6808
  Gene Symbol: GTF3A
  Gene Name: general transcription factor IIIA
  ENST ID: ENST00000438571
  CDS Start-End: 63-377
tcccggcacgtgtctcggcacgtggcagcgcgcctggccctgggcttggaggcgccggcgccctggatccgccggccgtggtcgccgagtcggtgtcgtccttgaccatcgccgacgcgttcattgcagccggcgagagctcagctccgaccccgccgcgccccgcgcttcccaggaggttcatctgctccttccctgactgcagcgccaattacagcaaagcctggaagcttgacgcgcacctgtgcaagcacacgggggaggtgaggggggcgaggctgccaaccctgggcctagggatggcgcgtggccccggggtagccactgcagtcgtggccagggccgcaggccccgctgtgcagcgcgttcagctttgacatccaggacttggggaaggagctgaggaagtagacaggaagttgtaggaccttcgttctgcgaccttgatatccatggcaggggctcgggatttactaagcagtcattgatcagaccatttgtttgtgactatgaagggtgtggcaaggccttcatcagggactaccatctgagccgccacattctgactcacacaggagaaaagccgtttgtttgtgcagccaatggctgtgatcaaaaattcaacacaaaatcaaacttgaagaaacattttgaacgcaaacatgaaaatcaacaaaaacaatatatatgcagttttgaagactgtaagaagacctttaagaaacatcagcagctgaaaatccatcagtgccagcataccaatgaacctctattcaagtgtacccaggaagg

SEQ ID NO: 136929 - DNA, 1191 bp, Homo sapiens
  Payload ID: 6808
  Gene Symbol: GTF3A
  Gene Name: general transcription factor IIIA
  ENST ID: ENST00000419181
  CDS Start-End: 77-643
ccgggcgcgccggttcccggcacgtgtctcggcacgtggcagcgcgcctggccctgggcttggaggcgccggcgccctggatccgccggccgtggtcgccgagtcggtgtcgtccttgaccatcgccgacgcgttcattgcagccggcgagagctcagctccgaccccgccgcgccccgcgcttcccaggaggttcatctgctccttccctgactgcagcgccaattacagcaaagcctggaagcttgacgcgcacctgtgcaagcacacgggggagagaccatttgtttgtgactatgaagggtgtggcaaggccttcatcagggactaccatctgagccgccacattctgactcacacaggagaaaagccgtttgtttgtgcagccaatggctgtgatcaaaaattcaacacaaaatcaaacttgaagaaacattttgaacgcaaacatgaaaatcaacaaaaacaatatatatgcagttttgaagactgtaagaagacctttaagaaacatcagcagctgaaaatccatcagtgccagcataccaatgaacctctattcaagctatgtatgtcaaaaaggatgttcctttgtggcaaaaacatggacggaacttctgaaacatgtgagagaaacccataaagaggaaatactatgtgaagtatgccggaaaacatttaaacgcaaagattaccttaagcaacacatgaaaactcatgccccagaaagggatgtatgtcgctgtccaagagaaggctgtggaagaacctatacaactgtgtttaatctccaaagccatatcctctccttccatgaggaaagccgcccttttgtgtgtgaacatgctggctgtggcaaaacatttgcaatgaaacaaagtctcactaggcatgctgttgtacatgatcctgacaagaagaaaatgaagctcaaagtcaaaaaatctcgtgaaaaacggagtttggcctctcatctcagtggatatatccctcccaaaaggaaacaagggcaaggcttatctttgtgtcaaaacggagagtcacccaactgtgtggaagacaagatgctctcgacagttgcagtacttacccttggctaagaactgcactgctttgtttaaaggactgcagaccaaggagcgagctttctctcagagcatgcttttctttattaaaattactgatgcagaa

SEQ ID NO: 136930 - DNA, 1377 bp, Homo sapiens
  Payload ID: 6808
  Gene Symbol: GTF3A
  Gene Name: general transcription factor IIIA
  ENST ID: ENST00000439403
  CDS Start-End: 20-1288
atgcgcgatctcccggagcatgcgcagcagcggcgccgacgcggggcggtgcctggtgaccgcgcgcgctcccggaagtgtgccggcgtcgcgcgaaggttcagcagggagccgtgggccgggcgcgcggttcccggcacgtgtctcggcacgtggcagcgcgcctggccctgggcttggaggcgccggcgccctggatccgccggccgtggtcgccgagtcggtgtcgtccttgaccatcgccgacgcgttcattgcagccggcgagagctcagctccgaccccgccgcgccccgcgcttcccaggaggttcatctgctccttccctgactgcagcgccaattacagcaaagcctggaagcttgacgcgcacctgtgcaagcacacgggggagagaccatttgtttgtgactatgaagggtgtggcaaggccttcatcagggactaccatctgagccgccacattctgactcacacaggagaaaagccgtttgtttgtgcagccaatggctgtgatcaaaaattcaacacaaaatcaaacttgaagaaacattttgaacgcaaacatgaaaatcaacaaaaacaatatatatgcagttttgaagactgtaagaagacctttaagaaacatcagcagctgaaaatccatcagtgccagcataccaatgaacctctattcaagtgtacccaggaaggatgtgggaaacactttgcatcacccagcaagctgaaacgacatgccaaggcccacgagggctatgtatgtcaaaaaggatgttcctttgtggcaaaaacatggacggaacttctgaaacatgtgagagaaacccataaagaggaaatactatgtgaagtatgccggaaaacatttaaacgcaaagattaccttaagcaacacatgaaaactcatgccccagaaagggatgtatgtcgctgtccaagagaaggctgtggaagaacctatacaactgtgtttaatctccaaagccatatcctctccttccatgaggaaagccgcccttttgtgtgtgaacatgctggctgtggcaaaacatttgcaatgaaacaaagtctcactaggcatgctgttgtacatgatcctgacaagaagaaaatgaagctcaaagtcaaaaaatctcgtgaaaaacggagtttggcctcttctcagtggatatatcctcccaaaaggaaacaagggcaaggcttatctttgtgtcaaaacggagagtcacccaactgtgtggaagacaagatgctctcgacagttgcagtacttacccttggctaagaactgcactgctttgtttaaaggactgcagaccaaggagcgagctttctctcagagcatgcttttctttattaaaattactgatgcag

SEQ ID NO: 136931 - DNA, 688 bp, Homo sapiens
  Payload ID: 6808
  Gene Symbol: GTF3A
  Gene Name: general transcription factor IIIA
  ENST ID: ENST00000435781
  CDS Start-End: 101-505
gaaggttcagcagggagccgtgggccgggcgcgccggttcccggcacgtgtctcggcacgtggcagcgcgcctggccctgggcttggaggcgccggcgccctggatccgccggccgtggtcgccgagtcggtgtcgtccttgaccatcgccgacgcgttcattgcagccggcgagagctcagctccgaccccgccgcgccccgcgcttcccaggaggttcatctgctccttccctgactgcagcgccaattacagcaaagcctggaagcttgacgcgcacctgtgcaagcacacgggggagagaccatttgtttgtgactatgaagggtgtggcaaggccttcatcagggactaccatctgagccgccacattctgactcacacaggagaaaagccgtttgtttgtgcagccaatggctgtgatcaaaaattcaacacaaaatcaaacttgaagaaacattttgaacgcaaacatgaaaatcaacaaaaacaatatatattttgaagactgtaagaagacctttaagaaacatcagcagctgaaaatccatcagtgccagcataccaatgaacctctattcaagtgtacccaggaaggatgtgggaaacactttgcatcacccagcaagctgaaacgacatgccaaggcccacgagggctatgtatgtcaaaaaggatgttcctttgt

SEQ ID NO: 136932 - DNA, 7018 bp, Homo sapiens
  Payload ID: 6809
  Gene Symbol: GTF3C1
  Gene Name: general transcription factor IIIC, polypeptide 1, alpha 220kDa
  Uniprot ID: Q12789
  ENST ID: ENST00000356183
  CDS Start-End: 17-6346
gccgactgaagtagcaatggacgcgctggagtcgttgttggacgaagtcgctctggaggggctcgatggcctgtgtctgccagcgctgtggagccggctggagacgcgagtgccgcccttcccgctgcctttggaaccctgcacgcaggagtttctctggcgggccctcgccacgcacccgggcatcagcttctatgaggagcctcgggagcgacccgacctacagctccaggaccggtatgaagaaattgatttggaaactggaattttggagtctaggagggacccggtggctttggaggatgtctaccccattcatatgatcttagagaataaggatggcatccagggctcatgccgctactttaaggagaggaaaaacattaccaatgacatcagaaccaagtccttgcagcctcgctgtacaatggtggaagcctttgacaggtgggggaagaaactgatcatcgttgcctcccaggccatgcggtacagggccttgataggccaggagggggatcccgacctgaagctgcccgacttctcctactgcatcctggaacggctaggccggtccaggtggcaaggggagctccagcgagaccttcacaccactgctttcaaggttgatgctgggaagctgcactatcacagaaaaattttgaacaaaaacgggctgattacaatgcagtcccatgtgatccgattacccactggagcccagcaacactcaatcctcctcctactgaaccggtttcatgtggacaggaggagcaaatacgacatcctcatggagaagctttcggtcatgctgagcacacggactaaccacatagagacgctgggaaagctgagggaagagctggggctgtgcgaaaggacgtttaagcgtctgtaccagtatatgctgaacgccgggctagccaaggtggtgtctcttcgcttgcaagagatccaccctgaatgtggaccttgtaagacaaagaaagggaccgacgtcatggttcggtgcctcaagctgctgaaggaatttaaacggaatgaccatgatgatgacgaggacgaggaggtcatctccaagacagtgcctccagtggacattgtgttcgagcgggatatgctcacacagacctacgacctcattgagcgcagaggcacgaaaggaatttcccaagctgaaatccgagtggctatgaatgtgggaaaactagaagcaagaatgctgtgccgacttcttcaaagattcaaagttgtcaagggattcatggaagacgaaggtcggcagcgaaccaccaagtacatttcctgcgtgtttgcagaggagagcgacctaagccggcagtaccaaagagagaaggcccgcagcgagctcttgaccaccgtgagcctggcgtctatgcaggaggagtcgcttctgcctgaaggcgaggacaccttcctctctgagtcggacagtgaggaggagaggagcagcagcaagcggagaggcagagggtcccagaaagacacaagagcctctgcaaacctccggcccaagacccagcctcatcactccaccccaaccaagggtgggtggaaagttgtaaacctacacccattgaaaaagcagccgccctccttcccaggagctgctgaagagagagcctgccagagccttgccagcagggacagcctcttagataccagcagcgtctcagaacccaacgtgtcctttgtctcccactgtgcggacagcaacagtggtgacatagctgtgatcgaggaggtccggatggaaaacccaaaggagagtagcagttccctgaagactgggaggcacagctcaggccaagacaaaccacacgaaacttaccgactgctgaaacgcaggaatctgatcatagaagctgtcaccaatcttcgcttaatcgagagtttattcacgattcagaagatgatcatggatcaggagaagcaggaaggcgtgtccaccaagtgctgcaagaagtccattgtccgcttggtgcggaacctgtctgaggaaggtctcttgcgattgtatcggaccactgtcattcaagatggcatcaagaagaaggtggatctggtggtgcacccgtccatggaccagaacgaccctctagtgagaagtgccatcgagcaggtccgcttccggatctccaattcaagcacagccaacagggttaaaacttcccagcctccagtgccccaaggggaggcagaagaagacagtcaaggaaaagagggcccaagtggatcaggggactctcagctgagtgcttcctctagatcagaaagtggacggatgaaaaaaagtgataataaaatgggcataaccccgcttagaaattatcaccccattgtagttcccggactggggcgttctctaggatttctgcccaaaatgcctcgcctgcgggtggtccacatgtttctgtggtacctcatctacgggcaccctgccagcaacaccgtggagaagccaagcttcatcagtgaacggagaacgataaagcaggagtcaggcagggcaggcgtccggccgtcctcctctggaagtgcctgggaggcctgctctgaagccccatctaaaggcagccaagatggtgtcacctgggaggctgaagtggagcttgccacggagacagtgtatgtcgacgatgcctcgtggatgcgctacatccccccaatcccagtccacagggacttcggctttggctgggctctcgtcagcgacatcctcctctgccttcccctctccatcttcatccagattgtgcaagtcagctacaaggtggacaacctggaggaatttctgaacgacccgctgaagaagcacacgctgatccgctttctccccaggcccattcggcagcagcttctgtacaagaggcgttacattttttcggtggtggagaaccttcagaggctgtgctacatggggctgctacagtttggtcccacggaaaagtttcaggataaagatcaggtctttatcttcttgaagaagaatgcagtcattgttgacactaccatctgcgacccacattacaacctggcccgcagcagccggcccttcgagaggcgcctctatgtcctgaactcaatgcaggatgtggaaaactactggtttgacctgcagtgcgtctgcctcaacaccccactaggcgtggtgcgctgcccgcgcgtcaggaagaacagcagcacagaccagggcagcgacgaggagggcagcctgcagaaggagcaggagagcgccatggacaagcacaacctggagcgcaagtgcgccatgctggagtacaccactggaagccgtgaggtggtggatgaaggcttgatccctggagatgggctgggtgccgcagggctcgattccagcttctacggacacctcaagcgcaactggatctggaccagctacatcatcaaccaggccaaaaaggagaacactgccgcagagaatggactcacagtgaggctccagacatttctgtccaagcgcccaatgcccctcagtgccagaggcaacagcaggttgaatatttggggggaagcaagagtaggctccgagctctgtgctggctgggaagagcagtttgaggtggaccgagagccctcgctggaccgaaaccggagagtgaggggtgggaaaagccagaagcggaagcggctgaagaaggaccctgggaagaagatcaagagaaagaagaaaggagagttcccaggagaaaaaagcaaaaggctgcgctaccatgatgaagccgaccagagtgccctgcagcggatgacgcggcttcgtgtcacctggtctatgcaggaggatgggctgcttgtgctgtgccgcattgccagcaatgtcctcaacaccaaggtgaagggcccatttgtcacctggcaggtggtacgggacattttgcatgccacgtttgaagagtctttggataaaacatctcattccgttggacgaagagctcgctacatagtcaaaaacccacaggcctatctcaactataaagtgtgcctggccgaggtgtaccaggataaagcacttgttggagatttcatgaatcgaagaggtgactatgatgacccaaaggtttgtgccaacgagtttaaagaatttgtggagaagcttaaagaaaagttcagttcagccctaaggaattctaaccttgaaatcccagacacactccaggagctgttcgccaggtaccgagttttggcaattggggatgaaaaagatcaaaccaggaaagaggatgaacttaacagcgtggatgacatccactttctggtgcttcagaacctgatccagagcacgctggccctctcagacagtcagatgaagtcctaccagtcattccagactttccgcctctatcgggagtacaaggaccacgttcttgtgaaggccttcatggagtgccagaagaggagcttggtcaaccggcgccgggtcaaccacacgctgggccccaagaagaaccgggccctccccttcgtgccaatgtcctaccagctatcccagacctactacaggatttttacgtggcgatttccaagcaccatctgcacggagtcattccagtttttggacagaatgcgggctgccggcaagttggaccagcctgatcgtttctctttcaaagaccaggataataacgagcccacaaacgacatggtggccttttcactggacggccctggaggaaattgtgtggccgtcctgaccctcttctctctgggcctcatttctgtggatgtcaggatcccggagcagatcatcgtggtagacagctcaatggtggagaatgaggtcatcaaaagcttggggaaggacggcagcctggaggatgacgaggatgaagaggatgacttggacgaaggtgtagggggcaagcgccggagcatggaggtgaaacctgcgcaagcctcccacaccaactacctgctgatgaggggctactactcccccggcatcgtcagcacccgcaacctcaaccccaacgacagcattgtggtcaactcctgccagatgaagttccagctccgctgcacccctgtgcccgcccggctcaggcccgctgccgctcctctggaagagctaacaatgggaacctcctgcctccctgatacgttcaccaagctgataaacccccaggaaaacacctgcagcttggaggagtttgtcctccagctggagctgtctgggtatagtcccgaagacctgactgctgccttggagatcttggaagccattatagccacgggttgttttgggattgacaaggaggagctgcgcagacggttctcggccttggagaaggcaggtggtgggcgcaccaggacattcgcagattgcatccaggccctcctggagcagcatcaggtgctggaggtcggtggcaacactgcgcgcctggtagccatgggctctgcctggccttggctcctgcactccgtgcggctgaaagacagagaagacgccgacatccagagagaagacccccaggccagacccctggaggggtcttccagtgaggacagcccccccgaggggcaggcacctccttctcacagcccccggggcaccaagaggcgcgccagctgggccagtgagaatggggagaccgacgccgagggcacccagatgacccctgccaagaggccagcgctccaggactcaaatttggcccccagccttgggcccggagctgaagatggggcagaagcccaggccccatctccacccccagctcttgaagacaccgctgcagcgggagcagcacaggaagaccaagagggtgtcggtgagttcagttccccaggccaagagcagctgagcggccaggcgcagcctccagagggctctgaagaccccagagggttcacagagagtttcggagctgccaacatctcccaggcagcacgggaaagggactgtgagagtgtctgcttcatcggccggccgtggcgtgtcgtggatggccacctgaaccttcctgtatgcaagggtatgatggaggccatgctgtaccacatcatgaccaggcctggcatccccgagagctccctgctgcgccactaccagggggtcctgcagcccgtcgccgtgctggagttgctccagggcctggagtccctcggctgcatccggaagcgctggctgagaaagccaaggcctgtctcgctcttctctacacccgtggtggaagaggtggaagtgccctccagcctggacgagagccccatggctttctatgagcccaccttggactgtaccctccggctgggccgtgtgttcccccacgaggtcaactggaacaagtggatccacctctaggacccctgtgggcgtcccctccctcccagccaccgcctgccacaccactcctgcctggtgctcggcagaccccactgtgccctggccttgggtctgccgagcctcctgcagcaggggacgggtgctttggccagagtcacagactgacacgtttcccactgtactggaactctggaaagaggggctccccgacctgcccatcccccaggctcttctgggccttccccttgggaactggcctcatcacactgggagttggtgcttcttgtctctgggtctccagagtttgccccgcctgtgcacacctcacattccagactctagccatctcggcaggatctcctggctccttgagtgcccaggtgccaccaagaggaagggccttgtgggatacaccttgcagaatagggatcggtgtgccccgctgcgaggggccccccatgggggctgtggcccctccgcaggcaggacatcccaacccctggctgggactgaaccacccagagcggagcggctcccttttcagccttgtgagtcacctggcaggccccagctgggctggctgtccgtgtccctcagcctggctggtgattccttgcaggccagaaatgaagagtccctgtaggttttggttttgtttgttttattttgttctttcaccttttttcctca

SEQ ID NO: 136933 - DNA, 7015 bp, Homo sapiens
  Payload ID: 6809
  Gene Symbol: GTF3C1
  Gene Name: general transcription factor IIIC, polypeptide 1, alpha 220kDa
  Uniprot ID: Q12789
  ENST ID: ENST00000561623
  CDS Start-End: 24-6278
gggcgccgccgactgaagtagcaatggacgcgctggagtcgttgttggacgaagtcgctctggaggggctcgatggcctgtgtctgccagcgctgtggagccggctggagacgcgagtgccgcccttcccgctgcctttggaaccctgcacgcaggagtttctctggcgggccctcgccacgcacccgggcatcagcttctatgaggagcctcgggagcgacccgacctacagctccaggaccggtatgaagaaattgatttggaaactggaattttggagtctaggagggacccggtggctttggaggatgtctaccccattcatatgatcttagagaataaggatggcatccagggctcatgccgctactttaaggagaggaaaaacattaccaatgacatcagaaccaagtccttgcagcctcgctgtacaatggtggaagcctttgacaggtgggggaagaaactgatcatcgttgcctcccaggccatgcggtacagggccttgataggccaggagggggatcccgacctgaagctgcccgacttctcctactgcatcctggaacggctaggccggtccaggtggcaaggggagctccagcgagaccttcacaccactgctttcaaggttgatgctgggaagctgcactatcacagaaaaattttgaacaaaaacgggctgattacaatgcagtcccatgtgatccgattacccactggagcccagcaacactcaatcctcctcctactgaaccggtttcatgtggacaggaggagcaaatacgacatcctcatggagaagctttcggtcatgctgagcacacggactaaccacatagagacgctgggaaagctgagggaagagctggggctgtgcgaaaggacgtttaagcgtctgtaccagtatatgctgaacgccgggctagccaaggtggtgtctcttcgcttgcaagagatccaccctgaatgtggaccttgtaagacaaagaaagggaccgacgtcatggttcggtgcctcaagctgctgaaggaatttaaacggaatgaccatgatgatgacgaggacgaggaggtcatctccaagacagtgcctccagtggacattgtgttcgagcgggatatgctcacacagacctacgacctcattgagcgcagaggcacgaaaggaatttcccaagctgaaatccgagtggctatgaatgtgggaaaactagaagcaagaatgctgtgccgacttcttcaaagattcaaagttgtcaagggattcatggaagacgaaggtcggcagcgaaccaccaagtacatttcctgcgtgtttgcagaggagagcgacctaagccggcagtaccaaagagagaaggcccgcagcgagctcttgaccaccgtgagcctggcgtctatgcaggaggagtcgcttctgcctgaaggcgaggacaccttcctctctgagtcggacagtgaggaggagaggagcagcagcaagcggagaggcagagggtcccagaaagacacaagagcctctgcaaacctccggcccaagacccagcctcatcactccaccccaaccaagggtgggtggaaagttgtaaacctacacccattgaaaaagcagccgccctccttcccaggagctgctgaagagagagcctgccagagccttgccagcagggacagcctcttagataccagcagcgtctcagaacccaacgtgtcctttgtctcccactgtgcggacagcaacagtggtgacatagctgtgatcgaggaggtccggatggaaaacccaaaggagagtagcagttccctgaagactgggaggcacagctcaggccaagacaaaccacacgaaacttaccgactgctgaaacgcaggaatctgatcatagaagctgtcaccaatcttcgcttaatcgagagtttattcacgattcagaagatgatcatggatcaggagaagcaggaaggcgtgtccaccaagtgctgcaagaagtccattgtccgcttggtgcggaacctgtctgaggaaggtctcttgcgattgtatcggaccactgtcattcaagatggcatcaagaagaaggtggatctggtggtgcacccgtccatggaccagaacgaccctctagtgagaagtgccatcgagcaggtccgcttccggatctccaattcaagcacagccaacagggttaaaacttcccagcctccagtgccccaaggggaggcagaagaagacagtcaaggaaaagagggcccaagtggatcaggggactctcagctgagtgcttcctctagatcagaaagtggacggatgaaaaaaagtgataataaaatgggcataaccccgcttagaaattatcaccccattgtagttcccggactggggcgttctctaggatttctgcccaaaatgcctcgcctgcgggtggtccacatgtttctgtggtacctcatctacgggcaccctgccagcaacaccgtggagaagccaagcttcatcagtgaacggagaacgataaagcaggagtcaggcagggcaggcgtccggccgtcctcctctggaagtgcctgggaggcctgctctgaagccccatctaaaggcagccaagatggtgtcacctgggaggctgaagtggagcttgccacggagacagtgtatgtcgacgatgcctcgtggatgcgctacatccccccaatcccagtccacagggacttcggctttggctgggctctcgtcagcgacatcctcctctgccttcccctctccatcttcatccagattgtgcaagtcagctacaaggtggacaacctggaggaatttctgaacgacccgctgaagaagcacacgctgatccgctttctccccaggcccattcggcagcagcttctgtacaagaggcgttacattttttcggtggtggagaaccttcagaggctgtgctacatggggctgctacagtttggtcccacggaaaagtttcaggataaagatcaggtctttatcttcttgaagaagaatgcagtcattgttgacactaccatctgcgacccacattacaacctggcccgcagcagccggcccttcgagaggcgcctctatgtcctgaactcaatgcaggatgtggaaaactactggtttgacctgcagtgcgtctgcctcaacaccccactaggcgtggtgcgctgcccgcgcgtcaggaagaacagcagcacagaccagggcagcgacgaggagggcagcctgcagaaggagcaggagagcgccatggacaagcacaacctggagcgcaagtgcgccatgctggagtacaccactggaagccgtgaggtggtggatgaaggcttgatccctggagatgggctgggtgccgcagggctcgattccagcttctacggacacctcaagcgcaactggatctggaccagctacatcatcaaccaggccaaaaaggagaacactgccgcagagaatggactcacagtgaggctccagacatttctgtccaagcgcccaatgcccctcagtgccagaggcaacagcaggttgaatatttggggggaagcaagagtaggctccgagctctgtgctggctgggaagagcagtttgaggtggaccgagagccctcgctggaccgaaaccggagagtgaggggtgggaaaagccagaagcggaagcggctgaagaaggaccctgggaagaagatcaagagaaagaagaaaggagagttcccaggagaaaaaagcaaaaggctgcgctaccatgatgaagccgaccagagtgccctgcagcggatgacgcggcttcgtgtcacctggtctatgcaggaggatgggctgcttgtgctgtgccgcattgccagcaatgtcctcaacaccaaggtgaagggcccatttgtcacctggcaggtggtacgggacattttgcatgccacgtttgaagagtctttggataaaacatctcattccgttggacgaagagctcgctacatagtcaaaaacccacaggcctatctcaactataaagtgtgcctggccgaggtgtaccaggataaagcacttgttggagatttcatgaatcgaagaggtgactatgatgacccaaaggtttgtgccaacgagtttaaagaatttgtggagaagcttaaagaaaagttcagttcagccctaaggaattctaaccttgaaatcccagacacactccaggagctgttcgccaggtaccgagttttggcaattggggatgaaaaagatcaaaccaggaaagaggatgaacttaacagcgtggatgacatccactttctggtgcttcagaacctgatccagagcacgctggccctctcagacagtcagatgaagtcctaccagtcattccagactttccgcctctatcgggagtacaaggaccacgttcttgtgaaggccttcatggagtgccagaagaggagcttggtcaaccggcgccgggtcaaccacacgctgggccccaagaagaaccgggccctccccttcgtgccaatgtcctaccagctatcccagacctactacaggatttttacgtggcgatttccaagcaccatctgcacggagtcattccagtttttggacagaatgcgggctgccggcaagttggaccagcctgatcgtttctctttcaaagaccaggataataacgagcccacaaacgacatggtggccttttcactggacggccctggaggaaattgtgtggccgtcctgaccctcttctctctgggcctcatttctgtggatgtcaggatcccggagcagatcatcgtggtagacagctcaatggtggagaatgaggtcatcaaaagcttggggaaggacggcagcctggaggatgacgaggatgaagaggatgacttggacgaaggtgtagggggcaagcgccggagcatggaggtgaaacctgcgcaagcctcccacaccaactacctgctgatgaggggctactactcccccggcatcgtcagcacccgcaacctcaaccccaacgacagcattgtggtcaactcctgccagatgaagttccagctccgctgcacccctgtgcccgcccggctcaggcccgctgccgctcctctggaagagctaacaatgggaacctcctgcctccctgatacgttcaccaagctgataaacccccaggaaaacacctgcagcttggaggagtttgtcctccagctggagctgtctgggtatagtcccgaagacctgactgctgccttggagatcttggaagccattatagccacgggttgttttgggattgacaaggaggagctgcgcagacggttctcggccttggagaaggcaggtggtgggcgcaccaggacattcgcagattgcatccaggccctcctggagcagcatcaggtgctggaggtcggtggcaacactgcgcgcctggtagccatgggctctgcctggccttggctcctgcactccgtgcggctgaaagacagagaagacgccgacatccagagagaagacccccaggccagacccctggaggggtcttccagtgaggacagcccccccgaggggcaggcacctccttctcacagcccccggggcaccaagaggcgcgccagctgggccagtgagaatggggagaccgacgccgagggcacccagatgacccctgccaagaggccagcgctccaggactcaaatttggcccccagccttgggcccggagctgaagatggggcagaagcccaggccccatctccacccccagctcttgaagacaccgctgcagcgggagcagcacaggaagaccaagagggtgtcgggttcacagagagtttcggagctgccaacatctcccaggcagcacgggaaagggactgtgagagtgtctgcttcatcggccggccgtggcgtgtcgtggatggccacctgaaccttcctgtatgcaagggtatgatggaggccatgctgtaccacatcatgaccaggcctggcatccccgagagctccctgctgcgccactaccagggggtcctgcagcccgtcgccgtgctggagttgctccagggcctggagtccctcggctgcatccggaagcgctggctgagaaagccaaggcctgtctcgctcttctctacacccgtggtggaagaggtggaagtgccctccagcctggacgagagccccatggctttctatgagcccaccttggactgtaccctccggctgggccgtgtgttcccccacgaggtcaactggaacaagtggatccacctctaggacccctgtgggcgtcccctccctcccagccaccgcctgccacaccactcctgcctggtgctcggcagaccccactgtgccctggccttgggtctgccgagcctcctgcagcaggggacgggtgctttggccagagtcacagactgacacgtttcccactgtactggaactctggaaagaggggctccccgacctgcccatcccccaggctcttctgggccttccccttgggaactggcctcatcacactgggagttggtgcttcttgtctctgggtctccagagtttgccccgcctgtgcacacctcacattccagactctagccatctcggcaggatctcctggctccttgagtgcccaggtgccaccaagaggaagggccttgtgggatacaccttgcagaatagggatcggtgtgccccgctgcgaggggccccccatgggggctgtggcccctccgcaggcaggacatcccaacccctggctgggactgaaccacccagagcggagcggctcccttttcagccttgtgagtcacctggcaggccccagctgggctggctgtccgtgtccctcagcctggctggtgattccttgcaggccagaaatgaagagtccctgtaggttttggttttgtttgttttattttgttctttcaccttttttcctcattaaaaaaaaaaagtccctgtggagtgtacttatttattttttgattaaagggaagtaaaatgca

SEQ ID NO: 136934 - DNA, 540 bp, Homo sapiens
  Payload ID: 6809
  Gene Symbol: GTF3C1
  Gene Name: general transcription factor IIIC, polypeptide 1, alpha 220kDa
  ENST ID: ENST00000568569
  CDS Start-End: 1-540
gaaaggagagttcccaggagaaaaaagcaaaaggctgcgctaccatgatgaagccgaccagagtgccctgcagcggatgacgcggcttcgtgtcacctggtctatgcaggaggatgggctgcttgtgctgtgccgcattgccagcaatgtcctcaacaccaaggtgaagggcccatttgtcacctggcaggtggtacgggacattttgcatgccacgtttgaagagtctttggataaaacatctcattccgttggacgaagagctcgctacatagtcaaaaacccacaggcctatctcaactataaagtgtgcctggccgaggtgtaccaggataaagcacttgttggagatttcatgaatcgaagaggtgactatgatgacccaaagtgtgtgtggcaggacttgtgccaagtgaggccagtggacaaggagaggctaccttttccgccaaggaggccacaggtttgtgccaacgagtttaaagaatttgtggagaagcttaaagaaaagttcagttcagccctaaggaattctaacct

SEQ ID NO: 136935 - DNA, 897 bp, Homo sapiens
  Payload ID: 6809
  Gene Symbol: GTF3C1
  Gene Name: general transcription factor IIIC, polypeptide 1, alpha 220kDa
  ENST ID: ENST00000569653
  CDS Start-End: 1-644
gcaggaatctgatcatagaagctgtcaccaatcttcgcttaatcgagagtttattcacgattcagaagatgatcatggatcaggagaagcaggaagaccaagagggtgtcggtgagttcagttccccaggccaagagcagctgagcggccaggcgcagcctccagagggctctgaagaccccagagggttcacagagagtttcggagctgccaacatctcccaggcagcacgggaaagggactgtgagagtgtctgcttcatcggccggccgtggcgtgtcgtggatggccacctgaaccttcctgtatgcaagggtatgatggaggccatgctgtaccacatcatgaccaggcctggcatccccgagagctccctgctgcgccactaccagggggtcctgcagcccgtcgccgtgctggagttgctccagggcctggagtccctcggctgcatccggaagcgctggctgagaaagccaaggcctgtctcgctcttctctacacccgtggtggaagaggtggaagtgccctccagcctggacgagagccccatggctttctatgagcccaccttggactgtaccctccggctgggccgtgtgttcccccacgaggtcaactggaacaagtggatccacctctaggacccctgtgggcgtcccctccctcccagccaccgcctgccacaccactcctgcctggtgctcggcagaccccactgtgccctggccttgggtctgccgagcctcctgcagcaggggacgggtgctttggccagagtcacagactgacacgtttcccactgtactggaactctggaaagaggggctccccgacctgcccatcccccaggctcttctgggccttccccttgggaactggcctcatcacactggg

SEQ ID NO: 136936 - DNA, 933 bp, Homo sapiens
  Payload ID: 6809
  Gene Symbol: GTF3C1
  Gene Name: general transcription factor IIIC, polypeptide 1, alpha 220kDa
  ENST ID: ENST00000564664
  CDS Start-End: 1-420
gcagggctcgattccagcttctacggacacctcaagcgcaactggatctggaccagctacatcatcaaccaggccaaaaaggagaacactgccgcagagaatggactcacagtgaggctccagacatttctgtccaagcgcccaatgcccctcagtgccagaggcaacagcaggttgaatatttggggggaagcaagagtaggctccgagctctgtgctggctgggaagagcagtttgaggtggaccgagagccctcgctggaccgaaaccggagagtgaggggtgggaaaagccagaagcggaagcggctgaagaaggaccctgggaagaagatcaagagaaagaagaaaggttatgtgaaaaaagcaaaaggctgcgctaccatgatgaagccgaccagagtgccctgcagcggatgacgcggcttcgtgtcacctggtctatgcaggaggatgggctgcttgtgctgtgccgcattgccagcaatgtcctcaacaccaaggtgaagggcccatttgtcacctggcaggtggtacgggacattttgcatgccacgtttgaagagtctttggataaaacatctcattccgttggacgaagagctcgctacatagtcaaaaacccacaggcctatctcaactataagtaccgagttttggcaattggggatgaaaaagatcaaaccaggaaagaggatgaacttaacagcgtggatgacatccactttctggtgcttcagaacctgatccagagcacgctggccctctcagacagtcagatgaagtcctaccagtcattccagactttccgcctctatcgggagtacaaggaccacgttcttgtgaaggccttcatggagtgccagaagaggagcttggtcaaccggcgccgggtcaaccacacgctgggccccaagaagaaccgggccctcc

SEQ ID NO: 136937 - DNA, 721 bp, Homo sapiens
  Payload ID: 6809
  Gene Symbol: GTF3C1
  Gene Name: general transcription factor IIIC, polypeptide 1, alpha 220kDa
  ENST ID: ENST00000571886
  CDS Start-End: 1-255
tttctggtgcttcagaacctgatccagagcacgctggccctctcagacagtcagatgaagtcctaccagtcattccagactttccgcctctatcgggagtacaaggaccacgttcttgtgaaggccttcatggagtgccagaagaggagcttggtcaaccggcgccgggtcaaccacacgctgggccccaagaagaaccgggccctccccttcgtgccaatgtcctaccagctatcccagacctactacaggtgagtacctgtcaggagccttgggtactccgaggtggagccacgccctgtctgtaaagaggagcaaaggaagcactgtggccatgaaagcgtgtaggagccagggaccttcgcagcctcatgtgcaagatgccggcttgggtttcctgcagccccttacctccttcgtggtatggggatcaggatttttacgtggcgatttccaagcaccatctgcacggagtcattccagtttttggacagaatgcgggctgccggcaagttggaccagcctgatcgtttctctttcaaagaccaggataataacgagcccacaaacgacatggtggccttttcactggacggccctggaggaaattgtgtggccgtcctgaccctcttctctctgggcctcatttctgtggatgtcaggatcccggagcagatcatcgtggtagacagctcaatggtggagaatgaggtcatcaaaa

SEQ ID NO: 136938 - DNA, 3882 bp, Homo sapiens
  Payload ID: 6810
  Gene Symbol: GTF3C2
  Gene Name: general transcription factor IIIC, polypeptide 2, beta 110kDa
  Uniprot ID: Q8WUA4
  ENST ID: ENST00000264720
  CDS Start-End: 321-3056
ccctttttgacactgcaactcccatgaggccctgcagcgtccctggcgccgctgaagacgccctggaactcggctggcttcggagggctcggtgactctggccgcgctgcattatggaatacagagtctaagagaaaactagcccggcaccgactccggaccaagcacacgtgtttaccttgtgcactggggtgggggcgtcagtgaagagcagctaacaagatttcgtcataagaccgcgaccagacaggcggcgccatcttcgaacttagacttccggaaggactttggcgagggggcagccattttggggggtgctgatggatacctgcggggtcggctatgttgccctgggggaggccggccccgtggggaacatgactgtggtagactctcctggacaagaggtgctaaatcagcttgatgtcaagacctcttcagaaatgaccagtgcagaggcttccgtagagatgtcattacctacccctttgcctggatttgaggattctcctgatcagaggaggctccctccagagcaggaaagcctctccagactggaacagccagatctttcttcagagatgtcaaaggtctcaaagcctagggcctcaaagcctggccggaagagaggtggtaggacacgaaaaggccccaaaaggccccaacagcctaatcctccatcagccccactggttcctggtctcttagatcaatccaaccctctgtccacccccatgcctaagaaacgaggtcgaaagtccaaggcagagctgctgctgctgaagttgtcaaaagacctagatcggccagaatctcaatctccaaagaggccccctgaggactttgagaccccttctggggaacgaccccgccgaagggctgcccaagtggcacttctgtatcttcaggaactggctgaagagctctcaacagccctgcctgcccctgtgtcctgtcctgagggccccaaggtgagcagccccaccaaaccgaagaagatccggcagccagcagcctgtccaggtggagaagaggtggatggtgctccacgggatgaagacttttttctccaggttgaggctgaagatgtggaagaaagtgagggcccaagtgagagctcatctgaacctgagcctgtagtgccccgaagcaccccacgaggatctacttcagggaaacagaaaccacactgccgaggaatggctcccaatggcttaccaaatcatatcatggctcctgtttggaagtgcctccatctcaccaaggacttccgagagcagaaacattcatactgggagtttgctgagtggattcctttagcctggaagtggcacttgttatctgagcttgaggccgctccctacctgccccaggaggagaagtctccattgttttctgtacaacgtgaagggctacctgaagatggcaccctctaccgaataaacagatttagctcgatcacagcacatccagagcgctgggatgtgtccttcttcacggggggaccgctctgggctctggactggtgcccagtgccagagggggcaggagcctcgcaatatgtggctcttttctccagccctgacatgaatgagacacacccactgagccagcttcattcgggtcctgggctgctccagctctggggccttgggaccttgcagcaagaaagctgtcctggcaacagggcccactttgtctatgggattgcttgtgacaacggctgcatctgggacctcaagttctgccccagtggagcatgggaacttccaggcacccctcggaaggctcctctcctgccccggttgggtctcttggctctggcctgctcagacgggaaagtactgctattcagtctaccccatccggaggccctgctggctcagcaacccccagatgcagtgaagcctgccatatataaggtacaatgtgtggcaactctgcaggtggggtctatgcaagctacagacccctctgagtgtggtcagtgccttagcctggcctggatgcctaccaggccccaccaacacctagctgctggatattataatggcatggtggttttctggaaccttcccactaactcacccctgcagcggatacggctctctgatggctccttaaagctctaccccttccagtgtttcctagcccatgaccaggctgtgcgtacccttcaatggtgcaaagctaacagccatttccttgtctctgcggggagtgaccggaaaatcaaattctgggaccttcgacgtccttacgaacccataaactctatcaagcgcttcttgagtacagaactggcctggctgcttccctacaatggtgtcactgtggctcaggacaactgctatgcctcttatggactctgtgggattcattatattgacgctggttaccttggtttcaaggcctacttcactgctcctcgaaaaggcaccgtttggagtctttcaggatccgactggcttgggacaatagctgcaggagatatatccggggagctcattgctgctatattaccagatatggcactgaatccaataaatgtcaagcgacctgtagagcgaagatttcctatatataaagcagatctgataccgtatcaggacagtcctgaaggtccagaccattcttctgcttcatctggggtccccaaccctcctaaggctcgaacttacactgaaactgtcaaccatcactacttgctctttcaagacacagatttgggttcattccatgatctgctccgtagagaaccaatgctgcgcatgcaggagggagaggggcattctcaactctgcctggacaggctgcagctggaggctattcataaggtacgtttcagcccaaacctggactcctatggatggctggtatctggggggcagtcagggctggttcgaatccattttgtccgtggactcgcctccccactgggccaccgtatgcagcttgaaagccgagcccacttcaatgctatgttccaaccatcctcccccactagacggcctggcttctctccaaccagccatcgccttctgcccactccctagccttggcccacaccagatccttggagtgaagtcggtcaagaacaaatggcccctatgcacagagccataggaactgggggccttccctggacagtgatcatgccaggcctggacctttaggcctgcctccccaggactccttagatcccactctttctacagacttctgtgatcacagccccctgcgggcaggggggctctccctccaccaactctcaaggctcctcagcctaagactatggctcatgagaaacactcaggcctgacctaggcttgggagtcaaactgctcatattgagcatattgttaagtgggtaaagccaagtaaaggtactgggtgtttttgtgaccacttgtgaatgggtgtatggagaactgaaaagggtatctgcatgaaggctcctgtctgactattccaggatccaatattactgccttctgaaacttcctctttagggtaaccatcatgtatgcccacgagggtgatagtaattcgtgagactgaagttgcttagagtacttctttgaccaaggaataccacagacaccctaccgatagaacagtggctcagatcttacttgctcctgcttacgaagtattcccaatcactggtcatctgaccctacttgaacactcctgaacagtcatgttttttaaaatcttcctttatatcaagtcagagagtatacttctataaatttcactcatggatgttaggaaatctagtcatcttccctgtgattgccctgttaagtatttaaccatagctatcatgtgtttcccaaatcttctctagattaaatatcttcagttacttcaaccatt

SEQ ID NO: 136939 - DNA, 3992 bp, Homo sapiens
  Payload ID: 6810
  Gene Symbol: GTF3C2
  Gene Name: general transcription factor IIIC, polypeptide 2, beta 110kDa
  Uniprot ID: Q8WUA4
  ENST ID: ENST00000359541
  CDS Start-End: 431-3166
ggtaacgcggaagcctgtgtccgggcgtaggcgctgcatacgtagcgtccctcgaactcggcgaacctacagtagtccttgttagaaaaaccagggctcctctcccgcacaggctaggggagaaatctaccttcacgcccaggactgaagaagggcaggtgatggcccctagagtggttgtgggtcaatctctttcagctgtgtcccagcctcttcctcgaggaggctctttaaccccgagggttgtgccccgcgcgctgcaacgccattggcgtaaccaagggccagttgtgtttccctgtctagtccttttgtcccgtggcaagttggctgcctgttggggaagtcagaggtggcgacttcaactccgtcggaggcaactcactttgttggagggatgtatagggggcagccattttggggggtgctgatggatacctgcggggtcggctatgttgccctgggggaggccggccccgtggggaacatgactgtggtagactctcctggacaagaggtgctaaatcagcttgatgtcaagacctcttcagaaatgaccagtgcagaggcttccgtagagatgtcattacctacccctttgcctggatttgaggattctcctgatcagaggaggctccctccagagcaggaaagcctctccagactggaacagccagatctttcttcagagatgtcaaaggtctcaaagcctagggcctcaaagcctggccggaagagaggtggtaggacacgaaaaggccccaaaaggccccaacagcctaatcctccatcagccccactggttcctggtctcttagatcaatccaaccctctgtccacccccatgcctaagaaacgaggtcgaaagtccaaggcagagctgctgctgctgaagttgtcaaaagacctagatcggccagaatctcaatctccaaagaggccccctgaggactttgagaccccttctggggaacgaccccgccgaagggctgcccaagtggcacttctgtatcttcaggaactggctgaagagctctcaacagccctgcctgcccctgtgtcctgtcctgagggccccaaggtgagcagccccaccaaaccgaagaagatccggcagccagcagcctgtccaggtggagaagaggtggatggtgctccacgggatgaagacttttttctccaggttgaggctgaagatgtggaagaaagtgagggcccaagtgagagctcatctgaacctgagcctgtagtgccccgaagcaccccacgaggatctacttcagggaaacagaaaccacactgccgaggaatggctcccaatggcttaccaaatcatatcatggctcctgtttggaagtgcctccatctcaccaaggacttccgagagcagaaacattcatactgggagtttgctgagtggattcctttagcctggaagtggcacttgttatctgagcttgaggccgctccctacctgccccaggaggagaagtctccattgttttctgtacaacgtgaagggctacctgaagatggcaccctctaccgaataaacagatttagctcgatcacagcacatccagagcgctgggatgtgtccttcttcacggggggaccgctctgggctctggactggtgcccagtgccagagggggcaggagcctcgcaatatgtggctcttttctccagccctgacatgaatgagacacacccactgagccagcttcattcgggtcctgggctgctccagctctggggccttgggaccttgcagcaagaaagctgtcctggcaacagggcccactttgtctatgggattgcttgtgacaacggctgcatctgggacctcaagttctgccccagtggagcatgggaacttccaggcacccctcggaaggctcctctcctgccccggttgggtctcttggctctggcctgctcagacgggaaagtactgctattcagtctaccccatccggaggccctgctggctcagcaacccccagatgcagtgaagcctgccatatataaggtacaatgtgtggcaactctgcaggtggggtctatgcaagctacagacccctctgagtgtggtcagtgccttagcctggcctggatgcctaccaggccccaccaacacctagctgctggatattataatggcatggtggttttctggaaccttcccactaactcacccctgcagcggatacggctctctgatggctccttaaagctctaccccttccagtgtttcctagcccatgaccaggctgtgcgtacccttcaatggtgcaaagctaacagccatttccttgtctctgcggggagtgaccggaaaatcaaattctgggaccttcgacgtccttacgaacccataaactctatcaagcgcttcttgagtacagaactggcctggctgcttccctacaatggtgtcactgtggctcaggacaactgctatgcctcttatggactctgtgggattcattatattgacgctggttaccttggtttcaaggcctacttcactgctcctcgaaaaggcaccgtttggagtctttcaggatccgactggcttgggacaatagctgcaggagatatatccggggagctcattgctgctatattaccagatatggcactgaatccaataaatgtcaagcgacctgtagagcgaagatttcctatatataaagcagatctgataccgtatcaggacagtcctgaaggtccagaccattcttctgcttcatctggggtccccaaccctcctaaggctcgaacttacactgaaactgtcaaccatcactacttgctctttcaagacacagatttgggttcattccatgatctgctccgtagagaaccaatgctgcgcatgcaggagggagaggggcattctcaactctgcctggacaggctgcagctggaggctattcataaggtacgtttcagcccaaacctggactcctatggatggctggtatctggggggcagtcagggctggttcgaatccattttgtccgtggactcgcctccccactgggccaccgtatgcagcttgaaagccgagcccacttcaatgctatgttccaaccatcctcccccactagacggcctggcttctctccaaccagccatcgccttctgcccactccctagccttggcccacaccagatccttggagtgaagtcggtcaagaacaaatggcccctatgcacagagccataggaactgggggccttccctggacagtgatcatgccaggcctggacctttaggcctgcctccccaggactccttagatcccactctttctacagacttctgtgatcacagccccctgcgggcaggggggctctccctccaccaactctcaaggctcctcagcctaagactatggctcatgagaaacactcaggcctgacctaggcttgggagtcaaactgctcatattgagcatattgttaagtgggtaaagccaagtaaaggtactgggtgtttttgtgaccacttgtgaatgggtgtatggagaactgaaaagggtatctgcatgaaggctcctgtctgactattccaggatccaatattactgccttctgaaacttcctctttagggtaaccatcatgtatgcccacgagggtgatagtaattcgtgagactgaagttgcttagagtacttctttgaccaaggaataccacagacaccctaccgatagaacagtggctcagatcttacttgctcctgcttacgaagtattcccaatcactggtcatctgaccctacttgaacactcctgaacagtcatgttttttaaaatcttcctttatatcaagtcagagagtatacttctataaatttcactcatggatgttaggaaatctagtcatcttccctgtgattgccctgttaagtatttaaccatagctatcatgtgtttcccaaatcttctctagattaaatatcttcagttacttcaaccatt

SEQ ID NO: 136940 - DNA, 557 bp, Homo sapiens
  Payload ID: 6810
  Gene Symbol: GTF3C2
  Gene Name: general transcription factor IIIC, polypeptide 2, beta 110kDa
  ENST ID: ENST00000457748
  CDS Start-End: 154-557
cttagacttccggaaggactttggcgaggtccttttgtcccgtggcaagttggctgcctgttggggaagtcagaggtggcgacttcaactccgtcggaggcaactcactttgttggagggatgtatagggggcagccattttggggggtgctgatggatacctgcggggtcggctatgttgccctgggggaggccggccccgtggggaacatgactgtggtagactctcctggacaagaggtgctaaatcagcttgatgtcaagacctcttcagaaatgaccagtgcagaggcttccgtagagatgtcattacctacccctttgcctggatttgaggattctcctgatcagaggaggctccctccagagcaggaaagcctctccagactggaacagccagatctttcttcagagatgtcaaaggtctcaaagcctagggcctcaaagcctggccggaagagaggtggtaggacacgaaaaggccccaaaaggccccaacagcctaatcctccatcagccccactggttcctggtctcttagatcaatccaaccctct

SEQ ID NO: 136941 - DNA, 1440 bp, Homo sapiens
  Payload ID: 6810
  Gene Symbol: GTF3C2
  Gene Name: general transcription factor IIIC, polypeptide 2, beta 110kDa
  ENST ID: ENST00000454704
  CDS Start-End: 1-1262
cttttgcagtcttacagctgtactctttcagcacatttccttttatctcccccttcttccctcttctgtgctctcaagactttccccctcttgctgccacagatgcagtgaagcctgccatatataaggtacaatgtgtggcaactctgcaggtggggtctatgcaagctacagacccctctgagtgtggtcagtgccttagcctggcctggatgcctaccaggccccaccaacacctagctgctggatattataatggcatggtggttttctggaaccttcccactaactcacccctgcagcggatacggctctctgatggctccttaaagctctaccccttccagtgtttcctagcccatgaccaggctgtgcgtacccttcaatggtgcaaagctaacagccatttccttgtctctgcggggagtgaccggaaaatcaaattctgggaccttcgacgtccttacgaacccataaactctatcaagcgcttcttgagtacagaactggcctggctgcttccctacaatggtgtcactgtggctcaggacaactgctatgcctcttatggactctgtgggattcattatattgacgctggttaccttggtttcaaggcctacttcactgctcctcgaaaaggcaccgtttggagtctttcaggatccgactggcttgggacaatagctgcaggagatatatccggggagctcattgctgctatattaccagatatggcactgaatccaataaatgtcaagcgacctgtagagcgaagatttcctatatataaagcagatctgataccgtatcaggacagtcctgaaggtccagaccattcttctgcttcatctggggtccccaaccctcctaaggctcgaacttacactgaaactgtcaaccatcactacttgctctttcaagacacagatttgggttcattccatgatctgctccgtagagaaccaatgctgcgcatgcaggagggagaggggcattctcaactctgcctggacaggctgcagctggaggctattcataaggtacgtttcagcccaaacctggactcctatggatggctggtatctggggggcagtcagggctggttcgaatccattttgtccgtggactcgcctccccactgggccaccgtatgcagcttgaaagccgagcccacttcaatgctatgttccaaccatcctcccccactagacggcctggcttctctccaaccagccatcgccttctgcccactccctagccttggcccacaccagatccttggagtgaagtcggtcaagaacaaatggcccctatgcacagagccataggaactgggggccttccctggacagtgatcatgccaggcctggacctttaggcctgcctccccaggactccttagatcccactctttctacagacttctgtgatcacag

SEQ ID NO: 136942 - DNA, 592 bp, Homo sapiens
  Payload ID: 6810
  Gene Symbol: GTF3C2
  Gene Name: general transcription factor IIIC, polypeptide 2, beta 110kDa
  ENST ID: ENST00000431028
  CDS Start-End: 1-239
cttacactgaaactgtcaaccatcactacttgctctttcaagacacagatttgggttcattccatgatctgctccgtagagaaccaatgctgcgcatgcaggagggagaggggcattctcaactctgcctggacaggctgcagctggaggctattcataagacggcctggcttctctccaaccagccatcgccttctgcccactccctagccttggcccacaccagatccttggagtgaagtcggtcaagaacaaatggcccctatgcacagagccataggaactgggggccttccctggacagtgatcatgccaggcctggacctttaggcctgcctccccaggactccttagatcccactctttctacagacttctgtgatcacagccccctgcgggcaggggggctctccctccaccaactctcaaggctcctcagcctaagactatggctcatgagaaacactcaggcctgacctaggcttgggagtcaaactgctcatattgagcatattgttaagtgggtaaagccaagtaaaggtactgggtgtttttgtgaccacttgtgaatgggtgtatggagaactgaaaa

SEQ ID NO: 136943 - DNA, 828 bp, Homo sapiens
  Payload ID: 6810
  Gene Symbol: GTF3C2
  Gene Name: general transcription factor IIIC, polypeptide 2, beta 110kDa
  ENST ID: ENST00000423998
  CDS Start-End: 605-828
agcgtccctggcgccgctgaagacgccctggaactcggctggcttcggagggctcggtgactctggccgcgctgcattatggaatacagagtctaagagaaaactagcccggcaccgactccggaccaagcacacgtgtttaccttgtgcactggggtgggggcgtcagtgaagagcagctaacaagatttcgtcataagaccgcgaccagacaggcggcgccatcttcgaacttagacttccggaaggactttggcgaggagacaaagtcttgctgtgttgcccaggctgatcttgaactcctggcctcaagcgatcctcccaccttggcctcccaaagtgttgagattacaggcatgagccactgcgcccagcccagcacatgattcttgagccagcagctgtaaataagagcaccttcccagtttgataagcacttgttcctaccaactgtttttccctcaaccctcatcgtgatcatttatttatgcaagtgtttttcagcttgagtgtgcgtcagaatcccctgaagagcttgttaaaacacaaggtgctggccccatccagaattgctgattcggggcagccattttggggggtgctgatggatacctgcggggtcggctatgttgccctgggggaggccggccccgtggggaacatgactgtggtagactctcctggacaagaggtgctaaatcagcttgatgtcaagacctcttcagaaatgaccagtgcagaggcttccgtagagatgtcattacctacccctttgcctggatttgaggattctcctgatcagaggaggctccctccagagcaggaaag

SEQ ID NO: 136944 - DNA, 762 bp, Homo sapiens
  Payload ID: 6810
  Gene Symbol: GTF3C2
  Gene Name: general transcription factor IIIC, polypeptide 2, beta 110kDa
  ENST ID: ENST00000457098
  CDS Start-End: 1-427
cgtttggagtctttcaggatccgactggcttgggacaatagctgcaggagatatatccggggagctcattgctgctatattaccagatatggcactgaatccaataaatgtcaagcgacctgtagagcgaagatttcctatatataaagcagatctgataccgtatcaggacagtcctgaaggtccagaccattcttctgcttcatctggggtccccaaccctcctaaggctcgaacttacactgaaactgtcaaccatcactacttgctctttcaagacacagatttgggttcattccatgatctgctccgtagagaaccaatgctgcgcatgcaggagggagaggggcattctcaactctgcctggacaggctgcagctggaggctattcataagggtaaccatcatgtatgcccacgagggtgatagtaattcgtgagactgaagttgcttagagtacttctttgaccaaggaataccacagacaccctaccgatagaacagtggctcagatcttacttgctcctgcttacgaagtattcccaatcactggtcatctgaccctacttgaacactcctgaacagtcatgttttttaaaatcttcctttatatcaagtcagagagtatacttctataaatttcactcatggatgttaggaaatctagtcatcttccctgtgattgccctgttaagtatttaaccatagctatcatgtgtttcccaaatcttctctagattaaatatcttcagttacttcaa

SEQ ID NO: 136945 - DNA, 779 bp, Homo sapiens
  Payload ID: 6810
  Gene Symbol: GTF3C2
  Gene Name: general transcription factor IIIC, polypeptide 2, beta 110kDa
  ENST ID: ENST00000415683
  CDS Start-End: 1-545
gctccttaaagctctaccccttccagtgtttcctagcccatgaccaggctgtgcgtacccttcaatggtgcaaagctaacagccatttccttgtctctgcggggagtgaccggaaaatcaaattctgggaccttcgacgtccttacgaacccataaactctatcaagcgcttcttgagtacagaactggcctggctgcttccctacaatggtgtcactgtggctcaggacaactgctatgcctcttatggactctgtgggattcattatattgacgctggttaccttggtttcaaggcctacttcactgctcctcgaaaaggcaccgtttggagtctttcaggatccgactggcttgggacaatagctgcaggagatatatccggggagctcattgctgctatattaccagatatggcactgaatccaataaatgtcaagcgacctgtagagcgaagatttgtacgtatacgaacatctaacagcagctgttggatcctaacccacatgccctcccaaattctgctatatataaagcagatctgataccgtatcaggacagtcctgaaggtccagaccattcttctgcttcatctggggtccccaaccctcctaaggctcgaacttacactgaaactgtcaaccatcactacttgctctttcaagacacagatttgggttcattccatgatctgctccgtagagaaccaatgctgcgcatgcaggagggagaggggcattctcaactctgcctggacaggctgcagctggaggctattc

SEQ ID NO: 136946 - DNA, 1858 bp, Homo sapiens
  Payload ID: 6810
  Gene Symbol: GTF3C2
  Gene Name: general transcription factor IIIC, polypeptide 2, beta 110kDa
  ENST ID: ENST00000622534
  CDS Start-End: 79-1833
gagctagtacaaatagtttttgtcctctactcatttgtgtgtctctgtatgcaggggcagccattttggggggtgctgatggatacctgcggggtcggctatgttgccctgggggaggccggccccgtggggaacatgactgtggtagactctcctggacaagaggtgctaaatcagcttgatgtcaagacctcttcagaaatgaccagtgcagaggcttccgtagagatgtcattacctacccctttgcctggatttgaggattctcctgatcagaggaggctccctccagagcaggaaagcctctccagactggaacagccagatctttcttcagagatgtcaaaggtctcaaagcctagggcctcaaagcctggccggaagagaggtggtaggacacgaaaaggccccaaaaggccccaacagcctaatcctccatcagccccactggttcctggtctcttagatcaatccaaccctctgtccacccccatgcctaagaaacgaggtcgaaagtccaaggcagagctgctgctgctgaagttgtcaaaagacctagatcggccagaatctcaatctccaaagaggccccctgaggactttgagaccccttctggggaacgaccccgccgaagggctgcccaagtggcacttctgtatcttcaggaactggctgaagagctctcaacagccctgcctgcccctgtgtcctgtcctgagggccccaaggtgagcagccccaccaaaccgaagaagatccggcagccagcagcctgtccaggtggagaagaggtggatggtgctccacgggatgaagacttttttctccaggttgaggctgaagatgtggaagaaagtgagggcccaagtgagagctcatctgaacctgagcctgtagtgccccgaagcaccccacgaggatctacttcagggaaacagaaaccacactgccgaggaatggctcccaatggcttaccaaatcatatcatggctcctgtttggaagtgcctccatctcaccaaggacttccgagagcagaaacattcatactgggagtttgctgagtggattcctttagcctggaagtggcacttgttatctgagcttgaggccgctccctacctgccccaggaggagaagtctccattgttttctgtacaacgtgaagggctacctgaagatggcaccctctaccgaataaacagatttagctcgatcacagcacatccagagcgctgggatgtgtccttcttcacggggggaccgctctgggctctggactggtgcccagtgccagagggggcaggagcctcgcaatatgtggctcttttctccagccctgacatgaatgagacacacccactgagccagcttcattcgggtcctgggctgctccagctctggggccttgggaccttgcagcaagaaagctgtcctggcaacagggcccactttgtctatgggattgcttgtgacaacggctgcatctgggacctcaagttctgccccagtggagcatgggaacttccaggcacccctcggaaggctcctctcctgccccggttgggtctcttggctctggcctgctcagacgggaaagtactgctattcagtctaccccatccggaggccctgctggctcagcaacccccagatgcagtgaagcctgccatatataaggtacaatgtgtggcaactctgcaggtggggtctatgcaagctacagacccctctgagtgtggtcagtgccttagcctggcctggatgcctaccaggccccaccaacacctagctgctggatattataatggtaaaaaccaaaataaaacataaggaactattgctctttaaatttttt

SEQ ID NO: 136947 - DNA, 4282 bp, Homo sapiens
  Payload ID: 6811
  Gene Symbol: GTF3C3
  Gene Name: general transcription factor IIIC, polypeptide 3, 102kDa
  Uniprot ID: Q9Y5Q9
  ENST ID: ENST00000263956
  CDS Start-End: 91-2751
tgctggccccggcgaggtagcttctggaaggcgctgctcttccggttctctgtcccggttcctggggttgcacagacagaccctgtaaacatgtcagggttcagtccggaactcatcgactacttggaagggaaaatctcctttgaggagttcgaacggcggagagaagagagaaaaacccgcgagaagaaaagtcttcaggaaaaaggcaagttatcagctgaagaaaatcccgatgactctgaagttccatcatcatcaggaattaactctaccaaatcccaagacaaagatgtcaatgaaggagaaacatcagatggagtgaggaagtcagttcacaaggtctttgcttccatgcttggagagaatgaagatgatgaggaggaagaggaagaagaggaggaggaggaggaggaggaagaaacacctgagcaacccactgcgggcgatgtatttgtattggagatggttctcaatcgtgaaaccaagaaaatgatgaaagagaaaaggcctcggagtaaacttcccagagctctgagaggtctcatgggtgaagccaacattcgttttgctcgaggagaacgtgaagaggcgatattgatgtgcatggaaatcataagacaagctcctctggcttatgagccattctctactctagccatgatatatgaggaccaaggtgacatggaaaaatcattgcagtttgagttgattgctgcgcatttaaatcccagtgacacagaagaatgggttagactggcagaaatgtctctggaacaagacaatattaagcaggctattttttgctatacaaaagctcttaaatatgaacctactaatgtccgttatctgtgggagcgatcaagcctttatgaacagatgggtgatcataaaatggccatggatggttataggcgtattttaaaccttttgtctccatctgatggcgaacgttttatgcagctggctagagatatggcaaagagttactatgaagccaatgatgttacttctgctattaacataattgatgaagctttctcaaaacaccagggcctagtctccatggaagatgttaacatagcagctgaactatatatttctaacaaacagtatgacaaagctttggagataattacagatttttctggaattgtgctggaaaaaaaaacttcagaagaaggcacctcagaagagaataaagctcctgagaatgttacctgcactatacctgatggcgtgccaatagatatcacagtgaagttgatggtctgccttgtacatctcaacattcttgaaccacttaatcctctcttgacaacactagtagaacagaatcctgaagatatgggagacctatacctagatgttgctgaagcttttctggatgttggtgaatataattctgcacttcccctcctcagtgctcttgtttgctctgaaagatacaaccttgcagtagtttggcttcgtcatgcagaatgtttaaaggccttaggctatatggagcgagctgctgaaagctatggcaaggtggttgatctggccccactccatttggatgcaaggatttcactttctacccttcagcagcagctgggccagcctgagaaagctctggaagctctggaaccaatgtatgatccagatactttagcacaggatgcaaatgctgcacagcaggaactgaagttattgcttcatcgttctactctgttgttttcacaaggcaaaatgtatggttatgtggataccttacttactatgttagccatgcttttaaaggtagcaatgaatcgagcccaagtttgtttgatatccagttccaagtctggagagaggcatctttatcttattaaagtatcgagagacaaaatatcagacagcaatgaccaagagtcagcaaattgtgatgcaaaagcaatatttgctgtgctcacaagcgtcttgacaaaggatgactggtggaatcttctgttgaaggccatatactccttatgtgacctatcccgatttcaagaggctgagttgcttgtagattcctcattggaatattactcattttatgatgacaggcaaaaacgcaaagaactagaatactttggtctgtctgctgcaattctggacaaaaatttcagaaaggcatacaactatatcaggataatggtaatggaaaatgtcaataaaccccagctctggaacattttcaatcaagttaccatgcactcccaagatgtacgacatcatcgcttctgtctccgtttgatgctgaaaaacccagaaaatcatgccctatgtgtcttaaatggacacaatgcatttgtatctggtagttttaagcatgcgcttggacagtatgtgcaagcctttcgcactcaccctgacgaacctctctatagcttctgtataggcctaacctttattcatatggcatctcagaagtatgtgttacggagacatgctcttattgtacagggcttttcctttcttaatcgatacctcagtttacgtgggccctgccaggaatcattctacaatttgggccgtggccttcatcagttggggctgattcatcttgcaatccactattatcagaaggccctggagctccctccacttgtggtagagggtatagaacttgaccagttagacttacgaagagatattgcctacaacttgtctctcatctatcagagcagtgggaataccggaatggctcaaacgcttttgtatacctattgttctatataaagcaccgcaactgagaacagagcaatggcagctgctgtgtgaggaccagtgtcttctgtctcagggcttattatttgtaactccaaaatagaaatgacaatttcagaattacctaacaaacagtgtatttatttttaatatgtgataatgatcttgtggtatatatgcaaaattattcctacaaaaatttgtatattggtctgtcattttcctttcacattctatagtgaattgttcccaatgttgaaatggacgtgtaagcctttgagctagcttggagtcgaatacactatttttcactcacaccatttattcatctttgtatttaatactatagctctgtcaatatcacatgaggcagtttttcaaatacgtataaacagaggttgcttattattaaaggaaagacaaagtgggactctttatgatgtcatgaccatgataactaagcacctaagaaaattatttaaaatagttatgtggtaggcagaaagacaaataatttagttttttacttttcaccagcatgtatcttagctacctaaactgaaacatgggaggctgggcttaattcaaaatatattgctccaaggcaaataaaaaaatgctttatctatatttgtggctttctgatgaaaaaatagagaagagcttgttcaataacaggacatggtttccatttcaagatcacaagtaatataagactgggcaagtagtacgtatggaataaaggacatactgctgattgataaagtaaaaaactttttttttgtttgtttactcatctccactatttattatatgttcttgaatttaagttaacagtactttttagatgatatactgttagcttaataacaactttttagggaaaaataaatgctgtaattaatgtgcacatgggttagtaacacccagcccaattgtgggagggaaacaagtagaggcttaggatcaaagaaataaaattgggacttattagaaattcttaccactgtttctactgtacacaaaactttctagttgagcagaatttgtatgcaataagtaaatatattgtatactccatgtgtataatttaaatgcattttatttttataattgaggttaactgtttcacatgcttaatttttactttatgccatttataggtaatggtagaggtaactgagatacagtaataagttagacttgtgtgttggaattctgtggaactgagcattctgtgctccgagtttctctcttaaattagctcactggactgtggctccagtgtctactaaatagccgtggaggaaataagtctccctaagggaaaaaaaaaccagctgatattgtatagttttgtttagcttttaaaatcatagcttccatttgctgagtttttactctgctactgtatgctaagtatggtgctaaacactttggatatgttatctctgattctctcagggaactgcaaggtagttattattgatattgtcatcaccactttgtatctagagattaaatagcatgttcaagatcacta

SEQ ID NO: 136948 - DNA, 1736 bp, Homo sapiens
  Payload ID: 6811
  Gene Symbol: GTF3C3
  Gene Name: general transcription factor IIIC, polypeptide 3, 102kDa
  Uniprot ID: Q9Y5Q9
  ENST ID: ENST00000409364
  CDS Start-End: 49-1290
cggttctctgtcccggttcctggggttgcacagacagaccctgtaaacatgtcagggttcagtccggaactcatcgactacttggaagggaaaatctcctttgaggagttcgaacggcggagagaagagagaaaaacccgcgagaagaaaagtcttcaggaaaaaggcaagttatcagctgaagaaaatcccgatgactctgaagttccatcatcatcaggaattaactctaccaaatcccaagacaaagatgtcaatgaaggagaaacatcagatggagtgaggaagtcagttcacaaggtctttgcttccatgcttggagagaatgaagatgatgaggaggaagaggaagaagaggaggaggaggaggaggaggaagaaacacctgagcaacccactgcgggcgatgtatttgtattggagatggttctcaatcgtgaaaccaagaaaatgatgaaagagaaaaggcctcggagtaaacttcccagagctctgagaggtctcatgggtgaagccaacattcgttttgctcgaggagaacgtgaagaggcgatattgatgtgcatggaaatcataagacaagctcctctggcttatgagccattctctactctagccatgatatatgaggaccaaggtgacatggaaaaatcattgcagtttgagttgattgctgcgcatttaaatcccagtgacacagaagaatgggttagactggcagaaatgtctctggaacaagacaatattaagcaggctattttttgctatacaaaagctcttaaatatgaacctactaatgtccgttatctgtgggagcgatcaagcctttatgaacagatgggtgatcataaaatggccatggatggttataggcgtattttaaaccttttgtctccatctgatggcgaacgttttatgcagctggctagagatatggcaaagagttactatgaagccaatgatgttacttctgctattaacataattgatgaagctttctcaaaacaccagggcctagtctccatggaagatgttaacatagcagctgaactatatatttctaacaaacagtatgacaaagctttggagataattacagatttttctggaattgtgctggaaaaaaaaacttcagaagaaggcacctcagaagagaataaagctcctgagaatgttacctgcactatacctgatggcgtgccaatagatatcacagtgaagttgatggtctgccttgtacatctcaacattcttgaaccacttaatgtatgtaacaagatctgcacttgagatacttcagatcaaatgcaccatctcttttctttagatgtcaagaaattataacttgaccctagagtttcacatttcttaataaccaaggaggtaacaataagcatcaaataattttgtatgaatatcttataaaaactaaaattgttttgcaattgggcttacagtaatttatttttcttttaaaataacaatctaaagatcataatttgagattgtctttagaccatttgagattgtcattagataattggtaataattctgacagctattcttttttgcggactttggaccaagtatattattgaaaaaaaaaaagtacttagcatctactttgtaaaccttaggataagatattgagtaaaatatacaaatccataccctcatgggttgggatgcttttttgttttaatgggattagataataaaataaatacataacata

SEQ ID NO: 136949 - DNA, 547 bp, Homo sapiens
  Payload ID: 6811
  Gene Symbol: GTF3C3
  Gene Name: general transcription factor IIIC, polypeptide 3, 102kDa
  ENST ID: ENST00000455546
  CDS Start-End: 1-21
aagaaagtgaggcgatgctaggccacggtgcccttcactcttgttgccttcatacccttagggtagcttaacgctgagtcttcaggaaaaaggcaagttatcagctgaagaaaatcccgatgactctgaagttccatcatcatcaggaattaactctaccaaatcccaagacaaagatgtcaatgaaggagaaacatcagatggagtgaggaagtcagttcacaaggtctttgcttccatgcttggagagaatgaagatgatgaggaggaagaggaagaagaggaggaggaggaggaggaggaagaaacacctgagcaacccactgcgggcgatgtatttgtattggagatggttctcaatcgtgaaaccaagaaaatgatgaaagagaaaaggcctcggagtaaacttcccagagctctgagaggtctcatgggtgaagccaacattcgttttgctcgaggagaacgtgaagaggcgatattgatgtgcatggaaatcataagacaagctcctctggcttatgagccattctctactctagccatg

SEQ ID NO: 136950 - DNA, 326 bp, Homo sapiens
  Payload ID: 6811
  Gene Symbol: GTF3C3
  Gene Name: general transcription factor IIIC, polypeptide 3, 102kDa
  ENST ID: ENST00000416690
  CDS Start-End: 1-326
tgcaaatgctgcacagcaggaactgaagttattgcttcatcgttctactctgttgttttcacaaggcaaaatgtatggttatgtggataccttacttactatgttagccatgcttttaaagatggtactgtctagttgcaggaaaacaagctcagggctcccactgattctacattatgcaatatttgctgtgctcacaagcgtcttgacaaaggatgactggtggaatcttctgttgaaggccatatactccttatgtgacctatcccgatttcaagaggctgagttgcttgtagattcctcattggaatattactcattttatg

SEQ ID NO: 136951 - DNA, 527 bp, Homo sapiens
  Payload ID: 6811
  Gene Symbol: GTF3C3
  Gene Name: general transcription factor IIIC, polypeptide 3, 102kDa
  ENST ID: ENST00000435252
  CDS Start-End: 1-447
agctatggcaaggtggttgatctggccccactccatttggatgcaaggatttcactttctacccttcagcagcagctgggccagcctgagaaagctctggaagctctggaaccaatgtatgatccagatactttagcacaggatgcaaatgctgcacagcaggaactgaagttattgcttcatcgttctactctgttgttttcacaaggcaaaatgtatggttatgtggataccttacttactatgttagccatgcttttaaaggtagcaatgaatcgagcccaagtttgtttgatatccagttccaagtctggagagaggcatctttatcttattaaagtatcgagagacaaaatatcagacagcaatgaccaagagtcagcaaattgtgatgcaaaaggtaataacttcatttgcattatgttatataaaatttggctgaattgaaaaagactcatgaagtaacactggacagcaatctaattgaaaatatacttttcaaataaaatgaaattttccaatctaaa

SEQ ID NO: 136952 - DNA, 1702 bp, Homo sapiens
  Payload ID: 6811
  Gene Symbol: GTF3C3
  Gene Name: general transcription factor IIIC, polypeptide 3, 102kDa
  ENST ID: ENST00000448087
  CDS Start-End: 1-486
gctttctcaaaacaccagggcctagtctccatggaagatgttaacatagcagctgaactatatatttctaacaaacagtatgacaaagctttggagataattacagatttttctggaattgtgctggaaaaaaaaacttcagaagaaggcacctcagaagagaataaagctcctgagaatgttacctgcactatacctgatggcgtgccaatagatatcacagtgaagttgatggtctgccttgtacatctcaacattcttgaaccacttaatcctctcttgacaacactagtagaacagaatcctgaagatatgggagacctatacctagatgttgctgaagcttttctggatgttggtgaatataattctgcacttcccctcctcagtgctcttgtttgctctgaaagatacaaccttgcagtagtttggcttcgtcatgcaggtaacacttttttgtgggaggaagaagttttaatcatataagcagccaagaacttactttcccaagatggtaataattattatagtgcaagtgtttctggtttcaggggagttttttgaaagtcagtattttaaattgtcttgctaggctactaagtgatttccccatcactaatgctttggaggaatgatttacttaatgatgccagagtgaagttgaaggactcacatttcccttagatgcctgtcttgaacctctcttaaccatagggtctggtttctagcaaaggattgtcagacttggggcaaaatctaattttgaagagtttttatagatttatatttaatatgttatattgggaaaaattaatatatttttcaatgctctttgagccacacatactcaaaattgggttttatcagccgtttattacactgtgcctaagtccatagtaatctgcagtgaatcatttagactggaaaaaatagcttaagaaacatgactaaatcttttgaagaaatacatgaaagcaaaaagtattctaataggatttcttatagagtcaacataaaagatgcattaaaaatcgaatagtcttggtttcaaatactgtgtgatggcagaaaactctagtggctcttacatgaaagcaaaaagtattctaatagggtttcttattgagtcaacataaaagacgcattaaagatcgaatagtcttggtttcaaatactatgtgatggcagaaaactaatggctcttaagtattatatgatgacagaactctataattagagaagcattgattggcattttggggcagtagtgcactcacatcacagatatgagctaggaaagagagcacttaatgattaagataacacttttctgtttagatgaataaatatgaatacaaatgtaataccatcgtaaaaagctgcattatttgtgagatttgaattttaaagatatgagcaggatatcttagtttgtattgcctttctacttagggctgtgatattgaaactgctcctgtgttactaatagtgtatactttaaaaatcctatttaatcatgattctgatcaatgctgtttccattttgagcccatgtggcttgagatgaatgaaagataaaatctcagagtcatctaaaaatgataaagaaatttgggatcagtatataagaaagataattagaggaattcagttatttcagtaacaaaataacaaaatgtttttaaagtgaaaaatgagaaaa

SEQ ID NO: 136953 - DNA, 796 bp, Homo sapiens
  Payload ID: 6811
  Gene Symbol: GTF3C3
  Gene Name: general transcription factor IIIC, polypeptide 3, 102kDa
  ENST ID: ENST00000448539
  CDS Start-End: 115-231
agaaggacgccggttccttgctcttgctggccccggcgaggtagcttctggaaggcgctgctcttccggttctctgtcccggttcctggggttgcacagacagaccctgtaaacatgtcagggttcagtccggaactcatcgactacttggaagggaaaatctcctttgaggagttcgaacggcggagagaagagagaaaaacccgcgagaagaaagtgaggcgatgctaggccacggtgcccttcactcttgttgccttcatacccttaggtgtgggggacccagacgaccgctttcactgtgatggggcgggctgggaactttcagcagcttcttccttatcttacagaaactccggttttcacccctcatccctgtgctaagctccttaaaacgttttcccccaccgaaaagctttcgtcttggtggtaacctcttctttttcccccaatactacgtttttatttcagggtagcttaacgctgagtcttcaggaaaaaggcaagttatcagctgaagaaaatcccgatgactctgaagttccatcatcatcaggaattaactctaccaaatcccaagacaaagatgtcaatgaaggagaaacatcagatggagtgaggaagtcagttcacaaggtctttgcttccatgcttggagagaatgaagatgatgaggaggaagaggaagaagaggaggaggaggaggaggaggaagaaacacctgagcaacccactgcgggcgatgtatttgtattggagatggttctcaatcgtgaaaccaagaaaatgatgaaag

SEQ ID NO: 136954 - DNA, 488 bp, Homo sapiens
  Payload ID: 6811
  Gene Symbol: GTF3C3
  Gene Name: general transcription factor IIIC, polypeptide 3, 102kDa
  ENST ID: ENST00000451088
  CDS Start-End: 1-134
agacagaccctgtaaacatgtcagggttcagtccggaactcatcgactacttggaagggaaaatctcctttgaggagttcgaacggcggagagaagagagaaaaacccgcgagaagaaagtgaggcgatgctaggccacggtgcccttcactcttgttgccttcatacccttagagtcttcaggaaaaaggcaagttatcagctgaagaaaatcccgatgactctgaagttccatcatcatcaggaattaactctaccaaatcccaagacaaagatgtcaatgaaggagaaacatcagatggagtgaggaagtcagttcacaaggtctttgcttccatgcttggagagaatgaagatgatgaggaggaagaggaagaagaggaggaggaggaggaggaggaagaaacacctgagcaacccactgcgggcgatgtatttgtattggagatggttctcaatcgtgaaaccaagaaaatgatgaaagtaaa

SEQ ID NO: 136955 - DNA, 9043 bp, Homo sapiens
  Payload ID: 6812
  Gene Symbol: GTF3C4
  Gene Name: general transcription factor IIIC, polypeptide 4, 90kDa
  Uniprot ID: Q9UKN8
  ENST ID: ENST00000372146
  CDS Start-End: 565-3033
cttccgggtccggaacggctccagctgtacggactcgtcccgaggggagccggggacggcggcaccgggcgggtagggacaagactaccgcgcgtgcccccgcctggtggcagcccctctctgcgtccctcgcggcctggcaaaattacattcggccgagagttcacgctggggaagctctctgaatgcctctgagaagcgagatccggcgccatctcaccgacgagcctcccctttaccgccccgtgcgtttcctcagcactttaggaactaaagcctgtctgggtagctccctaacaggctctggagctcaatccctgggcagggaaaagggggtcctcggggctccccgctcgctgtcctttttctggacaggcagttccttggccacctggtagggccgcgttgcctggcaacggcggggtccttcttggctcggcggcgctcggggcctgaggggagaaaaccgccgcggagggcgctgggggtggcggcggcggtccgggaggtggtcgcgcgactgcgtggagcgccagggcgtccgacctctgcacctgagagaagatgaacacggccgaccaggcccgggtggggcccgcggacgacgggcctgcgccgtctggggaggaggagggagaggggggcggcgaggcgggcgggaaggagccagcagcggacgcggccccggggcccagcgctgcattccgcctcatggtgactcggcgggagccggccgtgaagctgcagtatgcggtgagcggcctggaaccgctggcttggtccgaggaccaccgcgtgtctgtgtccacggcccgcagcatcgctgtgctggagctcatctgcgacgtgcacaacccgggccaggacctggttatccaccgcacctcggtgcccgcaccgctcaacagctgtctcctcaaagttggctcaaaaacagaagttgctgagtgcaaggagaaattcgccgcctccaaggaccccacggtcagtcagactttcatgttggatagggtgttcaaccctgaggggaaggctttaccaccaatgagaggattcaagtacaccagctggtctcccatgggttgcgatgctaatggcaggtgcctcttggcagcactgaccatggacaatcgcctgaccatccaggcaaatctcaacagactgcagtgggtccagctggttgacctgactgagatctatggagaacgtctttatgagaccagttacaggctctctaaaaatgaggccccggaaggaaatctcggggattttgctgagtttcagaggagacacagcatgcagaccccagtcagaatggagtggtcgggcatctgtaccacccagcaggtcaagcataacaacgaatgccgggacgttggcagtgtgctcctggctgtcctctttgaaaacggtaatatcgccgtgtggcagtttcagctgccgtttgtaggaaaagaatccatctcttcatgcaacacaattgagtcaggaatcacctctcccagtgtattgttttggtgggaatatgagcacaataatcgaaaaatgagtggccttattgtggggagtgcttttggacccataaaaattcttcctgtcaatctcaaagcagtcaaaggctatttcactttaaggcagcctgttatcttgtggaaagaaatggaccagttacctgtgcacagtatcaaatgtgtgccactttatcatccttaccagaagtgtagttgcagcttagtagtggctgcaagaggctcttatgtattttggtgtcttcttctgatctccaaagcagggctgaatgttcacaattcccatgtcacaggccttcactcactgccaattgtctccatgactgcagacaaacagaatggaacagtctatacttgctccagtgacggaaaggtgaggcagctgattcccattttcacagatgttgcattgaagtttgaacaccagttgattaaactctcagatgtgtttggctcagtgaggactcacgggatagcagtgagcccctgcggtgcatacctggccatcatcaccactgagggcatgatcaacggcctccaccctgttaacaaaaactaccaggtccaatttgttactctcaaaacctttgaagaggcagctgctcagctcctggaatcttcagttcaaaacctttttaagcaggtagatttaatagacctagtacgctggaagattttaaaagataaacatatccctcaatttttacaagaagctttggaaaaaaagattgaaagcagtggagtcacctatttttggcgttttaagcttttcctcctgaggattttatatcagtcaatgcagaaaaccccttcagaagccttgtggaaacccacccatgaggactcaaaaatcttactagtggattcgcctgggatgggcaatgctgacgatgaacagcaggaagaaggcacttcttccaaacaggtggtgaagcaaggcctgcaggagaggagcaaggaaggagatgtagaggagcccactgatgactcgctccccacgactggagatgctggaggccgtgagccaatggaagagaaactcctggaaatccaagggaaaatcgaagctgtggagatgcacttgaccagggaacacatgaagcgagtcttaggagaagtgtatctgcacacctggatcacagaaaacactagcatccccacccgcggactctgtaactttttaatgtctgatgaagagtatgatgacagaactgcacgggtgctgattggacatatctcaaagaagatgaacaaacagactttccctgagcactgtagtttgtgtaaagagatcttgccattcacagatcgcaaacaggcagtctgttccaatggccacatttggctccggtgcttcttaacctaccagtcctgccagagtttgatatatagaaggtgtttgctccatgacagcattgcccggcatccagctccagaagatcccgactggattaagaggttactgcaaagcccctgccctttctgtgattctcctgtcttctaaataatcagtgacgggaagatggaagggcatgatgaactctgccatagaaaacttcctccagcctgaagagaaggatgcactggaggaagccggaccctcacgagtggagagaagtccttggtgattgtaaagagggcccctggagctcatttctgaatcgcactctccatttccagagactaaaggatgtcctttgaaatggctggactcagagagttggagtcgttttgagatgagcattagccccagctttgtaaccaatgaggaacacttacttatttttaagtatcttgacagaagcaatttgaacacagtgtcccgtcatttctagaaacagaatggtctcttctagagagcttggataaggaccttgctgggttgagttaggttttaatccttgctttggtttggaactgccttcgggctccagaacttaaattgcttggtccgtggcatctgatgtaccaacagagattaaaagtgtaaagcaacacatgggctgatgttttgttctcagaaaatagctgctggtctgcatccctccattcttgttttttatgcatatggaaaacattttcctaaaactctatattcttaagttgaagccaagactaaaatttaatgtgtcaaatgatctggtgactattataatgaataattgtgacttatttttcattctctcctgggtcatcaggtttcctgacccaactccttaatccgtataaagatgtcaaatactgtagttcacccacgccacagccctgcttcagacttaactgtggtagcctagatgagctatttgtacacagaggaaaaaaagatattttcctcttttagtaataagactttcagtatttttaatgttgacatttccagatgtttcatttagtatccaggggtctgtctggagacttctagagagggacagctcagaagtgagacccttgagctctggtgctgtaagcttgtgcaattaagttgaacagagcctgggaatttctttcctctgcacagtcccttgatatttggaatccaggttctgcccccaacccctacccacccagtggtctgttaagatgtctcagatggggctgggcttggtggctcatgcctgtactctcaacactttgggaagcaaaggcaggcagatcacaaggtcaggagttcagcctaaccaacatggtgaaaccgtgtctctactaaaaatacaaaaattagccaggcgtggtggtgcacacctgtaatcccagcactttgggaggccgaggcagacgggtcacttgaggccaggagttcgagaccagcctgggcaatatggcgagactccgtctctactacaaatacaaaagttagcctggcatggtggcgcatgcctgtaatctcagttactcaggaggctgaggcaggagcatcacttcaacccaggaggcagaagctgcagtcagccgaggtggcaccactgcacttcagcctgggcaagactggagactgcctcaaaaaaaaaagaaaaaaaatgttggtacttagatgataccatgacggcaacctccccacccccaccccgcattgataggtagtgcagaccagcccttggaggcacttctaaacagtctgctcagaaatgttttctgtttcctattcaaattgctgttttgtctcctatgtttaatcatgtatttgctattctgcttatttttctcatttggtggtaatttcaagaagagcgtttatccactattgattttcaagaaagaaaccaagcagcattgaaatcatgagtaacagaattcagaacattgtatggtggaagtcatttgtgtctgcagctgttttttcactttacaataaataagagtaaaaattgagatcatgtcaaaaaattattgcagttttaatcattatggcatagtttcacttcccctccccccattagaatcagtggagatttgttcttactagggaattttggactgctgccatttaaaacttaggtttttatttaaagcagttgtgcatttttgagaaaatgtattgggagtaactagagaggatctcccaaatttttttgtatgtctctctaggagtaaacatggcaacagtttttctagaacgtggactcactgcagggactggacccaatggcattgttaagaccctaaaatctagccaccacctgcctcccccaggtttccacacacccagttggaaggcctttccctgcccttgtccctgtctcacacccatggaggttaagctacagagctggggaaacaggagattttgagttaatggcagcctcacaaatagtgcttctgaatttctctgagggtcagcatacctcatgggagtgtgttgctcagtgcaaccttggaaaagtgggaatggcaccagacgtttttcaggtgcctcttgcaattcaaacttacatcctctataccgtcctaaaatttgcctgatcttatttggtagatttcaagttgctttcagctgtgaccgtaataactgtttcaggaactggagaaatagtggaagtgctattgccgcgctgcatgtaaagcacaggagcaaagattcgatacaattagaccctttaagctacaacgtggttgcatttggggagtctgatacccacataggtatcacattttctctgcctggggttaatttgttcttattattctaggtaagaaattgatagcttgttatgcttggtactcattctgaaatccctgtgtgtccaccaggcagacttcaagcaatctctacctactattatatctgccaaaactaccaattatttttcaatgtcagaagttattagagccactggcaaagctcatggttgaatatgacatttttctgcttttccctctaagaagtttttgagaatgttaatgttgaagtatgcaggctggacctaccagcaagtttaacacgttaattaggttaaaaagaatattaaaaggcaataattaaatatttcaattattttgtaattataatggtatcaaataagatgcaaaagaagttgatgcttattggtgcttaagagaattacaatactggttttatgagcatcttttctctgcaacagttaaactgcctcagagtttgtgaattgctgcaattcctggaatggaaacaggaattagggtcactggttgattggcacaggatctttccatcgtttctgctcctgacctctctctcttgcctttccttcccccagacaccctcttggtttccattcctttagttccctctgctttagaacacagattacatgttggaaagaaaaatggattaatggtaaaatttctaaaagctaaattgtacagtggggtctcacttcctagaagaaactattggtaatatttctttctaaaggtaatagtattaattgtatctggttttcttcaaaacttaactataatttccttgtcagggtgctcagtagctcttggtttgactttgggctaagggatgtgaaattttagctccttcccaccacctgtttcccctcactcccacccccagccaatattcttcataagcaaaaattatggttaagctaagctgaatgggttatattcaaagtaagtacagacggcaaataggcagacaaatacaggaatgtctttacaattagcccaccatggactgttttgagtctctgcatggtttccataattcattatgatgtatctttatgctctttcactgctcttctgtgcgttggagtttagcaattcagtgagactggggagtgtctcaagaatggaacctttgccttcaaggttgggtcatcaaaaatccctctaaaggatctaactgtaatgaactgtttttatttttgccattagtgcaagtatcaactggcagcctcaaacagctttagactatgtctcaggtctctcatagttatacttagaactgctctttcttgaagctaaaagaggtttttggagtaaagatctgcttcatgtctgctagcatggtatctgctgttcaacctagtatagagcatgtgaaatgcaactgtcctttaatggaattcagccaaactccaaaaatactgagttgcttctagttatctaaagtagtacagaatcactatcccgatgaagaagtggggtttttcagaagattgtaaactcatttccatggcacagatacaaatcatcgtcaggacttgttagccagtccatgtctcattgataggatgtagcctgccatctgcatagatggtttaacatggtgctgtttttgaaaacttgctgtggaaataaatttgacagacgagtagttatttgtaaagctgtcctagaaagaggttaattcttttggtatatgaatatttctcctccaatccttttaattaggtggttcagcttatcttgtattttctgagtcataactatactctagggccaagacctactataaaatctggggtcctaaccagagagttgtttagatcaatatgatatgctttgccaacatgatctaagaaggtattcattctttctgggtttgagaagagttgacgaaagtgtaagattatactctcatgctaaaataaggtataggctaagtgaaatactgtaaatgggttggttagaattaaagtttagaactctaaatcttatgcttatttttaaagtaaaaagttgcctcactgtcatgaaatcctgttactttcattaaaaaaaaaaatcctgtaaaatggtcaaattggataatgtaagagataatgatggctttgaggcatttcatactttaccagtttacatttggctagcagactggtaaggtttagggttctctccactaatggaaaattaaatgctaaacgtcctaagaattatgttgttttcaaggctttgactcagatttgtactttgatgtatgaaagtgaatatcaaacttgtttatagaaaagactatatagaaaaataagtctgtgttgtgtatagtgatacatgttttatgtttacccaatgcctgtactaaatcttgtgcttggctttgaattatatatgtgtttacctatgacttttttttgaaataaacagaacagtcatctaaaaacataaggttttggaaaggagatgctttttcaattcttaccatctgattaggtggaatgttttatagacttttggtgttgaaaaaaaaaagtttgataacaatgcattttgcttggaataccccccaatccagaaaagttggtgacttctctccattgtatatatgtacatagttttcattactagattgtaagctcctcaagggcaggaattgttttatctttgttgttcctgcagcacctaatgtaaagtgccttgcacagggtaggtgctcatgacgtgtagaatgagtgagtaacttcctgcctcatcaggatgaaatgtggttcacttcccctgtgttcaacactacaaagctactcctgccagaagagggcagagttctttcttgggtttgaactggcttttttgggttgaaccagatcatcccacatccttagcactacttaaccttcttttcctgaagattacatatcagtgtcctgcgtttttatctaatattagagctgaggttcctaggaaaattttgaagtggggaagattatggagaaaatgaaatggaaatttggggagggtggtttgtcagtataaggccctgtggggtaatcatattttagttattacttgttaaaagggtaacagaacctctgtttctttaccaagtcgctggttggccatttctccaattgatgaactaccattggttttagctctttctcatttgggattcccctcaattgcttacatgattctggtacttagagtctaatagagttgctgtgaatatgtagtgctgtacataatggcagttttgtaaatgtgagataaccttgaatatgttgtggtttgtatacagagccattagtattgttattttggccacttttttattcaaaataaataacataattatttgtata

SEQ ID NO: 136956 - DNA, 1417 bp, Homo sapiens
  Payload ID: 6812
  Gene Symbol: GTF3C4
  Gene Name: general transcription factor IIIC, polypeptide 4, 90kDa
  ENST ID: ENST00000483873
  CDS Start-End: 565-1014
cttccgggtccggaacggctccagctgtacggactcgtcccgaggggagccggggacggcggcaccgggcgggtagggacaagactaccgcgcgtgcccccgcctggtggcagcccctctctgcgtccctcgcggcctggcaaaattacattcggccgagagttcacgctggggaagctctctgaatgcctctgagaagcgagatccggcgccatctcaccgacgagcctcccctttaccgccccgtgcgtttcctcagcactttaggaactaaagcctgtctgggtagctccctaacaggctctggagctcaatccctgggcagggaaaagggggtcctcggggctccccgctcgctgtcctttttctggacaggcagttccttggccacctggtagggccgcgttgcctggcaacggcggggtccttcttggctcggcggcgctcggggcctgaggggagaaaaccgccgcggagggcgctgggggtggcggcggcggtccgggaggtggtcgcgcgactgcgtggagcgccagggcgtccgacctctgcacctgagagaagatgaacacggccgaccaggcccgggtggggcccgcggacgacgggcctgcgccgtctggggaggaggagggagaggggggcggcgaggcgggcgggaaggagccagcagcggacgcggccccggggcccagcgctgcattccgcctcatggtgactcggcgggagccggccgtgaagctgcagtatgcggtgagcggcctggaaccgctggcttggtccgaggaccaccgcgtgtctgtgtccacggcccgcagcatcgctgtgctggagctcatctgcgacgtgcacaacccgggccaggacctggttatccaccgcacctcggtgcccgcaccgctcaacagctgtctcctcaaagttggctcaaaaacagaagttgctgagtgcaaggagaaattcgccgcctccaaggaccccacggccttcactcactgccaattgtctccatgactgcagacaaacagaatggaacagtctatacttgctccagtgacggaaaggtgaggcagctgattcccattttcacagatgttgcattgaagtttgaacaccagttgattaaactctcagatgtgtttggctcagtgaggactcacgggatagcagtgagcccctgcggtgcatacctggccatcatcaccactgagggcatgatcaacggcctccaccctgttaacaaaaactaccaggtccaatttgttactctcaaaacctttgaagaggcagctgctcagctcctggaatcttcagttcaaaacctttttaagcaggtagatttaatagacctagtacgctggaagattttaaaagataaacatatccctcaatttttacaagaagctttggaaaaaaa

SEQ ID NO: 136957 - DNA, 1905 bp, Homo sapiens
  Payload ID: 6813
  Gene Symbol: GTF3C5
  Gene Name: general transcription factor IIIC, polypeptide 5, 63kDa
  ENST ID: ENST00000342018
  CDS Start-End: 9-1382
gcacagggatggcggcggaggcggccgatttggggctgggggccgccgtccccgtggagctgaggcgggagcgacgcatggtgtgcgtggagtacccgggagtggtgcgtgatgtggctaagatgctgccgactctgggcggcgaggaaggcgtctcccggatctacgcagaccccaccaagaggctggagctgtacttccggcccaaggacccatactgccacccagtgtgcgccaaccgcttcagtaccagcagcctgctgctccgcatcaggaagagaacgaggcggcagaaaggggtgctgggcactgaggcccactccgaggtcacatttgacatggagatccttggcatcatctccaccatttacaaatttcaggggatgtctgacttccagtacttggctgtgcatacggaagcaggcggcaagcatacgtcaatgtatgacaaggtgctcatgctccggcccgagaaggaggcctttttccaccaggagctgccgctctacatccccccacccatcttctcccggctggacgccccggtggactacttctaccgaccagagacccagcaccgggaaggctacaacaatccccccatctcaggtgagaatctgattggcctgagcagagcccggcgcccccacaatgccatctttgtcaactttgaggatgaggaggtgcccaagcacctatggattcgatttgggtatgacccccgaaaaaacccagatgccaagatttatcaagtcctcgatttccgaatccgttgtggaatgaaacacggttacgcccccagtgacttgccggtcaaagcaaagcgcagcacctacaactacagcctccccatcaccgtcaagaagacatccagccagcttgtcaccatgcatgacctgaagcagggcctgggcccgtcggggacgagtggtgctcggaaaccagcttccagcaagtacaagctcaaggtcagccttcagacactgagggactctgtctacatcttccgggaaggggccttgccaccctatcggcagatgttctaccagttatgcgacttgaatgtggaagagttgcagaagatcattcaccgcaatgacggggcagagaattcctgcacagaacgggatgggtggtgcctccccaagaccagcgacgagctcagggacaccatgtccctcatgatccggcagaccatccgctccaagaggcctgctctcttttccagctcagccaaggctgatggcggaaaagagcagctgacgtacgagtctggggaagacgaggaggatgaggaggaggaggaagaggaggaggaggacttcaagccatccgacggcagtgaaaacgaaatggagacagagattctggactacgtgtgacagggcccaaggctgggcctccctgacccggccagactggtgtctggcctaatgagggagccggggctccccattgccacccacagtgcccggaatggccctaggaggccctctgaggagagctagagtcccagcaaagggtgcagctgaccctagcactggctgtgacatgctgcttggtgctgcctctggtcctgaggggttagggacatccccaaagggtataccctggctctgccacccatgaaccagcccagcatccagccagtgagtgggcacccaatgcctctcaggatgagaccagtaaatgccggaggtggagctgggcagctgtggagccccaggccacaggccagtctcgcttggctctcatgactgtggtggtggagatagcgtggggagcctcgcccatggtctcacgtggcaagaagtgcctttagctctggatcccaaccgtttggcacagctttggccacagccaggcccctctggaattgtccttattaaaccagtttcccgagaa

SEQ ID NO: 136958 - DNA, 2406 bp, Homo sapiens
  Payload ID: 6813
  Gene Symbol: GTF3C5
  Gene Name: general transcription factor IIIC, polypeptide 5, 63kDa
  Uniprot ID: Q9Y5Q8
  ENST ID: ENST00000372097
  CDS Start-End: 324-1883
gaagtcgagggaggtttgtgtcttattatcctccgggtccctcgctggctagtaggagagactggtgcttgccccgcccggtggactaactcgcttaattttaaataaaaagtcgaggacacggcggtcgttttcccgaagacatgggccctcccatgggccatttgctccctggaggccctcgcgtcttgctgagcccggggagttaggatgacgcgagcggtgagggagcccggaacgattccttcgcggaacaattgaggcgaggcctttgggagtactttgtgggacggaccctggcgggccctgccagacgcacagggatggcggcggaggcggccgatttggggctgggggccgccgtccccgtggagctgaggcgggagcgacgcatggtgtgcgtggagtacccgggagtggtgcgtgatgtggctaagatgctgccgactctgggcggcgaggaaggcgtctcccggatctacgcagaccccaccaagaggctggagctgtacttccggcccaaggacccatactgccacccagtgtgcgccaaccgcttcagtaccagcagcctgctgctccgcatcaggaagagaacgaggcggcagaaaggggtgctgggcactgaggcccactccgaggtcacatttgacatggagatccttggcatcatctccaccatttacaaatttcaggggatgtctgacttccagtacttggctgtgcatacggaagcaggcggcaagcatacgtcaatgtatgacaaggtgctcatgctccggcccgagaaggaggcctttttccaccaggagctgccgctctacatccccccacccatcttctcccggctggacgccccggtggactacttctaccgaccagagacccagcaccgggaaggctacaacaatccccccatctcaggtgagaatctgattggcctgagcagagcccggcgcccccacaatgccatctttgtcaactttgaggatgaggaggtgcccaagcagccactggaggctgcagcccagacgtggaggagagtctgcactaaccccgtggaccggaaggtggaggaggagctgaggaagctgtttgacatccgtcccatctggtcccgaaatgctgtcaaggccaacatcagcgtccacccagacaagctcaaggtcttgcttcccttcatagcctattacatgataacaggcccctggcgcagcctatggattcgatttgggtatgacccccgaaaaaacccagatgccaagatttatcaagtcctcgatttccgaatccgttgtggaatgaaacacggttacgcccccagtgacttgccggtcaaagcaaagcgcagcacctacaactacagcctccccatcaccgtcaagaagacatccagccagcttgtcaccatgcatgacctgaagcagggcctgggcccgtcggggacgagtggtgctcggaaaccagcttccagcaagtacaagctcaaggactctgtctacatcttccgggaaggggccttgccaccctatcggcagatgttctaccagttatgcgacttgaatgtggaagagttgcagaagatcattcaccgcaatgacggggcagagaattcctgcacagaacgggatgggtggtgcctccccaagaccagcgacgagctcagggacaccatgtccctcatgatccggcagaccatccgctccaagaggcctgctctcttttccagctcagccaaggctgatggcggaaaagagcagctgacgtacgagtctggggaagacgaggaggatgaggaggaggaggaagaggaggaggaggacttcaagccatccgacggcagtgaaaacgaaatggagacagagattctggactacgtgtgacagggcccaaggctgggcctccctgacccggccagactggtgtctggcctaatgagggagccggggctccccattgccacccacagtgcccggaatggccctaggaggccctctgaggagagctagagtcccagcaaagggtgcagctgaccctagcactggctgtgacatgctgcttggtgctgcctctggtcctgaggggttagggacatccccaaagggtataccctggctctgccacccatgaaccagcccagcatccagccagtgagtgggcacccaatgcctctcaggatgagaccagtaaatgccggaggtggagctgggcagctgtggagccccaggccacaggccagtctcgcttggctctcatgactgtggtggtggagatagcgtggggagcctcgcccatggtctcacgtggcaagaagtgcctttagctctggatcccaaccgtttggcacagctttggccacagccaggcccctctggaattgtccttattaaaccagtttcccgagaa

SEQ ID NO: 136959 - DNA, 1999 bp, Homo sapiens
  Payload ID: 6813
  Gene Symbol: GTF3C5
  Gene Name: general transcription factor IIIC, polypeptide 5, 63kDa
  ENST ID: ENST00000372099
  CDS Start-End: 441-1478
gattctcattggctgaagtcgagggaggtttgtgtcttattatcctccgggtccctcgctggctagtaggagagactggtgcttgccccgcccggtggactaactcgcttaattttaaataaaaagtcgaggacacggcggtcgttttcccgaagacatgggccctcccatgggccatttgctccctggaggccctcgcgtcttgctgagcccggggagttaggatgacgcgagcggtgagggagcccggaacgattccttcgcggaacaattgaggcgaggcctttgggagtactttgtgggacggaccctggcgggccctgccagacgcacagggatggcggcggaggcggccgatttggggctgggggccgccgtccccgtggagctgaggcgggagcgacgcatggtgtgcgtggagtacccgggagtggtgcgtgatgtggctaagatgctgccgactctgggcggcgaggaaggcgtctcccggggaaggctacaacaatccccccatctcaggtgagaatctgattggcctgagcagagcccggcgcccccacaatgccatctttgtcaactttgaggatgaggaggtgcccaagcagccactggaggctgcagcccagacgtggaggagagtctgcactaaccccgtggaccggaaggtggaggaggagctgaggaagctgtttgacatccgtcccatctggtcccgaaatgctgtcaaggccaacatcagcgtccacccagacaagctcaaggtcttgcttcccttcatagcctattacatgataacaggcccctggcgcagcctatggattcgatttgggtatgacccccgaaaaaacccagatgccaagatttatcaagtcctcgatttccgaatccgttgtggaatgaaacacggttacgcccccagtgacttgccggtcaaagcaaagcgcagcacctacaactacagcctccccatcaccgtcaagaagacatccagccagcttgtcaccatgcatgacctgaagcagggcctgggcccgtcggggacgagtggtgctcggaaaccagcttccagcaagtacaagctcaaggactctgtctacatcttccgggaaggggccttgccaccctatcggcagatgttctaccagttatgcgacttgaatgtggaagagttgcagaagatcattcaccgcaatgacggggcagagaattcctgcacagaacgggatgggtggtgcctccccaagaccagcgacgagctcagggacaccatgtccctcatgatccggcagaccatccgctccaagaggcctgctctcttttccagctcagccaaggctgatggcggaaaagagcagctgacgtacgagtctggggaagacgaggaggatgaggaggaggaggaagaggaggaggaggacttcaagccatccgacggcagtgaaaacgaaatggagacagagattctggactacgtgtgacagggcccaaggctgggcctccctgacccggccagactggtgtctggcctaatgagggagccggggctccccattgccacccacagtgcccggaatggccctaggaggccctctgaggagagctagagtcccagcaaagggtgcagctgaccctagcactggctgtgacatgctgcttggtgctgcctctggtcctgaggggttagggacatccccaaagggtataccctggctctgccacccatgaaccagcccagcatccagccagtgagtgggcacccaatgcctctcaggatgagaccagtaaatgccggaggtggagctgggcagctgtggagccccaggccacaggccagtctcgcttggctctcatgactgtggtggtggagatagcgtggggagcctcgcccatggtctcacgtggcaagaagtgcctttagctctggatcccaaccgtttggcacagctttggccacagccaggcccctctggaattgtccttattaaaccagtttcccgag

SEQ ID NO: 136960 - DNA, 2110 bp, Homo sapiens
  Payload ID: 6813
  Gene Symbol: GTF3C5
  Gene Name: general transcription factor IIIC, polypeptide 5, 63kDa
  Uniprot ID: Q9Y5Q8
  ENST ID: ENST00000372108
  CDS Start-End: 9-1589
gcacagggatggcggcggaggcggccgatttggggctgggggccgccgtccccgtggagctgaggcgggagcgacgcatggtgtgcgtggagtacccgggagtggtgcgtgatgtggctaagatgctgccgactctgggcggcgaggaaggcgtctcccggatctacgcagaccccaccaagaggctggagctgtacttccggcccaaggacccatactgccacccagtgtgcgccaaccgcttcagtaccagcagcctgctgctccgcatcaggaagagaacgaggcggcagaaaggggtgctgggcactgaggcccactccgaggtcacatttgacatggagatccttggcatcatctccaccatttacaaatttcaggggatgtctgacttccagtacttggctgtgcatacggaagcaggcggcaagcatacgtcaatgtatgacaaggtgctcatgctccggcccgagaaggaggcctttttccaccaggagctgccgctctacatccccccacccatcttctcccggctggacgccccggtggactacttctaccgaccagagacccagcaccgggaaggctacaacaatccccccatctcaggtgagaatctgattggcctgagcagagcccggcgcccccacaatgccatctttgtcaactttgaggatgaggaggtgcccaagcagccactggaggctgcagcccagacgtggaggagagtctgcactaaccccgtggaccggaaggtggaggaggagctgaggaagctgtttgacatccgtcccatctggtcccgaaatgctgtcaaggccaacatcagcgtccacccagacaagctcaaggtcttgcttcccttcatagcctattacatgataacaggcccctggcgcagcctatggattcgatttgggtatgacccccgaaaaaacccagatgccaagatttatcaagtcctcgatttccgaatccgttgtggaatgaaacacggttacgcccccagtgacttgccggtcaaagcaaagcgcagcacctacaactacagcctccccatcaccgtcaagaagacatccagccagcttgtcaccatgcatgacctgaagcagggcctgggcccgtcggggacgagtggtgctcggaaaccagcttccagcaagtacaagctcaaggtcagccttcagacactgagggactctgtctacatcttccgggaaggggccttgccaccctatcggcagatgttctaccagttatgcgacttgaatgtggaagagttgcagaagatcattcaccgcaatgacggggcagagaattcctgcacagaacgggatgggtggtgcctccccaagaccagcgacgagctcagggacaccatgtccctcatgatccggcagaccatccgctccaagaggcctgctctcttttccagctcagccaaggctgatggcggaaaagagcagctgacgtacgagtctggggaagacgaggaggatgaggaggaggaggaagaggaggaggaggacttcaagccatccgacggcagtgaaaacgaaatggagacagagattctggactacgtgtgacagggcccaaggctgggcctccctgacccggccagactggtgtctggcctaatgagggagccggggctccccattgccacccacagtgcccggaatggccctaggaggccctctgaggagagctagagtcccagcaaagggtgcagctgaccctagcactggctgtgacatgctgcttggtgctgcctctggtcctgaggggttagggacatccccaaagggtataccctggctctgccacccatgaaccagcccagcatccagccagtgagtgggcacccaatgcctctcaggatgagaccagtaaatgccggaggtggagctgggcagctgtggagccccaggccacaggccagtctcgcttggctctcatgactgtggtggtggagatagcgtggggagcctcgcccatggtctcacgtggcaagaagtgcctttagctctggatcccaaccgtttggcacagctttggccacagccaggcccctctggaattgtccttattaaaccagtttcccgag

SEQ ID NO: 136961 - DNA, 920 bp, Homo sapiens
  Payload ID: 6813
  Gene Symbol: GTF3C5
  Gene Name: general transcription factor IIIC, polypeptide 5, 63kDa
  ENST ID: ENST00000440319
  CDS Start-End: 189-920
ttattatcctccgggtccctcgctggctagtaggagagactggtgcttgccccgcccggtggactaactcgcttaattttaaataaaaagtcgaggacacggcggtcgttttcccgaagacatgggccctcccatgggccatttgctccctggaggccctcgcgtcttgctgagcccggggagttaggatgacgcgagcgatctacgcagaccccaccaagaggctggagctgtacttccggcccaaggacccatactgccacccagtgtgcgccaaccgcttcagtaccagcagcctgctgctccgcatcaggaagagaacgaggcggcagaaaggggtgctgggcactgaggcccactccgaggtcacatttgacatggagatccttggcatcatctccaccatttacaaatttcaggggatgtctgacttccagtacttggctgtgcatacggaagcaggcggcaagcatacgtcaatgtatgacaaggtgctcatgctccggcccgagaaggaggcctttttccaccaggagctgccgctctacatccccccacccatcttctcccggctggacgccccggtggactacttctaccgaccagagacccagcaccgggaaggctacaacaatccccccatctcaggtgagaatctgattggcctgagcagagcccggcgcccccacaatgccatctttgtcaactttgaggatgaggaggtgcccaagcagccactggaggctgcagcccagacgtggaggagagtctgcactaaccccgtggaccggaaggtggaggaggagctgaggaagctgtttgacatccgtcccatctggtcccgaaatgctgtcaaggccaacatcagcgtccacccagacaagctcaaggtcttgcttcccttcatagcctattacatg

SEQ ID NO: 136962 - DNA, 823 bp, Homo sapiens
  Payload ID: 6813
  Gene Symbol: GTF3C5
  Gene Name: general transcription factor IIIC, polypeptide 5, 63kDa
  ENST ID: ENST00000439697
  CDS Start-End: 151-823
ggcggaggcggccgatttggggctgggggccgccgtccccgtggagctgaggcgggagcgacgcatggtgtgcgtggagtacccgggagtggtgcgtgatgtggctaagatgctgccgactctgggcggcgaggaaggcgtctcccggggatgtctgacttccagtacttggctgtgcatacggaagcaggcggcaagcatacgtcaatgtatgacaaggtgctcatgctccggcccgagaaggaggcctttttccaccaggagctgccgctctacatccccccacccatcttctcccggctggacgccccggtggactacttctaccgaccagagacccagcaccgggaaggctacaacaatccccccatctcaggtgagaatctgattggcctgagcagagcccggcgcccccacaatgccatctttgtcaactttgaggatgaggaggtgcccaagcagccactggaggctgcagcccagacgtggaggagagtctgcactaaccccgtggaccggaaggtggaggaggagctgaggaagctgtttgacatccgtcccatctggtcccgaaatgctgtcaaggccaacatcagcgtccacccagacaagctcaaggtcttgcttcccttcatagcctattacatgataacaggcccctggcgcagcctatggattcgatttgggtatgacccccgaaaaaacccagatgccaagatttatcaagtcctcgatttccgaatccgttgtggaatgaaacacggttacgcccccagtgacttgccggtcaaagcaaagcgcagcacctacaactacagcctcc

SEQ ID NO: 136963 - DNA, 736 bp, Homo sapiens
  Payload ID: 6813
  Gene Symbol: GTF3C5
  Gene Name: general transcription factor IIIC, polypeptide 5, 63kDa
  ENST ID: ENST00000435745
  CDS Start-End: 1-272
gaatccgttgtggaatgaaacacggttacgcccccagtgacttgccggtcaaagcaaagcgcagcacctacaactacagcctccccatcaccgtcaagaagacatccagccagcttgtcaccatgcatgacctgaagcagggcctgggcccgtcggggacgagtggtgctcggaaaccagcttccagcaagtacaagctcaaggtgggcgcccctggaggccaggaatggaggggaggacttccctcttggggccgggcaccttgtgggtgacacctggggggctgtgattagggcagctctgcccaccggggcctcggcaccttgcttccttttaggtcagccttcagacactgagggtgagaactcgggtgcaaagccccagggctgtgtgtgttggggacatctggcgaagaggtggtgacaagtctcagggaagtctggcaccagcagctgcatgtggttgtccttctcgagccctttgggagcctgggcccccactgagccacgtgaccactccgggaatgatcggaattgggcacacacaggaggacagagccagagcaggccatgtgggctgcagctgtggcaggagcctcactggctcacgtttccgtcagtgcggttgcccagcgggggttggcggtttccagagctgttcccacattcaggctcccgcaagccgctccacagccctgggggaggccgagaagggggcatcccgcacggtggaatca

SEQ ID NO: 136964 - DNA, 952 bp, Homo sapiens
  Payload ID: 6814
  Gene Symbol: GTF3C6
  Gene Name: general transcription factor IIIC, polypeptide 6, alpha 35kDa
  Uniprot ID: Q969F1
  ENST ID: ENST00000329970
  CDS Start-End: 211-852
tctccacgtgggtaccggcgctctcggcgcccgtagccacccgcccgccggaagccgacatctcgagttctggcagaagcaatttgcgcggcgaggagcggagcggcaggaacccaataagctgcttcgcctcggagctgaagcccgtactcaagatggcggctccgggcgggcgtggccagtgactagaaggcgaggcgccgcgggaccatggcggcggcggcggacgagcggagtccagaggacggagaagacgaggaagaggaggagcagttggttctggtggaattatcaggaattattgattcagacttcctctcaaaatgtgaaaataaatgcaaggttttgggcattgacactgagaggcccattctgcaagtggacagctgtgtctttgctggggagtatgaagacactctagggacctgtgttatatttgaagaaaatgttgaacatgctgatacagaaggcaataataaaacagtgctaaaatataaatgccatacaatgaagaagctcagcatgacaagaactctcctgacagagaagaaggaaggagaagaaaacataggtggggtggaatggctgcaaataaaggataatgatttctcctatcgacccaacatgatttgtaactttctacatgaaaatgaagacgaagaagtggtagcttcagccccagataaatctttggaattggaagaggaagagattcaaatgaacgacagttcaaacctgagttgtgaacaggagaaaccaatgcacttggaaatagaagattctggtcctcttattgatataccttctgagacagaaggttctgtttttatggaaactcaaatgctgccttagaaatcactcctagatgaaatgtttctcataataacttgtcaagaactttttagagttgttacataaaaataattgctgtgtagctttcagtcttttaata

SEQ ID NO: 136965 - DNA, 4193 bp, Homo sapiens
  Payload ID: 6815
  Gene Symbol: GPHN
  Gene Name: gephyrin
  Uniprot ID: Q9NQX3
  ENST ID: ENST00000315266
  CDS Start-End: 1122-3332
agcagcgctcatggcgaagaggcttaaggccacaaaaccgtgggacagcaggaggaagagaagccaggtatctccactccagctgccctgcctcagactcctcagtttcgcacgtgaggatcgtcttgcaggcactgactggagatggaatcctaaagcataggtgaagcggaaatcctccttcagggagagcccactgaggaagccagcggctagcacgaggcaggacaggatacctccctcttcgcccacggcggcctctctgtcatagtagccaccgttctgccactcatgcagctttctaagacacctctcggttccccagcgctttcagtggggcggccggccattcccgagggttgcaagaggaggcccggggtgctgagccagcctcgctgcccccgcgtagaaagccggcccgccggcgagagccagcctaaggcgcggacaaccaacgaggtgtcaggctcggcaggggattgcttctgtctggggcccggccgaggttgcgttcgtgcctcgcgcgcacacgctccgcgttcactcagccaatccggtgctactcgcgcgcccaggagcgatccgcggtcctactcaggctgggccggctccttcccgctcccaatactcagcacccgagctctcactcctcccctcactctccacgagttccacgcctaggggtgtagctccgcccttgtccccgagtccgcccccgcaacctccagagcgtgtgctatcctttcctctcagtcctgccatctagctgccttgggtctcgcgctccgcagagcgttccgacactctccggcctcgttctgccgcctccgcgcgctctccccgtgcggccaccgcgccccccaagcttgcctccttcttgccggacttggggccgcgcgccctgactccttcccctcccgcggacccgcgcactcccggcgcggcctctcccccacgcaggccaccgtgcactctgtggcctccccctccttccccgctctcctcgcgcttctctggctccctagctgtcgcgctctcctcggcgagcgcgctcccggcccgcgcgctccgggctccggtttctcccggctcctgtcagtgcggtgactgcgctgggaaacatggcgaccgagggaatgatccttactaaccacgaccatcaaatccgtgtcggagtccttacagtgagtgatagttgcttcaggaatcttgcagaagaccgcagtgggataaatctcaaagatctcgtacaagatccttctttgttgggtgggactatatcagcatacaagatagtaccagatgaaatagaagaaatcaaggaaaccctgatagattggtgtgatgaaaaggaacttaatttgatattaacaactggaggaacaggatttgcaccacgagatgtcactccagaggccacaaaagaagtaatagaacgggaagcaccagggatggccctggcaatgctgatgggatcacttaatgttacacctctgggcatgctctctaggcctgtatgtggaatcagagggaaaacgctcataattaacctgccaggtagcaagaaaggatctcaggaatgctttcaattcatactgccagctctacctcatgccattgaccttttacgtgatgccattgtaaaagtaaaggaggtgcatgatgaacttgaagatttgccttccccacctccccctctttcccctcctcctactaccagcccccataaacagacagaagacaaaggagttcaatgtgaggaagaggaagaagagaagaaagacagtggtgttgcttcaacagaagatagttcctcatcacatataactgcagcagccattgctgccaagattccagactccatcatttctcgtggtgttcaggtgctcccacgagacacagcctccctcagcactactccttcagaatcgcctcgtgctcaggctacatctcgcctctctacagcttcctgcccaacaccaaaagtccagtccaggtgcagcagcaaggagaacattctcagagccagtcacagtgctgtcgatatcaccaaggtggctagaagacatcgcatgtctccttttcctctgacatctatggacaaagcctttatcacagtcctggagatgactccggtgcttgggacagaaatcatcaattaccgagatggaatggggcgagtccttgctcaagatgtatatgcaaaagacaatttaccccccttcccagcatcagtaaaagatggctatgctgtccgagctgctgatggcccaggagatcgtttcatcattggggaatcccaagctggtgaacagccaactcagacagtaatgccaggacaagtcatgcgggttacaacaggtgctccaataccctgcggtgctgatgcagtagtacaagtggaagataccgaacttatcagggaatcagatgatggcactgaagaacttgaagtgcgaattctggtgcaagctcggccaggccaagatatcagacccatcggccatgacattaaaagaggggaatgtgttttggccaaaggaacccacatgggcccctcagagattggtcttctggcaactgtaggtgtcacagaggttgaagttaataagtttccagtggttgcagtcatgtcaacagggaatgagctgctaaatcctgaagatgacctcttaccagggaagattcgagacagcaatcgttcaactcttctagcaacaattcaggaacatggttaccccacgatcaacttgggtattgtaggagacaacccagatgacttactcaatgccttgaatgagggtatcagtcgtgctgatgtcatcatcacatcagggggtgtatccatgggggaaaaggactatctcaagcaggtgctggacattgatcttcatgctcagatccattttggcagggtttttatgaaaccaggcttgccaacaacatttgcaactttggatattgatggtgtaagaaaaataatctttgcactacctgggaatcctgtatcggctgtggtcacctgcaatctctttgttgtgcctgcactgaggaaaatgcagggcatcttggatcctcggccaaccatcatcaaagcaaggttatcatgtgatgtaaaacttgatcctcgtccagaataccatcggtgtatactaacttggcatcaccaagaaccactaccttgggcacagagtacaggtaatcaaatgagcagccgtctgatgagcatgcgcagtgccaatggattgttgatgctacctccaaagacagaacagtacgtggagctccacaaaggcgaggtggtggatgtcatggtcattggacggctatgatggtcaccagcaggagaaagctttgatgcatgtccacatatcattgactgtatcctgtaatatgcaacggcacagctagttttcccgatttggataaaagttgatctgtatagtcaacatcttgaactatatttcaaatgaatttaaatatcttttaaagaaaaaaacacctaaaaataaatcttaacagaaaattctgttctgattatatcaaggcaaatttttcctttcttgcaaattgctttgtgtgttcaatgctaggtctgatagcgatagcttttagtagacagcggtaggtgcctgcagaacttgtgtttttctcatctttaaaatacaactacttatgctcttaaatcaaggctgtctgcttatttatactagcgtaggcaacacttggatttcccttcttagtatgcttcataactgctttacagagagcttttgcttgttctttctcatgtatctcgtgtttatgtgcacagtgccaaaagaagactgactgggtggaggctctgccttgcctcaagaaccatcccctgcagagcatccagggaggtttctcgccccaatagcctcacggcacagtactcttgggcagtaactggacaccttttatttgaagaaacaaactgaagaaaaaatgcttccttaagtgctgacagcctttttaaccaatacatttaaaattgtacagaacaaaaaaataaaatcaaagactgatcttgtacagatattagtgttaccagcattcatgtggaaatcaagagcaaagacaaaataatgttaaacaattctgtaccataacattttctgtaatgatactgaaacttaatgaataaaaaaattccttgatcattattt

SEQ ID NO: 136966 - DNA, 4297 bp, Homo sapiens
  Payload ID: 6815
  Gene Symbol: GPHN
  Gene Name: gephyrin
  Uniprot ID: Q9NQX3
  ENST ID: ENST00000478722
  CDS Start-End: 1122-3431
agcagcgctcatggcgaagaggcttaaggccacaaaaccgtgggacagcaggaggaagagaagccaggtatctccactccagctgccctgcctcagactcctcagtttcgcacgtgaggatcgtcttgcaggcactgactggagatggaatcctaaagcataggtgaagcggaaatcctccttcagggagagcccactgaggaagccagcggctagcacgaggcaggacaggatacctccctcttcgcccacggcggcctctctgtcatagtagccaccgttctgccactcatgcagctttctaagacacctctcggttccccagcgctttcagtggggcggccggccattcccgagggttgcaagaggaggcccggggtgctgagccagcctcgctgcccccgcgtagaaagccggcccgccggcgagagccagcctaaggcgcggacaaccaacgaggtgtcaggctcggcaggggattgcttctgtctggggcccggccgaggttgcgttcgtgcctcgcgcgcacacgctccgcgttcactcagccaatccggtgctactcgcgcgcccaggagcgatccgcggtcctactcaggctgggccggctccttcccgctcccaatactcagcacccgagctctcactcctcccctcactctccacgagttccacgcctaggggtgtagctccgcccttgtccccgagtccgcccccgcaacctccagagcgtgtgctatcctttcctctcagtcctgccatctagctgccttgggtctcgcgctccgcagagcgttccgacactctccggcctcgttctgccgcctccgcgcgctctccccgtgcggccaccgcgccccccaagcttgcctccttcttgccggacttggggccgcgcgccctgactccttcccctcccgcggacccgcgcactcccggcgcggcctctcccccacgcaggccaccgtgcactctgtggcctccccctccttccccgctctcctcgcgcttctctggctccctagctgtcgcgctctcctcggcgagcgcgctcccggcccgcgcgctccgggctccggtttctcccggctcctgtcagtgcggtgactgcgctgggaaacatggcgaccgagggaatgatccttactaaccacgaccatcaaatccgtgtcggagtccttacagtgagtgatagttgcttcaggaatcttgcagaagaccgcagtgggataaatctcaaagatctcgtacaagatccttctttgttgggtgggactatatcagcatacaagatagtaccagatgaaatagaagaaatcaaggaaaccctgatagattggtgtgatgaaaaggaacttaatttgatattaacaactggaggaacaggatttgcaccacgagatgtcactccagaggccacaaaagaagtaatagaacgggaagcaccagggatggccctggcaatgctgatgggatcacttaatgttacacctctgggcatgctctctaggcctgtatgtggaatcagagggaaaacgctcataattaacctgccaggtagcaagaaaggatctcaggaatgctttcaattcatactgccagctctacctcatgccattgaccttttacgtgatgccattgtaaaagtaaaggaggtgcatgatgaacttgaagatttgccttccccacctccccctctttcccctcctcctactaccagcccccataaacagacagaagacaaaggagttcaatgtgaggaagaggaagaagagaagaaagacagtggtgttgcttcaacagaagatagttcctcatcacatataactgcagcagccattgctgccaagaagcatccattctacaccagtcctgctgttgtcatggcacacggtgaacagcccatccctggtctcatcaattattcccatcattcaacagatgaacggattccagactccatcatttctcgtggtgttcaggtgctcccacgagacacagcctccctcagcactactccttcagaatcgcctcgtgctcaggctacatctcgcctctctacagcttcctgcccaacaccaaaagtccagtccaggtgcagcagcaaggagaacattctcagagccagtcacagtgctgtcgatatcaccaaggtggctagaagacatcgcatgtctccttttcctctgacatctatggacaaagcctttatcacagtcctggagatgactccggtgcttgggacagaaatcatcaattaccgagatggaatggggcgagtccttgctcaagatgtatatgcaaaagacaatttaccccccttcccagcatcagtaaaagatggctatgctgtccgagctgctgatggcccaggagatcgtttcatcattggggaatcccaagctggtgaacagccaactcagacagtaatgccaggacaagtcatgcgggttacaacaggtgctccaataccctgcggtgctgatgcagtagtacaagtggaagataccgaacttatcagggaatcagatgatggcactgaagaacttgaagtgcgaattctggtgcaagctcggccaggccaagatatcagacccatcggccatgacattaaaagaggggaatgtgttttggccaaaggaacccacatgggcccctcagagattggtcttctggcaactgtaggtgtcacagaggttgaagttaataagtttccagtggttgcagtcatgtcaacagggaatgagctgctaaatcctgaagatgacctcttaccagggaagattcgagacagcaatcgttcaactcttctagcaacaattcaggaacatggttaccccacgatcaacttgggtattgtaggagacaacccagatgacttactcaatgccttgaatgagggtatcagtcgtgctgatgtcatcatcacatcagggggtgtatccatgggggaaaaggactatctcaagcaggtgctggacattgatcttcatgctcagatccattttggcagggtttttatgaaaccaggcttgccaacaacatttgcaactttggatattgatggtgtaagaaaaataatctttgcactacctgggaatcctgtatcggctgtggtcacctgcaatctctttgttgtgcctgcactgaggaaaatgcagggcatcttggatcctcggccaaccatcatcaaagcaaggttatcatgtgatgtaaaacttgatcctcgtccagaataccatcggtgtatactaacttggcatcaccaagaaccactaccttgggcacagagtacaggtaatcaaatgagcagccgtctgatgagcatgcgcagtgccaatggattgttgatgctacctccaaagacagaacagtacgtggagctccacaaaggcgaggtggtggatgtcatggtcattggacggctatgatggtcaccagcaggagaaagctttgatgcatgtccacatatcattgactgtatcctgtaatatgcaacggcacagctagttttcccgatttggataaaagttgatctgtatagtcaacatcttgaactatatttcaaatgaatttaaatatcttttaaagaaaaaaacacctaaaaataaatcttaacagaaaattctgttctgattatatcaaggcaaatttttcctttcttgcaaattgctttgtgtgttcaatgctaggtctgatagcgatagcttttagtagacagcggtaggtgcctgcagaacttgtgtttttctcatctttaaaatacaactacttatgctcttaaatcaaggctgtctgcttatttatactagcgtaggcaacacttggatttcccttcttagtatgcttcataactgctttacagagagcttttgcttgttctttctcatgtatctcgtgtttatgtgcacagtgccaaaagaagactgactgggtggaggctctgccttgcctcaagaaccatcccctgcagagcatccagggaggtttctcgccccaatagcctcacggcacagtactcttgggcagtaactggacaccttttatttgaagaaacaaactgaagaaaaaatgcttccttaagtgctgacagcctttttaaccaatacatttaaaattgtacagaacaaaaaaataaaatcaaagactgatcttgtacagatattagtgttaccagcattcatgtggaaatcaagagcaaagacaaaataatgttaaacaattctgtaccataacattttctgtaatgatactgaaacttaatgaataaaaaaattccttgatcattatttaaaaa

SEQ ID NO: 136967 - DNA, 2459 bp, Homo sapiens
  Payload ID: 6815
  Gene Symbol: GPHN
  Gene Name: gephyrin
  ENST ID: ENST00000543237
  CDS Start-End: 25-2373
agtgcggtgactgcgctgggaaacatggcgaccgagggaatgatccttactaaccacgaccatcaaatccgtgtcggagtccttacagtgagtgatagttgcttcaggaatcttgcagaagaccgcagtgggataaatctcaaagatctcgtacaagatccttctttgttgggtgggactatatcagcatacaagatagtaccagatgaaatagaagaaatcaaggaaaccctgatagattggtgtgatgaaaaggaacttaatttgatattaacaactggaggaacaggatttgcaccacgagatgtcactccagagaaattcccaacattcccattttgtgggctccagaaaggggccacaaaagaagtaatagaacgggaagcaccagggatggccctggcaatgctgatgggatcacttaatgttacacctctgggcatgctctctaggcctgtatgtggaatcagagggaaaacgctcataattaacctgccaggtagcaagaaaggatctcaggaatgctttcaattcatactgccagctctacctcatgccattgaccttttacgtgatgccattgtaaaagtaaaggaggtgcatgatgaacttgaagatttgccttccccacctccccctctttcccctcctcctactaccagcccccataaacagacagaagacaaaggagttcaatgtgaggaagaggaagaagagaagaaagacagtggtgttgcttcaacagaagatagttcctcatcacatataactgcagcagccattgctgccaagattccagactccatcatttctcgtggtgttcaggtgctcccacgagacacagcctccctcagcactactccttcagaatcgcctcgtgctcaggctacatctcgcctctctacagcttcctgcccaacaccaaaacaaattagacggccggatgaaagcaaaggagttgctagtagagttggatccctcaaagctcggcttccctcgtgctcatctacctatagtgtatctgaggtccagtccaggtgcagcagcaaggagaacattctcagagccagtcacagtgctgtcgatatcaccaaggtggctagaagacatcgcatgtctccttttcctctgacatctatggacaaagcctttatcacagtcctggagatgactccggtgcttgggacagaaatcatcaattaccgagatggaatggggcgagtccttgctcaagatgtatatgcaaaagacaatttaccccccttcccagcatcagtaaaagatggctatgctgtccgagctgctgatggcccaggagatcgtttcatcattggggaatcccaagctggtgaacagccaactcagacagtaatgccaggacaagtcatgcgggttacaacaggtgctccaataccctgcggtgctgatgcagtagtacaagtggaagataccgaacttatcagggaatcagatgatggcactgaagaacttgaagtgcgaattctggtgcaagctcggccaggccaagatatcagacccatcggccatgacattaaaagaggggaatgtgttttggccaaaggaacccacatgggcccctcagagattggtcttctggcaactgtaggtgtcacagaggttgaagttaataagtttccagtggttgcagtcatgtcaacagggaatgagctgctaaatcctgaagatgacctcttaccagggaagattcgagacagcaatcgttcaactcttctagcaacaattcaggaacatggttaccccacgatcaacttgggtattgtaggagacaacccagatgacttactcaatgccttgaatgagggtatcagtcgtgctgatgtcatcatcacatcagggggtgtatccatgggggaaaaggactatctcaagcaggtgctggacattgatcttcatgctcagatccattttggcagggtttttatgaaaccaggcttgccaacaacatttgcaactttggatattgatggtgtaagaaaaataatctttgcactacctgggaatcctgtatcggctgtggtcacctgcaatctctttgttgtgcctgcactgaggaaaatgcagggcatcttggatcctcggccaaccatcatcaaagcaaggttatcatgtgatgtaaaacttgatcctcgtccagaataccatcggtgtatactaacttggcatcaccaagaaccactaccttgggcacagagtacaggtaatcaaatgagcagccgtctgatgagcatgcgcagtgccaatggattgttgatgctacctccaaagacagaacagtacgtggagctccacaaaggcgaggtggtggatgtcatggtcattggacggctatgatggtcaccagcaggagaaagctttgatgcatgtccacatatcattgactgtatcctgtaatatgcaacggcacagctagttttccc

SEQ ID NO: 136968 - DNA, 404 bp, Homo sapiens
  Payload ID: 6815
  Gene Symbol: GPHN
  Gene Name: gephyrin
  ENST ID: ENST00000556240
  CDS Start-End: 1-182
gattgttgatgctacctccaaagacagaacatgccaaaagaagactgactgggtggaggctctgccttgcctcaagaaccatcccctgcagagcatccagggaggtttctcgccccaatagcctcacggcacagtactcttgggcagtaactggacaccttttatttgaagaaacaaactgaagaaaaaatgcttccttaagtgctgacagcctttttaaccaatacatttaaaattgtacagaacaaaaaaataaaatcaaagactgatcttgtacagatattagtgttaccagcattcatgtggaaatcaagagcaaagacaaaataatgttaaacaattctgtaccataacattttctgtaatgatactgaaacttaatgaataaaaaaattccttgatca

SEQ ID NO: 136969 - DNA, 841 bp, Homo sapiens
  Payload ID: 6815
  Gene Symbol: GPHN
  Gene Name: gephyrin
  ENST ID: ENST00000555456
  CDS Start-End: 1-841
gaaaccctgatagattggtgtgatgaaaaggaacttaatttgatattaacaactggaggaacaggatttgcaccacgagatgtcactccagaggccacaaaagaagtaatagaacgggaagcaccagggatggccctggcaatgctgatgggatcacttaatgttacacctctgggcatgctctctaggcctgtatgtggaatcagagggaaaacgctcataattaacctgccaggtagcaagaaaggatctcaggaatgctttcaattcatactgccagctctacctcatgccattgaccttttacgtgatgccattgtaaaagtaaaggaggtgcatgatgaacttgaagatttgccttccccacctccccctctttcccctcctcctactaccagcccccataaacagacagaagacaaaggagttcaatgtgaggaagaggaagaagagaagaaagacagtggtgttgcttcaacagaagatagttcctcatcacatataactgcagcagccattgctgccaagattccagactccatcatttctcgtggtgttcaggtgctcccacgagacacagcctccctcagcactactccttcagaatcgcctcgtgctcaggctacatctcgcctctctacagcttcctgcccaacaccaaaacaaattagacggccggatgaaagcaaaggagttgctagtagagttggatccctcaaagtccagtccaggtgcagcagcaaggagaacattctcagagccagtcacagtgctgtcgatatcaccaaggtggctagaagacatcgcatgtctccttttcctctgacatctatggacaaag

SEQ ID NO: 136970 - DNA, 512 bp, Homo sapiens
  Payload ID: 6815
  Gene Symbol: GPHN
  Gene Name: gephyrin
  ENST ID: ENST00000556633
  CDS Start-End: 22-174
gcggtgactgcgctgggaaacatggcgaccgagggaatgatccttactaaccacgaccatcaaatccgtgtcggagtccttacagtgagtgatagttgcttcaggaatcttgcagaagaccgcagtgggataaatctcaaagatctcgtacaagatccttctttgaaaccctgatagattggtgtgatgaaaaggaacttaatttgatattaacaactggaggaacaggatttgcaccacgagatgtcactccagaggccacaaaagaagtaatagaacgggaagcaccagggatggccctggcaatgctgatgggatcacttaatgttacacctctgggcatgctctctaggcctgtatgtggaatcagagggaaaacgctcataattaacctgccaggtagcaagaaaggatctcaggaatgctttcaattcatactgccagctctacctcatgccattgaccttttacgtgatgccattgtaaaagtaaaggaggtgcatgatgaactt

SEQ ID NO: 136971 - DNA, 574 bp, Homo sapiens
  Payload ID: 6815
  Gene Symbol: GPHN
  Gene Name: gephyrin
  ENST ID: ENST00000553936
  CDS Start-End: 13-132
gcgctgggaaacatggcgaccgagggaatgatccttactaaccacgaccatcaaatccgtgtcggagtccttacagtagggatggagtttcaccgtgttagccaggatggtctcgatctcctgaccttgtgatccacccatctcggcctcccaaagtgctgggattacaggcgtgagccaccacgcccggccagcagtaaggtatttttaaattaagtgagtgatagttgcttcaggaatcttgcagaagaccgcagtgggataaatctcaaagatctcgtacaagatccttctttgttgggtgggactatatcagcatacaagatagtaccagatgaaatagaagaaatcaaggaaaccctgatagattggtgtgatgaaaaggaacttaatttgatattaacaactggaggaacaggatttgcaccacgagatgtcactccagaggccacaaaagaagtaatagaacgggaagcaccagggatggccctggcaatgctgatgggatcacttaatgttacacctctgggcatgctctctaggcctgtatgtggaatcagagggaaaacgctca

SEQ ID NO: 136972 - DNA, 503 bp, Homo sapiens
  Payload ID: 6815
  Gene Symbol: GPHN
  Gene Name: gephyrin
  ENST ID: ENST00000557654
  CDS Start-End: 13-162
gcgctgggaaacatggcgaccgagggaatgatccttactaaccacgaccatcaaatccgtgtcggagtccttacagtgagtgatagttgcttcaggaatcttgcagaagaccgcagtgggataaatctcaaagatctcgtacaagatccttctttgggataaattccaaaactgccagtgaatggctgaaaccacagatactactgaacccaagtactgcgataccacaatagctgatctgataacccagatggctggttgggtgggactatatcagcatacaagatagtaccagatgaaatagaagaaatcaaggaaaccctgatagattggtgtgatgaaaaggaacttaatttgatattaacaactggaggaacaggatttgcaccacgagatgtcactccagaggccacaaaagaagtaatagaacgggaagcaccagggatggccctggcaatgctgatgggatcacttaatgttacacctctgggcatgctctctag

SEQ ID NO: 136973 - DNA, 550 bp, Homo sapiens
  Payload ID: 6815
  Gene Symbol: GPHN
  Gene Name: gephyrin
  ENST ID: ENST00000555668
  CDS Start-End: 22-171
gcggtgactgcgctgggaaacatggcgaccgagggaatgatccttactaaccacgaccatcaaatccgtgtcggagtccttacagtgagtgatagttgcttcaggaatcttgcagaagaccgcagtgggataaatctcaaagatctcgtacaagatccttctttgggataaattccaaaactgccagtgaatggctgaaaccacagatactactgaacccaagtactgcgataccacaatagctgatctgataacccagatggctggttgggtgggactatatcagcatacaagatagtaccagatgaaatagaagaaatcaaggaaaccctgatagattggtgtgatgaaaaggaacttaatttgatattaacaactggaggaacaggatttgcaccacgagatgtcactccagagaaattcccaacattcccattttgtgggctccagaaaggggccacaaaagaagtaatagaacgggaagcaccagggatggccctggcaatgctgatgggatcacttaatgttacacctctgggcatgctctcta

SEQ ID NO: 136974 - DNA, 655 bp, Homo sapiens
  Payload ID: 6815
  Gene Symbol: GPHN
  Gene Name: gephyrin
  ENST ID: ENST00000555503
  CDS Start-End: 1-606
cacatgggcccctcagagattggtcttctggcaactgtaggtgtcacagaggttgaagttaataagtttccagtggttgcagtcatgtcaacagggaatgagctgctaaatcctgaagatgacctcttaccagggaagattcgagacagcaatcgttcaactcttctagcaacaattcaggaacatggttaccccacgatcaacttgggtattgtaggagacaacccagatgacttactcaatgccttgaatgagggtatcagtcgtgctgatgtcatcatcacatcagggggtgtatccatgggggaaaaggactatctcaagcaggtgctggacattgatcttcatgctcagatccattttggcagggtttttatgaaaccaggcttgccaacaacatttgcaactttggatattgatggtgtaagaaaaataatctttgcactacctgggaatcctgtatcggctgtggtcacctgcaatctctttgttgtgcctgcactgaggaaaatgcagggcatcttggatcctcggccaaccatcatcaaagcaagggtaatgctttctaatgaccagaaaccaaaatggaagcctggtaacagttagggatatgatttcctaactgtccaaaataaacatctagagttttctatta

SEQ ID NO: 136975 - DNA, 1723 bp, Homo sapiens
  Payload ID: 6815
  Gene Symbol: GPHN
  Gene Name: gephyrin
  ENST ID: ENST00000459628
  CDS Start-End: 391-1533
gtgtgctatcctttcctctcagtcctgccatctagctgccttgggtctcgcgctccgcagagcgttccgacactctccggcctcgttctgccgcctccgcgcgctctccccgtgcggccaccgcgccccccaagcttgcctccttcttgccggacttggggccgcgcgccctgactccttcccctcccgcggacccgcgcactcccggcgcggcctctcccccacgcaggccaccgtgcactctgtggcctccccctccttccccgctctcctcgcgcttctctggctccctagctgtcgcgctctcctcggcgagcgcgctcccggcccgcgcgctccgggctccggtttctcccggctcctgtcagtgcggtgactgcgctgggaaacatggcgaccgagggaatgatccttactaaccacgaccatcaaatccgtgtcggagtccttacagtgagtgatagttgcttcaggaatcttgcagaagaccgcagtgggataaatctcaaagatctcgtacaagatccttctttgttgggtgggactatatcagcatacaagatagtaccagatgaaatagaagaaatcaagaaattcccaacattcccattttgtgggctccagaaaggggccacaaaagaagtaatagaacgggaagcaccagggatggccctggcaatgctgatgggatcacttaatgttacacctctgggcatgctctctaggcctgtatgtggaatcagagggaaaacgctcataattaacctgccaggtagcaagaaaggatctcaggaatgctttcaattcatactgccagctctacctcatgccattgaccttttacgtgatgccattgtaaaagtaaaggaggtgcatgatgaacttgaagatttgccttccccacctccccctctttcccctcctcctactaccagcccccataaacagacagaagacaaaggagttcaatgtgaggaagaggaagaagagaagaaagacagtggtgttgcttcaacagaagatagttcctcatcacatataactgcagcagccattgctgccaagaagcatccattctacaccagtcctgctgttgtcatggcacacggtgaacagcccatccctggtctcatcaattattcccatcattcaacagatgaacggattccagactccatcatttctcgtggtgttcaggtgctcccacgagacacagcctccctcagcactactccttcagaatcgcctcgtgctcaggctacatctcgcctctctacagcttcctgcccaacaccaaaagtccagtccaggtgcagcagcaaggagaacattctcagagccagtcacagtgctgtcgatatcaccaaggtggctagaagacatcgcatgtctccttttcctctgacatctatggacaaagcctttatcacagtcctggagatgactccggtgcttgggacagaaatcatcaattaccgaggtactattatatttgaccattgccctttcttttcttcatttttttccaaataagattcatgtaacattaatgcacagttttcctgaaaaagaaagattattaaccattattacagttatcatcattctttttttttcttatttctactcaataagaaaaaggctaagggttcagccttaacagtatacagagtaaaatccatgaaactgccttttcattaaaaaaaggaaaaaaaaaaaaaaa

SEQ ID NO: 136976 - DNA, 2895 bp, Homo sapiens
  Payload ID: 6816
  Gene Symbol: GGPS1
  Gene Name: geranylgeranyl diphosphate synthase 1
  Uniprot ID: O95749
  ENST ID: ENST00000282841
  CDS Start-End: 233-1135
agtgtgaccgggatggcgcattttcttgcaccaactaatgcggtgtcgctggcggctgaggagggcggagagttctgtggtgaaatagtgggaaggattcatgtaggcatcgggaagagcctaagtccacattataaaataggaagttgatgcggggtacagttactcccggaccggcggcgtgaaagtcgtgatatcatcgttgaactattagctttgaagtttaaatccaatggagaagactcaagaaacagtccaaagaattcttctagaaccctataaatacttacttcagttaccaggtaaacaagtgagaaccaaactttcacaggcatttaatcattggctgaaagttccagaggacaagctacagattattattgaagtgacagaaatgttgcataatgccagtttactcatcgatgatattgaagacaactcaaaactccgacgtggctttccagtggcccacagcatctatggaatcccatctgtcatcaattctgccaattacgtgtatttccttggcttggagaaagtcttaacccttgatcacccagatgcagtgaagctttttacccgccagcttttggaactccatcagggacaaggcctagatatttactggagggataattacacttgtcccactgaagaagaatataaagctatggtgctgcagaaaacaggtggactgtttggattagcagtaggtctcatgcagttgttctctgattacaaagaagatttaaaaccgctacttaatacacttgggctctttttccaaattagggatgattatgctaatctacactccaaagaatatagtgaaaacaaaagtttttgtgaagatctgacagagggaaagttctcatttcctactattcatgctatttggtcaaggcctgaaagcacccaggtgcagaatatcttgcgccagagaacagaaaacatagatataaaaaaatactgtgtacattatcttgaggatgtaggttcttttgaatacactcgtaatacccttaaagagcttgaagctaaagcctataaacagattgatgcacgtggtgggaaccctgagctagtagccttagtaaaacacttaagtaagatgttcaaagaagaaaatgaataatgttaagccattcttgattggacctcatagcttattttagttaatcttttttttgtcttttagccttaccaccttttaaaaaatttgttattctccagaaacagtaaataggtgagtaggggtggtgcaagtgaattcgttttcatttagaagcccctctgtacagataatcaaaattcaaagttgaaagaatcaaaagcagccacagttatgtaggtctgatttgaatgtcataattgcagtgacaggacattgccaccaactctatcctactaccatcaatgttgtgtttattccgtcaataaaaaagacttgcttccaggaatttttatccatacactttctaactgtactatctgggcagttccaagccagtttctattagctagctggaccaaagaccacaaatctctttttttcctaaacgctgctgtaaggaatatctcacttttccccccggaaacaccctcactgaagtcttctatgaaaaggctgataatgggctgggcgcggtggctcacgcctgtaatcccagcactttgggaggccgaggcgggcagatcacgaggtcaggagatcgagaccatcctgacacggtgaaaccctgtctctactaaaaatacaaaaaattagctgggcgtggtggtgggcgcctgtagtcccagctactcgggaggctgaggcaggagaatggtgtgaacccaggaggcggagcttgcagtgagccgagatagtgcctctgcactccagcctgggtgacagagcgagactccgtctcaaaaaaaagggctgataatgataaacagtgagcactccggtcctttttcttaggttttccttttttccttcctctccaccccacaagttttgctttttaaccaaggtgtctctgcttgatgaaattcacatgctagtctaaatctttttttctcccttgtaacatttatgtgccccaaactggttagtatatgggtacagcattccctttccaattgggaagcggaaaaagagagtatgggatattttagaagggagcctttgaaccttattatatttccccatcattgatagtgacaatcttaaaagggttgttttcttaccttaagtacaaaagcatggaaaaatgcgcttttccttcccgcccacatcaccaccccgacttgaagacagtaggtgcttgaatggaaagtgagtaggcatctttaatcgccctgattaaaggaaagtgttagcctgagagggcctgactgaaaagtaaccaaaggcttaatatcaaacactaattagctttttagtgccttaaccctgacctggttaccagttttctgtagtttctacacccaagccactgaagtcatctgtggcccaagaggtaggacaaaaaaaaaaaaaaaaaaagctgatttcaatatttgatttgttgacatcccaaaatgaaagttttatgtttcccttagaaacatgttttgcttggttctatagtatgttacttaggatctatttaccatatatttgtatgagaaatcctcacccaagcattcaacctaaatctttgaaaagttgggtgctgtctttagtaacttttaaaatagtttaaatctcccattttaatagtgataaggaaacctgttaaaatcatggctattgatgttatagtatggaaagttgaactttatgaacccatacttttaaaaagcatttttaaaaatctaacactgactatagaaacaaattaaaatgtctacctttaagtataaaaa

SEQ ID NO: 136977 - DNA, 2740 bp, Homo sapiens
  Payload ID: 6816
  Gene Symbol: GGPS1
  Gene Name: geranylgeranyl diphosphate synthase 1
  Uniprot ID: O95749
  ENST ID: ENST00000358966
  CDS Start-End: 85-987
cgcgcaaatcctcgtccgcgagaactgcaaggcccgcaatgccctgcgcctgcgtggaccgattagctttgaagtttaaatccaatggagaagactcaagaaacagtccaaagaattcttctagaaccctataaatacttacttcagttaccaggtaaacaagtgagaaccaaactttcacaggcatttaatcattggctgaaagttccagaggacaagctacagattattattgaagtgacagaaatgttgcataatgccagtttactcatcgatgatattgaagacaactcaaaactccgacgtggctttccagtggcccacagcatctatggaatcccatctgtcatcaattctgccaattacgtgtatttccttggcttggagaaagtcttaacccttgatcacccagatgcagtgaagctttttacccgccagcttttggaactccatcagggacaaggcctagatatttactggagggataattacacttgtcccactgaagaagaatataaagctatggtgctgcagaaaacaggtggactgtttggattagcagtaggtctcatgcagttgttctctgattacaaagaagatttaaaaccgctacttaatacacttgggctctttttccaaattagggatgattatgctaatctacactccaaagaatatagtgaaaacaaaagtttttgtgaagatctgacagagggaaagttctcatttcctactattcatgctatttggtcaaggcctgaaagcacccaggtgcagaatatcttgcgccagagaacagaaaacatagatataaaaaaatactgtgtacattatcttgaggatgtaggttcttttgaatacactcgtaatacccttaaagagcttgaagctaaagcctataaacagattgatgcacgtggtgggaaccctgagctagtagccttagtaaaacacttaagtaagatgttcaaagaagaaaatgaataatgttaagccattcttgattggacctcatagcttattttagttaatcttttttttgtcttttagccttaccaccttttaaaaaatttgttattctccagaaacagtaaataggtgagtaggggtggtgcaagtgaattcgttttcatttagaagcccctctgtacagataatcaaaattcaaagttgaaagaatcaaaagcagccacagttatgtaggtctgatttgaatgtcataattgcagtgacaggacattgccaccaactctatcctactaccatcaatgttgtgtttattccgtcaataaaaaagacttgcttccaggaatttttatccatacactttctaactgtactatctgggcagttccaagccagtttctattagctagctggaccaaagaccacaaatctctttttttcctaaacgctgctgtaaggaatatctcacttttccccccggaaacaccctcactgaagtcttctatgaaaaggctgataatgggctgggcgcggtggctcacgcctgtaatcccagcactttgggaggccgaggcgggcagatcacgaggtcaggagatcgagaccatcctgacacggtgaaaccctgtctctactaaaaatacaaaaaattagctgggcgtggtggtgggcgcctgtagtcccagctactcgggaggctgaggcaggagaatggtgtgaacccaggaggcggagcttgcagtgagccgagatagtgcctctgcactccagcctgggtgacagagcgagactccgtctcaaaaaaaagggctgataatgataaacagtgagcactccggtcctttttcttaggttttccttttttccttcctctccaccccacaagttttgctttttaaccaaggtgtctctgcttgatgaaattcacatgctagtctaaatctttttttctcccttgtaacatttatgtgccccaaactggttagtatatgggtacagcattccctttccaattgggaagcggaaaaagagagtatgggatattttagaagggagcctttgaaccttattatatttccccatcattgatagtgacaatcttaaaagggttgttttcttaccttaagtacaaaagcatggaaaaatgcgcttttccttcccgcccacatcaccaccccgacttgaagacagtaggtgcttgaatggaaagtgagtaggcatctttaatcgccctgattaaaggaaagtgttagcctgagagggcctgactgaaaagtaaccaaaggcttaatatcaaacactaattagctttttagtgccttaaccctgacctggttaccagttttctgtagtttctacacccaagccactgaagtcatctgtggcccaagaggtaggacaaaaaaaaaaaaaaaaaaagctgatttcaatatttgatttgttgacatcccaaaatgaaagttttatgtttcccttagaaacatgttttgcttggttctatagtatgttacttaggatctatttaccatatatttgtatgagaaatcctcacccaagcattcaacctaaatctttgaaaagttgggtgctgtctttagtaacttttaaaatagtttaaatctcccattttaatagtgataaggaaacctgttaaaatcatggctattgatgttatagtatggaaagttgaactttatgaacccatacttttaaaaagcatttttaaaaatctaacactgactatagaaacaaattaaaatgtctacctttaagt

SEQ ID NO: 136978 - DNA, 1407 bp, Homo sapiens
  Payload ID: 6816
  Gene Symbol: GGPS1
  Gene Name: geranylgeranyl diphosphate synthase 1
  Uniprot ID: O95749
  ENST ID: ENST00000391855
  CDS Start-End: 301-1041
gtgtgaccgggatggcgcattttcttgcaccaactaatgcggtgtcgctggcggctgaggagggcggagagttctgtggtgaaatagtgggaaggattcatgtaggcatcgggaagagcctaagtccacattataaaataggaagttgatgcggggtacagttactcccggaccggcggcgtgaaagtcgtgatatcatcgttgaactgtaaacaagtgagaaccaaactttcacaggcatttaatcattggctgaaagttccagaggacaagctacagattattattgaagtgacagaaatgttgcataatgccagtttactcatcgatgatattgaagacaactcaaaactccgacgtggctttccagtggcccacagcatctatggaatcccatctgtcatcaattctgccaattacgtgtatttccttggcttggagaaagtcttaacccttgatcacccagatgcagtgaagctttttacccgccagcttttggaactccatcagggacaaggcctagatatttactggagggataattacacttgtcccactgaagaagaatataaagctatggtgctgcagaaaacaggtggactgtttggattagcagtaggtctcatgcagttgttctctgattacaaagaagatttaaaaccgctacttaatacacttgggctctttttccaaattagggatgattatgctaatctacactccaaagaatatagtgaaaacaaaagtttttgtgaagatctgacagagggaaagttctcatttcctactattcatgctatttggtcaaggcctgaaagcacccaggtgcagaatatcttgcgccagagaacagaaaacatagatataaaaaaatactgtgtacattatcttgaggatgtaggttcttttgaatacactcgtaatacccttaaagagcttgaagctaaagcctataaacagattgatgcacgtggtgggaaccctgagctagtagccttagtaaaacacttaagtaagatgttcaaagaagaaaatgaataatgttaagccattcttgattggacctcatagcttattttagttaatcttttttttgtcttttagccttaccaccttttaaaaaatttgttattctccagaaacagtaaataggtgagtaggggtggtgcaagtgaattcgttttcatttagaagcccctctgtacagataatcaaaattcaaagttgaaagaatcaaaagcagccacagttatgtaggtctgatttgaatgtcataattgcagtgacaggacattgccaccaactctatcctactaccatcaatgttgtgtttattccgtcaataaaaaagacttgcttccaggaatttttatccatacactttctaactgtactatctgggcagtt

SEQ ID NO: 136979 - DNA, 850 bp, Homo sapiens
  Payload ID: 6816
  Gene Symbol: GGPS1
  Gene Name: geranylgeranyl diphosphate synthase 1
  ENST ID: ENST00000471812
  CDS Start-End: 124-850
aaggctttctgggaaataaagtccatactctggggccaacgcgcaaatcctcgtccgcgagaactgcaaggcccgcaatgccctgcgcctgcgtggaccgattagctttgaagtttaaatccaatggagaagactcaagaaacagtccaaagaattcttctagaaccctataaatacttacttcagttaccaggtaaacaagtgagaaccaaactttcacaggcatttaatcattggctgaaagttccagaggacaagctacagattattattgaagtgacagaaatgttgcataatgccagtttactcatcgatgatattgaagacaactcaaaactccgacgtggctttccagtggcccacagcatctatggaatcccatctgtcatcaattctgccaattacgtgtatttccttggcttggagaaagtcttaacccttgatcacccagatgcagtgaagctttttacccgccagcttttggaactccatcagggacaaggcctagatatttactggagggataattacacttgtcccactgaagaagaatataaagctatggtgctgcagaaaacaggtggactgtttggattagcagtaggtctcatgcagttgttctctgattacaaagaagatttaaaaccgctacttaatacacttgggctctttttccaaattagggatgattatgctaatctacactccaaagaatatagtgaaaacaaaagtttttgtgaagatctgacagagggaaagttctcatttcctactattcatgctatttggtcaaggcctgaaagcacccaggtgcagaatatcttgcgccagagaacagaaaacatagata

SEQ ID NO: 136980 - DNA, 868 bp, Homo sapiens
  Payload ID: 6816
  Gene Symbol: GGPS1
  Gene Name: geranylgeranyl diphosphate synthase 1
  ENST ID: ENST00000497327
  CDS Start-End: 179-868
tagcactgtatacgtttgcagttctctgcccagccgctgtggaaaatcggcctcgaagtgattgaaattccctgtttatatcaggcggcttctttcagatccatcgtctttctcccggagtatgaatggaaggattcagtatgcgcttcacatttattagctttgaagtttaaatccaatggagaagactcaagaaacagtccaaagaattcttctagaaccctataaatacttacttcagttaccaggtaaacaagtgagaaccaaactttcacaggcatttaatcattggctgaaagttccagaggacaagctacagattattattgaagtgacagaaatgttgcataatgccagtttactcatcgatgatattgaagacaactcaaaactccgacgtggctttccagtggcccacagcatctatggaatcccatctgtcatcaattctgccaattacgtgtatttccttggcttggagaaagtcttaacccttgatcacccagatgcagtgaagctttttacccgccagcttttggaactccatcagggacaaggcctagatatttactggagggataattacacttgtcccactgaagaagaatataaagctatggtgctgcagaaaacaggtggactgtttggattagcagtaggtctcatgcagttgttctctgattacaaagaagatttaaaaccgctacttaatacacttgggctctttttccaaattagggatgattatgctaatctacactccaaagaatatagtgaaaacaaaagtttttgtgaagatctgacagagggaaagttctcatttcctactattcatgctatttggtcaaggcctgaaagcacccaggtg

SEQ ID NO: 136981 - DNA, 1396 bp, Homo sapiens
  Payload ID: 6816
  Gene Symbol: GGPS1
  Gene Name: geranylgeranyl diphosphate synthase 1
  Uniprot ID: O95749
  ENST ID: ENST00000488594
  CDS Start-End: 173-1075
aggccggccgggggccaccgaggggccaggagggcctgtgggccgcgggcaggaccggcccgccacagagcccctgcccacgtcccgttccgggctcagacccgacaagtgggagcgagatcaacatctggccccgccgcggggacaacattagctttgaagtttaaatccaatggagaagactcaagaaacagtccaaagaattcttctagaaccctataaatacttacttcagttaccaggtaaacaagtgagaaccaaactttcacaggcatttaatcattggctgaaagttccagaggacaagctacagattattattgaagtgacagaaatgttgcataatgccagtttactcatcgatgatattgaagacaactcaaaactccgacgtggctttccagtggcccacagcatctatggaatcccatctgtcatcaattctgccaattacgtgtatttccttggcttggagaaagtcttaacccttgatcacccagatgcagtgaagctttttacccgccagcttttggaactccatcagggacaaggcctagatatttactggagggataattacacttgtcccactgaagaagaatataaagctatggtgctgcagaaaacaggtggactgtttggattagcagtaggtctcatgcagttgttctctgattacaaagaagatttaaaaccgctacttaatacacttgggctctttttccaaattagggatgattatgctaatctacactccaaagaatatagtgaaaacaaaagtttttgtgaagatctgacagagggaaagttctcatttcctactattcatgctatttggtcaaggcctgaaagcacccaggtgcagaatatcttgcgccagagaacagaaaacatagatataaaaaaatactgtgtacattatcttgaggatgtaggttcttttgaatacactcgtaatacccttaaagagcttgaagctaaagcctataaacagattgatgcacgtggtgggaaccctgagctagtagccttagtaaaacacttaagtaagatgttcaaagaagaaaatgaataatgttaagccattcttgattggacctcatagcttattttagttaatcttttttttgtcttttagccttaccaccttttaaaaaatttgttattctccagaaacagtaaataggtgagtaggggtggtgcaagtgaattcgttttcatttagaagcccctctgtacagataatcaaaattcaaagttgaaagaatcaaaagcagccacagttatgtaggtctgatttgaatgtcataattgcagtgacaggacattgccaccaactctatcctactaccatcaatgttgtgtttattccgtcaataaaaaagacttgcttcca

SEQ ID NO: 136982 - DNA, 2390 bp, Homo sapiens
  Payload ID: 6817
  Gene Symbol: GSG1
  Gene Name: germ cell associated 1
  Uniprot ID: Q2KHT4
  ENST ID: ENST00000337630
  CDS Start-End: 69-1049
aaaccaaagggacttggagtgcagatggcatccttcggttcttccagacaagctgcaagacgctgaccatggccaagatggagctctcgaaggccttctctggccagcggacactcctatctgccatcctcagcatgctatcactcagcttctccacaacatccctgctcagcaactactggtttgtgggcacacagaaggtgcccaagcccctgtgcgagaaaggtctggcagccaagtgctttgacatgccagtgtccctggatggagataccaacacatccacccaggaggtggtacaatacaactgggagactggggatgaccggttctccttccggagcttccggagtggcatgtggctatcctgtgaggaaactgtggaagaaccaggggagaggtgccgaagtttcattgaacttacaccaccagccaagagagaaatcctatggttatccctgggaacgcagatcacctacatcggacttcaattcatcagcttcctcctgctactaacagacttgctactcactgggaaccctgcctgtgggctcaaactgagcgcctttgctgctgtttcctctgtcctgtcaggtctcctggggatggtggcccacatgatgtattcacaagtcttccaagcgactgtcaacttgggtccagaagactggagaccacatgtttggaattatggctgggccttctacatggcctggctctccttcacctgctgcatggcgtcggctgtcaccaccttcaacacgtacaccaggatggtgctggagttcaagtgcaagcatagtaagagcttcaaggaaaacccgaactgcctaccacatcaccatcagtgtttccctcggcggctgtcaagtgcagcccccaccgtgggtcctttgaccagctaccaccagtatcataatcagcccatccactctgtctctgagggagtcgacttctactccgagctgcggaacaagggatttcaaagaggggccagccaggagctgaaagaagcagttaggtcatctgtagaggaagagcagtgttaggagttaagcgggtttggggagtaggcttgagccctaccttacacgtctgctgattatcaacatgtgcttaagccaacatccgtctcttgagcatggtttttagaggctacgaataaggctatgaataagggttatctttaagtcctaagggattcctgggtgccactgctctcttttcctctacagctccatcttgtttcacccaccccacatctcacacatccagaattcccttctttactgatagtttctgtgccaggttctgggctaaaccatggagataaaaagaagagtaaaatacacttcccgaccttaaggatctgatacatctagttattggtctggaaattggagaaatggaggtgagcaaattaacggtagtgtgactgtggctcaactttccatggtacgcgcgaattgttctggaagtcacagatgggaagacagaagcgcccctgagtgctttgtcatatagcacagaagtcctccacactgcctgggacagtgtcctgcatccacacagtaggtacccagtaaaagtgttattaaatattgtcccaggagcccttaggagagtggtttaacatgagaaggcgccaacagcacacagggtcagggtcacttctagaaatagcccaccaaggctattcagattggactgtggttcccttctggacagtcacaccagggacttcccagtgaacaagggggcataggctcctctctggatcccaccttttcatcccttctgagaaatgtaccctattatttccttcataaagaatgccacccatctgattcctcaagaatctagacctagaaataccatttgacccagccatcccattactgggtagatacccaaaggattacaaatcatgctgctataaagacacatgcacacatatgtttattacggcactatttataatagcaaagacttggaaccaacccaaatgtccatcagtgatagactggattaagaaaatgtggcacatatacaccatggaatactatgcagccataaagaaggatgagtttatgccctttgtagggacatggatgaagctggaaaccatcattctgagcaaactatcgcaaggatagaaaaccaaacactgcatattctcactcacaggtgggaattgaacaataaaaacacttggacacagggtggggaacatcacacaccgggcctgtcatggggtggggggaggggggagggatagcattaggagatatactaacgtaaatgacgagttaatgggtgcagcacaccaacatggcacatgtatacatatgtaacaaatctgcacgttgtgcacatgtaccctagaactt

SEQ ID NO: 136983 - DNA, 1422 bp, Homo sapiens
  Payload ID: 6817
  Gene Symbol: GSG1
  Gene Name: germ cell associated 1
  ENST ID: ENST00000351606
  CDS Start-End: 134-1099
acacaccaccttacccctctgctggcaagaggggacctgattcatcctcacgctaaacactcattctacccaactgattgagacagaacagaagataaactgaaacttctctgccttcccgctgcaagagtgaatgagcgatccctctcaactgactcaaaatgtttgcctcacccaggagatggagctctcgaaggccttctctggccagcggacactcctatctgccatcctcagcatgctatcactcagcttctccacaacatccctgctcagcaactactggtttgtgggcacacagaaggtgcccaagcccctgtgcgagaaaggtctggcagccaagtgctttgacatgccagtgtccctggatggagataccaacacatccacccaggaggtggtacaatacaactgggagactggggatgaccggttctccttccggagcttccggagtggcatgtggctatcctgtgaggaaactgtggaagaaccagcactgctccatccccagtcctggaaacaatttagagcccttcggtccagtggtacagcggcagcaaaaggggagaggtgccgaagtttcattgaacttacaccaccagccaagagaggtgagaaaggactactggaatttgccacgttgcaaggcccatgtcaccccactctccgatttggagggaagcggttgatggagaaggcttccctcccctcccctcccttggggctttgtggcaaaaatcctatggttatccctgggaacgcagatcacctacatcggacttcaattcatcagcttcctcctgctactaacagacttgctactcactgggaaccctgcctgtgggctcaaactgagcgcctttgctgctgtttcctctgtcctgtcaggtctcctggggatggtggcccacatgatgtattcacaagtcttccaagcgactgtcaacttgggtccagaagactggagaccacatgtttggaattatggctgggccttctacatggcctggctctccttcacctgctgcatggcgtcggctgtcaccaccttcaacacgtacaccaggatggtgctggagttcaagtgcaagcatagtaagagcttcaaggaaaacccgaactgcctaccacatcaccatcagtgtttccctcggcggctgtcaagtgcagcccccaccgtgggtcctttgaccagctaccaccagtatcataatcagcccatccactctgtctctgagggagtcgacttctactccgagctgcggaacaagggatttcaaagaggggccagccaggagctgaaagaagcagttaggtcatctgtagaggaagagcagtgttaggagttaagcgggtttggggagtaggcttgagccctaccttacacgtctgctgattatcaacatgtgcttaagccaa

SEQ ID NO: 136984 - DNA, 1628 bp, Homo sapiens
  Payload ID: 6817
  Gene Symbol: GSG1
  Gene Name: germ cell associated 1
  Uniprot ID: Q2KHT4
  ENST ID: ENST00000396302
  CDS Start-End: 200-1057
aattattaaatgcccgtgttccctgtaaggcagcatttaatcatgaggcactccaaagaatatgagatagaaggggaggggtaggaggagagggaggagggtaggaagacagtttgcattcttgcaacattaaaccaaagggacttggagtgcagatggcatccttcggttcttccagacaagctgcaagacgctgaccatggccaagatggagctctcgaaggccttctctggccagcggacactcctatctgccatcctcagcatgctatcactcagcttctccacaacatccctgctcagcaactactggtttgtgggcacacagaaggtgcccaagcccctgtgcgagaaaggtctggcagccaagtgctttgacatgccagtgtccctggatggagataccaacacatccacccaggaggtggtacaatacaactgggagactggggatgaccggttctccttccggagcttccggagtggcatgtggctatcctgtgaggaaactgtggaagaaccaggggagaggtgccgaagtttcattgaacttacaccaccagccaagagaggtgagaaaggactactggaatttgccacgttgcaaggcccatgtcaccccactctccgatttggagggaagcggttgatggagaaggcttccctcccctcccctcccttggggctttgtggcaaaaatcctatggttatccctgggaacgcagatcacctacatcggacttcaattcatcagcttcctcctgctactaacagacttgctactcactgggaaccctgcctgtgggctcaaactgagcgcctttgctgctgtttcctctgtcctgtcaggtctcctggggatggtggcccacatgatgtattcacaagtcttccaagcgactgtcaacttgggtccagaagactggagaccacatgtttggaattatggctgggccttctacatggcctggctctccttcacctgctgcatggcgtcggctgtcaccaccttcaacacgtacaccaggatggtgctggagttcaagtgcaagcatagtaagagcttcaaggaaaacccgaactgcctaccacatcaccatcagtgtttccctcggcggctgtcaagtgcagcccccaccgtgggtcctttgaccagctaccaccagtatcataatcagcccatccactctgtctctgagggagtcgacttctactccgagctgcggaacaagggatttcaaagaggggccagccaggagctgaaagaagcagttaggtcatctgtagaggaagagcagtgttaggagttaagcgggtttggggagtaggcttgagccctaccttacacgtctgctgattatcaacatgtgcttaagccaacatccgtctcttgagcatggtttttagaggctacgaataaggctatgaataagggttatctttaagtcctaagggattcctgggtgccactgctctcttttcctctacagctccatcttgtttcacccaccccacatctcacacatccagaattcccttctttactgatagtttctgtgccaggttctgggctaaaccatggagataaaaagaagagtaaaatacacttcccgaccttaaggatctga

SEQ ID NO: 136985 - DNA, 1183 bp, Homo sapiens
  Payload ID: 6817
  Gene Symbol: GSG1
  Gene Name: germ cell associated 1
  Uniprot ID: Q2KHT4
  ENST ID: ENST00000457134
  CDS Start-End: 42-869
gcatccttcggttcttccagacaagctgcaagacgctgaccatggccaagatggagctctcgaaggccttctctggccagcggacactcctatctgccatcctcagcatgctatcactcagcttctccacaacatccctgctcagcaactactggtttgtgggcacacagaaggtgcccaagcccctgtgcgagaaaggtctggcagccaagtgctttgacatgccagtgtccctggatggagataccaacacatccacccaggaggtggtacaatacaactgggagactggggatgaccggttctccttccggagcttccggagtggcatgtggctatcctgtgaggaaactgtggaagaaccaggggagaggtgccgaagtttcattgaacttacaccaccagccaagagaggtctcctggggatggtggcccacatgatgtattcacaagtcttccaagcgactgtcaacttgggtccagaagactggagaccacatgtttggaattatggctgggccttctacatggcctggctctccttcacctgctgcatggcgtcggctgtcaccaccttcaacacgtacaccaggatggtgctggagttcaagtgcaagcatagtaagagcttcaaggaaaacccgaactgcctaccacatcaccatcagtgtttccctcggcggctgtcaagtgcagcccccaccgtgggtcctttgaccagctaccaccagtatcataatcagcccatccactctgtctctgagggagtcgacttctactccgagctgcggaacaagggatttcaaagaggggccagccaggagctgaaagaagcagttaggtcatctgtagaggaagagcagtgttaggagttaagcgggtttggggagtaggcttgagccctaccttacacgtctgctgattatcaacatgtgcttaagccaacatccgtctcttgagcatggtttttagaggctacgaataaggctatgaataagggttatctttaagtcctaagggattcctgggtgccactgctctcttttcctctacagctccatcttgtttcacccaccccacatctcacacatccagaattcccttctttactgatagtttctgtgccaggttctgggctaaaccatggagataaaaagaagagtaaaatacacttcccgacctt

SEQ ID NO: 136986 - DNA, 1231 bp, Homo sapiens
  Payload ID: 6817
  Gene Symbol: GSG1
  Gene Name: germ cell associated 1
  Uniprot ID: Q2KHT4
  ENST ID: ENST00000432710
  CDS Start-End: 134-1153
acacaccaccttacccctctgctggcaagaggggacctgattcatcctcacgctaaacactcattctacccaactgattgagacagaacagaagataaactgaaacttctctgccttcccgctgcaagagtgaatgagcgatccctctcaactgactcaaaatgtttgcctcacccaggagatggagctctcgaaggccttctctggccagcggacactcctatctgccatcctcagcatgctatcactcagcttctccacaacatccctgctcagcaactactggtttgtgggcacacagaaggtgcccaagcccctgtgcgagaaaggtctggcagccaagtgctttgacatgccagtgtccctggatggagataccaacacatccacccaggaggtggtacaatacaactgggagactggggatgaccggttctccttccggagcttccggagtggcatgtggctatcctgtgaggaaactgtggaagaaccaggggagaggtgccgaagtttcattgaacttacaccaccagccaagagagaaatcctatggttatccctgggaacgcagatcacctacatcggacttcaattcatcagcttcctcctgctactaacagacttgctactcactgggaaccctgcctgtgggctcaaactgagcgcctttgctgctgtttcctctgtcctgtcaggtctcctggggatggtggcccacatgatgtattcacaagtcttccaagcgactgtcaacttgggtccagaagactggagaccacatgtttggaattatggctgggccttctacatggcctggctctccttcacctgctgcatggcgtcggctgtcaccaccttcaacacgtacaccaggatggtgctggagttcaagtgcaagcatagtaagagcttcaaggaaaacccgaactgcctaccacatcaccatcagtgtttccctcggcggctgtcaagtgcagcccccaccgtgggtcctttgaccagctaccaccagtatcataatcagcccatccactctgtctctgagggagtcgacttctactccgagctgcggaacaagggatttcaaagaggggccagccaggagctgaaagaagcagttaggtcatctgtagaggaagagcagtgttaggagttaagcgggtttggggagtaggcttgagccctaccttacacgtctgctgattatcaacatgtgcttaagccaaca

SEQ ID NO: 136987 - DNA, 832 bp, Homo sapiens
  Payload ID: 6817
  Gene Symbol: GSG1
  Gene Name: germ cell associated 1
  ENST ID: ENST00000542415
  CDS Start-End: 172-832
ctggtgtctggccctcaggacatcctctccaatccaccacacaccaccttacccctctgctggcaagaggggacctgattcatcctcacgctaaacactcattctacccaactgattgagacagaacagaagataaactgaaacttctctgccttcccgctgcaagagtgaatgagcgatccctctcaactgactcaaaatgtttgcctcacccaggagatggagctctcgaaggccttctctggccagcggacactcctatctgccatcctcagcatgctatcactcagcttctccacaacatccctgctcagcaactactggtttgtgggcacacagaaggtgcccaagcccctgtgcgagaaaggtctggcagccaagtgctttgacatgccagtgtccctggatggagataccaacacatccacccaggaggtggtacaatacaactgggagactggggatgaccggttctccttccggagcttccggagtggcatgtggctatcctgtgaggaaactgtggaagaaccagctaaaagcgagatggaagaggaattaaaaaaatgtgtgtatttacatttatatttattattgtgccacttagcactgctccatccccagtcctggaaacaatttagagcccttcggtccagtggtacagcggcagcaaaaggggagaggtgccgaagtttcattgaacttacaccaccagccaagagagaaatcctatggttatccctgggaacgcagatcacctacatcggacttcaattcatcagcttcctcctgctactaacagacttgctactcactgggaaccctgcctgtg

SEQ ID NO: 136988 - DNA, 702 bp, Homo sapiens
  Payload ID: 6817
  Gene Symbol: GSG1
  Gene Name: germ cell associated 1
  ENST ID: ENST00000545699
  CDS Start-End: 70-702
taaaccaaagggacttggagtgcagatggcatccttcggttcttccagacaagctgcaagacgctgaccatggccaagatggagctctcgaaggccttctctggccagcggacactcctatctgccatcctcagcatgctatcactcagcttctccacaacatccctgctcagcaactactggtttgtgggcacacagaaggtgcccaagcccctgtgcgagaaaggtctggcagccaagtgctttgacatgccagtgtccctggatggagataccaacacatccacccaggaggtggtacaatacaactgggagactggggatgaccggttctccttccggagcttccggagtggcatgtggctatcctgtgaggaaactgtggaagaaccagctaaaagcgagatggaagaggaattaaaaaaatgtgtgtatttacatttatatttattattgtgccacttagcactgctccatccccagtcctggaaacaatttagagcccttcggtccagtggtacagcggcagcaaaaggggagaggtgccgaagtttcattgaacttacaccaccagccaagagaggtgagaaaggactactggaatttgccacgttgcaaggcccatgtcaccccactctccgatttggagggaagcggttgatggagaaggcttccctcccctcccctcccttggggctttgt

SEQ ID NO: 136989 - DNA, 1028 bp, Homo sapiens
  Payload ID: 6817
  Gene Symbol: GSG1
  Gene Name: germ cell associated 1
  Uniprot ID: Q2KHT4
  ENST ID: ENST00000537302
  CDS Start-End: 56-952
ttggagtgcagatggcatccttcggttcttccagacaagctgcaagacgctgaccatggccaagatggagctctcgaaggccttctctggccagcggacactcctatctgccatcctcagcatgctatcactcagcttctccacaacatccctgctcagcaactactggtttgtgggcacacagaaggtgcccaagcccctgtgcgagaaaggtctggcagccaagtgctttgacatgccagtgtccctggatggagataccaacacatccacccaggaggtggtacaatacaactgggagactggggatgaccggttctccttccggagcttccggagtggcatgtggctatcctgtgaggaaactgtggaagaaccagcactgctccatccccagtcctggaaacaatttagagcccttcggtccagtggtacagcggcagcaaaaggggagaggtgccgaagtttcattgaacttacaccaccagccaagagaggtctcctggggatggtggcccacatgatgtattcacaagtcttccaagcgactgtcaacttgggtccagaagactggagaccacatgtttggaattatggctgggccttctacatggcctggctctccttcacctgctgcatggcgtcggctgtcaccaccttcaacacgtacaccaggatggtgctggagttcaagtgcaagcatagtaagagcttcaaggaaaacccgaactgcctaccacatcaccatcagtgtttccctcggcggctgtcaagtgcagcccccaccgtgggtcctttgaccagctaccaccagtatcataatcagcccatccactctgtctctgagggagtcgacttctactccgagctgcggaacaagggatttcaaagaggggccagccaggagctgaaagaagcagttaggtcatctgtagaggaagagcagtgttaggagttaagcgggtttggggagtaggcttgagccctaccttacacgtctgctgattatcaacatgtgcttaagccaa

SEQ ID NO: 136990 - DNA, 838 bp, Homo sapiens
  Payload ID: 6817
  Gene Symbol: GSG1
  Gene Name: germ cell associated 1
  ENST ID: ENST00000545401
  CDS Start-End: 131-838
caccaccttacccctctgctggcaagaggggacctgattcatcctcacgctaaacactcattctacccaactgattgagacagaacagaagataaactgaaacttctctgccttcccgctgcaagagtgaatgagcgatccctctcaactgactcaaaatgtttgcctcacccaggagatggagctctcgaaggccttctctggccagcggacactcctatctgccatcctcagcatgctatcactcagcttctccacaacatccctgctcagcaactactggtttgtgggcacacagaaggtgcccaagcccctgtgcgagaaaggtctggcagccaagtgctttgacatgccagtgtccctggatggagataccaacacatccacccaggaggtggtacaatacaactgggagactggggatgaccggttctccttccggagcttccggagtggcatgtggctatcctgtgaggaaactgtggaagaaccaggggagaggtgccgaagtttcattgaacttacaccaccagccaagagaggtgagaaaggactactggaatttgccacgttgcaaggcccatgtcaccccactctccgatttggagggaagcggttgatggagaaggcttccctcccctcccctcccttggggctttgtggcaaaaatcctatggttatccctgggaacgcagatcacctacatcggacttcaattcatcagcttcctcctgctactaacagacttgctactcactgggaaccctgcctgtgggctcaaactgagcgcctttgctgctgtttcctctgtcctgtcaggtctcctggggatggtggc

SEQ ID NO: 136991 - DNA, 2797 bp, Homo sapiens
  Payload ID: 6818
  Gene Symbol: GSG2
  Gene Name: germ cell associated 2 (haspin)
  Uniprot ID: Q8TF76
  ENST ID: ENST00000325418
  CDS Start-End: 34-2430
gtttgcgtttgaacctcttggcgggtgccggccatggcggcttcgctcccgggacctgggagccggcttttccgcacatatggggctgcggacggcaggagacagcggcggccgggccgggaagccgcgcagtggttcccgccgcaggaccggaggcgtttcttcaacagcagcggcagcagcgacgccagcatcggcgacccctcgcagtccgacgatcctgacgatcccgacgaccccgacttccccggcagcccggtgaggcggcggcggaggcgtcccggcggccgagtgcccaaggaccggcccagcctgaccgtgaccccaaagcgctggaagctgcgagctcgcccaagcctaaccgtgaccccaagacgcctggggctgcgagctcggcccccgcagaagtgcagcacaccctgcggcccgctccgacttccgcccttccccagccgcgactccggccgcctcagcccggacctcagcgtgtgcggccagcccagggacggcgacgagctgggcatcagtgcctccctgttcagctctctggcctcgccctgccccgggtccccaacgccaagggacagtgtcatctcgatcggcacctccgcctgtctggttgcagcctcagccgtcccgagcggcctccacctcccagaagtctccctggaccgagcatctctcccctgctcccaggaggaagcgacaggaggagccaaggacaccaggatggtccaccaaacccgcgccagcctcaggtcagttctctttggccttatgaactcaggaacccctgaggattctgagtttcgggcagatgggaagaatatgagagagtcctgctgtaaaaggaaactggtggtgggaaatggaccagagggtccaggtctgtcaagcacaggcaagaggagggccacaggccaggactcttgtcaagagagagggcttcaagaggccgtccggagagagcatcaggaggccagtgttcccaagggccgcattgtgccaaggggaatagacaggctggagagaactagatcaagccggaagagcaaacatcaggaggcaacggaaacctctctcctccattcccaccgctttaaaaagggccaaaagctgggaaaagattcgttccccacccaggacctgactcctttacagaatgtctgcttttggaccaaaaccagggcttccttcagtttccacaagaagaaaattgtgactgatgtgtcagaggtctgcagcatctataccactgccacttctctctctggatccctcctatcagaatgttcaaaccggcctgtcatgaacagaacaagtggtgctccgtcctcttggcactcctcctctatgtatttgctaagccccttaaacactctaagtatttcaaacaaaaaggcatctgatgctgaaaaggtttatggggaatgcagtcagaagggtcctgtcccctttagccattgccttcccacagaaaaactgcaacgctgtgagaagattggggaaggggtgtttggcgaagtgtttcaaacaattgctgatcacacacccgtagccataaaaatcattgctattgaaggaccagatttagtcaatggatcccatcagaaaacctttgaggaaatcctgccagagatcatcatctccaaagagttgagcctcttatccggtgaagtgtgcaaccgcacagaaggctttatcgggctgaactcagtgcactgtgtccagggatcttaccctcccttgctcctcaaagcctgggatcactataattcaaccaaaggctctgcaaatgaccggcctgatttttttaaagacgaccagctcttcattgtgctggaatttgagtttggagggattgacttagagcaaatgcgaaccaagttgtcttccttggctactgcaaagagcattctacaccagctcacagcctccctcgcagtggcagaggcatcactgcgctttgagcaccgagacttacactgggggaacgtgctcttaaagaaaaccagcctcaaaaaactccactacaccctcaatgggaagagcagcactatccccagctgtgggttgcaagtgagcatcattgactacaccctgtcgcgcttggaacgggatgggattgtggttttctgtgacgtttccatggatgaggacctgtttaccggtgacggtgactaccagtttgacatctacaggctcatgaagaaggagaataacaaccgctggggtgaatatcacccttatagtaatgtgctctggttacattacctgacagacaagatgctgaaacaaatgaccttcaagactaaatgtaacactcctgccatgaagcaaattaagagaaaaatccaggagttccacaggacaatgctgaacttcagctctgccactgacttgctctgccagcacagtctgtttaagtaagctaaatgtatcttactgccccgaaatgagaggagactggtcttgaagcctctggtgctgtttcaacctccatccccacaggagggtggaactcccattctcacaggtttccagtcagcttttcaaacaagaattttgtttccaaatggaaactgaaatatttgttgaaatgtttaaatttgctgataacaaatgttctgaaagaagtaaactagccgggcacagtggcgtgcgcctgtagtcccagctactcgggaggctgaggcaggaggatcgcttgagcccaagagttcatatctagcctggtcaacatagcaagacccctgtctctatttttttaaataaataaactacatgtgaaaacaaa

SEQ ID NO: 136992 - DNA, 4191 bp, Homo sapiens
  Payload ID: 6819
  Gene Symbol: GMCL1
  Gene Name: germ cell-less, spermatogenesis associated 1
  Uniprot ID: Q96IK5
  ENST ID: ENST00000282570
  CDS Start-End: 252-1799
atgcgccctccgtcccgcgctttgttgcgaaagcgagggggcgaggtgctgcggtgctagagcgcggcgcgaccggacgctgcgggcggggaagaggatggagactgtggcgtccgctgcaacggttggggctgcgcgtgagaaggtggcggtgtaggcacctgcgctcggggaaggctggcggcggcggccgagccatggcgggagacccccttctctgggctccctgaagtctcggggagccgtgacccatgggatcgttgagcagccgggtgctgcgccagccaagaccagcccttgcccagcaggcgcagggtgccagggcggggggctcggcccggaggccggacactggagacgatgcggcgggccacggattctgttactgtgcgggcagccacaagcgcaagcggagcagcgggtccttctgctactgtcaccctgactcggagacggacgaggatgaggaggagggggacgagcagcagcggctcctcaacacccctcgaaggaaaaaattaaagagtacatctaaatatatttatcaaacattatttttgaatggtgaaaacagtgacattaagatttgtgctctaggagaagaatggagcttacacaaaatatatttatgtcaatctggctacttttctagtatgttcagtggttcttggaaagaatccagcatgaatattattgaactggagattcctgaccagaacattgatgtagaagcactgcaggttgcatttggttcactgtatcgagatgatgtcttgataaagcccagtcgagttgttgccattttggcagcagcttgtttgctgcagttggacggtttaatacagcagtgtggtgagacaatgaaggaaacagttaatgtgaaaactgtatgtggctattacacatcagcagggacctatggattagattctgtaaagaaaaagtgccttgaatggcttctaaacaatttgatgactcaccagaatgttgaactttttaaagaactcagtataaatgtcatgaaacagctcattggttcatctaacttatttgtgatgcaagtggagatggatatatacactgctctaaaaaagtggatgttccttcaacttgtgccttcttggaatggatctttaaaacagcttttgacagaaacagatgtctggttttctaaacagaggaaagattttgaaggtatggcctttcttgaaactgaacaaggaaaaccatttgtgtcagtattcagacatttaaggttacaatatattatcagtgatctggcttctgcaagaattattgaacaagatgctgtagtaccttcagaatggctctcttctgtgtataaacagcagtggtttgctatgctgcgggcagaacaggacagtgaggtggggcctcaagaaatcaataaagaagaactagagggaaacagcatgaggtgtggtagaaagcttgccaaagatggtgaatactgctggcgttggacaggttttaacttcggcttcgacctacttgtaacttacaccaatcgatacatcattttcaaacgcaatacactgaatcagccatgtagcggatctgtcagtttacagcctcgaaggagcatagcatttagattacgtttggcttcttttgatagtagtggaaaactaatatgtagtagaacaactggctatcaaatacttacacttgaaaaggatcaggaacaagtggtgatgaacttggacagcaggcttctgatcttccctttatatatctgctgtaacttcttgtatatatcaccagaaaaaaagaattgaaaataatcgtcacccagaaaatccagaaaactgaagatttcatcagttggaaacagtagcactttgaaaactttttaggccagctttaatttaatggccctactgatattcacatcgaaggtgactaacaatgacaaaggccttatgaactgtacagacaatacagaagattattcttatcctcattgcatttctatgcatatgcgtaagaacattttaaagccaagaaaatatctgtcaaaccatttctgttagaacgatgtcaattcatgcttttaatttagcatcaatagaaaattgctgtaggtaaatctcacatttatctgcaacaaaatatagatttaatttttagcttaaactttgtttctaccttatgttagtggacctcagttatccatctgtaaatttctttttatttggctaaaataatctaaaagaataatttggttggccaattagaaatgcctttttcagttggtgtattgaaagctttcctttaacattttcacctgctcattgtgattcctccttttagtctaatatctttccaggtcatacttgtttttaatcattaaatattttcttcctggttttggagactaagctgataaactttttttaaaacttaagcattgtcattgctattttttttaatttgactttcctaggagtttaagaacagtgaaagttagctttgcaccttcaaatgatcttgaatgagggaaaaatcagtttgattccaaggatatttcttgccttacatggtcttttctttgacagtctgtacacctttattattaggttttgaattatttatgtaccagatattatagttttaaacattttaatattctctgatctttagaattatttatgttcaaattttagttgggaactttgtttcctacttaagctcaggactttttaccctctgaattgagtgcctttgagtgacacatgctaatagaaatttcatagtaaatgtaaataaggtcagaggatgtaatatggagcctgatgatgaagcattaatgtaaaaatggaacttatttttgtcaaaaatgagatgtacacttgtcatgatttatgtatgttgaccttttgtgtttattactgttttgaaaatagccatgttcattttctttccagttagagtaagtacttctgtggttaatgtatatttttattatggtttttaaaatgggaatcatttttatgtatctgtgcaaataataaatgcccatttggaaaaagagtaagctcttacataaaatggaccaaaaaatcccccttaattgaaaccaaaattttttctttctagttaggtttttttcccaactccttttaacttttggaatttattaataatttttttcttttttaatgatatgcccataggttcataaattgcttttgttcttttaaaattcatccatttggtttaacttaaaggaaccttttaaatgcctcacccttgaccctcagagctggaatttaaatgtttctaatacagtgatttggctgttatcaagaggttacatttcagctgggtgtcagccaggtgtggtggctcacacttgtaagcccagcactttgggaggccgaggcaggcagatcatctgaggtcaggagtttaagatcagccatgaccaacatggtgaaaccccatctctattaaatacacaaaataaaaattagccaggcatggtggcacacgcctgtcatctcagctactcaggaggctgaggcaggagaatcacttgaacccaggaggcagaggttgcagtgagtggagattgcgccattgcactccaacctaggcgacagagtgagactccgtctcaaaaaaaaaaaaaaaaaaaaagaggctactgtacttatttttatatttgactacattaggtctttttcacgggaagctgttgttttctttccgtctcattactgtataagagtttccttaccctttatgtattgaaaaatatataaattccaaacttaaattatttggataattaagtttttgcagatcttggaagtaaagataatgttttgatcatattaatgaataaagttaactgtttcatttcacttacataagttaactggccaaattggatttatatgtggtttcatccattggttctgtcctggccaagttgcttatgtcatccatagacaggataattctttcttcaatcacaagtaggttaatgttcttatttgagaagttgataattgtcaggtagtaattcacactggtagtaaagatgtgcttttgttttcttaccaaatatttttatgtgtttccagagttcttttcaatagaaatattttcaataaagtgttaatagtgtaagataaagtattgtataaaccatggtttgtgaaa

SEQ ID NO: 136993 - DNA, 3336 bp, Homo sapiens
  Payload ID: 6820
  Gene Symbol: GCSAM
  Gene Name: germinal center-associated, signaling and motility
  Uniprot ID: Q8N6F7
  ENST ID: ENST00000308910
  CDS Start-End: 186-722
ctctaacactcctcccccagcctcttccttccctctgcagagacacccttctcctttctgctgtctctgcacgggtggccagagccacacagccctttctttaagtcaggagttgccctgtcagagcacaaggcaagaaggaagtggtaaagggacggaggggaagccctgagaggactgagaggatgggaaattctctgctgagagaaaacaggcggcagcagaacactcaagagatgccttggaatgtgagaatgcaaagccccaaacagagaacatccagatgctgggatcaccatatcgctgaagggtgtttctgccttccatggaaaaaaatactcatttttgaaaagaggcaagattcccaaaacgaaaatgaaagaatgtcatctactcccatccaggacaatgttgaccagacctactcagaggagctgtgctataccctcatcaatcatcgggttctctgtacaaggccatcagggaactctgctgaagagtactatgagaatgttccctgcaaagctgagagacccagagagtccttgggaggaactgagactgagtattcacttctacatatgccttctacagaccccaggcatgcccgatccccagaagatgaatatgaacttctcatgcctcacagaatctcctctcactttctgcaacagccacgtccacttatggccccttctgagactcagttttcccatttatagtgaagtggctggactagcatttgtttagcaccaacaaataaaaggtgggatgggggatctgcctgaagcagggatgggacacaaagtccctccagcttatctcccacaacaaccctttccctgcagagcatggtttgtataccacaagccctcttagcacgcaaaagccaaaatctaaagatcaaccatttatcctgaacaacaccatttgagaaagaggtaaccatctttggttctacatggtttggagagtatagtggtaggaggggctccctgattcccctaaagctatgcacaccacaaggggctctgctcttctgtctgggatcttcttataaagtgttcccatgatcattctctaaagtcacaaggaagctttactcatcatactaagtgtgcccaagggggagttcactcattactgtgaccttccagctcagtccccacccatgggagcctgtgttgctcctctcactccatgtgtctaagtcatgtcttttacatagtgtcctttgacctgttggcccccatggtctggttagttatgtgagttgaatcaagaggctctaggccagatgtttacataattttaacctatatgattttatttttaactttgtatttctccctagaaatcttaataagacaattatgccatcagacaatgttaagaagaacgatccttggagatcccgtaatcccactacccttctttggctcagagaggataatttgcctaatgatacattaaagttagtggcaaaacttaatttggagcctgatttcctactgacttccaatttagtgctcccccagtatgctaaatagaaagccctctgcaatatattaaatgtatactaaatgtatatatttaataatgtcatgtataaaatatgaataaaatgtccacataggaaattaacacatatataccttctctgataagcactcctctatgtgtcctgattatttactttctcttatcttttccttagtgttcctcaaattatatctatcctctaaaccagggatcagcaaactataacccccaggccaaatctagcccactccctgtttttatagataaagatttgttggaacacagccacactcatttgtttacctactatctatgattgttcaaccatgggagagttgagtaattgtgacatggaccataggccctaaagagccaaaataaatatactttggcactttttggaaaaaaagtttgcagacacctgccctaaatgattatagtttgagagaaacttaacagaaatgtgtttggttactgatgcataagagcaagcaccaataaaatggcataaaaatattaaatcacaaatggataagtgagaccaaggcaatttagcaaattctactatttctgtattcacacctgtgtcttccacttgctgttttatttaactcacggctactgtcctaattttagggatgctaaaatagtttgttttaaaagaggtttgtttaagaaagcagtaggtacattatgtttactagacaggcccttggaccagctaagcgacagggaacctggtacattatgtttagttactgttttcttctcaaagttaaccaaagctaaataactttcctatgtaaaatgtgctgactcccaaaagaggagaaatgcaatggcttgagcttgcatgtgtcacaggtttgtggagccttcagccaggtgatggtcttcagctaaagagccagctgcatcttggtatctcttcctctgctaacttcctacttttagcaaaattctttcacttggaactctagctgatccttggccaggatcagatcctcaaaaggaaatattcagttagcagtggatattgtacaagatgtaacatggcttagaggaaagagtgtagacccagcgacagatcatcagtcactcaaatcctggttctctctcttcctccatctgtgactttgaacatgctacttggaggctcagcttcttcaccatcaacaggaggattacatctaatgcaggcaatcatctattacagatgccgaataaatgatatcaaagagcatagagaaacaaaaatcttttatgatgtacggaaaaaaaccatgctgatacagctggctattcagggtcacccagcagtcctccagcaaggtagaaacaccaaatcaatgagtttatgctagaatttttcacatggccactggaccattgtggaagtagactggttgaaatattcttagtatgacatagtaagttatatttgtttgaaccttatcctgtgaaagcattatctgtcccaaacagtatatgccttttatcagggacacattaaatataaatgtttaaccaaagaaagttgttcttataatgtaattataacagggatttataagagggaattataagagggattatgaaagggaattacttttgagcaaggggagccatttgggagtgcttcaagatacccaatatgatatacacaattatgatttgtcagtcaaaaataatattaagaacaaaaaaagagttaaaaaattctgatatgagtgtaatatacttaatatgtaggatgtctcaaatttccagtaaataaattttaatgtcccaaaa

SEQ ID NO: 136994 - DNA, 1072 bp, Homo sapiens
  Payload ID: 6820
  Gene Symbol: GCSAM
  Gene Name: germinal center-associated, signaling and motility
  ENST ID: ENST00000470085
  CDS Start-End: 139-282
cttctcctttctgctgtctctgcacgggtggccagagccacacagccctttctttaagtcaggagttgccctgtcagagcacaaggcaagaaggaagtggtaaagggacggaggggaagccctgagaggactgagaggatgggaaattctctgctgagagaaaacaggcggcagcagaacactcaagagatgccttggaatgtgagaatgcaaagccccaaacagagaacatccaggaagacaaaggcattctaccatgagagatgtgtccaagttatctagaatgaaacacgcttgcggggagaaaaaaagttttccacagaaatggcaaaaggaaaggagtcaccttaacaaagctgcagaaatcaaccttatgatttgccatctctcttgggtattttagatgctgggatcaccatatcgctgaagggtgtttctgccttccatggaaaaaaatactcatttttgaaaagaggcaagattcccaaaacgaaaatgaaagaatgtcatctactcccatccaggacaatgttgaccagacctactcagaggagctgtgctataccctcatcaatcatcgggttctctgtacaaggccatcagggaactctgctgaagagtactatgagaatgttccctgcaaagctgagagacccagagagtccttgggaggaactgagactgagtattcacttctacatatgccttctacagaccccaggcatgcccgatccccagaagatgaatatgaacttctcatgcctcacagaatctcctctcactttctgcaacagccacgtccacttatggccccttctgagactcagttttcccatttatagtgaagtggctggactagcatttgtttagcaccaacaaataaaaggtgggatgggggatctgcctgaagcagggatgggacacaaagtccctccagcttatctcccacaacaaccctttccctgcagagcatggtttgtataccacaagccctcttagcacgcaaaagccaaaatctaaagatcaaccatttatcctgaacaacaccatttgagaaagaggtaaccatctt

SEQ ID NO: 136995 - DNA, 871 bp, Homo sapiens
  Payload ID: 6820
  Gene Symbol: GCSAM
  Gene Name: germinal center-associated, signaling and motility
  ENST ID: ENST00000495418
  CDS Start-End: 47-190
ggaagtggtaaagggacggaggggaagccctgagaggactgagaggatgggaaattctctgctgagagaaaacaggcggcagcagaacactcaagagatgccttggaatgtgagaatgcaaagccccaaacagagaacatccaggaagacaaaggcattctaccatgagagatgtgtccaagttatctagaatgaaacacgcttgcggggagaaaaaaagttttccacagaaatggcaaaaggaaaggagtcaccttaacaaagctgcagaaatcaaccttatgatttgccatctctcttgggtattttagatgctgggatcaccatatcgctgaagggtgtttctgccttccatggaaaaaaatactcatttttgaaaagaggcaagattcccaaaacgaaagacaatgttgaccagacctactcagaggagctgtgctataccctcatcaatcatcgggttctctgtacaaggccatcagggaactctgctgaagagtactatgagaatgttccctgcaaagctgagagacccagagagtccttgggaggaactgagactgagtattcacttctacatatgccttctacagaccccaggcatgcccgatccccagaagatgaatatgaacttctcatgcctcacagaatctcctctcactttctgcaacagccacgtccacttatggccccttctgagactcagttttcccatttatagtgaagtggctggactagcatttgtttagcaccaacaaataaaaggtgggatgggggatctgcctgaagcagggatgggacacaaagtccctccagcttatctcccacaacaaccctttccctgcagagcatggtttgtataccacaagcc

SEQ ID NO: 136996 - DNA, 809 bp, Homo sapiens
  Payload ID: 6820
  Gene Symbol: GCSAM
  Gene Name: germinal center-associated, signaling and motility
  ENST ID: ENST00000487901
  CDS Start-End: 476-809
tgcagagacacccttctcctttctgctgtctctgcacgggtggccagagccacacagccctttctttaagtcaggagttgccctgtcagagcacaaggcaagaaggaagtggtaaagggacggaggggaagccctgagaggactgagaggatgggaaattctctgctgagagaaaacaggttttgccttctcccaagaatcatggtgagcagctgatggagaatagctgaaaggtggaaagactttaccaaggaaggtctatataataggttaccacctaagaaatgaaacaactttctgaaagcccgggaaggagatgctctcctgagctcctcatgctccacaaggaggtcaaaatcaccaccctctttcagccactattttaagtttgaaataaacagcaagcttcctgccaccttgagtcttcctttgatgtgcactccctgcaagcaggcggcagcagaacactcaagagatgccttggaatgtgagaatgcaaagccccaaacagagaacatccagatgctgggatcaccatatcgctgaagggtgtttctgccttccatggaaaaaaatactcatttttgaaaagaggcaagattcccaaaacgaaaatgaaagaatgtcatctactcccatccaggacaatgttgaccagacctactcagaggagctgtgctataccctcatcaatcatcgggttctctgtacaaggccatcagggaactctgctgaagagtactatgagaatgttccctgcaaagctgagagacccagagagtccttgggaggaactgagactgagtatt

SEQ ID NO: 136997 - DNA, 1036 bp, Homo sapiens
  Payload ID: 6820
  Gene Symbol: GCSAM
  Gene Name: germinal center-associated, signaling and motility
  Uniprot ID: Q8N6F7
  ENST ID: ENST00000484193
  CDS Start-End: 135-677
tcctttctgctgtctctgcacgggtggccagagccacacagccctttctttaagtcaggagttgccctgtcagagcacaaggcaagaaggaagtggtaaagggacggaggggaagccctgagaggactgagaggatgggaaattctctgctgagagaaaacagtttcaggcggcagcagaacactcaagagatgccttggaatgtgagaatgcaaagccccaaacagagaacatccagatgctgggatcaccatatcgctgaagggtgtttctgccttccatggaaaaaaatactcatttttgaaaagaggcaagattcccaaaacgaaaatgaaagaatgtcatctactcccatccaggacaatgttgaccagacctactcagaggagctgtgctataccctcatcaatcatcgggttctctgtacaaggccatcagggaactctgctgaagagtactatgagaatgttccctgcaaagctgagagacccagagagtccttgggaggaactgagactgagtattcacttctacatatgccttctacagaccccaggcatgcccgatccccagaagatgaatatgaacttctcatgcctcacagaatctcctctcactttctgcaacagccacgtccacttatggccccttctgagactcagttttcccatttatagtgaagtggctggactagcatttgtttagcaccaacaaataaaaggtgggatgggggatctgcctgaagcagggatgggacacaaagtccctccagcttatctcccacaacaaccctttccctgcagagcatggtttgtataccacaagccctcttagcacgcaaaagccaaaatctaaagatcaaccatttatcctgaacaacaccatttgagaaagaggtaaccatctttggttctacatggtttggagagtatagtggtaggaggggctccctgattcccctaaagctatgcacaccacaaggggctctgctcttctgtctgggatcttcttataaagtgttcccatgatcattctc

SEQ ID NO: 136998 - DNA, 816 bp, Homo sapiens
  Payload ID: 6820
  Gene Symbol: GCSAM
  Gene Name: germinal center-associated, signaling and motility
  ENST ID: ENST00000488580
  CDS Start-End: 437-816
agagccacacagccctttctttaagtcaggagttgccctgtcagagcacaaggcaagaaggaagtggtaaagggacggaggggaagccctgagaggactgagaggatgggaaattctctgctgagagaaaacaggttttgccttctcccaagaatcatggtgagcagctgatggagaatagctgaaaggtggaaagactttaccaaggaaggtctatataataggttaccacctaagaaatgaaacaactttctgaaagcccgggaaggagatgctctcctgagctcctcatgctccacaaggaggtcaaaatcaccaccctctttcagccactattttaagtttgaaataaacagcaagcttcctgccaccttgagtcttcctttgatgtgcactccctgcaagcagtttcaggcggcagcagaacactcaagagatgccttggaatgtgagaatgcaaagccccaaacagagaacatccagatgctgggatcaccatatcgctgaagggtgtttctgccttccatggaaaaaaatactcatttttgaaaagaggcaagattcccaaaacgaaaatgaaagaatgtcatctactcccatccaggacaatgttgaccagacctactcagaggagctgtgctataccctcatcaatcatcgggttctctgtacaaggccatcagggaactctgctgaagagtactatgagaatgttccctgcaaagctgagagacccagagagtccttgggaggaactgagactgagtattcacttctacatatgccttctacagaccccaggcatgcccgatcccc

SEQ ID NO: 136999 - DNA, 623 bp, Homo sapiens
  Payload ID: 6820
  Gene Symbol: GCSAM
  Gene Name: germinal center-associated, signaling and motility
  Uniprot ID: Q8N6F7
  ENST ID: ENST00000460387
  CDS Start-End: 132-623
tttctgctgtctctgcacgggtggccagagccacacagccctttctttaagtcaggagttgccctgtcagagcacaaggcaagaaggaagtggtaaagggacggaggggaagccctgagaggactgagaggatgggaaattctctgctgagagaaaacaggcggcagcagaacactcaagagatgccttggaatgtgagaatgcaaagccccaaacagagaacatccaggaaaaaaatactcatttttgaaaagaggcaagattcccaaaacgaaaatgaaagaatgtcatctactcccatccaggacaatgttgaccagacctactcagaggagctgtgctataccctcatcaatcatcgggttctctgtacaaggccatcagggaactctgctgaagagtactatgagaatgttccctgcaaagctgagagacccagagagtccttgggaggaactgagactgagtattcacttctacatatgccttctacagaccccaggcatgcccgatccccagaagatgaatatgaacttctcatgcctcacagaatctcctctcactttctgcaacagccacgtccacttatggccccttctgagactcagttttcccatttatag

SEQ ID NO: 137000 - DNA, 3820 bp, Homo sapiens
  Payload ID: 6821
  Gene Symbol: GCSAML
  Gene Name: germinal center-associated, signaling and motility-like
  Uniprot ID: Q5JQS6
  ENST ID: ENST00000366488
  CDS Start-End: 105-512
agatgcaacgtcctgcctcatgcattttcctcttggtgctttggtcagaacttccccaagtggagtgaaactcaggagctgagaaaccgagtcactgtgaaaagatgggaaattatctcctgcgaaaactcagttgcctgggagagaatcaaaagaagcccaagaaaggaaacccagatgaggaaagaaaacggcaggaaatgactacatttgaaagaaaacttcaagatcaagataagaaaagccaagaagtttcatccacttctaatcaggaaaacgagaatggcagtggttctgaagaagtgtgctacactgtcattaatcacatcccccatcagagatcctccctgagctccaatgatgatggctatgagaacattgactccctcacaaggaaagtgagacagtttagagaaaggtcagagacagaatatgcccttcttaggacttctgttagtaggccttgttcctgcacccatgagcatgattatgaagttgtgtttccacactaaaatcctcaagctgctttatcaccttccagcaatgaagacaatgcagaatagcagactctggcgaagttgttcaccctgagcagtgcatgaaacattcctttctggctaaagtttagaaatattatcttattatatatccttaggcaactctgatatgtggcatctctgtggcttaggtgaaatcatagaaattgacacaatgacctaaaatattctatgtgtttttgcttgtaaagtttgaggacatggaggtgataaaaaaaactttcttaggacaataatgtaaaatgaaaataaatttctaatccccctgactaactgaatggaccctcttctaggccaaagagacctcagatgaacctgaaagactgaattctggccatgataggaagggaggtgagacacaccttgttataccccttcccttttggagtttatgcacaagtgaccaggatgagtcataagactgatgaaatagactgattgtggcaataagagtcccaattccaacctgactctggtgtagatcacacactgtctgagggattccatctatgagactttgtctacataacagagaccttggtttccacaacccctttattttagctaaagcattcttttctactgacttcttaagtctttagacaaagcttaactctttcaaccaattgccaatcagacaaactttgaatctacctatgacctgtaagctctctcctgcttcaagatcttgcctctttaagctgaaccgatgtgcactttccatttaatgatttatgtctttgcttgtaactcctgtctccctaaaatgtataaaagtaaacggtgacctgaccacctcaggcacactttctcaggacctcctgagagtgtatcccaggccatggtaagtcatgttggctcagaatcaacctctttaaatattttacagaatttgggttttggttaccaataagtctccacaaatatatgtccaagaatcttcaattccaagcctgctcaccaaatttcaaatgccaacatctccccatccaattacctatttcatctttgaggtgtaatctactcaataaactgtgtaagaccagtgaccagaccctttgctaacctgacatttacttcaatttttctttttctatgtactggatatttttgcatataaacttgcagtaatagttcaaaaattaatagtttttgacattggcttttctgagaagagaaattgaaagtgtcacaaaataaaaaaagatgaaatgaagcatatataattgtcaattttttcaattttctagccaacagagaatcgaaggattctgttcaaatattagtaaaaattgaaaataaacttgtgcttatattttgtttgcaacacactagttaatttaacctgtgactagttatctctaccgaaggtggatgtgtagtttctggttttaaaattcaagcaaactggaaaataatccatctaattatgctttctttcccaagaagttttttaatgatatgccagcttcctaatttggagacaaaagccttaattgacaatgcattcattatatatttttttgtatagttacagtatacgagttgagtatcccttagatgagatgcttgggaccagaagtgttttggatttcagatttatttttggattttggaatatttccatacatataatgagagagttggaaaatgggattcaagtctaatcataaaattcacttatgtttgatatacaccttatctgaatagcctgaaggtaattttatacaatattttaaataattttatgcctgaaacagagtttgcgcacattggaccatcagaaagcagaagtgtcactatttcaagtcagtgctcaaaaagtttcagatgttaagctggtgatgcagttcatgccagtgatccgagtactttgggaagccaagacaggtggatctcttgagcccaggagtttgaggccagactgcacaacacagtgagacctcgtttctacaaataattaaaaaattagccaggtgtggtggtgcacacctgtagtcccaggtactcaggaggctgaggtagtaggattgtttgagactgggaggttgaggctgaactgagccaggatcttgccaccacattccagcttgggcaacagagtgagaccctgtctcaaaaaaaaaaaaagtttcagattttggagcatttcagatcttcagattagggattttcaacctgtactgaccttttagtcattgacaagcattaatcaataggtggactccagataactcatttgctgtatacacattttgcctctctattcaacgaattcttatgccctcttgtggtgattttaatgtgcggaagggaaacaatagaaattttgcaattctagaaaagtcattctgtcaaaatatgtcagtcctgtagatattagccaattttaggaaaatgacaaaattttttacttttcgtctgcctttgtagctgttttatgatataaataccttatttgtaataaaattaattttaatttgagtaacaatctggaattatcagagaaggggcaagcaataggttaataaacagtattgattggtagaaggaacgttgaaatccaagagcatcaatgtcttctggtggttcaccataagccacagcagatgtcttaatctttccgagatctagtttttcagcaaagcaggatttaagaaatgtaactatcttatgtggttatgaagaacaatagaatcattgctgtataagtgctttttaacctgtaaattttgtgaagcttatcttttatgcatataaatatttgaacattttacattgtttatatttttaatcagttttactcaagtgtgattatatacaagaaaatgtaaccactgtaagggtagagttataagaattttgtcaaatgtattcacccatgtagtcacctccttatgaagagacagaacacgtacatcctcccagaaagttccacagtgctccttttccctgagtttcaccagtcctggcaaccaatgatctgcttcgtataattataactgttctagatatttgtagcaatgtaccctttccatatttattttgtgtgtgtaaggcttcttttagtcattataatatttttgagattcatctatgtttaatgttctatcagtagttgtacatcttacttgtctcagcatatcaccatatagatatactataatttgttaatctaatcactgatggatatgtaggatatttaagtttttgacattatgaataaagtggctataaatgaataaagcgactacaaatttgaa

SEQ ID NO: 137001 - DNA, 4030 bp, Homo sapiens
  Payload ID: 6821
  Gene Symbol: GCSAML
  Gene Name: germinal center-associated, signaling and motility-like
  Uniprot ID: Q5JQS6
  ENST ID: ENST00000366489
  CDS Start-End: 377-724
agacaatgacaaatatgagcctgaaggaagatgagctgatggcattcccagcttattaccactccttgggggccttatcttacatacatggattcaattcgtagattcagctgggatttactgcctcaagatggttatgttggaggattccaatagttctactggatgtggagccagaaattgtgtggaatgcctggtgtttctttcagttcttggatgccaatctgaggcccctggcagctcgtggttggcaagagcacgaacccgtggtcagatgcaacgtcctgcctcatgcattttcctcttggtgctttggtcagaacttccccaagtggagtgaaactcaggagctgagaaaccgagtcactgtgaaaagatgggaaattatctcctgcgaaaactcaggcaggaaatgactacatttgaaagaaaacttcaagatcaagataagaaaagccaagaagtttcatccacttctaatcaggaaaacgagaatggcagtggttctgaagaagtgtgctacactgtcattaatcacatcccccatcagagatcctccctgagctccaatgatgatggctatgagaacattgactccctcacaaggaaagtgagacagtttagagaaaggtcagagacagaatatgcccttcttaggacttctgttagtaggccttgttcctgcacccatgagcatgattatgaagttgtgtttccacactaaaatcctcaagctgctttatcaccttccagcaatgaagacaatgcagaatagcagactctggcgaagttgttcaccctgagcagtgcatgaaacattcctttctggctaaagtttagaaatattatcttattatatatccttaggcaactctgatatgtggcatctctgtggcttaggtgaaatcatagaaattgacacaatgacctaaaatattctatgtgtttttgcttgtaaagtttgaggacatggaggtgataaaaaaaactttcttaggacaataatgtaaaatgaaaataaatttctaatccccctgactaactgaatggaccctcttctaggccaaagagacctcagatgaacctgaaagactgaattctggccatgataggaagggaggtgagacacaccttgttataccccttcccttttggagtttatgcacaagtgaccaggatgagtcataagactgatgaaatagactgattgtggcaataagagtcccaattccaacctgactctggtgtagatcacacactgtctgagggattccatctatgagactttgtctacataacagagaccttggtttccacaacccctttattttagctaaagcattcttttctactgacttcttaagtctttagacaaagcttaactctttcaaccaattgccaatcagacaaactttgaatctacctatgacctgtaagctctctcctgcttcaagatcttgcctctttaagctgaaccgatgtgcactttccatttaatgatttatgtctttgcttgtaactcctgtctccctaaaatgtataaaagtaaacggtgacctgaccacctcaggcacactttctcaggacctcctgagagtgtatcccaggccatggtaagtcatgttggctcagaatcaacctctttaaatattttacagaatttgggttttggttaccaataagtctccacaaatatatgtccaagaatcttcaattccaagcctgctcaccaaatttcaaatgccaacatctccccatccaattacctatttcatctttgaggtgtaatctactcaataaactgtgtaagaccagtgaccagaccctttgctaacctgacatttacttcaatttttctttttctatgtactggatatttttgcatataaacttgcagtaatagttcaaaaattaatagtttttgacattggcttttctgagaagagaaattgaaagtgtcacaaaataaaaaaagatgaaatgaagcatatataattgtcaattttttcaattttctagccaacagagaatcgaaggattctgttcaaatattagtaaaaattgaaaataaacttgtgcttatattttgtttgcaacacactagttaatttaacctgtgactagttatctctaccgaaggtggatgtgtagtttctggttttaaaattcaagcaaactggaaaataatccatctaattatgctttctttcccaagaagttttttaatgatatgccagcttcctaatttggagacaaaagccttaattgacaatgcattcattatatatttttttgtatagttacagtatacgagttgagtatcccttagatgagatgcttgggaccagaagtgttttggatttcagatttatttttggattttggaatatttccatacatataatgagagagttggaaaatgggattcaagtctaatcataaaattcacttatgtttgatatacaccttatctgaatagcctgaaggtaattttatacaatattttaaataattttatgcctgaaacagagtttgcgcacattggaccatcagaaagcagaagtgtcactatttcaagtcagtgctcaaaaagtttcagatgttaagctggtgatgcagttcatgccagtgatccgagtactttgggaagccaagacaggtggatctcttgagcccaggagtttgaggccagactgcacaacacagtgagacctcgtttctacaaataattaaaaaattagccaggtgtggtggtgcacacctgtagtcccaggtactcaggaggctgaggtagtaggattgtttgagactgggaggttgaggctgaactgagccaggatcttgccaccacattccagcttgggcaacagagtgagaccctgtctcaaaaaaaaaaaaagtttcagattttggagcatttcagatcttcagattagggattttcaacctgtactgaccttttagtcattgacaagcattaatcaataggtggactccagataactcatttgctgtatacacattttgcctctctattcaacgaattcttatgccctcttgtggtgattttaatgtgcggaagggaaacaatagaaattttgcaattctagaaaagtcattctgtcaaaatatgtcagtcctgtagatattagccaattttaggaaaatgacaaaattttttacttttcgtctgcctttgtagctgttttatgatataaataccttatttgtaataaaattaattttaatttgagtaacaatctggaattatcagagaaggggcaagcaataggttaataaacagtattgattggtagaaggaacgttgaaatccaagagcatcaatgtcttctggtggttcaccataagccacagcagatgtcttaatctttccgagatctagtttttcagcaaagcaggatttaagaaatgtaactatcttatgtggttatgaagaacaatagaatcattgctgtataagtgctttttaacctgtaaattttgtgaagcttatcttttatgcatataaatatttgaacattttacattgtttatatttttaatcagttttactcaagtgtgattatatacaagaaaatgtaaccactgtaagggtagagttataagaattttgtcaaatgtattcacccatgtagtcacctccttatgaagagacagaacacgtacatcctcccagaaagttccacagtgctccttttccctgagtttcaccagtcctggcaaccaatgatctgcttcgtataattataactgttctagatatttgtagcaatgtaccctttccatatttattttgtgtgtgtaaggcttcttttagtcattataatatttttgagattcatctatgtttaatgttctatcagtagttgtacatcttacttgtctcagcatatcaccatatagatatactataatttgttaatctaatcactgatggatatgtaggatatttaagtttttgacattatgaataaagtggctataaatgaataaagcgactacaaatttg

SEQ ID NO: 137002 - DNA, 4130 bp, Homo sapiens
  Payload ID: 6821
  Gene Symbol: GCSAML
  Gene Name: germinal center-associated, signaling and motility-like
  Uniprot ID: Q5JQS6
  ENST ID: ENST00000366491
  CDS Start-End: 498-845
acaagagacaatgacaaatatgagcctgaaggaagatgagctgatggcattcccagcttattaccactccttgggggccttatcttacatacatggattcaattcgtagattcagctgggatttactgcctcaagatggttatgttggaggattccaatagttctactggatgtggagccagaaattgtgtggaatgcctggtgtttctttcagttcttggatgccaatctgagaggaaaggccagatgaggacacagcaagcaggcagatggctgcgagctggaagggaagcgtcatcagaaaccaaccctgagggtaccttgatcttggacttccagtctccagaactgcccctggcagctcgtggttggcaagagcacgaacccgtggtcagatgcaacgtcctgcctcatgcattttcctcttggtgctttggtcagaacttccccaagtggagtgaaactcaggagctgagaaaccgagtcactgtgaaaagatgggaaattatctcctgcgaaaactcaggcaggaaatgactacatttgaaagaaaacttcaagatcaagataagaaaagccaagaagtttcatccacttctaatcaggaaaacgagaatggcagtggttctgaagaagtgtgctacactgtcattaatcacatcccccatcagagatcctccctgagctccaatgatgatggctatgagaacattgactccctcacaaggaaagtgagacagtttagagaaaggtcagagacagaatatgcccttcttaggacttctgttagtaggccttgttcctgcacccatgagcatgattatgaagttgtgtttccacactaaaatcctcaagctgctttatcaccttccagcaatgaagacaatgcagaatagcagactctggcgaagttgttcaccctgagcagtgcatgaaacattcctttctggctaaagtttagaaatattatcttattatatatccttaggcaactctgatatgtggcatctctgtggcttaggtgaaatcatagaaattgacacaatgacctaaaatattctatgtgtttttgcttgtaaagtttgaggacatggaggtgataaaaaaaactttcttaggacaataatgtaaaatgaaaataaatttctaatccccctgactaactgaatggaccctcttctaggccaaagagacctcagatgaacctgaaagactgaattctggccatgataggaagggaggtgagacacaccttgttataccccttcccttttggagtttatgcacaagtgaccaggatgagtcataagactgatgaaatagactgattgtggcaataagagtcccaattccaacctgactctggtgtagatcacacactgtctgagggattccatctatgagactttgtctacataacagagaccttggtttccacaacccctttattttagctaaagcattcttttctactgacttcttaagtctttagacaaagcttaactctttcaaccaattgccaatcagacaaactttgaatctacctatgacctgtaagctctctcctgcttcaagatcttgcctctttaagctgaaccgatgtgcactttccatttaatgatttatgtctttgcttgtaactcctgtctccctaaaatgtataaaagtaaacggtgacctgaccacctcaggcacactttctcaggacctcctgagagtgtatcccaggccatggtaagtcatgttggctcagaatcaacctctttaaatattttacagaatttgggttttggttaccaataagtctccacaaatatatgtccaagaatcttcaattccaagcctgctcaccaaatttcaaatgccaacatctccccatccaattacctatttcatctttgaggtgtaatctactcaataaactgtgtaagaccagtgaccagaccctttgctaacctgacatttacttcaatttttctttttctatgtactggatatttttgcatataaacttgcagtaatagttcaaaaattaatagtttttgacattggcttttctgagaagagaaattgaaagtgtcacaaaataaaaaaagatgaaatgaagcatatataattgtcaattttttcaattttctagccaacagagaatcgaaggattctgttcaaatattagtaaaaattgaaaataaacttgtgcttatattttgtttgcaacacactagttaatttaacctgtgactagttatctctaccgaaggtggatgtgtagtttctggttttaaaattcaagcaaactggaaaataatccatctaattatgctttctttcccaagaagttttttaatgatatgccagcttcctaatttggagacaaaagccttaattgacaatgcattcattatatatttttttgtatagttacagtatacgagttgagtatcccttagatgagatgcttgggaccagaagtgttttggatttcagatttatttttggattttggaatatttccatacatataatgagagagttggaaaatgggattcaagtctaatcataaaattcacttatgtttgatatacaccttatctgaatagcctgaaggtaattttatacaatattttaaataattttatgcctgaaacagagtttgcgcacattggaccatcagaaagcagaagtgtcactatttcaagtcagtgctcaaaaagtttcagatgttaagctggtgatgcagttcatgccagtgatccgagtactttgggaagccaagacaggtggatctcttgagcccaggagtttgaggccagactgcacaacacagtgagacctcgtttctacaaataattaaaaaattagccaggtgtggtggtgcacacctgtagtcccaggtactcaggaggctgaggtagtaggattgtttgagactgggaggttgaggctgaactgagccaggatcttgccaccacattccagcttgggcaacagagtgagaccctgtctcaaaaaaaaaaaaagtttcagattttggagcatttcagatcttcagattagggattttcaacctgtactgaccttttagtcattgacaagcattaatcaataggtggactccagataactcatttgctgtatacacattttgcctctctattcaacgaattcttatgccctcttgtggtgattttaatgtgcggaagggaaacaatagaaattttgcaattctagaaaagtcattctgtcaaaatatgtcagtcctgtagatattagccaattttaggaaaatgacaaaattttttacttttcgtctgcctttgtagctgttttatgatataaataccttatttgtaataaaattaattttaatttgagtaacaatctggaattatcagagaaggggcaagcaataggttaataaacagtattgattggtagaaggaacgttgaaatccaagagcatcaatgtcttctggtggttcaccataagccacagcagatgtcttaatctttccgagatctagtttttcagcaaagcaggatttaagaaatgtaactatcttatgtggttatgaagaacaatagaatcattgctgtataagtgctttttaacctgtaaattttgtgaagcttatcttttatgcatataaatatttgaacattttacattgtttatatttttaatcagttttactcaagtgtgattatatacaagaaaatgtaaccactgtaagggtagagttataagaattttgtcaaatgtattcacccatgtagtcacctccttatgaagagacagaacacgtacatcctcccagaaagttccacagtgctccttttccctgagtttcaccagtcctggcaaccaatgatctgcttcgtataattataactgttctagatatttgtagcaatgtaccctttccatatttattttgtgtgtgtaaggcttcttttagtcattataatatttttgagattcatctatgtttaatgttctatcagtagttgtacatcttacttgtctcagcatatcaccatatagatatactataatttgttaatctaatcactgatggatatgtaggatatttaagtttttgacattatgaataaagtggctataaatg

SEQ ID NO: 137003 - DNA, 1308 bp, Homo sapiens
  Payload ID: 6821
  Gene Symbol: GCSAML
  Gene Name: germinal center-associated, signaling and motility-like
  ENST ID: ENST00000527084
  CDS Start-End: 359-670
tttccctttgataccctctgtttgtaacaatcccaatgccaacactgtcctgtttctacaagagacaatgacaaatatgagcctgaaggaagatgagctgatggcattcccagcttattaccactccttgggggccttatcttacatacatggattcaattcgtagattcagctgggatttactgcctcaagatggttatgttggaggattccaatagttctactggatgtggagccagaaattgtgtggaatgcctggtgtttctttcagttcttggatgccaatctgagttgcctgggagagaatcaaaagaagcccaagaaaggaaacccagatgaggaaagaaaacggcaggaaatgactacatttgaaagaaaacttcaagatcaagataagaaaagccaagaagtttcatccacttctaatcaggaaaacgagaatggcagtggttctgaagaagtgtgctacactgtcattaatcacatcccccatcagagatcctccctgagctccaatgatgatggctatgagaacattgactccctcacaaggaaagtgagacagtttagagaaaggtcagagacagaatatgcccttcttaggacttctgttagtaggccttgttcctgcacccatgagcatgattatgaagttgtgtttccacactaaaatcctcaagctgctttatcaccttccagcaatgaagacaatgcagaatagcagactctggcgaagttgttcaccctgagcagtgcatgaaacattcctttctggctaaagtttagaaatattatcttattatatatccttaggcaactctgatatgtggcatctctgtggcttaggtgaaatcatagaaattgacacaatgacctaaaatattctatgtgtttttgcttgtaaagtttgaggacatggaggtgataaaaaaaactttcttaggacaataatgtaaaatgaaaataaatttctaatccccctgactaactgaatggaccctcttctaggccaaagagacctcagatgaacctgaaagactgaattctggccatgataggaagggaggtgagacacaccttgttataccccttcccttttggagtttatgcacaagtgaccaggatgagtcataagactgatgaaatagactgattgtggcaataagagtcccaattccaacctgactctggtgtagatcacacactgtctgagggattccatctatgagactttgtctacataacagagaccttggtttccacaacccctttattttagctaaagcattcttttctactgacttctta

SEQ ID NO: 137004 - DNA, 562 bp, Homo sapiens
  Payload ID: 6821
  Gene Symbol: GCSAML
  Gene Name: germinal center-associated, signaling and motility-like
  ENST ID: ENST00000529512
  CDS Start-End: 340-562
tttccacggtgacgccgtctgcactagcgccgcacccgcttcaactgcctgcaaccgccgctgaattccctcatccccacgctgagaggacgagaaaggcgccctggggaaggctctcgggaaagcccgcagccgctggacgcgggaggacatggaggatttactgcctcaagatggttatgttggaggattccaatagttctactggatgtggagccagaaattgtgtggaatgcctggtgtttctttcagttcttggatgccaatctgagttgcctgggagagaatcaaaagaagcccaagaaaggaaacccagatgaggaaagaaaacggcaggaaatgactacatttgaaagaaaacttcaagatcaagataagaaaagccaagaagtttcatccacttctaatcaggaaaacgagaatggcagtggttctgaagaagtgtgctacactgtcattaatcacatcccccatcagagatcctccctgagctccaatgatgatggctatgagaacattgactccctcacaaggaaagtgagacagtttagagaaaggtcag

SEQ ID NO: 137005 - DNA, 1822 bp, Homo sapiens
  Payload ID: 6821
  Gene Symbol: GCSAML
  Gene Name: germinal center-associated, signaling and motility-like
  ENST ID: ENST00000463359
  CDS Start-End: 245-556
ttcccgcgcggctgccgccctttccacggtgacgccgtctgcactagcgccgcacccgcttcaactgcctgcaaccgccgctgaattccctcatccccacgctgagaggacgagaaaggcgccctggggaaggctctcgggaaagcccgcagccgctggacgcgggaggacatggagttgcctgggagagaatcaaaagaagcccaagaaaggaaacccagatgaggaaagaaaacggcaggaaatgactacatttgaaagaaaacttcaagatcaagataagaaaagccaagaagtttcatccacttctaatcaggaaaacgagaatggcagtggttctgaagaagtgtgctacactgtcattaatcacatcccccatcagagatcctccctgagctccaatgatgatggctatgagaacattgactccctcacaaggaaagtgagacagtttagagaaaggtcagagacagaatatgcccttcttaggacttctgttagtaggccttgttcctgcacccatgagcatgattatgaagttgtgtttccacactaaaatcctcaagctgctttatcaccttccagcaatgaagacaatgcagaatagcagactctggcgaagttgttcaccctgagcagtgcatgaaacattcctttctggctaaagtttagaaatattatcttattatatatccttaggcaactctgatatgtggcatctctgtggcttaggtgaaatcatagaaattgacacaatgacctaaaatattctatgtgtttttgcttgtaaagtttgaggacatggaggtgataaaaaaaactttcttaggacaataatgtaaaatgaaaataaatttctaatccccctgactaactgaatggaccctcttctaggccaaagagacctcagatgaacctgaaagactgaattctggccatgataggaagggaggtgagacacaccttgttataccccttcccttttggagtttatgcacaagtgaccaggatgagtcataagactgatgaaatagactgattgtggcaataagagtcccaattccaacctgactctggtgtagatcacacactgtctgagggattccatctatgagactttgtctacataacagagaccttggtttccacaacccctttattttagctaaagcattcttttctactgacttcttaagtctttagacaaagcttaactctttcaaccaattgccaatcagacaaactttgaatctacctatgacctgtaagctctctcctgcttcaagatcttgcctctttaagctgaaccgatgtgcactttccatttaatgatttatgtctttgcttgtaactcctgtctccctaaaatgtataaaagtaaacggtgacctgaccacctcaggcacactttctcaggacctcctgagagtgtatcccaggccatggtaagtcatgttggctcagaatcaacctctttaaatattttacagaatttgggttttggttaccaataagtctccacaaatatatgtccaagaatcttcaattccaagcctgctcaccaaatttcaaatgccaacatctccccatccaattacctatttcatctttgaggtgtaatctactcaataaactgtgtaagaccagtgaccagaccctttgctaacctgacatttacttcaatttttctttttctatgtactggatatttttgcatataaacttgcagtaatagttcaaaaattaatagtttttgacattggcttttctgagaagagaaattgaaagtgtcacaaaataaaaaaagatgaaatgaagcata

SEQ ID NO: 137006 - DNA, 1094 bp, Homo sapiens
  Payload ID: 6821
  Gene Symbol: GCSAML
  Gene Name: germinal center-associated, signaling and motility-like
  ENST ID: ENST00000527541
  CDS Start-End: 284-595
ctctgtttgtaacaatcccaatgccaacactgtcctgtttctacaagagacaatgacaaatatgagcctgaaggaagatgagctgatggcattcccagcttattaccactccttgggggccttatcttacatacatggattcaattcgtagattcagctgggatttactgcctcaagatggttatgttggaggattccaatagttctactggatgtggagccagaaattgtgtggaatgcctggtgtttctttcagttcttggatgccaatctgaggcaggaaatgactacatttgaaagaaaacttcaagatcaagataagaaaagccaagaagtttcatccacttctaatcaggaaaacgagaatggcagtggttctgaagaagtgtgctacactgtcattaatcacatcccccatcagagatcctccctgagctccaatgatgatggctatgagaacattgactccctcacaaggaaagtgagacagtttagagaaaggtcagagacagaatatgcccttcttaggacttctgttagtaggccttgttcctgcacccatgagcatgattatgaagttgtgtttccacactaaaatcctcaagctgctttatcaccttccagcaatgaagacaatgcagaatagcagactctggcgaagttgttcaccctgagcagtgcatgaaacattcctttctggctaaagtttagaaatattatcttattatatatccttaggcaactctgatatgtggcatctctgtggcttaggtgaaatcatagaaattgacacaatgacctaaaatattctatgtgtttttgcttgtaaagtttgaggacatggaggtgataaaaaaaactttcttaggacaataatgtaaaatgaaaataaatttctaatccccctgactaactgaatggaccctcttctaggccaaagagacctcagatgaacctgaaagactgaattctggccatgataggaagggaggtgagacacaccttgttataccccttcccttttggagtttatgcacaagtgaccaggatgagtcataagactgatgaaatagactgattgtggcaataagagt

SEQ ID NO: 137007 - DNA, 522 bp, Homo sapiens
  Payload ID: 6821
  Gene Symbol: GCSAML
  Gene Name: germinal center-associated, signaling and motility-like
  ENST ID: ENST00000526896
  CDS Start-End: 282-522
aatgacaaatatgagcctgaaggaagatgagctgatggcattcccagcttattaccactccttgggggccttatcttacatacatggattcaattcgtagattcagctgggatttactgcctcaagatggttatgttggaggattccaatagttctactggatgtggagccagaaattgtgtggaatgcctggtgtttctttcagttcttggatgccaatctgagaacttccccaagtggagtgaaactcaggagctgagaaaccgagtcactgtgaaaagatgggaaattatctcctgcgaaaactcagttgcctgggagagaatcaaaagaagcccaagaaaggaaacccagatgaggaaagaaaacggcaggaaatgactacatttgaaagaaaacttcaagatcaagataagaaaagccaagaagtttcatccacttctaatcaggaaaacgagaatggcagtggttctgaagaagtgtgctacactgtcattaatcacatcccccatcagagatcct

SEQ ID NO: 137008 - DNA, 4063 bp, Homo sapiens
  Payload ID: 6821
  Gene Symbol: GCSAML
  Gene Name: germinal center-associated, signaling and motility-like
  Uniprot ID: Q5JQS6
  ENST ID: ENST00000536561
  CDS Start-End: 348-755
tttccctttgataccctctgtttgtaacaatcccaatgccaacactgtcctgtttctacaagagacaatgacaaatatgagcctgaaggaagatgagctgatggcattcccagcttattaccactccttgggggccttatcttacatacatggattcaattcgtagattcagctgggatttactgcctcaagatggttatgttggaggattccaatagttctactggatgtggagccagaaattgtgtggaatgcctggtgtttctttcagttcttggatgccaatctgagaacttccccaagtggagtgaaactcaggagctgagaaaccgagtcactgtgaaaagatgggaaattatctcctgcgaaaactcagttgcctgggagagaatcaaaagaagcccaagaaaggaaacccagatgaggaaagaaaacggcaggaaatgactacatttgaaagaaaacttcaagatcaagataagaaaagccaagaagtttcatccacttctaatcaggaaaacgagaatggcagtggttctgaagaagtgtgctacactgtcattaatcacatcccccatcagagatcctccctgagctccaatgatgatggctatgagaacattgactccctcacaaggaaagtgagacagtttagagaaaggtcagagacagaatatgcccttcttaggacttctgttagtaggccttgttcctgcacccatgagcatgattatgaagttgtgtttccacactaaaatcctcaagctgctttatcaccttccagcaatgaagacaatgcagaatagcagactctggcgaagttgttcaccctgagcagtgcatgaaacattcctttctggctaaagtttagaaatattatcttattatatatccttaggcaactctgatatgtggcatctctgtggcttaggtgaaatcatagaaattgacacaatgacctaaaatattctatgtgtttttgcttgtaaagtttgaggacatggaggtgataaaaaaaactttcttaggacaataatgtaaaatgaaaataaatttctaatccccctgactaactgaatggaccctcttctaggccaaagagacctcagatgaacctgaaagactgaattctggccatgataggaagggaggtgagacacaccttgttataccccttcccttttggagtttatgcacaagtgaccaggatgagtcataagactgatgaaatagactgattgtggcaataagagtcccaattccaacctgactctggtgtagatcacacactgtctgagggattccatctatgagactttgtctacataacagagaccttggtttccacaacccctttattttagctaaagcattcttttctactgacttcttaagtctttagacaaagcttaactctttcaaccaattgccaatcagacaaactttgaatctacctatgacctgtaagctctctcctgcttcaagatcttgcctctttaagctgaaccgatgtgcactttccatttaatgatttatgtctttgcttgtaactcctgtctccctaaaatgtataaaagtaaacggtgacctgaccacctcaggcacactttctcaggacctcctgagagtgtatcccaggccatggtaagtcatgttggctcagaatcaacctctttaaatattttacagaatttgggttttggttaccaataagtctccacaaatatatgtccaagaatcttcaattccaagcctgctcaccaaatttcaaatgccaacatctccccatccaattacctatttcatctttgaggtgtaatctactcaataaactgtgtaagaccagtgaccagaccctttgctaacctgacatttacttcaatttttctttttctatgtactggatatttttgcatataaacttgcagtaatagttcaaaaattaatagtttttgacattggcttttctgagaagagaaattgaaagtgtcacaaaataaaaaaagatgaaatgaagcatatataattgtcaattttttcaattttctagccaacagagaatcgaaggattctgttcaaatattagtaaaaattgaaaataaacttgtgcttatattttgtttgcaacacactagttaatttaacctgtgactagttatctctaccgaaggtggatgtgtagtttctggttttaaaattcaagcaaactggaaaataatccatctaattatgctttctttcccaagaagttttttaatgatatgccagcttcctaatttggagacaaaagccttaattgacaatgcattcattatatatttttttgtatagttacagtatacgagttgagtatcccttagatgagatgcttgggaccagaagtgttttggatttcagatttatttttggattttggaatatttccatacatataatgagagagttggaaaatgggattcaagtctaatcataaaattcacttatgtttgatatacaccttatctgaatagcctgaaggtaattttatacaatattttaaataattttatgcctgaaacagagtttgcgcacattggaccatcagaaagcagaagtgtcactatttcaagtcagtgctcaaaaagtttcagatgttaagctggtgatgcagttcatgccagtgatccgagtactttgggaagccaagacaggtggatctcttgagcccaggagtttgaggccagactgcacaacacagtgagacctcgtttctacaaataattaaaaaattagccaggtgtggtggtgcacacctgtagtcccaggtactcaggaggctgaggtagtaggattgtttgagactgggaggttgaggctgaactgagccaggatcttgccaccacattccagcttgggcaacagagtgagaccctgtctcaaaaaaaaaaaaagtttcagattttggagcatttcagatcttcagattagggattttcaacctgtactgaccttttagtcattgacaagcattaatcaataggtggactccagataactcatttgctgtatacacattttgcctctctattcaacgaattcttatgccctcttgtggtgattttaatgtgcggaagggaaacaatagaaattttgcaattctagaaaagtcattctgtcaaaatatgtcagtcctgtagatattagccaattttaggaaaatgacaaaattttttacttttcgtctgcctttgtagctgttttatgatataaataccttatttgtaataaaattaattttaatttgagtaacaatctggaattatcagagaaggggcaagcaataggttaataaacagtattgattggtagaaggaacgttgaaatccaagagcatcaatgtcttctggtggttcaccataagccacagcagatgtcttaatctttccgagatctagtttttcagcaaagcaggatttaagaaatgtaactatcttatgtggttatgaagaacaatagaatcattgctgtataagtgctttttaacctgtaaattttgtgaagcttatcttttatgcatataaatatttgaacattttacattgtttatatttttaatcagttttactcaagtgtgattatatacaagaaaatgtaaccactgtaagggtagagttataagaattttgtcaaatgtattcacccatgtagtcacctccttatgaagagacagaacacgtacatcctcccagaaagttccacagtgctccttttccctgagtttcaccagtcctggcaaccaatgatctgcttcgtataattataactgttctagatatttgtagcaatgtaccctttccatatttattttgtgtgtgtaaggcttcttttagtcattataatatttttgagattcatctatgtttaatgttctatcagtagttgtacatcttacttgtctcagcatatcaccatatagatatactataatttgttaatctaatcactgatggatatgtaggatatttaagtttttgacattatgaataaagtggctataaatgaataaagcgactacaaatttgaa

SEQ ID NO: 137009 - DNA, 3959 bp, Homo sapiens
  Payload ID: 6821
  Gene Symbol: GCSAML
  Gene Name: germinal center-associated, signaling and motility-like
  ENST ID: ENST00000623578
  CDS Start-End: 340-651
tttccacggtgacgccgtctgcactagcgccgcacccgcttcaactgcctgcaaccgccgctgaattccctcatccccacgctgagaggacgagaaaggcgccctggggaaggctctcgggaaagcccgcagccgctggacgcgggaggacatggaggatttactgcctcaagatggttatgttggaggattccaatagttctactggatgtggagccagaaattgtgtggaatgcctggtgtttctttcagttcttggatgccaatctgagttgcctgggagagaatcaaaagaagcccaagaaaggaaacccagatgaggaaagaaaacggcaggaaatgactacatttgaaagaaaacttcaagatcaagataagaaaagccaagaagtttcatccacttctaatcaggaaaacgagaatggcagtggttctgaagaagtgtgctacactgtcattaatcacatcccccatcagagatcctccctgagctccaatgatgatggctatgagaacattgactccctcacaaggaaagtgagacagtttagagaaaggtcagagacagaatatgcccttcttaggacttctgttagtaggccttgttcctgcacccatgagcatgattatgaagttgtgtttccacactaaaatcctcaagctgctttatcaccttccagcaatgaagacaatgcagaatagcagactctggcgaagttgttcaccctgagcagtgcatgaaacattcctttctggctaaagtttagaaatattatcttattatatatccttaggcaactctgatatgtggcatctctgtggcttaggtgaaatcatagaaattgacacaatgacctaaaatattctatgtgtttttgcttgtaaagtttgaggacatggaggtgataaaaaaaactttcttaggacaataatgtaaaatgaaaataaatttctaatccccctgactaactgaatggaccctcttctaggccaaagagacctcagatgaacctgaaagactgaattctggccatgataggaagggaggtgagacacaccttgttataccccttcccttttggagtttatgcacaagtgaccaggatgagtcataagactgatgaaatagactgattgtggcaataagagtcccaattccaacctgactctggtgtagatcacacactgtctgagggattccatctatgagactttgtctacataacagagaccttggtttccacaacccctttattttagctaaagcattcttttctactgacttcttaagtctttagacaaagcttaactctttcaaccaattgccaatcagacaaactttgaatctacctatgacctgtaagctctctcctgcttcaagatcttgcctctttaagctgaaccgatgtgcactttccatttaatgatttatgtctttgcttgtaactcctgtctccctaaaatgtataaaagtaaacggtgacctgaccacctcaggcacactttctcaggacctcctgagagtgtatcccaggccatggtaagtcatgttggctcagaatcaacctctttaaatattttacagaatttgggttttggttaccaataagtctccacaaatatatgtccaagaatcttcaattccaagcctgctcaccaaatttcaaatgccaacatctccccatccaattacctatttcatctttgaggtgtaatctactcaataaactgtgtaagaccagtgaccagaccctttgctaacctgacatttacttcaatttttctttttctatgtactggatatttttgcatataaacttgcagtaatagttcaaaaattaatagtttttgacattggcttttctgagaagagaaattgaaagtgtcacaaaataaaaaaagatgaaatgaagcatatataattgtcaattttttcaattttctagccaacagagaatcgaaggattctgttcaaatattagtaaaaattgaaaataaacttgtgcttatattttgtttgcaacacactagttaatttaacctgtgactagttatctctaccgaaggtggatgtgtagtttctggttttaaaattcaagcaaactggaaaataatccatctaattatgctttctttcccaagaagttttttaatgatatgccagcttcctaatttggagacaaaagccttaattgacaatgcattcattatatatttttttgtatagttacagtatacgagttgagtatcccttagatgagatgcttgggaccagaagtgttttggatttcagatttatttttggattttggaatatttccatacatataatgagagagttggaaaatgggattcaagtctaatcataaaattcacttatgtttgatatacaccttatctgaatagcctgaaggtaattttatacaatattttaaataattttatgcctgaaacagagtttgcgcacattggaccatcagaaagcagaagtgtcactatttcaagtcagtgctcaaaaagtttcagatgttaagctggtgatgcagttcatgccagtgatccgagtactttgggaagccaagacaggtggatctcttgagcccaggagtttgaggccagactgcacaacacagtgagacctcgtttctacaaataattaaaaaattagccaggtgtggtggtgcacacctgtagtcccaggtactcaggaggctgaggtagtaggattgtttgagactgggaggttgaggctgaactgagccaggatcttgccaccacattccagcttgggcaacagagtgagaccctgtctcaaaaaaaaaaaaagtttcagattttggagcatttcagatcttcagattagggattttcaacctgtactgaccttttagtcattgacaagcattaatcaataggtggactccagataactcatttgctgtatacacattttgcctctctattcaacgaattcttatgccctcttgtggtgattttaatgtgcggaagggaaacaatagaaattttgcaattctagaaaagtcattctgtcaaaatatgtcagtcctgtagatattagccaattttaggaaaatgacaaaattttttacttttcgtctgcctttgtagctgttttatgatataaataccttatttgtaataaaattaattttaatttgagtaacaatctggaattatcagagaaggggcaagcaataggttaataaacagtattgattggtagaaggaacgttgaaatccaagagcatcaatgtcttctggtggttcaccataagccacagcagatgtcttaatctttccgagatctagtttttcagcaaagcaggatttaagaaatgtaactatcttatgtggttatgaagaacaatagaatcattgctgtataagtgctttttaacctgtaaattttgtgaagcttatcttttatgcatataaatatttgaacattttacattgtttatatttttaatcagttttactcaagtgtgattatatacaagaaaatgtaaccactgtaagggtagagttataagaattttgtcaaatgtattcacccatgtagtcacctccttatgaagagacagaacacgtacatcctcccagaaagttccacagtgctccttttccctgagtttcaccagtcctggcaaccaatgatctgcttcgtataattataactgttctagatatttgtagcaatgtaccctttccatatttattttgtgtgtgtaaggcttcttttagtcattataatatttttgagattcatctatgtttaatgttctatcagtagttgtacatcttacttgtctcagcatatcaccatatagatatactataatttgttaatctaatcactgatggatatgtaggatatttaagtttttgacattatgaataaagtggctataaatgaataaagcgactacaaatttgaa

SEQ ID NO: 137010 - DNA, 2650 bp, Homo sapiens
  Payload ID: 6822
  Gene Symbol: GHDC
  Gene Name: GH3 domain containing
  Uniprot ID: Q8N2G8
  ENST ID: ENST00000301671
  CDS Start-End: 443-2035
cttttctttttttttttgacagggtctcactctgttgcccaagctggggtgcagtggcacgatcttggctcactgtagccttgacatcctgggctcaagggatcctcccatctcagcctcccaagtagctgcgactatgggtgtgacaccacgctgggctagtttttcaattttttgtagagatggagtctccctatgttgctcaggccggttgcaaactcctgggctcaagtgattctcctgcctcagcctcccaaagtgctgggattacagatgatagccacctcacccggcccacccctaccttctgaaagaggcattcttattcttattcccattttgcagatcaggaaacagagctcagtgcagcccactaaattgctcagggccctacagctaacaagcggcagaggcaggatctgcactcaggagctgcttggagatgctgctgtggccactgctgctgctgctgctgctgctgccaacattggccctgctcaggcagcagcggtcccaggatgccaggctgtcctggcttgctggcctccagcaccgagtggcatggggggccctggtctgggcagccacctggcagcggcggaggctggagcagagcacgctccatgtgcaccagagccagcagcaggccctgaggtggtgtctacagggagcccagcgcccccactgttccctcagaaggagcacagacataagcaccttccggaatcatctccctctgaccaaggccagccagacccagcaggaagacagtggagagcagccactgcccccgacctcaaaccaggaccttggggaggcctctctgcaggccaccttgctgggtctggcagccctaaacaaggcctacccagaagtgctggctcagggacgcactgcccgtgtgacgcttacatccccttggccccgacccctgccttggcctgggaataccctgggccaggtgggcacccctggaaccaaggaccctagggccctgctgctggacgcactgaggtccccagggctgagggcactggaggctgggacggctgtcgaacttctggatgttttcttgggcctggagactgatggtgaagagctagctggggcgatagctgccgggaaccctggagcgcctctccgtgaacgggcagctgagctccgggaggccctagagcaggggccacggggactggcccttcggctctggccaaagctgcaggtggtggtgactctggatgcaggaggccaggccgaggctgtggctgccctcggggccttgtggtgccaaggactagccttcttctctcctgcttatgctgcctcgggaggggtgctgggcctaaacctacagccagagcagccccatgggctctaccttctgccccctggggccccctttatcgagctgctcccagtcaaggaaggcacccaggaggaagctgcctccaccctccttttggccgaggcccagcagggcaaggagtatgagctggtgctgacggaccgcgccagcctcaccaggtgccgcctgggtgatgtggtgcgagtggttggtgcctacaatcagtgtccagtcgtcaggttcatctgcaggctggaccagaccctgagtgtgcgaggggaagatattggtgaagacctgttctctgaggccctgggccgggcagtggggcagtgggcgggggccaagctgctggaccatggctgtgtggagagcagcattctggattcctctgcgggctctgctccccactacgaggtgtttgtggcgctgagggggctgaggaatctgtcagaggaaaatcgagacaagctggaccactgccttcaggaagcctctccccgctacaagtccctgcggttctggggcagcgtgggccctgccagagtccacctggtggggcagggagccttccgagcactccgggcagccctcgctgcctgcccctcctcccccttcccccctgcgatgccccgggtccttcggcacaggcacctggcccagtgtctgcaggagagggtggtgtcctgagtcaagtcctgccccaccgcccagctccccccagaggccacctcgcccctccctctgggacctctccggatggggagtccttggccagggtctctgactctgtgtcacctgacatttgcccatgagagccgctgggccttagagaggccttggcccagctgaccggttctgaagtatgggcctccggggttagcagatgccagcagtgcctgcccgtgtccccatgtcccggcatgaaggacactgctagagagttaccatgcacaccgatggtttcctgtatcacagcccaaagaggttctctggtggccacagctgtgtgctcagtcagtgcactgggcaagctagaagtgttggggggttaatgtccccaggagcagcaaccctgagtcaataaggagcaggacctcagcttcattgtccttgagcaggacaattctgaagtgtattctacataaactctcagaggatgcccagcaggatggagtcccagttgcccgcagcagtaacccactcattcatgtacttcctgcgggggctctcccttccctctcttccccactcccccgccttgggcttcctgggatggctcccaaataaacctcttgcacccag

SEQ ID NO: 137011 - DNA, 2496 bp, Homo sapiens
  Payload ID: 6822
  Gene Symbol: GHDC
  Gene Name: GH3 domain containing
  Uniprot ID: Q8N2G8
  ENST ID: ENST00000414034
  CDS Start-End: 200-1624
aaagccatcgctccttctttctggccggatgtgtgctgagacccagagtcacccaggggtctccgtcacgtgccaggagtaggcagaagtgggctgtgacagatcaggaaacagagctcagtgcagcccactaaattgctcagggccctacagctaacaagcggcagaggcaggatctgcactcaggagctgcttggagatgctgctgtggccactgctgctgctgctgctgctgctgccaacattggccctgctcaggcagcagcggtcccaggatgccaggctgtcctggcttgctggcctccagcaccgagtggcatggggggccctggtctgggcagccacctggcagcggcggaggctggagcagagcacgctccatgtgcaccagagccagcagcaggccctgaggtggtgtctacagggagcccagcgcccccactgttccctcagaaggagcacagacataagcaccttccggaatcatctccctctgaccaaggccagccagacccagcaggaagacagtggagagcagccactgcccccgacctcaaaccaggaccttggggaggcctctctgcaggccaccttgctgggtctggcagccctaaacaaggcctacccagaagtgctggctcagggacgcactgcccgtgtgacgcttacatccccttggccccgacccctgccttggcctgggaataccctgggccaggtgggcacccctggaaccaaggaccctagggccctgctgctggacgcactgaggtccccagggctgagggcactggaggctgggacggctgtcgaacttctggatgttttcttgggcctggagactgatggtgaagagctagctggggcgatagctgccgggaaccctggagcgcctctccgtgaacgggcagctgagctccgggaggccctagagcaggggccacggggactggcccttcggctctggccaaagctgcaggtggtggtgactctggatgcaggaggccaggccgaggctgtggctgccctcggggccttgtggtgccaaggactagccttcttctctcctgcttatgctgcctcgggaggggtgctgggcctaaacctacagccagagcagccccatgggctctaccttctgccccctggggccccctttatcgagctgctcccagtcaaggaaggcacccaggaggaagctgcctccaccctccttttggccgaggcccagcagggcaaggagtatgagctggtgctgacggaccgcgccagcctcaccaggtgccgcctgggtgatgtggtgcgagtggttggtgcctacaatcagtgtccagtcgtcaggttcatctgcaggctggaccagaccctgagtgtgcgaggggaagatattggtgaagacctgttctctgaggccctgggccgggcagtggggcagtgggcgggggccaagctgctggaccatggctgtgtggagagcagcattctggagtggggaagaacagatagggcagaggacactagacttggcagctgcccattcaccggaagtatgtgtgcacatggggtctattcacagattcctctgcgggctctgctccccactacgaggtgtttgtggcgctgagggggctgaggaatctgtcagaggaaaatcgagacaagctggaccactgccttcaggaagcctctccccgctacaagtccctgcggttctggggcagcgtgggccctgccagagtccacctggtggggcagggagccttccgagcactccgggcagccctcgctgcctgcccctcctcccccttcccccctgcgatgccccgggtccttcggcacaggcacctggcccagtgtctgcaggagagggtggtgtcctgagtcaagtcctgccccaccgcccagctccccccagaggccacctcgcccctccctctgggacctctccggatggggagtccttggccagggtctctgactctgtgtcacctgacatttgcccatgagagccgctgggccttagagaggccttggcccagctgaccggttctgaagtatgggcctccggggttagcagatgccagcagtgcctgcccgtgtccccatgtcccggcatgaaggacactgctagagagttaccatgcacaccgatggtttcctgtatcacagcccaaagaggttctctggtggccacagctgtgtgctcagtcagtgcactgggcaagctagaagtgttggggggttaatgtccccaggagcagcaaccctgagtcaataaggagcaggacctcagcttcattgtccttgagcaggacaattctgaagtgtattctacataaactctcagaggatgcccagcaggatggagtcccagttgcccgcagcagtaacccactcattcatgtacttcctgcgggggctctcccttccctctcttccccactcccccgccttgggcttcctgggatggctcccaaataaacctcttgcacccag

SEQ ID NO: 137012 - DNA, 2518 bp, Homo sapiens
  Payload ID: 6822
  Gene Symbol: GHDC
  Gene Name: GH3 domain containing
  Uniprot ID: Q8N2G8
  ENST ID: ENST00000428494
  CDS Start-End: 224-1648
cctggtggccggatttcccagttggggcccagccttttaaagccatcgctccttctttctggccggatgtgtgctgagacccagagtcacccaggggtctccgtcacgtgccaggagtaggcagaagtgggctgtgacaggtgcatgtgggcatggaccccacagcctggggctcaggagggacaaggagctgggacaggctcttcccaggagctgcttggagatgctgctgtggccactgctgctgctgctgctgctgctgccaacattggccctgctcaggcagcagcggtcccaggatgccaggctgtcctggcttgctggcctccagcaccgagtggcatggggggccctggtctgggcagccacctggcagcggcggaggctggagcagagcacgctccatgtgcaccagagccagcagcaggccctgaggtggtgtctacagggagcccagcgcccccactgttccctcagaaggagcacagacataagcaccttccggaatcatctccctctgaccaaggccagccagacccagcaggaagacagtggagagcagccactgcccccgacctcaaaccaggaccttggggaggcctctctgcaggccaccttgctgggtctggcagccctaaacaaggcctacccagaagtgctggctcagggacgcactgcccgtgtgacgcttacatccccttggccccgacccctgccttggcctgggaataccctgggccaggtgggcacccctggaaccaaggaccctagggccctgctgctggacgcactgaggtccccagggctgagggcactggaggctgggacggctgtcgaacttctggatgttttcttgggcctggagactgatggtgaagagctagctggggcgatagctgccgggaaccctggagcgcctctccgtgaacgggcagctgagctccgggaggccctagagcaggggccacggggactggcccttcggctctggccaaagctgcaggtggtggtgactctggatgcaggaggccaggccgaggctgtggctgccctcggggccttgtggtgccaaggactagccttcttctctcctgcttatgctgcctcgggaggggtgctgggcctaaacctacagccagagcagccccatgggctctaccttctgccccctggggccccctttatcgagctgctcccagtcaaggaaggcacccaggaggaagctgcctccaccctccttttggccgaggcccagcagggcaaggagtatgagctggtgctgacggaccgcgccagcctcaccaggtgccgcctgggtgatgtggtgcgagtggttggtgcctacaatcagtgtccagtcgtcaggttcatctgcaggctggaccagaccctgagtgtgcgaggggaagatattggtgaagacctgttctctgaggccctgggccgggcagtggggcagtgggcgggggccaagctgctggaccatggctgtgtggagagcagcattctggagtggggaagaacagatagggcagaggacactagacttggcagctgcccattcaccggaagtatgtgtgcacatggggtctattcacagattcctctgcgggctctgctccccactacgaggtgtttgtggcgctgagggggctgaggaatctgtcagaggaaaatcgagacaagctggaccactgccttcaggaagcctctccccgctacaagtccctgcggttctggggcagcgtgggccctgccagagtccacctggtggggcagggagccttccgagcactccgggcagccctcgctgcctgcccctcctcccccttcccccctgcgatgccccgggtccttcggcacaggcacctggcccagtgtctgcaggagagggtggtgtcctgagtcaagtcctgccccaccgcccagctccccccagaggccacctcgcccctccctctgggacctctccggatggggagtccttggccagggtctctgactctgtgtcacctgacatttgcccatgagagccgctgggccttagagaggccttggcccagctgaccggttctgaagtatgggcctccggggttagcagatgccagcagtgcctgcccgtgtccccatgtcccggcatgaaggacactgctagagagttaccatgcacaccgatggtttcctgtatcacagcccaaagaggttctctggtggccacagctgtgtgctcagtcagtgcactgggcaagctagaagtgttggggggttaatgtccccaggagcagcaaccctgagtcaataaggagcaggacctcagcttcattgtccttgagcaggacaattctgaagtgtattctacataaactctcagaggatgcccagcaggatggagtcccagttgcccgcagcagtaacccactcattcatgtacttcctgcgggggctctcccttccctctcttccccactcccccgccttgggcttcctgggatggctcccaaataaacctcttgcaccc

SEQ ID NO: 137013 - DNA, 842 bp, Homo sapiens
  Payload ID: 6822
  Gene Symbol: GHDC
  Gene Name: GH3 domain containing
  ENST ID: ENST00000588762
  CDS Start-End: 184-522
ctttctggccggatgtgtgctgagacccagagtcacccaggggtctccgtcacgtgccaggagtaggcagaagtgggctgtgacagatcaggaaacagagctcagtgcagcccactaaattgctcagggccctacagctaacaagcggcagaggcaggatctgcactcaggagctgcttggagatgctgctgtggccactgctgctgctgctgctgctgctgccaacattggccctgctcaggcagcagcggtcccaggatgccaggctgtcctggcttgctggcctccagcaccgagtggcatggggggccctggtctgggcagccacctggcagcggcggaggctggagcagagcacgctccatgtgcaccagagccagcagcaggccctgaggtggtgtctacagggagcccagcgcccccactgttccctcagaaggagcacagggtctcaccagtcttgcctgaaactcttgggaaactggcttcctgaggcgtttctgttgtcattggggctatagacataagcaccttccggaatcatctccctctgaccaaggccagccagacccagcaggaagacagtggagagcagccactgcccccgacctcaaaccaggaccttggggaggcctctctgcaggccaccttgctgggtctggcagccctaaacaaggcctacccagaagtgctggctcagggacgcactgcccgtgtgacgcttacatccccttggccccgacccctgccttggcctgggaataccctgggccaggtgggcacccctggaaccaaggaccctagggccctgctgctggacgcactgaggtccccagggctg

SEQ ID NO: 137014 - DNA, 561 bp, Homo sapiens
  Payload ID: 6822
  Gene Symbol: GHDC
  Gene Name: GH3 domain containing
  ENST ID: ENST00000590249
  CDS Start-End: 124-561
agccttttaaagccatcgctccttctttctggccggatgtgtgctgagacccagagtcacccaggggtctccgtcacgtgccaggagtaggcagaagtgggctgtgacaggagctgcttggagatgctgctgtggccactgctgctgctgctgctgctgctgccaacattggccctgctcaggcagcagcggtcccaggatgccaggctgtcctggcttgctggcctccagcaccgagtggcatggggggccctggtctgggcagccacctggcagcggcggaggctggagcagagcacgctccatgtgcaccagagccagcagcaggccctgaggtggtgtctacagggagcccagcgcccccactgttccctcagaaggagcacagacataagcaccttccggaatcatctccctctgaccaaggccagccagacccagcaggaagacagtggagagcagccactgcccccgacctcaaaccaggaccttggggaggcctctctgcaggccaccttgctgggtctggcagccctaaacaaggcctacccagaagtgctg

SEQ ID NO: 137015 - DNA, 2396 bp, Homo sapiens
  Payload ID: 6822
  Gene Symbol: GHDC
  Gene Name: GH3 domain containing
  Uniprot ID: Q8N2G8
  ENST ID: ENST00000587427
  CDS Start-End: 190-1782
ctccttctttctggccggatgtgtgctgagacccagagtcacccaggggtctccgtcacgtgccaggagtaggcagaagtgggctgtgacagatcaggaaacagagctcagtgcagcccactaaattgctcagggccctacagctaacaagcggcagaggcaggatctgcactcaggagctgcttggagatgctgctgtggccactgctgctgctgctgctgctgctgccaacattggccctgctcaggcagcagcggtcccaggatgccaggctgtcctggcttgctggcctccagcaccgagtggcatggggggccctggtctgggcagccacctggcagcggcggaggctggagcagagcacgctccatgtgcaccagagccagcagcaggccctgaggtggtgtctacagggagcccagcgcccccactgttccctcagaaggagcacagacataagcaccttccggaatcatctccctctgaccaaggccagccagacccagcaggaagacagtggagagcagccactgcccccgacctcaaaccaggaccttggggaggcctctctgcaggccaccttgctgggtctggcagccctaaacaaggcctacccagaagtgctggctcagggacgcactgcccgtgtgacgcttacatccccttggccccgacccctgccttggcctgggaataccctgggccaggtgggcacccctggaaccaaggaccctagggccctgctgctggacgcactgaggtccccagggctgagggcactggaggctgggacggctgtcgaacttctggatgttttcttgggcctggagactgatggtgaagagctagctggggcgatagctgccgggaaccctggagcgcctctccgtgaacgggcagctgagctccgggaggccctagagcaggggccacggggactggcccttcggctctggccaaagctgcaggtggtggtgactctggatgcaggaggccaggccgaggctgtggctgccctcggggccttgtggtgccaaggactagccttcttctctcctgcttatgctgcctcgggaggggtgctgggcctaaacctacagccagagcagccccatgggctctaccttctgccccctggggccccctttatcgagctgctcccagtcaaggaaggcacccaggaggaagctgcctccaccctccttttggccgaggcccagcagggcaaggagtatgagctggtgctgacggaccgcgccagcctcaccaggtgccgcctgggtgatgtggtgcgagtggttggtgcctacaatcagtgtccagtcgtcaggttcatctgcaggctggaccagaccctgagtgtgcgaggggaagatattggtgaagacctgttctctgaggccctgggccgggcagtggggcagtgggcgggggccaagctgctggaccatggctgtgtggagagcagcattctggattcctctgcgggctctgctccccactacgaggtgtttgtggcgctgagggggctgaggaatctgtcagaggaaaatcgagacaagctggaccactgccttcaggaagcctctccccgctacaagtccctgcggttctggggcagcgtgggccctgccagagtccacctggtggggcagggagccttccgagcactccgggcagccctcgctgcctgcccctcctcccccttcccccctgcgatgccccgggtccttcggcacaggcacctggcccagtgtctgcaggagagggtggtgtcctgagtcaagtcctgccccaccgcccagctccccccagaggccacctcgcccctccctctgggacctctccggatggggagtccttggccagggtctctgactctgtgtcacctgacatttgcccatgagagccgctgggccttagagaggccttggcccagctgaccggttctgaagtatgggcctccggggttagcagatgccagcagtgcctgcccgtgtccccatgtcccggcatgaaggacactgctagagagttaccatgcacaccgatggtttcctgtatcacagcccaaagaggttctctggtggccacagctgtgtgctcagtcagtgcactgggcaagctagaagtgttggggggttaatgtccccaggagcagcaaccctgagtcaataaggagcaggacctcagcttcattgtccttgagcaggacaattctgaagtgtattctacataaactctcagaggatgcccagcaggatggagtcccagttgcccgcagcagtaacccactcattcatgtacttcctgcgggggctctcccttccctctcttccccactcccccgccttgggcttcctgggatggctcccaaataaacctcttgcaccca

SEQ ID NO: 137016 - DNA, 559 bp, Homo sapiens
  Payload ID: 6822
  Gene Symbol: GHDC
  Gene Name: GH3 domain containing
  ENST ID: ENST00000588352
  CDS Start-End: 169-559
tcgctccttctttctggccggatgtgtgctgagacccagagtcacccaggggtctccgtcacgtgccaggaatcaggaaacagagctcagtgcagcccactaaattgctcagggccctacagctaacaagcggcagaggcaggatctgcactcaggagctgcttggagatgctgctgtggccactgctgctgctgctgctgctgctgccaacattggccctgctcaggcagcagcggtcccaggatgccaggctgtcctggcttgctggcctccagcaccgagtggcatggggggccctggtctgggcagccacctggcagcggcggaggctggagcagagcacgctccatgtgcaccagagccagcagcaggccctgaggtggtgtctacagggagcccagcgcccccactgttccctcagaaggagcacagacataagcaccttccggaatcatctccctctgaccaaggccagccagacccagcaggaagacagtggagagcagccactgcccccgacctcaaaccaggaccttggggaggcctctctgcaggcca

SEQ ID NO: 137017 - DNA, 1827 bp, Homo sapiens
  Payload ID: 6822
  Gene Symbol: GHDC
  Gene Name: GH3 domain containing
  ENST ID: ENST00000593209
  CDS Start-End: 165-1604
ctgagacccagagtcacccaggggtctccgtcacgtgccaggagtaggcagaagtgggctgtgacagatcaggaaacagagctcagtgcagcccactaaattgctcagggccctacagctaacaagcggcagaggcaggatctgcactcaggagctgcttggagatgctgctgtggccactgctgctgctgctgctgctgctgccaacattggccctgctcaggcagcagcggtcccaggatgccaggctgtcctggcttgctggcctccagcaccgagtggcatggggggccctggtctgggcagccacctggcagcggcggaggctggagcagagcacgctccatgtgcaccagagccagcagcaggccctgaggtggtgtctacagggagcccagcgcccccactgttccctcagaaggagcacagacataagcaccttccggaatcatctccctctgaccaaggccagccagacccagcaggaagacagtggagagcagccactgcccccgacctcaaaccaggaccttggggaggcctctctgcaggccaccttgctgggtctggcagccctaaacaaggcctacccagaagtgctggctcagggacgcactgcccgtgtgacgcttacatccccttggccccgacccctgccttggcctgggaataccctgggccaggtgggcacccctggaaccaaggaccctagggccctgctgctggacgcactgaggtccccagggctgagggcactggaggctgggacggctgtcgaacttctggatgttttcttgggcctggagactgatggtgaagagctagctggggcgatagctgccgggaaccctggagcgcctctccgtgaacgggcagctgagctccgggaggccctagagcaggggccacggggactggcccttcggctctggccaaagctgcaggtggtggtgactctggatgcaggaggccaggccgaggctgtggctgccctcggggccttgtggtgccaaggactagccttcttctctcctgcttatgctgcctcgggaggggtgctgggcctaaacctacagccagagcagccccatgggctctaccttctgccccctggggccccctttatcgagctgctcccagtcaaggaaggcacccaggaggaagctgcctccaccctccttttggccgaggcccagcagggcaaggagtatgagctggtgctgacggaccgcgccagcctcaccaggtgccgcctgggtgatgtggtgcgagtggttggtgcctacaatcagtgtccagtcgtcaggttcatctgcaggctggaccagaccctgagtgtgcgaggggaagatattggtgaagacctgttctctgaggccctgggccgggcagtggggcagtgggcgggggccaagctgctggaccatggctgtgtggagagcagcattctggattcctctgcgggctctgctccccactacgaggtgtttgtggcgctgagggggctgaggaatctgtcagaggaaaatcgagacaagattcttgcctcagggtctgctttggggaaacgggagtggaccccggcccagccattcccccactgagctccaggactttcccccaacattctgctctgggcctggcaaggctgcatgcgcacacaggagccttggaggactcgtggcacatcctaggccagcacccacaaaccacttctgcggtggggaagggagagctattacttcacatcataaggcatcgccgcaggaagcaactccggagaccatctgggttcactgttccatactaatgaggaaacgcagcctc

SEQ ID NO: 137018 - DNA, 1313 bp, Homo sapiens
  Payload ID: 6823
  Gene Symbol: GHRL
  Gene Name: ghrelin/obestatin prepropeptide
  Uniprot ID: Q9UBU3
  ENST ID: ENST00000287656
  CDS Start-End: 842-1192
gtggatgtttacttgctggtggtcttatctaagatcaacattggcagctgtgcccggagaggcctccagggtccaggtccaatgcacttccctctcagaagaggcatccgctaaaatagggaccaaagctgctggagggaggcaaggcaagctgctatgtgaaaaaacgccaggccaggcagtcatgtcacacctggcagaaatgactgaagcatagccactggctgaagttatccccacacccactctctggagaggatgatcaggagcagtctgctcaaccgggaggtgggactcctcctcgggaaggtgtagaatcaccagcctggctccctgcggactcccggggctcacagaggccagagcagcaacagcacatgggaaacaacggggcgctggactggggaggtctcagagctctcctagtgatgacagcctcattttacccagggagaaagggcgagtaagctaaggtcacacagcaacaaagctgcacccagaccccagagccactctcctccctccctcctccaccagggccatgcccacttggggcaccccgccaccgtgttccagggacagctggagcacatgcttcttccctcgccaacccagcaattccgcagggcatctgacctccactgttgacttctacccagaggacaagaacatttttagttcccaaggaatgtacatcagccccacggaagctaggccacctctgggatggggttgctggtttagaacaaacgccagtcatcctatataaggacctgacagccaccaggcaccacctccgccaggaactgcaggcccacctgtctgcaacccagctgaggccatgccctccccagggaccgtctgcagcctcctgctcctcggcatgctctggctggacttggccatggcaggctccagcttcctgagccctgaacaccagagagtccagagaaaggagtcgaagaagccaccagccaagctgcagccccgagctctagcaggctggctccgcccggaagatggaggtcaagcagaaggggcagaggatgaactggaagtccggttcaacgccccctttgatgttggaatcaagctgtcaggggttcagtaccagcagcacagccaggccctggggaagtttcttcaggacatcctctgggaagaggccaaagaggccccagccgacaagtgatcgcccacaagccttactcacctctctctaagtttagaagcgctcatctggcttttcgcttgcttctgcagcaactcccacgactgttgtacaagctcaggaggcgaataaatgttcaaac

SEQ ID NO: 137019 - DNA, 1425 bp, Homo sapiens
  Payload ID: 6823
  Gene Symbol: GHRL
  Gene Name: ghrelin/obestatin prepropeptide
  Uniprot ID: Q9UBU3
  ENST ID: ENST00000335542
  CDS Start-End: 872-1225
agttccccaaagataacacagctttgcacagtggatgtttacttgctggtggtcttatctaagatcaacattggcagctgtgcccggagaggcctccagggtccaggtccaatgcacttccctctcagaagaggcatccgctaaaatagggaccaaagctgctggagggaggcaaggcaagctgctatgtgaaaaaacgccaggccaggcagtcatgtcacacctggcagaaatgactgaagcatagccactggctgaagttatccccacacccactctctggagaggatgatcaggagcagtctgctcaaccgggaggtgggactcctcctcgggaaggtgtagaatcaccagcctggctccctgcggactcccggggctcacagaggccagagcagcaacagcacatgggaaacaacggggcgctggactggggaggtctcagagctctcctagtgatgacagcctcattttacccagggagaaagggcgagtaagctaaggtcacacagcaacaaagctgcacccagaccccagagccactctcctccctccctcctccaccagggccatgcccacttggggcaccccgccaccgtgttccagggacagctggagcacatgcttcttccctcgccaacccagcaattccgcagggcatctgacctccactgttgacttctacccagaggacaagaacatttttagttcccaaggaatgtacatcagccccacggaagctaggccacctctgggatggggttgctggtttagaacaaacgccagtcatcctatataaggacctgacagccaccaggcaccacctccgccaggaactgcaggcccacctgtctgcaacccagctgaggccatgccctccccagggaccgtctgcagcctcctgctcctcggcatgctctggctggacttggccatggcaggctccagcttcctgagccctgaacaccagagagtccagcagagaaaggagtcgaagaagccaccagccaagctgcagccccgagctctagcaggctggctccgcccggaagatggaggtcaagcagaaggggcagaggatgaactggaagtccggttcaacgccccctttgatgttggaatcaagctgtcaggggttcagtaccagcagcacagccaggccctggggaagtttcttcaggacatcctctgggaagaggccaaagaggccccagccgacaagtgatcgcccacaagccttactcacctctctctaagtttagaagcgctcatctggcttttcgcttgcttctgcagcaactcccacgactgttgtacaagctcaggaggcgaataaatgttcaaactgtatgctgatgttccaaatgggaatttatttcaaagaggaaaagttaatattttactttaaaaaaatcaaaataatac

SEQ ID NO: 137020 - DNA, 440 bp, Homo sapiens
  Payload ID: 6823
  Gene Symbol: GHRL
  Gene Name: ghrelin/obestatin prepropeptide
  Uniprot ID: Q9UBU3
  ENST ID: ENST00000449238
  CDS Start-End: 5-319
gtggatgtttacttgctggtggtcttatctaagatcaacattggcagctgtgcccggagaggcctccagggtccagagaaaggagtcgaagaagccaccagccaagctgcagccccgagctctagcaggctggctccgcccggaagatggaggtcaagcagaaggggcagaggatgaactggaagtccggttcaacgccccctttgatgttggaatcaagctgtcaggggttcagtaccagcagcacagccaggccctggggaagtttcttcaggacatcctctgggaagaggccaaagaggccccagccgacaagtgatcgcccacaagccttactcacctctctctaagtttagaagcgctcatctggcttttcgcttgcttctgcagcaactcccacgactgttgtacaagctcaggaggcgaataaatgttcaaac

SEQ ID NO: 137021 - DNA, 855 bp, Homo sapiens
  Payload ID: 6823
  Gene Symbol: GHRL
  Gene Name: ghrelin/obestatin prepropeptide
  Uniprot ID: Q9UBU3
  ENST ID: ENST00000457360
  CDS Start-End: 381-734
gtggatgtttacttgctggtggtcttatctaagatcaacattggcagctgtgcccggagaggcctccagggtccagggccatgcccacttggggcaccccgccaccgtgttccagggacagctggagcacatgcttcttccctcgccaacccagcaattccgcagggcatctgacctccactgttgacttctacccagaggacaagaacatttttagttcccaaggaatgtacatcagccccacggaagctaggccacctctgggatggggttgctggtttagaacaaacgccagtcatcctatataaggacctgacagccaccaggcaccacctccgccaggaactgcaggcccacctgtctgcaacccagctgaggccatgccctccccagggaccgtctgcagcctcctgctcctcggcatgctctggctggacttggccatggcaggctccagcttcctgagccctgaacaccagagagtccagcagagaaaggagtcgaagaagccaccagccaagctgcagccccgagctctagcaggctggctccgcccggaagatggaggtcaagcagaaggggcagaggatgaactggaagtccggttcaacgccccctttgatgttggaatcaagctgtcaggggttcagtaccagcagcacagccaggccctggggaagtttcttcaggacatcctctgggaagaggccaaagaggccccagccgacaagtgatcgcccacaagccttactcacctctctctaagtttagaagcgctcatctggcttttcgcttgcttctgcagcaactcccacgactgttgtacaagctcaggaggcgaataaatgttcaaac

SEQ ID NO: 137022 - DNA, 217 bp, Homo sapiens
  Payload ID: 6823
  Gene Symbol: GHRL
  Gene Name: ghrelin/obestatin prepropeptide
  ENST ID: ENST00000446937
  CDS Start-End: 5-127
gtggatgtttacttgctggtggtcttatctaagatcaacattggcagctgtgcccggagaggcctccagggtccagaggccccagccgacaagtgatcgcccacaagccttactcacctctctctaagtttagaagcgctcatctggcttttcgcttgcttctgcagcaactcccacgactgttgtacaagctcaggaggcgaataaatgttcaaac

SEQ ID NO: 137023 - DNA, 856 bp, Homo sapiens
  Payload ID: 6823
  Gene Symbol: GHRL
  Gene Name: ghrelin/obestatin prepropeptide
  Uniprot ID: Q9UBU3
  ENST ID: ENST00000430179
  CDS Start-End: 381-731
gtggatgtttacttgctggtggtcttatctaagatcaacattggcagctgtgcccggagaggcctccagggtccagggccatgcccacttggggcaccccgccaccgtgttccagggacagctggagcacatgcttcttccctcgccaacccagcaattccgcagggcatctgacctccactgttgacttctacccagaggacaagaacatttttagttcccaaggaatgtacatcagccccacggaagctaggccacctctgggatggggttgctggtttagaacaaacgccagtcatcctatataaggacctgacagccaccaggcaccacctccgccaggaactgcaggcccacctgtctgcaacccagctgaggccatgccctccccagggaccgtctgcagcctcctgctcctcggcatgctctggctggacttggccatggcaggctccagcttcctgagccctgaacaccagagagtccagagaaaggagtcgaagaagccaccagccaagctgcagccccgagctctagcaggctggctccgcccggaagatggaggtcaagcagaaggggcagaggatgaactggaagtccggttcaacgccccctttgatgttggaatcaagctgtcaggggttcagtaccagcagcacagccaggccctggggaagtttcttcaggacatcctctgggaagaggccaaagaggccccagccgacaagtgatcgcccacaagccttactcacctctctctaagtttagaagcgctcatctggcttttcgcttgcttctgcagcaactcccacgactgttgtacaagctcaggaggcgaataaatgttcaaactgta

SEQ ID NO: 137024 - DNA, 326 bp, Homo sapiens
  Payload ID: 6823
  Gene Symbol: GHRL
  Gene Name: ghrelin/obestatin prepropeptide
  Uniprot ID: Q9UBU3
  ENST ID: ENST00000439975
  CDS Start-End: 5-205
gtggatgtttacttgctggtggtcttatctaagatcaacattggcagctgtgcccggagaggcctccagggtccagttcaacgccccctttgatgttggaatcaagctgtcaggggttcagtaccagcagcacagccaggccctggggaagtttcttcaggacatcctctgggaagaggccaaagaggccccagccgacaagtgatcgcccacaagccttactcacctctctctaagtttagaagcgctcatctggcttttcgcttgcttctgcagcaactcccacgactgttgtacaagctcaggaggcgaataaatgttcaaac

SEQ ID NO: 137025 - DNA, 227 bp, Homo sapiens
  Payload ID: 6823
  Gene Symbol: GHRL
  Gene Name: ghrelin/obestatin prepropeptide
  ENST ID: ENST00000425479
  CDS Start-End: 127-227
aagataacacagctttgcacagtggatgtttacttgctggtggtcttatctaagatcaacattggcagctgtgcccggagaggcctccagggtccaggcccacctgtctgcaacccagctgaggccatgccctccccagggaccgtctgcagcctcctgctcctcggcatgctctggctggacttggccatggcaggctccagcttcctgagccctgaacaccagag

SEQ ID NO: 137026 - DNA, 401 bp, Homo sapiens
  Payload ID: 6823
  Gene Symbol: GHRL
  Gene Name: ghrelin/obestatin prepropeptide
  Uniprot ID: Q9UBU3
  ENST ID: ENST00000422159
  CDS Start-End: 33-308
caggcccacctgtctgcaacccagctgaggccatgccctccccagggaccgtctgcagcctcctgctcctcggcatgctctggctggacttggccatggcaggctccagcttcctgagccctgaacaccagagagtccagcagagaaaggagtcgaagaagccaccagccaagctgcagccccgagctctagcaggctggctccgcccggaagatggaggtcaagcagaaggggcagaggatgaactggaagtccggaggccccagccgacaagtgatcgcccacaagccttactcacctctctctaagtttagaagcgctcatctggcttttcgcttgcttctgcagcaactcccacgactgttgtacaagctcaggaggcgaataaatgttcaaactgt

SEQ ID NO: 137027 - DNA, 793 bp, Homo sapiens
  Payload ID: 6823
  Gene Symbol: GHRL
  Gene Name: ghrelin/obestatin prepropeptide
  Uniprot ID: Q9UBU3
  ENST ID: ENST00000429122
  CDS Start-End: 319-672
aacacagctttgcacagtggatgtttacttgctggtggtcttatctaagatcaacattggcagctgtgcccggagaggcctccagggtccagcaattccgcagggcatctgacctccactgttgacttctacccagaggacaagaacatttttagttcccaaggaatgtacatcagccccacggaagctaggccacctctgggatggggttgctggtttagaacaaacgccagtcatcctatataaggacctgacagccaccaggcaccacctccgccaggaactgcaggcccacctgtctgcaacccagctgaggccatgccctccccagggaccgtctgcagcctcctgctcctcggcatgctctggctggacttggccatggcaggctccagcttcctgagccctgaacaccagagagtccagcagagaaaggagtcgaagaagccaccagccaagctgcagccccgagctctagcaggctggctccgcccggaagatggaggtcaagcagaaggggcagaggatgaactggaagtccggttcaacgccccctttgatgttggaatcaagctgtcaggggttcagtaccagcagcacagccaggccctggggaagtttcttcaggacatcctctgggaagaggccaaagaggccccagccgacaagtgatcgcccacaagccttactcacctctctctaagtttagaagcgctcatctggcttttcgcttgcttctgcagcaactcccacgactgttgtacaagctcaggaggcgaataaatgttcaaac

SEQ ID NO: 137028 - DNA, 443 bp, Homo sapiens
  Payload ID: 6823
  Gene Symbol: GHRL
  Gene Name: ghrelin/obestatin prepropeptide
  Uniprot ID: Q9UBU3
  ENST ID: ENST00000437422
  CDS Start-End: 5-322
gtggatgtttacttgctggtggtcttatctaagatcaacattggcagctgtgcccggagaggcctccagggtccagcagagaaaggagtcgaagaagccaccagccaagctgcagccccgagctctagcaggctggctccgcccggaagatggaggtcaagcagaaggggcagaggatgaactggaagtccggttcaacgccccctttgatgttggaatcaagctgtcaggggttcagtaccagcagcacagccaggccctggggaagtttcttcaggacatcctctgggaagaggccaaagaggccccagccgacaagtgatcgcccacaagccttactcacctctctctaagtttagaagcgctcatctggcttttcgcttgcttctgcagcaactcccacgactgttgtacaagctcaggaggcgaataaatgttcaaac

SEQ ID NO: 137029 - DNA, 4237 bp, Homo sapiens
  Payload ID: 6824
  Gene Symbol: GID4
  Gene Name: GID complex subunit 4 homolog
  Uniprot ID: Q8IVV7
  ENST ID: ENST00000268719
  CDS Start-End: 174-1076
agcgggccgctcgcgcaccgcgccacgtgttttctcctcccgccaatgggcggaagcgccgcctgagcctgctcccgccccccaggctcgcctgagccaatcggaaggggcggggtgtgtgtgtgtctgtgtgtgtttgtgtgttgtgtgtctgtgagtgtctgtgtgtgtgtatgtgtgcgcgagggcaagtcgggagggggacccagctcaggactgggaggccctgctcgcaggtccctgggtcccggtggcggccggagcgcttgctccgcaggcagcgggcgggtggtcgcccctcccgcccccaccccgcgcgtgcgcgccccggcctctccctccccgccaccctcctcggctcccgcgcggcggcggcggttcctctcccactccccccagccctggctccgggggaccccgcgatgccggtccgcaccgagtgtcccccgccggccggtgcctccgctgcctccgcggcctcactcatcccgccgccgcccatcaacacccagcagcccggcgtggccaccagcctgctctacagcggctccaagttccgcggccaccagaagagcaaggggaactcgtacgacgtagaggtggtgctgcagcacgtggacacggggaactcttacctttgtgggtacttgaagattaaaggccttactgaggagtatccaacccttacaaccttcttcgaaggagaaataatcagcaaaaaacaccctttcttaactcgcaagtgggatgcagatgaagatgttgatcggaaacactggggcaagtttctggctttttatcagtatgcaaaatcatttaactcagatgactttgattatgaagagctgaagaatggagactacgtcttcatgaggtggaaggaacagtttctggtcccagatcacacgatcaaagacatcagtggtgcttcttttgccgggttctactacatctgctttcagaagtcagcagcctccatagagggctactactaccataggagttcagaatggtatcagtccctcaatctaacccatgttcctgaacacagtgcacccatctatgaattccggtgacaacggttcagaacagcaaccaaataaaactgaacttggcaaaaaagaactttgccgagaaaattgtgtacctgccagaaccaggagaagtgtgttcctgtttcttcacgagcagactcgcatcacaaagcatgaatgttaacccacagaatccaaggagcatggctggcccgtggggcaggtggagggagcagtcttcgttcttcctcccctcagtggcagtttggtcttcacctgtttttaagctaccttaaacgcacttttccttcctgcacagctaacttctacatcactgaaatgcccattccttcctccgtcccacctccagccgaatagaaggtctgctcccggatcaccctcagccttggtgctcagtggtcccgaggccctagacccccaccccccgccagttgctttgtctggtagctcaagagaaggcagagccccagcacctctgtgccccccagagctctgtgcagggagttggccagctgccgcatcatcggccaccaagggcacaagaggcggaggctccagtccctgctgggctgcctcagtcttcagtgctgattgtgtcacgggtcagcgtgcgctgctgagccctgtactgttaacagtgcaaagctagtgagtagctgtcaggttccctgggcctgccatcagggatcactaaatttaaggcttccagatccctggcaggaacagattccagtcctgcttactcagtacatttgctccaaacttttcaacttgagggcaatactaaacttaaaaataagagtttttttattacaaaattatttttatggtccctttaacgaggaccctatggcaaatgcacaattattcagaattacattttatcgttttcacattgaaaacagcaaatgttgacttagtaatttttatatcgatatctatatgtatatgtatatttaatcaaccagcagttttgaaactagtcatcctggtacaaaagttttgcagcattgcctaaattatagtgctcaacacaagaactgtttttggggccagtttagcatttgtgccgcctccttttgctactcaaaacagcaatgcttggcggcagccttccatgaggcagaaggggtcgtcgttctctgaaaacagtgactctgaaatgttgggacaggggaaggggtgggaaacatgaacatgctcaaataactcgaggctcacgtgccaaagtgtgtgtgtgtgtgtgtgtgtgtgtgtgtgtgtatgatgttttgtttttttaaatgttttaaaagcttaataggttggcatcagttgtagcccacaaacatggctagggctttggggatttggcatttttctggtggtttacaagacttactccgaatacaagaggaaaagctttaaaaacaagattgcatcataacccccaggagcaaagcaacctggaggctgcatatccatgggcgggcagcataagagaatgtgaagcccttcagtgagacgagacgagcaatgggaaaccttttctgttcttaagaagtgactttaattttattgacatatgtactgtatgttactgagattgaatgttaggggaagccttaaggtagaggtatttgggaaagtagccagtgggcacttgtgatatctaaaatctgttatcccaggactgtgtacagaggggcaacctacccattcaggaaggtcagggctttggaaccctaaaaagttggcccgatgacttaaagggaaaaataattcattcccagagatgagtcagaacagtctcctcaatcctgaaattcaacaaggcatcagaagggctggctgtggtcaagcccagctgctgtcatgtgaggagatgctcactgtggtcttgttgagctgatggccttggttgagctgatggacaagtgaaggaggccatggggctgtgctgtccttcctgccgtacgtgccattccactctcttcagctctcccctcaacagcatgcgagcccataccttctgcatttttccaggcctgtgagggatataggcctccccttggagcactgagtccggaggtcatccctgagctcatccacggctcatgctgtggctccgagtagtggtttgagtgggcaggaagggccatttgcaaacactgctgtgttctagacaaacaacccaagtcctatggcaggatttcttccttccttccttttttacccaggtgatgaagtgcacccattgtactgggaagaatgaagaggtgatacctttactagatccttcagacacatctatgagaagatttgttcatttaaaagtctgcccactgaggatagggaaaggattaaggatttttccacctcctcttagtaactcctgaattaccaacatcaacttctttctctccgttcctgaaggaactttggggaatcatcttcatccgtagttacgctttcctgaaccttctcagtggtttacatgcctctgaaactatgtgcaatatttttggttgacacttgtatccatccttaagaaattagtgcagattgcagatgttctgtcttccatcccaaacaagcctgccatgaggtaggatcctaggggtttggctgttcttactccactgctcagaaagcttccattctgctgtcctcagcctcgaccctcttctgtgctggacttccacccacccacccttttcaagtttagatagtgtttcagctgctgtcccaaagtaacaaaacaatacctactgttaagtaggaagtcaatctgtgtgctggttttgttggttatgtggaaatcacaaactccagaggagcaaaggggtttttcaatgtcttttgctttcagaaacagagaatataatattctcactaaggccttgaattgatttttttctcataaaatagtctgataagctaatttttaaaaagaaatgccattaactgtgttgtatcgtggtttaaaattactaacaagttgtgggaaagaaaaataatatttgattttgaatcttaaatgtttttaaaaattagacttgaatgggcacaaagtataaatattttgtttctttatggaggacatgtggaaggagtttgagggtttgggatgggagaagtattttgcagagctatcaatgtccaaataatttaaaaaaaaaaataaaggtatttaagcagtg

SEQ ID NO: 137030 - DNA, 1391 bp, Homo sapiens
  Payload ID: 6824
  Gene Symbol: GID4
  Gene Name: GID complex subunit 4 homolog
  ENST ID: ENST00000376345
  CDS Start-End: 21-950
gtgagtgtctgtgtgtgtgtatgtgtgcgcgagggcaagtcgggagggggacccagctcaggactgggaggccctgctcgcaggtccctgggtcccggtggcggccggagcgcttgctccgcaggcagcgggcgggtggtcgcccctcccgcccccaccccgcgcgtgcgcgccccggcctctccctccccgccaccctcctcggctcccgcgcggcggcggcggttcctctcccactccccccagccctggctccgggggaccccgcgatgccggtccgcaccgagtgtcccccgccggccggtgcctccgctgcctccgcggcctcactcatcccgccgccgcccatcaacacccagcagcccggcgtggccaccagcctgctctacagcggctccaagttccgcggccaccagaagagcaaggggaactcgtacgacgtagaggtggtgctgcagcacgtggacacggggaactcttacctttgtgggtacttgaagattaaaggccttactgaggagtatccaacccttacaaccttcttcgaaggagaaataatcagcaaaaaacaccctttcttaactcgcaagtgggatgcagatgaagatgttgatcggaaacactggaacattggaagatatctggatctgcagactctgctagactggactgaaacattttgggtgagagaggaactaagaaggccacccttggtactggcatgtgaggtgtggttgagccagggagctgaacctatggagtgcttcctcctccaacagtttgtggctgcttttgtagtactcagcatttcccctaactttcaccactcatggaggactcccaggttcccacgtgggactcctggagctctgtactgcacctgggtttgtctgagatttacaatgtctaatacacttcacctaggctgtcattttttcattataaactagaatcagagatattgtattgcatcctcagattttcctgagtggtatttaagttgctattatagtggtactataaagtcaggattccatatattcagtctacataggataaaaatgtctatgtgacaccaggtgtggtggctcatgcctgtaatgccagcactttgggaggccgaggcagatggatcacctgaggtcaggagttcgagaacagcctggccaacatggtgaaaccccatctctaccaaaaatataaaaattaaccaggcatggtggcacacacctgtaatcccagctattcgggaggctgaggcaggagagtcacttgaacctgggaggcggagattgcagtgagctgagatcatgccattgcactccagcctgagcaacaagagcaagactttgtctcaaaaaataataataaaataaatctatgtgacaaaa

SEQ ID NO: 137031 - DNA, 540 bp, Homo sapiens
  Payload ID: 6824
  Gene Symbol: GID4
  Gene Name: GID complex subunit 4 homolog
  ENST ID: ENST00000459843
  CDS Start-End: 1-336
acccttacaaccttcttcgaaggagaaataatcagcaaaaaacaccctttcttaactcgcaagtgggatgcagatgaagatgttgatcggaaacactggggcaagtttctggctttttatcagtatgcaaaatcatttaactcagatgactttgattatgaagagctgaagaatggagactacgtcttcatgaggtggaaggaacagtttctggtcccagatcacacgatcaaagacatcagtggtgcttcttttgccgggttctactacatctgctttcagaagtcagcagcctccatagagggctactactaccataggagttcagaatggtgaggacctctgaggacagaggccacggggagggcttgctgcccagctggctctcccttggctcatcaaacccaaaagcaacatcttagcctgtctctgtatagattctgtgctttatttggatgctgagagcttatttcagtgatctcagttgctcacaataaggccttatccctatgcacagagcagagtaaatgagatgaaaat

SEQ ID NO: 137032 - DNA, 481 bp, Homo sapiens
  Payload ID: 6824
  Gene Symbol: GID4
  Gene Name: GID complex subunit 4 homolog
  ENST ID: ENST00000481836
  CDS Start-End: 1-441
ttcttcgaaggagaaataatcagcaaaaaacaccctttcttaactcgcaagtgggatgcagatgaagatgttgatcggaaacactggaacattggaagatatctggatctgcagactctgctagactggactgaaacattttggggcaagtttctggctttttatcagtatgcaaaatcatttaactcagatgactttgattatgaagagctgaagaatggagactacgtcttcatgaggtggaaggaacagtttctggtcccagatcacacgatcaaagacatcagtggtgcttcttttgccgggttctactacatctgctttcagaagtcagcagcctccatagagggctactactaccataggagttcagaatggtatcagtccctcaatctaacccatgttcctgaacacagtgcacccatctatgaattccggtgacaacggttcagaacagcaaccaaataaaactgaacttggc

SEQ ID NO: 137033 - DNA, 4397 bp, Homo sapiens
  Payload ID: 6825
  Gene Symbol: GID8
  Gene Name: GID complex subunit 8
  Uniprot ID: Q9NWU2
  ENST ID: ENST00000266069
  CDS Start-End: 148-834
ccgcctccgccgcggcccccacctctgcctccttctactcgggcgccccggcggccgccacctctccccagcccaggagaggctgcggagccgcagccgcccagaccgcgcagcgcgggaggcaggttccgcacgaaataaatcagaatgagttatgcagaaaaacccgatgaaatcacgaaagatgagtggatggaaaagctcaataacttgcatgtccagagagcagacatgaaccgcctcatcatgaactacctggtcacagagggctttaaggaagcagcggagaagtttcgaatggaatctggaatcgaacctagtgtggatctggaaacacttgatgaacgaatcaagatccgggagatgatactgaaaggtcagattcaggaggccatcgccttgatcaacagcctccacccagagctcttggacacaaaccggtatctttacttccatttgcagcaacagcatttgatcgagctgatccgccagcgggagacagaggcggcgctggagtttgcacagactcagctggcggagcagggcgaggagagccgagagtgcctcacagagatggagcgtaccctggcactgctggcctttgacagtcccgaggagtcgcccttcggagacctcctccacaccatgcagaggcagaaggtgtggagtgaagttaaccaagctgtgctagattatgaaaatcgcgagtcaacacccaaactggcaaaattactgaaactactactttgggctcagaacgagctggaccagaagaaagtaaaatatcccaaaatgacagacctcagcaagggtgtgattgaggagcccaagtagcgcctgcgcttgcgtggtggatccaacaccagccctgcgtcgtgggacttgcctcagatcagcctgcgactgcaagattcttactgcagtagagaactctttttctcccttgtacttttttttgacctggcatctttttatagggaaaaatggcctttgtaggcagtggaaaacttgcaaggaaagctgccgtctctttggcagtctgatgcagagcctgcactctggcactcgctgaagaatctggaaggttgcggtttgctcttccagtgttcgggggcctctggctgctgaaggattcggtctaccacggagggctgtgctgttaggctgcatcccactcaaaatacaggaaaagcacgaatcatgattctgctttctgttagcttaggcagacattgggccttcacctacaagtttttccttacccctgtggtttttgtgtttttttttttttctttttccataggaaagaatatataaatttgtaaatcctaattcaaagatggctcatgtgtgagggcattgagtttgatttgttttccctttggtctgggttgtgtggcttttgggggatgcgtgtgagggggctatgtgttttttaattttttaaatatatattttggtgctgtgtgtggtaagagacttgttcctagtggatcaatgaaccatctcttctgggcagttttgttgaaaataaaggtttctctttgatttcaagaatgaccaaaatggcctctaaaagatgttaatcatctcaaatgaccttttgtctttggggcgttcttccccctgtgatagcggcagtggctttttctggtacctgcagctggaaaggccacttggccctgtgctgagtgagcggccttcattagagcgaggcagcccttggccggtggggacgcagagccccagcaggtggtgcacgactgttggcggaaggaacgcgtgttcatcctcagtgatctgccctccagcatctcggcagcatctcatcctccatcgtcagctggctctgccgatgtcctgcttctgttcactcacagaactgtcccctgctccgtggtgggcaggagggaagtggtgcagggctgcgtgcattgcctgcgagtcgggacagttgatgggcacatggccttgtagctctgggcacagatgtgtttggattcattgcagcggaccaccgggcactgttgaccccactgagcagtgctaagtgttggtttagtggatgttcgtggaattgctgacccatccaagggcgtcctttggagccagtggagcctgccggcgcatctgaggggcagaatgctgctagcacttgaatctgggatctcgccttattctcaagtagcaaggcatctcgacaagcatggtctaggtctggtggccagcttgccagtacctgagccggtcgggtcatctgcctctgagggaccgtcctcaccgagctcctgcatcccttgagtgttgatcaggaggcgtccacagcattgttctcgcctctgaatgatgcttctttctgtgttggagcctggcgaagttgtgttttcaagccctctacttctctttccagtgggtaggagcttttggcagtgtttactttacctagatggcttatataatccagtaagagatgcaaagataaaattgctgcggttgttacagaagcatggcggcctccagactgacccattggttgccctttagattttgtaaggatgcggtgctggggaggtggtgcttccctaccccctagaaatgctgccttccaactaccactctcccagatgtgacccttgcgattatttcctctgaggtttgaggatgaagataagttggagggaaagagagtaactaataggggatgaaatatagcagaagctagaagaaagcggtgaggtgagagagatgcatctgcacgttttcttcaacagcaccaggtgattcagcatattcctaattacctttcactattcgtgtatataagatcgtttacttgcataatatatcatcaatttgacatattcttaaaactagagggtgtgagaagcacagcaataggaagtctctccacaaactaggggaacacaaatggggtcattcacgtgcctggactgtcactatgtggctgtcacgtgaagtgctggtgttgatttccatttcagccagtgggtagctgataagccagtgccagcatccagcatgagcagatgtcggggagactgggaagtctccagcgttactgctctccttcccttcatgataagccagtgccagcatccagcgtgagcagacgtcggggagactgggaagtctccgatgttactgcctgccttcctttcgtgtgaggggctgcacttgcttttcttgtgatctgttagtggacgaggtcttccaaggaagtgctttgcacactttctttgctcctttttacagtctttgtctttgcagcaagcaaatgaaattaagccactttgggataatgaacattcagtataattctactttgtctcattttggatctcactgttgtctttataaaaatggcacattttacaaagtagtttattcttattatactttctgctggagagtgccttgaaataaaatgtgagagtattctggtactctgtgttccagatgcatgaaattgggtgaggaataacccctagtctggaatctttgtgaagcatagggttattgcaaggcaaatgggaactaacacatcttgccatttgaatcagggtctccagtttctagaaaaggcagacactggttgggaccaaagtctccatggcacatgactgaagactggtggtcgtgtgtgtgcggagtccacggaagcctcggggaggtggagctgctccttccattccgtcaggacgtgatctgaaaacatgtagagaagatgagttgaggacagcttttctaaggcaatgtgatgtctttgctttcttatttctctttctctgcgttgttagttttgaagagtggaggagctaggggctccagaaagaatcttacacatgtgttgaagacattgatgtcatagggagcggggagctgcattcccttctgggctgttactgctaaatctcagtatgaacagaccaggcggaaagcttggtggccaagcagtctgtgtgcttccccgctgatggagaacgttgcgttgttcacaatagggcctcatgggtgtagccgcatggcagacccatggctggcgcagctgcctgttgccgtctgtcttcagtaactgctgctctgttaactgttctattctgatactacgcgtgttgttttttacaacaggtatgtttttgtttcagaaatatgtattgcttttctcatattttttgcaaattgtattgtcaacatgggtcatttaaagtcctgtatgaaccataacctgctgtggtacctttgtacatgtttgattctgtattctttattccagtgtggcatatgtgcccctctgtatcttttgagaagtgcggaataggttgcttctaccacctgttcttaatgtaacagtaaaagttttcacatttttctcagaa

SEQ ID NO: 137034 - DNA, 15244 bp, Homo sapiens
  Payload ID: 6826
  Gene Symbol: GAN
  Gene Name: gigaxonin
  Uniprot ID: Q9H2C0
  ENST ID: ENST00000568107
  CDS Start-End: 163-1956
agcgcgccgcggatagcacaggcacgtcccgggggctccagcttctgctcagagcgcggagagccgggccgggcgggcgcgcgcgcaggactcgggccgctcgaggggtccggccggacggtgtcgggagccggacccgtcggcagaggagcgggcgccgcgatggctgagggcagtgccgtgtctgaccctcagcacgccgcgcgtctgctgcgagcgctcagctctttccgcgaggagtctcgcttctgcgacgcgcacctggtcctcgacggggaggagatcccggtgcagaagaacatcctggcggcggccagcccgtacatcaggacaaagttaaactataatcctccaaaagatgatggatcaacttataagattgaacttgaagggatatcggtaatggttatgagagagatcctggattacatcttcagtgggcagatcaggctaaatgaagatacaatccaagatgttgttcaggcagctgacctgctgctactgacggaccttaaaaccctgtgctgtgagtttttggaaggctgcattgctgctgagaactgtattggtatccgtgactttgcactacattactgcctccatcacgttcattaccttgccacagaatacctggagactcatttccgagacgtcagcagcacggaagaattcttagagctgagtcctcaaaagcttaaagaagtgatttctcttgagaagttaaacgttggcaatgaaagatatgtctttgaagcagtaattcgatggatagcacatgatacagaaataagaaaggtccacatgaaggatgttatgtcagctctgtgggtttcagggttggactccagttatttacgggaacagatgctgaatgaaccattagtacgagaaattgtcaaagagtgtagcaatataccgctcagccagccgcagcaaggggaggcgatgctggccaacttcaaaccccggggctactctgagtgcatcgtgactgttggtggagaagagagagtttcacggaaacccacagcagcgatgcgatgcatgtgccctctctatgaccctaacaggcagctttggatcgaactggcccctttaagcatgccgagaattaaccatggagttctctcagcagaaggatttttgtttgtattcgggggccaagatgaaaataagcagactcttagctcaggagaaaagtatgatccagatgcaaatacatggacagcattgccacctatgaacgaggcaagacataacttcggaattgtggagatagatgggatgctgtacattttgggaggagaggatggtgaaaaggagctgatttccatggagtgttacgatatttattctaaaacctggacaaagcaacctgatttgaccatggtcagaaagatcggctgctatgcagctatgaaaaagaaaatctacgccatgggtggaggctcctacggaaagctttttgagtctgtagagtgttatgatcccaggacccagcagtggactgccatatgtccactaaaagagaggaggtttggagcggtggcctgtggagttgctatggagctgtatgtgtttgggggagtccgaagtcgtgaggacgcccagggtagcgagatggtaacttgcaagtccgagttctaccatgatgagtttaaaaggtggatctatcttaacgaccagaatttatgcatccccgccagttcctcttttgtttatggagctgtacctataggagccagtatttatgttattggagatcttgatacaggtaccaattacgactacgtgcgtgagtttaaaagaagcacaggaacctggcaccacactaaaccactccttccatccgaccttcgccgtacaggatgtgcagccttacgcattgcgaattgcaagcttttccgcctgcagcttcagcaaggcttattccgtattcgtgttcattccccttgaggaggaagcagagcagagtgcgagatcctgacccaagagcaccataacatagctccgaaagggagagcagagatggcagctgaaactcactctgtgctgggctttggtatggtaactctttggtggttttatgatgcttacaaacttgagctttagctcttgtttgggagaacacgtaactgttgaaaaactacctgggaggagtgagttcctccagttaaatgtggctgtagatgttggaggctagggaggctagtaaatatcaaaaggaaaagggagtgggaattgctatcatgtaaaatatcaaagttaaaatactaaggtgcattttccctgaagggaactcatgtctgactgctgtattcaaatacgtagctttggtaacaaacaaaatccgtatatgcaaatcaacatatccaaacatgccaagactgcttttccactgcacttggaaggatatattatgcctaaccctgcccaacaaattaaggtttgtgcctaaaatgttagattggactgtatgccagttagtctccatttattcctagtactctgtcctaagaatctttttaaaactatatcatgatgaattgaaatgaagataaaattgctcttttgtaactttatcttagtaatgtaaagattcagtaaattgatgagtcaggttgcagccctcatgtgaactgaaagaagttgctcgcttctgtgttgacttagatcaagacacgtcacgcatcctttctggggtagtacctgtggagccgggaagggtctcctgcagtgccattctgccttctcaatgagcaaaaccattttctaagtatgaggatattagtgagtaggagattttataaaagaaagacctgagtcagacaaataataaaggtctgctgtggctaaaaaagcaaaaacaaaaaagctatccagacaaaatacatagggatcagaaactttttcatataacctgtctgaaagcacacaaagtcttgtttactactgtttagggtttgaaaacttgtcttagaatgcgaatctgtgttaagaatctagtctttgtaatagaagtttcccagtggcattcactagtgagagttttagacaaattatgttacgagtaaagtttggctggtagaataaactacctcaacttaatttcattctgttcatagtagagcaaattaatcttttcctccttccctcctttcctatctctcattctcacctcaacccactttaccccacttctcattgggggaaaaatgtctttcgttcgtggaacgtatcttgtaagatattttgttttccacttgaattacaccaccctagtgtgaaatcggggacttcaaagtgcttgattccttcctaaattgaattttatgcaatgtcaaatttctaatcaatttaatatacagtacttcatttttaattgttttctaaaaaaaaggttttttttttccttttggaatatggctgtaagaagcagcattttgtcttattaacacatgtataaaggtatcctttggttttaagtcgagaacaggaatttcttctagaaacttcctgtatggaacgtttatatgcaattaacatgcatatgaaaaacatcacttacgttctcccacccatagacataaaaaagggtgacctgtgattttttttcttatacctgctggaagtcagtacaatgcgtcaaaagttgctgaaagatgctgtgcctatggggttctagagagtgttgagtgtggtacattaactctccattttagccagaagatacctgataagagaaggtgtaaggtttttatcttatatgccagaggcaccaggccagatgtgccgcacagtcatgtaattcaatcatgtttaatatgtcagtcaaaaccaaattcagaattgttttgtgtaccagtcagctgttgtctgcacattttcgtagtgacagtgtggagatctttttaatgaaagcaaactatgtggcctctgcaaagaaaggaagatttttctttttacaactagatattagttttagaggaaggaaatagctgaaaaactaaatttgctttggtgaaatgtcctgtacagaacagtaccttggcattcagcagctgtaattggggaacattaaaacagtaactgacatccagttaaagccacgatcgtcagcaattctccttttttaatttctgatatttaaagttttttttccagtctacaccaggcctctccaaggagacagttcattatttaggagtgaatgtgttcctcttgcaatattatcagtacctgcatgacttggtaaattcattttataaaaatagtgttttttttttttaatttcagttcattgactctataactgcagaaattagataatgttttataaaataaatttgccacataatatgggatgcaataaccaacaaagctgctaagtgccaaactgttattttactatatataaatattaaaatattgtgttgaagtatagggatgtatttaattttactatgctccaacattaatcatgactcttttgtaaattacagttatttcagtattgtaaaataaatgttgactcatttcatgcaggtttgtgttttaacattccacttatgccttgaaacatcatttcttgataactttttgatacttctttcttgataaggcacttttaccaggtgtgtgttggaattggtggctcaggataggtcttaaattttaaatacaaatatctttgggggaagtgcaatttattttcagaaggaaagttgtctcaggttagaataagtaaatatttaaagaacctctcctaggctgcagtctaaaataggtagtttgtttctttgtttagcatatccaaatttagatttttcaaagatttaagtgtttattgaaagtgttttttgttttgtttttgatagtgcttatatcctgtgaatagaaaaagtgtgagagatgaatgagtgagttgtacgtgtgtgtgtgatgctatttgacctgataaatgtatttgtgtttactttttgaattgtagttctaaactacatatattactgtctcctggtgcttcagataaattcttgagcctgttgaccttcagtttatactactgtgtcgaactcatattgagtgtaaatattgaaatatttgtagtttatagtaagttttacttggtgttcgcgtttctcttcttcagcaggattaaaaacagtgtttaccaactcgtagttggtatactgtcaggatttggcctaagaaatttctgaatgcattgtttagcttagtacttcattgctgtaaggaattgatagctaactgtaggcttttttcaaactgtataacaaccaaaaaggagcatttgggggtatgttggatggtgttttgtttgtaaacactttgttatattgcactaccactttaatgatgacacttccttcattgatggcttggaagtgtcatttttataatttatgagttggggggattccctagtcaatgcataggaaatacattctttgtacaaacgtggtaaagagaggactggctttgctatggcacctaagttactcatgggtagttaagtttcatttctagagaaatgtcttagctgctgtggtccattagagttccctttggtacattcctacctcagtgtaccaaaccagggattccaaaaaccttccaaggagtgctagaaacaccgcagtatccccttccagaatgttggcgttcatgattcaagaggcctcccgtggtcagatgaagacctttggttaaatgggggaagaatgaggtggcgctttgactgtatcaatttaaagatgccggaaccccgttaaaaacacctggtggaagggaaaggtgaggcggcccttttccactggctgctcactgagcactggagtccaggaagtcagtgagaagagagcagctgagtgtagcaaaacccgccttgggtcagccaacacatgtctgatgagcacccactaggaactgtgcttgccatcctgggagctgaacagtgaggcagaggtcacaccactctcctactcaaggtcataaacccactatggaacgggcaagggccccgtctttgtcatctgccagtctcagtgcttgcacagagtaggtaggcaataaacatttgacaaataaatataagattcttgtgatcaaagtaatgttcttctgttgaaaagggcactccaagagtgactgattttactgggttttcagtgagaaactttgtacccatatgggctggcctcctatacggagctgaaactagcatgggccggcctcctatatggagctgaaactagtatagcataaacaatgccaagtgcctgatgtacatgatgtacagtcttctgattgtaccctctatatgggactatgagaccctctatagactcagcacagcttataatgttgatcatgtttagtattgggctttattgactgctttttatatgggtgtcaaaatctttccaggacatacccctttgatcctcacacctctggaataggcagggcactctccccattgtaccagggtaatcttggaggcctgatagatatggcttcatttctcactttagggaggagcaagaaccaaaagcagaagccaggtctttggattatcagctcaccagtcagccagtgaggctggaacttgatttttctaggcatacaagtatttttagtaatagaataatcatttttagtattaatacaatttacgctcccaaacatgtcctttgctagttgcacaggcataagctgaaagatctttgattttctttgttagttagctataggaaggttaagaatttatttactaaggtcgtaagaacagaagaaagtttctttgaaagagaaactgtttttttatttcaaagagcttcatgtatacttccctctcttattccatgtaattagtaagggaaaataaactatgtcttagaatgttgaggaaagtattttgatagcttttaataattcttgaaatactctttactctgtctgtagttttgagaaattacagaaattcatagtataaggatgagaaggggcccatttgcccatatttgataacacagacttggattgagtgtctgtcatgcctgctggcagttaagtctcagtggtattgactgctaggcattttctatattttttgcaagttagctggtaaaacttggtaaagttttgtgtttttcagaaggaaccctattattatttccattttaaacatatttcaatattgtctcattgtaatagttccatttatgtgacatctgaggaattaaatcatacttccagatggtttggtctaatgtatacagtttaggaaagtttattcttttttattttattttatttttttaaatttcttttagaaactgggttttgctctgttgcccaggctgatcttaaactcctggcctcagatgtggagacccagctgggactacaggcatgagccaccacgctccgtagaaagtttgttctttttcagttctgtcattgaaattctctaagtgattggatttttaaaccccttccccttttcatgaaattaaacatcaaataaataaaactacattatataattatttagtcagaaatgactgttgccctctcttttttttttttttttttttttttttttgagacggagtctcgctctgtcgcctaggctggagtgcagtggtgcgatctcggctcactgcaatctccgcctcctgggttcaagcaatcatcctgcctcagcctccccagtacctgggattacaggtgcttattaccacactcggcgaattttttgtgtttttagtagagacggggtttcaccatgttagccagcatggtctcgatctcctaaacttcgtgatccgcccgcctcagcctcccaaagtgctggattacaggtgtgagccacctcgcctgccctctttttttttttttattttgagattaaaactaattcttttaaagtcactactcagctgaaatttggcctgattataaatgttgataataatttcttcctggctcaacaaagttgttgagcttccttctgtgcacacattgaaagaaaaccagaaattgtacagtcgtgatatgaattagagaaggaacaggtggaaaaggatggcaacacacagagtccgggggacacacggccttaagatgaagtgaacgagtagacactgaataggatccacgtaaatgaacggccatttcaaatcattcacatcccaaacggaggttcatctgtcttctggttggtgaattatatttattaggatcttatttttagcatttcattacaagtaataggtttgggtaccttatttttattgtttttactcatcagttatgaataaggcataccttagaaacttgggttaaattttttcaagttataccagtcaacttggtttaaatacaactgtactaacttgctttatcatgtttcctgtttaattggatgagaattacatgcacttattcagttgttctttgtgtttataggaaaaactctgttctcagctacctcattatgtagtattgtgcttgatcccctgccaattgagaagaattcaacacattctgttctttaacaaaagcttggaagcaggcagtcagaggccttgaggaatacaattctctaaggcctgttttccattttactacttaaaaaaaaaaaaaaaagaaaagaaaaaaaagcacttacaaccaggaggaataataattctcctagagttgctgcaaactgattacttgaaactcaacttgaactttaaagagtctttaaaaggctgttttcataatgcagaaaagtagtctatttaaacgccactgctgtgtaaaacagggggctcgatttccattcttgttagcatcagacaagaaaatgtgtctatctgtcatctgacccagtatttgggatttgggtgcttgaggatactatttttttcatttcttataaggtgctattgtttcccagaaatctttaattttgatgaaaatctactcattgctaagatcctcctcacttaaagtgtttcctcagtgcagagttgaggttggcagaactatatagagttggatgatactgaaaatcatgaatgatgtgatttgttccatgtatctgtggaacatccctcaccttcctccggtatgcgccttctgcactccacacgtggtcgcctccatcctccctagtgtctgtcagcttgcctggtcaccaagtcaggaggaagaagatgaggaggctcaccagttgtaggcaagactcttcctctcgggagatcttgtaataatggcccagtttcagggcacagttgtacacattctacttaaatggaggagttcagtgatgccgtggccaaaagagttatgcccatttctaaaagcctggcatatttggtataacttaagcaccaggtaaaatctggtgcttaagttgtaccaagtatagccaagtttaactgtcgttgtgtattaataagatttaatttttatgcttgtgcttttcagagtaaagggcttgctttcaatagtagaatgacaaagcttctcctccaatgacaatctgttagcaccctgttgacttagctcaggacatgagactgacttagctcaggacatgagacatttcctggaagtgatttccatgagaacaaaggcttattcctttaacttaaaccccaaactttgttattttaattattttcaggcaatcatctttatatactttccttacaaacccagtggttgagagcataggccttggtggcaggtgcatctgggcttgggggcttctgccacacttactactctgtgacttgggaagctcttaaggctcccaaggctccgtttcttatgtggaagaagaatagcaggaggactcacctctgcgggttgttgtgaggattaactgggtgatgactgtaagcagctgggagagtgccttgtgtgcagtgaccactgttgctgccaccatgattatgtcacctctcaacatggggtggtgggaggccctgtggatgaggccaaggctgcctgcactgagtgtcccaggccttatagctttccacattctcacgtctgctgccacatgatatacaagtaaatgtattagaagttggtgttcataaaatacttttttttttttttttttttgagatggagtctcgctccgtcacccaggctggagtgcagtggcgccatctcccaggctcaagggatcctcctgcctcggcctgccaagtagctgggactacaagtgcacaccagtatgcccagctaattttttgtatttttagaacaggtgtggtttcaccatattgcccaggctggtctcgagctcctgagctcaggcaatccgcctgcctcaacctcccaaagtgctgggattacaggtgtgagcatccagccagaaaatgatttgctttctagacccatatcacctctctccatctacatctctagtatttaaattcaacacaattctagatagctgaaacagcccaaaatatgtgtttagaatacttagagtttgttataaataaccctctgtttagaatttgcccagtgaaattctctaataatacttaaaactctttactaaagttgaattttccttttttttcattgaaatagcaaaggtagtaatctgtattggtcaaagaaacgagataattcctagatctctgttttagaccagtagacctaactgtgctttcttaacttggatgttacatgaaacttaaaaacaaacaaatatgtgttacaagtacttgtgtgtacgtgcatgtgtgtttgtgcatgtgtctgtgtgtgtggaacttttgtacctttgcataaagaaggttatttaacaaagtggtacaaacagtgaactacttaatccttctatggtatcatacacttcttttcctggttaggttatgagactggcagaggtaggagtatataatgtgctcagcttgtcttgatttcaataagacatttgataaagtcattcttgatctctgaatgtgaaaaggaagtagaacagccgggcgcggtggctcacgcctgtaatcccaggactttgggaggccaaggcgggcagatcacctgaggtcggcagtttgagaccagcctgaccaacgtggagaaaccccgtctctattaaaaatacaaaattagccgggcatggtggcacatgtctgtaatcccagctactcgggaggctgaggcaggagaatctcttgaacccaggaggcggaggttgcggtgagccgagatggtgccgttgcactccagccgggcaacaagggctaaactccatctcaaaagaaaagaaagaaagggaagtagaagtaggatttaacaaaggaccgagaagtcggctgaatagccaggttcagacagtgttggcaagaacggatctttggcaagatcacttaaggtgagctactctagcagcatcctgtttgacatttgtatccataacttgaataaaaatatagaaggcaaagaagagtgctgggcaagatgtgttgggtgttagatctgcaatactcttcatagtgtaatggctaaatgtaaagtcttacgtctcggttcaagaaagcacgttgctatatgaaatttcagaaaaaagttttgttgcggggggtgggatattgatcatttgaacatatgccagttgtttctcctgccctaggggaggttggcacggcaaccttcccactccgtaggtgggtagccttgctgatggggcacgtcgtcaccaagggacctgattgttgtcatggttttgtcttgtcctcctccctggtgaaagtctactgcagttttattctcagctctggaaggagagggaacgagcctctgcctgtgtgtcctgacccctcttgccttgtttttgatctgctcaggccgggtgcagtggctcacgcctgtaatcccagcactttgggaggcaaaggcaggtggatcacttgaggtcaggagttcaagactagcctggccaacatggtgaaaccccgtctctactaaaaatacaaaaattagccgagtgtgttggtgggcccctgtaatcccagctactcgggaggttgagggaggagaatcacttgaccccaggaggcagaggttgaagtgagccaggattgtgccactgtactccagcctgggcgacagagggggactctgtctcacaaaaaaataaaaaattaaaaaaaaaggtctgctcagaaataggggaaacacgggatcaagatcattagagatttataggctgggatgcacaccatgtcttcagagctagccggctgtgtcttctccccgtttctttcactggtgaataacctttcgtttgaaccagccttgattgttctctccatgttccactgtggctccccatggacactgctaggtggaatctctgagaaaacaggcacttcgcagtcggcgcatctttctctgccagcttagggattgccgtcaaggtggaggaagggtattttggccatgttcggagtcgttgtttttactcactcttcttgggatagctttcccaccctgccctctgctcctctgtcccaaccctcttccagcctggtttttttactgcttgaattatgtatccaaaataaaaaggaaaagaaaggtgcagttggggcgggttgttgggggcgaggagaatagcccttctggttcttcagaccacataatggccagagcatgagcctcacagatccctgagcagacctgcatactagcactttccacaaccagctggccctggctgtgagagtcagatctgtccccaaggctccaggtcagaacttggacccaggtgccttctgaggcaccgccaaggacacatcccagcgccttaggcacctgtaggctagaatgacaccttccaggccagccccagaggccctcagggctccccctccaagccgggagggcaggcaggcacaggccccgctcactacctcagcacccagtgcagccccaggctcccggacgtgctcggcccggtggcctcttgtgtgacaggccctctgccatgtctgtccgcagagccgggtggggaccctccgtgtgggtcctcctctgtccctttgcagctcgcattcgccagagcggagcgcagcccttgtttccttctttcctcttcagctctgacttaaaaacacactatgttccaaatcgttgtgggatcggaaactagaactgcttgtttccaggagagaccaccttttcatattttttttaaaaggaatttgtgcttcaaaagaaactccaaaaaataaatttattgttagtctagcatatgctcattgaaattgacttatgttttattttaaaaaatcatgtaggatctggtacatggggcgggcaaaagggtatcatcagcttaagaagtaaagaagtgagccttccatttgtgtgggtgataacatctttttcctagatcgtacctcaaaattcaggctctccatgaaaacaaagataatctgaataaaaattgtgtgttgggaaatgtatcaagtgaccttcagttaagaaaagcacaggctgtttattagcacaacttgcttcattaaataattcgtggctttttctgccactggggttcttttcgttttgaattcagcttgtgtttggttcctcggtcttgtaccccttcagttcgccggcgacgtaatggtgataccctttgttttttgtatcataccttttgtgaattgtgacaaccatcccgtaatcattgtggcctcagcagaagttttgaacaatctttgcagccactgttggggtgtgtaccagcagcctggaagtgaccagcagagctgacaaaagcaccccctgctctgcccacctccgcagagtcctgtcctcatcagaaacggtatcgcggatgctcctcaggtaggcgtaggcagacttcattgtgtgttagcagtgacagtgatgtctgtacctatctgtgagtgagacccattcatgacacactagaaatgtgtacattcttttgttttccatcacgggtataggtcttctgccatgaaagagaactatcaaggaaattcctgaaaacaagatttgtaaattcgatttgaccctcccaaattcagggctgctctttgcagtggtccctggcccagcaggtggccggcgtggctcctgttggctcatgccagtgttgtgctggaccctcgagtatgtgactgtcacccttgtccaagactggtttttaacagtcttgatttgtcattttgatgctttgaatactataaggaaaatgccacgaataccatataaataccacaccaatctgttgaacatatctgtgttttctgacatgggacctgcagaatagtatttcttttaaatcctgcaactttattatctagtagaattccaagtaggtctgcttagacacatattcagtgaagattgtattgtgtgtgatattatcctatctttaataaagtcctactactgaaaaacagggatttgcaatgaaaatcatagctaaataggcaggtttagaaagttcaaaatattggaagtgctagaaggctgcaacttgtaaaattgtactccccaagttcagtaggatagtagagaagtcgtgctaagttgatttcattgaaatgtcacgtctcacatcctgtggtccaaaggtactagtttgttttgtggaataattttctgttcacttgctgataagaaatttagcagtcagaagtaatttttaattaataacctttctttttaaaagttgctttatggtttacaagtaatactgatgcaaaaaggatttgttaacctaaattaagtagcacgcactttgtttacatgcttcagtatattgtggggttggtcccttctcacgaacccaggacctgtgcttggggaacattttgccatcatgctgttctcttgtaccaaggatcagtgaaagtgttttatcttttttatgtagtttgtattgactggattttataactgtaagaaaacagaaacagagtgttgtattttgatctgaaatttgtgtatgctaaagtaattttgttttatgtattggaagttcacttaaaaacttgaaatattttctagaagggtaccacacaaaaggaatcatctttaagctgtttaattaacctaataaaataatttgatggggaaggcattctaattgtttctgatttttagagtggttcctgctaaatcatcattatcaatacagcttgatttgatttaagaa

SEQ ID NO: 137035 - DNA, 2148 bp, Homo sapiens
  Payload ID: 6827
  Gene Symbol: GIMAP1-GIMAP5
  Gene Name: GIMAP1-GIMAP5 readthrough
  ENST ID: ENST00000611999
  CDS Start-End: 30-1565
ttcagagcctgtcaccaggaaaggtaagcatgggaggaaggaagatggcgacagatgaagaaaatgtctatggtttagaagagaacgctcagtcccggcaggagtccacgcggaggctcatccttgttgggagaacaggggccgggaagagcgccactgggaacagcatcctgggccagagacggttcttctccaggctgggggccacgtctgtgaccagggcctgcaccacgggcagccgcaggtgggacaagtgccacgtggaagtcgtggacactccggacattttcagctcccaagtgtccaagacagatcctggctgtgaggagagaggtcactgctacctgctctcggcccccggaccccacgcgctgctcctggtgacccagttgggtcggttcaccgcccaggaccagcaggcggtgaggcagctgagtcatggagctttcagccccagcacatggctcctccttaactgcgtctgctcaacctccctcagccctgtgaacagcatccccgcacacagacgcagagcaggactctctctgctgccacttcaccttcctgagagaggaccagcggccagagcctcagtgactgccaccctggaggacagggcacaacaaccgtttctggagagaatgggaggattccagaggggcaaatatggaactatggctgaaggtagatcagaagataacttgtctgcaacaccaccggcattgaggattatcctagtgggcaaaacaggctgcgggaaaagtgccacagggaacagcatccttggccagcccgtgtttgagtccaagctgagggcccagtcagtgaccaggacgtgccaggtgaaaacaggaacatggaacgggaggaaagtcctggtggttgacacgccctccatctttgagtcacaggccgatacccaagagctgtacaagaacatcggggactgctacctgctctctgccccggggccccacgtcctgcttctggtgatccagctggggcgtttcactgctcaggacacagtggccatcaggaaggtgaaagaggtctttgggacaggggccatgagacatgtggtcatcctcttcacccacaaagaggacttagggggccaggccctggatgactatgtagcaaacacggacaactgcagcctgaaagacctggtgcgggagtgtgagagaaggtactgtgccttcaacaactggggctctgtggaggagcagaggcagcagcaggcagagctcctggctgtgattgagaggctggggagggagcgagagggctccttccacagcaatgacctcttcttggatgcccagctgctccaaagaactggagctggggcctgccaggaagactacaggcagtaccaggccaaagtggaatggcaggtggagaagcacaagcaagagctgagggagaacgagagtaactgggcatacaaggcgctcctcagagtcaaacacttgatgcttttgcattatgagatttttgtttttctattgttgtgcagcatactttttttcattatttttctgttcatctttcattacatttaaatctctggaccctggagcacttctaatgtatcaccccatggagtcattgttctaataatcaccaattcagactcagatcctcgtggtctatggagcatgctgcttgctgtctgtgcagctcccatttccccttcttcctgatagacttggagctgtgtgcctccactccaaggctgcctgcctgctgtaaacactattccactctgtctgccaacaactgcttcaggaatgggcctgagatcccatgcaggtccctgagaagtgagtaaaagtccgcagaggtggggatggaagatctctccttagatagaacctgtcttcctccctggcattgtggggtctgggcgtgacactgggactctcagcagctttgtgctgccaacctgagattgaaggcagtgcctcagagcagcacagagagttggggccccctgagccctgagccaccagccctgcagcctgccctatctccgcatttccagttgtattagccaatagatttcctacttatttaagctatttgagctccgggtctcttctacctgcattctaaaacattcaaagtaataaaaatttctccaca

SEQ ID NO: 137036 - DNA, 3249 bp, Homo sapiens
  Payload ID: 6828
  Gene Symbol: GINS1
  Gene Name: GINS complex subunit 1 (Psf1 homolog)
  Uniprot ID: Q14691
  ENST ID: ENST00000262460
  CDS Start-End: 95-685
ctagaacgaaaggagtgaggcgccgagagcccagataccattttggcgtgagagctggtggttggcaaggccgcgggagtgggaagcgtccgccatgttctgcgaaaaagccatggaactgatccgcgagctgcatcgcgcgcccgaagggcaactgcctgccttcaacgaggatggactcagacaagttctggaggagatgaaagctttgtatgaacaaaaccagtctgatgtgaatgaagcaaagtcaggtggacgaagtgatttgataccaactatcaaatttcgacactgttctctgttaagaaatcgacgctgcactgtagcatacctgtatgaccgcttgcttcggatcagagcactcagatgggaatatggtagcgtcttgccaaatgcattacgatttcacatggctgctgaagaaatggagtggtttaataattataaaagatctcttgctacttatatgaggtcactgggaggagatgaaggtttggacattacacaggatatgaaaccaccaaaaagcctatatattgaagtccggtgtctaaaagactatggagaatttgaagttgatgatggcacttcagtcctattaaaaaaaaatagccagcactttttacctcgatggaaatgtgagcagctgatcagacaaggagtcctggagcacatcctgtcatgaccatgcgccgaggcacttccaggcttcactcaactcatggactcctctgtactcactctctccaccactcccttcacctccctctttgattttagaagctatagacattgtttaagataactaagaatacttggctaagaagtataatttgctaactattaaggactttctttttttaatgttgtacactattcttcctactcttttttggttttggttttgttttgtagagactgtctcactatgttgcccaagctggtctcaaactcctggcctcaagcagtcctcccaccttagcttctcaaagtgttgagatcacaggcgtgagccactgcacccggcccctactcctttttctaataagctgtatctgtaatcacagcattcctacagttgttacagtgtgttttttaaatgaaagtaaacatggttacatttgaatctcttaaataagcagtcacttggctggacaggaagaaggtagatcctgtgtgtcttgttttctggtcatgtgtattgtacaagctagagagctgaatttctgagatacacattttcaaatcacatgcaagtgaagatgatggtctgtagaaattttcagtatatataatgtttaatgacatactaatttatcatctggctatttgggaaggaaggacacacatggattttgcacatttccaccatggtggctggtgtggcttgtggctatggggtgatcaccagtatcaccactttggaaggggacagtgaaattggggctagagaaggaactttgtacagttttccctgagattcagattgactgaaaagtcacatgaagagttgattgtcttttaatggtatgttttaaacagctgacattttaaattttgatgaaatccagtttattcgtttgttcttttatgctttgggtgttgcatccgagaaatcttttcccatcccaagatcacaattttttttcctttttacttctagaagtgttataattttaagctttatactttggtctatgacccgtttttttttttgttttgttttgttttttcgtttgtttctttgttttgagatggagtcttgttctgtcacccaggctggggtgcagtggcgtgatcttggctcactgcaatctctatcccctgggttcaagtgattctcttgtctcagcctcccaagtagctgggattacaggcacaggccgccacgcctggctaatttttgtatttttagtagagacagagttttaccatgttggccaggctggtttcaaactcctgacctcaagtgacccaccttggcctcccaaagttttgggattacaagtgtgggccaccgcggccagcctatgatccattttgaatgaattttttatatggtgcaaggtgtcaatccaccttcactttttcttgggaatatagatatccagctgtttcactaccattttttgaaaggactgccctttgctctatcacctttgcatttttgttaaaaagtagttgtcaatgtatatgtgggtttatttcaggactctgttttgttccattgacctgtttttctctcctgaatgccaataccatatttgtatgtagtgtatgtaattttctaataattcttgaaacagatagtattaatgtgtcatatttttgctgttgtttgtattttttgtagagatggggtttcaccgtgttggccaggctgtgttgaactcctgagctaaagcaatacacttgcctcgtcctccccatgtgctgggattacaggcgtgagccttggtgctggcccagtgtaccacatttctttttgagatttgttttggctatgttaagtcctttgcttttgatgtgaaatttgggaacaggcagggtgtggtggcttatgcctgtaatcctagaactttgggaggcctagatgggtggatcacttgagctcaggagttccagaccagcccgggcctatggcaaaactccgtctctacaaaaaatagaaaaaattagccaggtgtggtggtgcatgcctgtagtcacagttacacggcaggctgaggtgggaggatcacttgaaccccagaggtcaagactgcagtgagctgagatcacaccactgtactccagcctgggtgacaaagtgagactctatctcaaaaagaaattaggatcaatttgtcaatttctacaacaacaacaacaaaaacccctgttgggcaccttgattgagattgcattgaatttatataaaactgttgggagaattgacatcttaataatattgagtcttctggcctataaacaaggtctgtcttcctaggtattaatgttttgtcttctatttctcttaataatcttttgtagttttcagtgtacaggtctaccatgtcagcatttcatagttttgatgctaaatggtattttaaaatttcaaattctaaccacttgttgctagtaaatagaaatacaattgatgttgaacttgtatccttcagccttgctaaactgtgagttctcatggtgtttttgtaaattacatcaacagtcatgtgttctatgaataaagagttttactccttc

SEQ ID NO: 137037 - DNA, 2673 bp, Homo sapiens
  Payload ID: 6829
  Gene Symbol: GINS2
  Gene Name: GINS complex subunit 2 (Psf2 homolog)
  Uniprot ID: Q9Y248
  ENST ID: ENST00000253462
  CDS Start-End: 102-659
gggctctcgccgtggcgggaaaacggcggccgcggcgtctcctccgggacgctgaggggcccgaggagaccgtgaggctctggcctgcagctcgcgccgccatggacgctgccgaggtcgaattcctcgccgagaaggagctggttaccattatccccaacttcagtctggacaagatctacctcatcgggggggacctggggccttttaaccctggtttacccgtggaagtgcccctgtggctggcgattaacctgaaacaaagacagaaatgtcgcctgctccctccagagtggatggatgtagaaaagttggagaagatgagggatcatgaacgaaaggaagaaacttttaccccaatgcccagcccttactacatggaacttacgaagctcctgttaaatcatgcttcagacaacatcccgaaggcagacgaaatccggaccctggtcaaggatatgtgggacactcgtatagccaaactccgagtgtctgctgacagctttgtgagacagcaggaggcacatgccaagctggataacttgaccttgatggagatcaacaccagcgggactttcctcacacaagcgctcaaccacatgtacaaactccgcacgaacctccagcctctggagagtactcagtctcaggacttctagagaaaggcctggtgcaggcggcttgctgggggatgtgagcgctcaggacgtgatgaggtactcgtggttctggagctctagaaacacttctgatgcatgaaaaatgtgtgatggtgcaaggaatggattcaggatgttgttggagaaacaagtttgtgattagtccttaaaacttagctccctgggacattcttcaattccacatctgtttctagaaaccagccctttttccccccacttttgagaaataaaaaagccttaggtaaataagtcattctccctagcagagccacttgggtctcctgcatggaagccatcacacttgggcaggtgttcagtgactggtaggtgtagatacagcaggagtggccatgtggtccacggctttttaccccttcttgatcctgatttcttgggctgaatttagactctctcacagaggtggctcacagagaaggatggcagatggtgcagccaacaatgctgaccggtgcttatcctctaagccctgatccacaataaaaatggacccaactcagctctgactctctaggtttttgtgctgcgtaactaccaagtaaaaggactgagcctgtggctgagatgactcagtcaacgaaactgaggcacacggcagttaagtggaaactgcagaccaacacctggggtgtctccttctcttggctacttctagctcaggtttaatgggttgcttatcaagaggagagtcaggaaaaaaacgaatccaatgtattgagcatgagtgacaatgtattgagcatgagtgacaatgctagaagaaaagtcactttcagtgctgctcttgatggatttggggaaggattctttgttgtaggtaacagtgggctcaggggaaattatttttttcctaagagaaaattactttattcgtagcattttggaaatgttaggacctttacagaaattacattaccttgagaggtgaaatgatcgtccagcatcatgcaatggatagaaggttctgtaatcagctttaaaaaaaactttaatttttggccgggcacattggcttggctcatgcatgtaatcccagcactttgggaggccaaggcaggtggatcacaaggccaggagattgagactatcctggctaacatggtgaaaccccgtctctattaaaaatacaaaaaaaaaaaaatttgccaggtgtggtggcacacgcctatagtcgcagctactcgggaggctgaggcaggagaatcgcttgaacccgagaggcggaggttgtagtgagccaagattgcaccactgtactcctgcctgggcaacgagagcaagactctgtctcaaacaaaaaaaattttaactttttttttagacagggtctcgttctgtcatccaggctgcagtagagtggcgtgattatagctcactgcagcctcgaactcctgggttcacacagttctcccaccacagcctcccaaagcactgggattgcaagcatgagccgccatgcctggccagcctatttttggctggacaccagtgggccaaaagcagtggggtgctgtctggggagctctgagaatgcgcatgtgtgacaggctgagcctaaagacttatcacccagcatctgccctccagtgtctagcatgctgcacactatcactccatgttgctgcccacgtgtccccgccaggcaggttttggtggttatttggacactgaagggtcagacctggaagactgggaccaaaagatgaggtctccataatttaaggtgctgttcagacttggttcagctcataggacttgttctttcatctcagccttccttggaatcctcctgctttcatctggggatcttttagaatgaaaccacttgttattgtggagggcaaggggtcctaatgccctcctcttagagcctgagccagtggaggcagctccgtctgcggagatgtatagttattgagcttttctttgtttggctttgttttatatcataaaaaagattttcctcttaacataa

SEQ ID NO: 137038 - DNA, 537 bp, Homo sapiens
  Payload ID: 6829
  Gene Symbol: GINS2
  Gene Name: GINS complex subunit 2 (Psf2 homolog)
  ENST ID: ENST00000596233
  CDS Start-End: 384-537
ctcgcgggcctaattatcaaggtttcaaattcgactgcagtcctagaatagcgcttcacccccaggaagcttttccggccatgaccaccccatcaaaatcacctggccctggatgaaattcagctttctgtcctttccacgactccggaatcccaactcccaggagcgtgcacacagacaatgggcacccgctaggggattctgacacaggtgagctccagccaccgctctggcttcacctgcgcccactgtacaggggcagccggtccagcgagcagggggacctggggccttttaaccctggtttacccgtggaagtgcccctgtggctggcgattaacctgaaacaaagacagaaatgtcgcctgctccctccagagtggatggatgtagaaaagttggagaagatgagggatcatgaacgaaaggaagaaacttttaccccaatgcccagcccttactacatggaacttacgaagctcctgttaaatcatgcttcagacaacatcccgaaggcagacgaaatccggaccctgg

SEQ ID NO: 137039 - DNA, 625 bp, Homo sapiens
  Payload ID: 6829
  Gene Symbol: GINS2
  Gene Name: GINS complex subunit 2 (Psf2 homolog)
  ENST ID: ENST00000595355
  CDS Start-End: 419-625
cgagtagctggattgtgagcccccgcgcccgcccggctttgcgttttcagtatgagggaggcgcctcggcgctgggagtcctggagaaggagggcaggctctgtacctgcccagacccacctccccgcaccccaggaccccaacattgggtgtgtgaaacctgttccggagttggagggtgcaggcgggagagggagcgccccccacccactcaggggagacttgcatcctgtccgcggaaaggccagaaggactgagccccacgctcgcaggtgtctcggagccgctcaggaggcgctttgttctgagtctgggggacctggggccttttaaccctggtttacccgtggaagtgcccctgtggctggcgattaacctgaaacaaagacagaaatgtcgcctgctccctccagagtggatggatgtagaaaagttggagaagatgagggatcatgaacgaaaggaagaaacttttaccccaatgcccagcccttactacatggaacttacgaagctcctgttaaatcatgcttcagacaacatcccgaaggcagacgaaatccggaccctggtcaaggatatgtgggacactcgtatagccaaactccgagtgtctgctgacagc

SEQ ID NO: 137040 - DNA, 2274 bp, Homo sapiens
  Payload ID: 6830
  Gene Symbol: GINS3
  Gene Name: GINS complex subunit 3 (Psf3 homolog)
  Uniprot ID: Q9BRX5
  ENST ID: ENST00000318129
  CDS Start-End: 209-859
agacttgatcgattgcttctgcctgggcggtaccgcccgaattgactgctcctgtctgatgcgtccccgggcgcgggaaacgagtttcaatccactttcctgaccccaaccatcctgcccagtctccgcttccccgtcttgtacacccctaactcctgaggctcctccgaatcacgcgagtggaagcggagaagctcaagtggccgccatgtcagaggcttatttccgagtggagtcgggtgcgctggggcctgaggagaactttctttctttggacgacatcctgatgtcccacgagaagctgccggtgcgcacggagaccgccatgcctcgccttggcgctttcttcctggagcggagcgcaggcgccgagactgacaacgcggtcccacagggttccaagcttgaactacccttgtggctggcaaaaggactttttgacaacaagcgacggatcctttctgtggaactccccaagatctaccaagagggttggaggactgtgttcagtgcagatcccaatgtggtggacctccacaaaatggggccccatttctacgggtttggctcccagctcctgcattttgacagtcccgagaatgcagacatttcccagtctctgctgcagacttttatcggacgttttcgccgcatcatggactcctcacagaatgcttacaacgaagacacttcagccctggtagccaggctagacgagatggagaggggcttatttcaaacagggcagaaaggactgaatgactttcagtgttgggagaaggggcaggcttctcagatcacagcttccaacctcgttcagaattacaagaagagaaaattcactgatatggaagactgaaagccggaagaacacagaatggctcctcacagacgtatccctccgtgtgtccttgataggagctggttgaccttgtacagaaccagaatcctgtcccatttcatggcttatttcctgtggccatagagaattatagggaactggacatgctggaggatgtgggtgtccctggctctgtgagtcttccaggaccgtcccaccctgctgacccacagcccaggccctttaacccaagaacccatggccaaggagaaatcaaagtccttcctaaataagaatcactgccatataatatatcacagtagagttgcaactgagattccttgtgtctgggagtttggacagcttcagatgtacagtttcactagccacaaagcacaggtacaaactgggtcatcgcctgttcacaaaatgctctcttgatcttatttgcctcatcttcctcatggttgtacagaggatagcaccccaccatgccagcctgacttggagatatctcctgctgcctgcctgcagggagttaccccagtttccaaaaacagtcgcccagataaaggaggaaaagggaaaggcagacgaatggcatggcttttactaaagaaaagatgttggcctcatactctatactcagggcttaatgaactggaatctgcataactcagcagtcaacccagaagggaaatggttaaactgagcttgttattgcctcggagagcctaagagcacccgcacacttaattctactccctgtctagaaaagctgtcagggagtcgtttggaattgcaatgtagttattaagggctgttaaccagcctgcattacatctggaagtcaggacttgggtgctgactatgaagggccctgttttcaaaatctaacattgcaagtgtaaatgggcaagaagcctccgttgtgctttttttttcctcttcagtaacttttgcaacattattgcatagaagatccctgaccatttactaggaacctggttaagcaagcactaatctcttttcctggagatcaaggatgcaacctcaggttgagaaagaaacagggttccctgggcccattagactgtttgcagggcatcactgcttccccctgacacctcacaactagcaaaaattgtctttgtctttggaaattatagagggatttgggtatccagattgtgcagatgcaaacttaggctgtcttgatgcaaacttagaaccacagaaatgcttttaaaatgcctgttttaagatggaattgttgtttttataatttgattttagtgctaaataaatgattggctttgtacatgaatatgttctgtacaagtgctctttcactagtactacagataatcaaagctatcagaattgtgtctttgatcatatttgacggtaatacacaaatccatgttttagca

SEQ ID NO: 137041 - DNA, 1932 bp, Homo sapiens
  Payload ID: 6830
  Gene Symbol: GINS3
  Gene Name: GINS complex subunit 3 (Psf3 homolog)
  Uniprot ID: Q9BRX5
  ENST ID: ENST00000328514
  CDS Start-End: 209-625
agacttgatcgattgcttctgcctgggcggtaccgcccgaattgactgctcctgtctgatgcgtccccgggcgcgggaaacgagtttcaatccactttcctgaccccaaccatcctgcccagtctccgcttccccgtcttgtacacccctaactcctgaggctcctccgaatcacgcgagtggaagcggagaagctcaagtggccgccatgtcagaggcttatttccgagtggagtcgggtgcgctggggcctgaggagaactttctttctttggacgacatcctgatgtcccacgagaagctgccggtgcgcacggagaccgccatgcctcgccttggcgctttcttcctggagcggagcgcaggcgccgagactgacaacgcggtcccacagacttttatcggacgttttcgccgcatcatggactcctcacagaatgcttacaacgaagacacttcagccctggtagccaggctagacgagatggagaggggcttatttcaaacagggcagaaaggactgaatgactttcagtgttgggagaaggggcaggcttctcagatcacagcttccaacctcgttcagaattacaagaagagaaaattcactgatatggaagactgaaagccggaagaacacagaatggctcctcacagacgtatccctccgtgtgtccttgataggagctggttgaccttgtacagaaccagaatcctgtcccatttcatggcttatttcctgtggccatagagaattatagggaactggacatgctggaggatgtgggtgtccctggctctgtgagtcttccaggaccgtcccaccctgctgacccacagcccaggccctttaacccaagaacccatggccaaggagaaatcaaagtccttcctaaataagaatcactgccatataatatatcacagtagagttgcaactgagattccttgtgtctgggagtttggacagcttcagatgtacagtttcactagccacaaagcacaggtacaaactgggtcatcgcctgttcacaaaatgctctcttgatcttatttgcctcatcttcctcatggttgtacagaggatagcaccccaccatgccagcctgacttggagatatctcctgctgcctgcctgcagggagttaccccagtttccaaaaacagtcgcccagataaaggaggaaaagggaaaggcagacgaatggcatggcttttactaaagaaaagatgttggcctcatactctatactcagggcttaatgaactggaatctgcataactcagcagtcaacccagaagggaaatggttaaactgagcttgttattgcctcggagagcctaagagcacccgcacacttaattctactccctgtctagaaaagctgtcagggagtcgtttggaattgcaatgtagttattaagggctgttaaccagcctgcattacatctggaagtcaggacttgggtgctgactatgaagggccctgttttcaaaatctaacattgcaagtgtaaatgggcaagaagcctccgttgtgctttttttttcctcttcagtaacttttgcaacattattgcatagaagatccctgaccatttactaggaacctggttaagcaagcactaatctcttttcctggagatcaaggatgcaacctcaggttgagaaagaaacagggttccctgggcccattagactgtttgcagggcatcactgcttccccctgacacctcacaactagcaaaaattgtctttgtctttggaaattatagagggatttgggtatccagattgtgcagatgcaaacttaggctgtcttgatgcaaacttagaaccacagaaatgcttttaaaatgcctgttttaagatggaattgttgtttttataatttgattttagtgctaaataaatgattggctttgtacatg

SEQ ID NO: 137042 - DNA, 1728 bp, Homo sapiens
  Payload ID: 6830
  Gene Symbol: GINS3
  Gene Name: GINS complex subunit 3 (Psf3 homolog)
  Uniprot ID: Q9BRX5
  ENST ID: ENST00000426538
  CDS Start-End: 209-976
agacttgatcgattgcttctgcctgggcggtaccgcccgaattgactgctcctgtctgatgcgtccccgggcgcgggaaacgagtttcaatccactttcctgaccccaaccatcctgcccagtctccgcttccccgtcttgtacacccctaactcctgaggctcctccgaatcacgcgagtggaagcggagaagctcaagtggccgccatgtcagaggcttatttccgagtggagtcgggtgcgctggggcctgaggagaactttctttctttggacgacatcctgatgtcccacgagaagctgccggtgcgcacggagaccgccatgcctcgccttggcgctttcttcctggagcggagcgcaggcgccgagactgacaacgcggtcccacagggttttgctctgttgcccaggctggagtgcagtggtgtgatatggctcactgcagccttgacctcccaggctccagagatcctcccacctcagccacctatgtggctggtattgcagggttccaagcttgaactacccttgtggctggcaaaaggactttttgacaacaagcgacggatcctttctgtggaactccccaagatctaccaagagggttggaggactgtgttcagtgcagatcccaatgtggtggacctccacaaaatggggccccatttctacgggtttggctcccagctcctgcattttgacagtcccgagaatgcagacatttcccagtctctgctgcagacttttatcggacgttttcgccgcatcatggactcctcacagaatgcttacaacgaagacacttcagccctggtagccaggctagacgagatggagaggggcttatttcaaacagggcagaaaggactgaatgactttcagtgttgggagaaggggcaggcttctcagatcacagcttccaacctcgttcagaattacaagaagagaaaattcactgatatggaagactgaaagccggaagaacacagaatggctcctcacagacgtatccctccgtgtgtccttgataggagctggttgaccttgtacagaaccagaatcctgtcccatttcatggcttatttcctgtggccatagagaattatagggaactggacatgctggaggatgtgggtgtccctggctctgtgagtcttccaggaccgtcccaccctgctgacccacagcccaggccctttaacccaagaacccatggccaaggagaaatcaaagtccttcctaaataagaatcactgccatataatatatcacagtagagttgcaactgagattccttgtgtctgggagtttggacagcttcagatgtacagtttcactagccacaaagcacaggtacaaactgggtcatcgcctgttcacaaaatgctctcttgatcttatttgcctcatcttcctcatggttgtacagaggatagcaccccaccatgccagcctgacttggagatatctcctgctgcctgcctgcagggagttaccccagtttccaaaaacagtcgcccagataaaggaggaaaagggaaaggcagacgaatggcatggcttttactaaagaaaagatgttggcctcatactctatactcagggcttaatgaactggaatctgcataactcagcagtcaacccagaagggaaatggttaaactgagcttgttattgcctcggagagcctaagagcacccgcacacttaattctactccctgtc

SEQ ID NO: 137043 - DNA, 3841 bp, Homo sapiens
  Payload ID: 6831
  Gene Symbol: GINS4
  Gene Name: GINS complex subunit 4 (Sld5 homolog)
  Uniprot ID: Q9BRT9
  ENST ID: ENST00000276533
  CDS Start-End: 211-882
gtgcctgggcggaaactttgcgagagtagcgcgggagctgagaagttgcagggttgagttggtcccggcaagtccttgagcagtttgttcctctgtcttcccgcttcctggtgccccgactgcgtccccacgaacgccccgtccttaccgccggctgctgtggagtgcctcgctgtctcccaggtccccgagttcctggtttcagagaagatgaccgaagaagtggatttcctgggacaggactctgatgggggtagtgaggaagtggtcctaactcctgcagagctcattgaaagattggagcaggcctggatgaatgaaaagtttgcccctgagctgctggagagcaagcctgagattgtagaatgtgtcatggaacagctggagcacatggaagaaaatctcaggagagccaaaagggaggacctgaaggtcagcatccaccaaatggagatggagaggatccgctacgtcctcagcagctacttgcggtgtcgcctcatgaagatagagaagtttttccctcatgtccttgagaaggaaaaaacacgtcctgagggggagccttccagcctctcgccggaagagttggcctttgccagagagttcatggcgaacacagagtcctatctgaaaaatgtcgccttgaagcacatgccccctaacttacagaaggtggacctctttcgggcagttcccaaaccagatctagattcttacgtgtttctgagagtgagagaacgacaagaaaacatactggtagaaccagacacagatgagcagagggactacgtgattgacctggagaagggctcacagcacttgatccgatacaaaaccattgcacctctggttgcatctggagctgtccagctaatttaaaactaggcataaacagccaggcatggtgactcaagcctgtaatcccagcactttgggaggccgaggcgggcggatcatgaggtcaggagttcgagaccaaccgaccaacatggtgaaaccccatctttactaaaaatacaaaataattagccgggtgttggtggtgtgcacctgtaatcccagctactcaggaggccggggcaggagaatcgcttgaacctgggagcaggaggttgcagtgagccgaggtcgtgccattgcactccagcctgggtgacagtgagactttgtctcaaaaaaaaaaacaaaaaacaaaaaaaaaacaaactaggcataaactcatgaggtcaggagatcaagaccatcctggctactaaaccccatctctactaaacccatctctactaaaaatacaaaaaattagccaggcatggtggcgggcccatctactcaggaggctgaggcaggagaatggtgtgaacccgggaggtggagcttgcagtgagccaagatcgtgccattgcactctagcctgggcgacagagcgagactccatttccaaaaaaaacacactaggcgtaaacaagaatgaagacctggaaccgtagagaaaatactagaaacccctcgtatcacgttgtgcctgaggacaataataaagtagtttactaggcatcagacattcctcagcagtgctgtgggtcacgggcgtgaagcggagctcgaggcaggattgcttgtgttgctgcatgtcctgtctgctgttttagcccgtgtcagtagatggggccattgtactgtttgttctgcacacttggcggagcagcagaggctctcagcacgccttttccctttgtagtattttctgagctaaggaaagtcaggcagaagtagttcataagaaggcatcactgcctgtgatcggggctgcatttagccctgacctgataatggtaggagagttcatttagcctttctgctgcgaagattgtaaatagattaaagaaaacagctgtggccttctcccgtcatacatcattagactgtgtaaactaacattttagaacctctaatattggacttaaaaccaatttctgtcgtgcttaattgaaaatcacaactaaaccaataaaccattattaaatttccattctgcagcagaaggcacctctggacggctcccggcttgtagtttaatgaagtatgtgctccctgctgttaacccgcagccctccccaactctccagcagctttgccaagtcagcctccgggccatctggctgtccttggccaaggcactgttaacggagtgacgttaaccatcttgtattgtgacctgtggccgcttttctggtttaagtccttcactttttcaagaggaatggatgaaattaatgtgcatgcagagtctcacagtgatgccggaaggaaggatgtataggcagtgaatgaatgatctttccttgaaatgctataaaaagcaacctgcattccagtcttttcttcctggttgaagttggcagatttccatttgcagggtatgggctgcgagagtaatcagggtaacattgctgtcatttccaagagaaatcagtaggggaaagcaagggaggtcttttttttttttcttttttgagacggagtttccctcttgttacccaggctggagtggcagtggtgtgaacacggctcactgcagcctccacctcctgggttcaagagattctcctgccccagcctcccgagtagctggtattataggtgcacaccaccacacccaactaattttttgtatttttagtagagatggggtttcatgatgttggccaagctggtctcgagctcctgaccccaggtgatccacccacctcggcctcccaaagtgctggaattataggcgtgagccactgcgcacggcctggggaggttttatttcttgacaaaggtatttgatactcgtgcagtccctggagggtctcactggagagacaacatttaggctgagatctgattaacaggaggcagctgcagtgcagaggtcaaaagggagggtgttccaggcagagaaaacagcctgtgcaaaggccctgaggcagaaacaaactctacttgaggtcagcctggttagaaagcccaactcaaaatagaaagtattacatgataaggtctgaggcaggctggacccagatcttacaggaccttgttaataaggatcccatttggtcccccacagtcctgagaagcgggcagggctgtgggaaacagcagatatttagtggtaagcctgagatcagaacccaagtctgcacttcctagtcacgttctccctgtagtgctaagcccagagacctgagctgttaacctagaacagtgtgcttcctaagccttaatgtgcatacccatcgcctggagctcgccttaagatgtaggttctgcctgaagcccaagttcatttagtatgtcatggttaattcagagtaaaatcaagagttagtacttgatttatgcttgttatataaagaaagagacaacttcactgtatgatcattttgtcacttttcaaaagcatttaattcccattcaattgaaaatgtttcaagaacaaacctgtttggtcattttattgatattgcacatttgtatatgaataaatttttgcaaattaaaaaaaaaaaagatgtaggttctgaaacagggtgaggtccaggatcctgcctttctaaggagctcccatgttgtgcagttgctgctggcccggggaccacattgaatgacggctctacgtcctcatgcctccagctgctgccctgtacatgtccaactgcacggagcactttacatcctctaaaaccacagtaaattgctccatttcctaaattacctcttcaagagaagactggttttgatgtcatttttaaataaaggagaagttgaatttcaaaaccaagtggaacaggaa

SEQ ID NO: 137044 - DNA, 1158 bp, Homo sapiens
  Payload ID: 6831
  Gene Symbol: GINS4
  Gene Name: GINS complex subunit 4 (Sld5 homolog)
  Uniprot ID: Q9BRT9
  ENST ID: ENST00000518671
  CDS Start-End: 172-843
cgggagctgagaagttgcagggttgagttggtcccggcaagtccttgagcagtttgttcctctgtcttcccgcttcctggtgccccgactgcgtccccacgaacgccccgtccttaccgccggctgctgtggagtgcctcgctgtctcccaggttcctggtttcagagaagatgaccgaagaagtggatttcctgggacaggactctgatgggggtagtgaggaagtggtcctaactcctgcagagctcattgaaagattggagcaggcctggatgaatgaaaagtttgcccctgagctgctggagagcaagcctgagattgtagaatgtgtcatggaacagctggagcacatggaagaaaatctcaggagagccaaaagggaggacctgaaggtcagcatccaccaaatggagatggagaggatccgctacgtcctcagcagctacttgcggtgtcgcctcatgaagatagagaagtttttccctcatgtccttgagaaggaaaaaacacgtcctgagggggagccttccagcctctcgccggaagagttggcctttgccagagagttcatggcgaacacagagtcctatctgaaaaatgtcgccttgaagcacatgccccctaacttacagaaggtggacctctttcgggcagttcccaaaccagatctagattcttacgtgtttctgagagtgagagaacgacaagaaaacatactggtagaaccagacacagatgagcagagggactacgtgattgacctggagaagggctcacagcacttgatccgatacaaaaccattgcacctctggttgcatctggagctgtccagctaatttaaaactaggcataaacagccaggcatggtgactcaagcctgtaatcccagcactttgggaggccgaggcgggcggatcatgaggtcaggagttcgagaccaaccgaccaacatggtgaaaccccatctttactaaaaatacaaaataattagccgggtgttggtggtgtgcacctgtaatcccagctactcaggaggccggggcaggagaatcgcttgaacctgggagcaggaggttgcagtgagccgaggtcgtgccattgcactccagcctgggtgacagtgagactttgtctcaaaaaaaaaaacaaaaaacaa

SEQ ID NO: 137045 - DNA, 3873 bp, Homo sapiens
  Payload ID: 6831
  Gene Symbol: GINS4
  Gene Name: GINS complex subunit 4 (Sld5 homolog)
  ENST ID: ENST00000523277
  CDS Start-End: 168-746
agttgcagggttgagttggtcccggcaagtccttgagcagtttgttcctctgtcttcccgcttcctggtgccccgactgcgtccccacgaacgccccgtccttaccgccggctgctgtggagtgcctcgctgtctcccaggtccccgagttcctggtttcagagaagatgaccgaagaagtggatttcctgggacaggactctgatgggggtagtgaggaagtggtcctaactcctgcagagctcattgaaagattggagcaggcctggatgaatgaaaagtttgcccctgagctgctggagagcaagcctgagattgtagaatgtgtcatggaacagctggagcacatggaagaaaatctcaggagagccaaaagggaggacctgaaggtcagcatccaccaaatggagatggagaggatccgctacgtcctcagcagctacttgcggtgtcgcctcatgaagatagagaagtttttccctcatgtccttgagaaggaaaaaacacgtcctgagggggagccttccagcctctcgccggaagagttggcctttgccagagagttcatggcgaacacagagtcctatctgaaaaatgtcgccttgaagcacatgccccctaacttacagaaggtggacctctttcgggcagttcccaaaccagatctagattcttacgtgtttctgagagtgagagaacgacaagaaaacatactggtagaaccagacacagatgagcagaggtgagtggcgtgcatctttcacagtgggcacattcctcccgatggagggccagccgagctctgcaggcaaatgtgtttccctctttttcagggactacgtgattgacctggagaagggctcacagcacttgatccgatacaaaaccattgcacctctggttgcatctggagctgtccagctaatttaaaactaggcataaacagccaggcatggtgactcaagcctgtaatcccagcactttgggaggccgaggcgggcggatcatgaggtcaggagttcgagaccaaccgaccaacatggtgaaaccccatctttactaaaaatacaaaataattagccgggtgttggtggtgtgcacctgtaatcccagctactcaggaggccggggcaggagaatcgcttgaacctgggagcaggaggttgcagtgagccgaggtcgtgccattgcactccagcctgggtgacagtgagactttgtctcaaaaaaaaaaacaaaaaacaaaaaaaaaacaaactaggcataaactcatgaggtcaggagatcaagaccatcctggctactaaaccccatctctactaaacccatctctactaaaaatacaaaaaattagccaggcatggtggcgggcccatctactcaggaggctgaggcaggagaatggtgtgaacccgggaggtggagcttgcagtgagccaagatcgtgccattgcactctagcctgggcgacagagcgagactccatttccaaaaaaaacacactaggcgtaaacaagaatgaagacctggaaccgtagagaaaatactagaaacccctcgtatcacgttgtgcctgaggacaataataaagtagtttactaggcatcagacattcctcagcagtgctgtgggtcacgggcgtgaagcggagctcgaggcaggattgcttgtgttgctgcatgtcctgtctgctgttttagcccgtgtcagtagatggggccattgtactgtttgttctgcacacttggcggagcagcagaggctctcagcacgccttttccctttgtagtattttctgagctaaggaaagtcaggcagaagtagttcataagaaggcatcactgcctgtgatcggggctgcatttagccctgacctgataatggtaggagagttcatttagcctttctgctgcgaagattgtaaatagattaaagaaaacagctgtggccttctcccgtcatacatcattagactgtgtaaactaacattttagaacctctaatattggacttaaaaccaatttctgtcgtgcttaattgaaaatcacaactaaaccaataaaccattattaaatttccattctgcagcagaaggcacctctggacggctcccggcttgtagtttaatgaagtatgtgctccctgctgttaacccgcagccctccccaactctccagcagctttgccaagtcagcctccgggccatctggctgtccttggccaaggcactgttaacggagtgacgttaaccatcttgtattgtgacctgtggccgcttttctggtttaagtccttcactttttcaagaggaatggatgaaattaatgtgcatgcagagtctcacagtgatgccggaaggaaggatgtataggcagtgaatgaatgatctttccttgaaatgctataaaaagcaacctgcattccagtcttttcttcctggttgaagttggcagatttccatttgcagggtatgggctgcgagagtaatcagggtaacattgctgtcatttccaagagaaatcagtaggggaaagcaagggaggtcttttttttttttcttttttgagacggagtttccctcttgttacccaggctggagtggcagtggtgtgaacacggctcactgcagcctccacctcctgggttcaagagattctcctgccccagcctcccgagtagctggtattataggtgcacaccaccacacccaactaattttttgtatttttagtagagatggggtttcatgatgttggccaagctggtctcgagctcctgaccccaggtgatccacccacctcggcctcccaaagtgctggaattataggcgtgagccactgcgcacggcctggggaggttttatttcttgacaaaggtatttgatactcgtgcagtccctggagggtctcactggagagacaacatttaggctgagatctgattaacaggaggcagctgcagtgcagaggtcaaaagggagggtgttccaggcagagaaaacagcctgtgcaaaggccctgaggcagaaacaaactctacttgaggtcagcctggttagaaagcccaactcaaaatagaaagtattacatgataaggtctgaggcaggctggacccagatcttacaggaccttgttaataaggatcccatttggtcccccacagtcctgagaagcgggcagggctgtgggaaacagcagatatttagtggtaagcctgagatcagaacccaagtctgcacttcctagtcacgttctccctgtagtgctaagcccagagacctgagctgttaacctagaacagtgtgcttcctaagccttaatgtgcatacccatcgcctggagctcgccttaagatgtaggttctgcctgaagcccaagttcatttagtatgtcatggttaattcagagtaaaatcaagagttagtacttgatttatgcttgttatataaagaaagagacaacttcactgtatgatcattttgtcacttttcaaaagcatttaattcccattcaattgaaaatgtttcaagaacaaacctgtttggtcattttattgatattgcacatttgtatatgaataaatttttgcaaattaaaaaaaaaaaagatgtaggttctgaaacagggtgaggtccaggatcctgcctttctaaggagctcccatgttgtgcagttgctgctggcccggggaccacattgaatgacggctctacgtcctcatgcctccagctgctgccctgtacatgtccaactgcacggagcactttacatcctctaaaaccacagtaaattgctccatttcctaaattacctcttcaagagaagactggttttgatgtcatttttaaataaaggagaagttgaatttcaaaa

SEQ ID NO: 137046 - DNA, 2022 bp, Homo sapiens
  Payload ID: 6831
  Gene Symbol: GINS4
  Gene Name: GINS complex subunit 4 (Sld5 homolog)
  Uniprot ID: Q9BRT9
  ENST ID: ENST00000520710
  CDS Start-End: 983-1285
ctttgcgagagtagcgcgggagctgagaagttgcagggttgagttggtcccggcaagtccttgagcagtttgttcctctgtcttcccgcttcctggtgccccgactgcgtccccacgaacgccccgtccttaccgccggctgctgtggagtgcctcgctgtctcccaggtccccgagtgagcgtcgaatgggacctctgtggctagggcaggcctgtgtgggtggcactgagagggaggaggggagggggatgttcgcagtttccttgcgaccccagggactttctttgtccccgccatccacctccttaggcctttgggatcgccgactggtctaatgtcgccggcccttgtggctctgggaaattagcattgattaatcttcctaacaatttttgtttttatagagacaggatctccctatgttgcccaggctggtctcgaactcctgggctcaaggtatcttcctgcctcggcttcccaaagtgctgggattacaggcgtgagcccggccagctcctaataatgttaagtgcttgctaggagtcaagcgctgtgctgagcgcaggggcttcccacgtcattgcgtccccagtgcttagtgccaggcactgagcagaggcgcgattcgtatttgaactaaaacgaaccccgtccctgaggaacaagacctctactgggaagtcaaagaaatgaatagtgattgtatggtgtgatgggtgctcagctcttggtggacagaagtaagggggaggcttgtttgagaaacggatacctgacctaagccttggaggaagaggcagacactggaaaactagagtccctgcgttctctcaccacttgctaaagggcctctacaaccccaggaaacctcaataaacctttcctttctccagatagatgtctgttcttgcagataattagaaaacgcattgcagagtattggttctttccctctcattaggttcctggtttcagagaagatgaccgaagaagtggatttcctgggacaggactctgatgggggtagtgaggaagtggtcctaactcctgcagagctcattgaaagattggagcaggcctggatgaatgaaaagtttgcccctgagctgctggagagcaagcctgagattgtagaatgtgtcatggaacagctggagcacatggaagaaaatctcaggagagccaaaagggaggacctgaaggtcagcatccaccaaatggagatggagaggatccgctacgtcctcagcagctacttgcggtgtcgcctcatgaaggtttgacgtggagatacctggagggattgagacagcacagtctgtaatgcagactgaatgtcctggggaaaacttgggctggggcccaggagggtccaggacctgaagatgctgctaagagcccaatatccatgtagctaaactgtaaggagagcgagagattgctccacagaagcacagaggaacgtgtgtggcccactgcggggacaccgcacacatttttagtctgttcacctgccgagtgagtggttcccccttgcgttacagcatggcagtgctaaagggagagttgttggcattggtcaatagtgaatgctgactagaggagaacttgtttccaaaattattttgtctgtcagatggccaacgtcagtgtcaaatgaaccaggatgacttacattcacctacagctttgtggctatctaacttacaaaaatgaagttgcaggccaggcgtggtggctcacacctgtaatcccagcactttgggaggctaggcgggtggatcacctgaggtcaggagtttgagaccagcctgaccaacaaggtgaaaccccatttctactaaaaataaaaaaattagccaggcgtggcggcaggcgcctgtagtcccagctactcaggaggctgagacaggagaattgcttgaacccaggaggtggaggtttcagtgagccaagattgtaccactgcactccagcctgggcaacagagcgagactccgcctcaaaaaaaaaaaaaaaa

SEQ ID NO: 137047 - DNA, 835 bp, Homo sapiens
  Payload ID: 6831
  Gene Symbol: GINS4
  Gene Name: GINS complex subunit 4 (Sld5 homolog)
  ENST ID: ENST00000520354
  CDS Start-End: 199-513
aaactttgcgagagtagcgcgggagctgagaagttgcagggttgagttggtcccggcaagtccttgagcagtttgttcctctgtcttcccgcttcctggtgccccgactgcgtccccacgaacgccccgtccttaccgccggctgctgtggagtgcctcgctgtctcccaggtccccgagttcctggtttcagagaagatgaccgaagaagtggatttcctgggacaggactctgatgggggtagtgaggaagtggtcctaactcctgcagagctcattgaaagattggagcaggcctggatgaatgaaaagtttgcccctgagctgctggagagcaagcctgagattgtagaatgtgtcatggaacagctggagcacatggaagaaaatctcaggagagccaaaagggaggacctgaaggtcagcatccaccaaatggagatggagaggatccgctacgtcctcagcagctacttgcggtgtcgcctcatgaagttcccaaaccagatctagattcttacgtgtttctgagagtgagagaacgacaagaaaacatactggtagaaccagacacagatgagcagagggactacgtgattgacctggagaagggctcacagcacttgatccgatacaaaaccattgcacctctggttgcatctggagctgtccagctaatttaaaactaggcataaacagccaggcatggtgactcaagcctgtaatcccagcactttgggaggccgaggcgggcggatcatgaggtcaggagttcgagaccaaccgaccaacatggtgaaaccccatctttactaaaaatacaaaataattagcc

SEQ ID NO: 137048 - DNA, 1782 bp, Homo sapiens
  Payload ID: 6832
  Gene Symbol: GIPC1
  Gene Name: GIPC PDZ domain containing family, member 1
  Uniprot ID: O14908
  ENST ID: ENST00000345425
  CDS Start-End: 127-1128
ggcccggtctggagtttgcggagggccgagccgggtgcgcacggggaggcggaggcagcggcggcggcggcggcggcggcggcggcggcggagcagatcttctggtgaccccacttctcgctgctcatgccgctgggactggggcggcggaaaaaggcgccccctctagtggaaaatgaggaggctgagccaggccgtggagggctgggcgtgggggagccagggcctctgggcggaggtgggtcggggggcccccaaatgggcttgcccccccctcccccagccctgcggccccgcctcgtgttccacacccagctggcccatggcagtcccactggccgcatcgagggcttcaccaacgtcaaggagctgtatggcaagatcgccgaggccttccgcctgccaactgccgaggtgatgttctgcaccctgaacacccacaaagtggacatggacaagctcctggggggccagatcgggctggaggacttcatcttcgcccacgtgaaggggcagcgcaaggaggtggaggtgttcaagtcggaggatgcactcgggctcaccatcacggacaacggggctggctacgccttcatcaagcgcatcaaggagggcagcgtgatcgaccacatccacctcatcagcgtgggcgacatgatcgaggccattaacgggcagagcctgctgggctgccggcactacgaggtggcccggctgctcaaggagctgccccgaggccgtaccttcacgctgaagctcacggagcctcgcaaggccttcgacatgatcagccagcgttcagcgggtggccgccctggctctggcccacaactgggcactggccgagggaccctgcggctccgatcccggggccccgccacggtggaggatctgccctctgcctttgaagagaaggccattgagaaggtggatgacctgctggagagttacatgggtatcagggacacggagctggcggccaccatggtggagctgggaaaggacaaaaggaacccggatgagctggccgaggccctggacgaacggctgggtgactttgccttccctgacgagttcgtctttgacgtctggggcgccattggggacgccaaggtcggccgctactaggactgcccccggaccctgcgatgatgacccgggcgcaacctggtgggggcccccagcagggacactgacgtcaggacccgagcctccagcctgagcctagctcagcagcccaaggacgatggtgaggggaggtggggccaggccccctgccccgctccaatcggtaccatcccctccctggttcccagtctggccggggtccccggcccccctgtgccctgttccccacctacctcagctgggtcaggcacagggaggggagggatcagccaaattgggcggccacccccgcctccaccactttccaccatcagctgccaaactggtccctctgtctccctggggccttgggttctgtttgggggtcatgaccttcctagtttcctgacgcagggaatacaggggagagggttgtccttccccccagcaaatgcaataatgccctcacccctcctgagaggagccccctccctgtggagcctgttacctccgcatttgacacgagtctgctgtgaaccccgcaacctcctccccacctcccatctctccttccaggcccatccctggcccagagcaggagggagggagggacgatggcggtgggtttttgtatctgaatttgctgtcttgaacataaagaatctatctgctgtt

SEQ ID NO: 137049 - DNA, 1483 bp, Homo sapiens
  Payload ID: 6832
  Gene Symbol: GIPC1
  Gene Name: GIPC PDZ domain containing family, member 1
  Uniprot ID: O14908
  ENST ID: ENST00000393028
  CDS Start-End: 117-827
ggcgccgctgcgggagaggcccggtctggagtttgcggagggccgagccgggtgcgcacggggaggcggaggcagcggcggcggcggcggcggcggcggcggcggcggagcaggtgatgttctgcaccctgaacacccacaaagtggacatggacaagctcctggggggccagatcgggctggaggacttcatcttcgcccacgtgaaggggcagcgcaaggaggtggaggtgttcaagtcggaggatgcactcgggctcaccatcacggacaacggggctggctacgccttcatcaagcgcatcaaggagggcagcgtgatcgaccacatccacctcatcagcgtgggcgacatgatcgaggccattaacgggcagagcctgctgggctgccggcactacgaggtggcccggctgctcaaggagctgccccgaggccgtaccttcacgctgaagctcacggagcctcgcaaggccttcgacatgatcagccagcgttcagcgggtggccgccctggctctggcccacaactgggcactggccgagggaccctgcggctccgatcccggggccccgccacggtggaggatctgccctctgcctttgaagagaaggccattgagaaggtggatgacctgctggagagttacatgggtatcagggacacggagctggcggccaccatggtggagctgggaaaggacaaaaggaacccggatgagctggccgaggccctggacgaacggctgggtgactttgccttccctgacgagttcgtctttgacgtctggggcgccattggggacgccaaggtcggccgctactaggactgcccccggaccctgcgatgatgacccgggcgcaacctggtgggggcccccagcagggacactgacgtcaggacccgagcctccagcctgagcctagctcagcagcccaaggacgatggtgaggggaggtggggccaggccccctgccccgctccaatcggtaccatcccctccctggttcccagtctggccggggtccccggcccccctgtgccctgttccccacctacctcagctgggtcaggcacagggaggggagggatcagccaaattgggcggccacccccgcctccaccactttccaccatcagctgccaaactggtccctctgtctccctggggccttgggttctgtttgggggtcatgaccttcctagtttcctgacgcagggaatacaggggagagggttgtccttccccccagcaaatgcaataatgccctcacccctcctgagaggagccccctccctgtggagcctgttacctccgcatttgacacgagtctgctgtgaaccccgcaacctcctccccacctcccatctctccttccaggcccatccctggcccagagcaggagggagggagggacgatggcggtgggtttttgtatctgaatttgctgtcttgaacataaagaatctatctgctgttgg

SEQ ID NO: 137050 - DNA, 1926 bp, Homo sapiens
  Payload ID: 6832
  Gene Symbol: GIPC1
  Gene Name: GIPC PDZ domain containing family, member 1
  Uniprot ID: O14908
  ENST ID: ENST00000393033
  CDS Start-End: 271-1272
ggcccggtctggagtttgcggagggccgagccgggtgcgcacggggaggcggaggcagcggcggcggcggcggcggcggcggcggcggcggagcagatgaagaaactgaggccctgtgatgtgaagtgacttgccccccagccacacagctggaccattctggctgctgtctggacaagaagtcgtagggggtgagggtggaagctgggaaacccacaggaggcaaccacactagtttagatcttctggtgaccccacttctcgctgctcatgccgctgggactggggcggcggaaaaaggcgccccctctagtggaaaatgaggaggctgagccaggccgtggagggctgggcgtgggggagccagggcctctgggcggaggtgggtcggggggcccccaaatgggcttgcccccccctcccccagccctgcggccccgcctcgtgttccacacccagctggcccatggcagtcccactggccgcatcgagggcttcaccaacgtcaaggagctgtatggcaagatcgccgaggccttccgcctgccaactgccgaggtgatgttctgcaccctgaacacccacaaagtggacatggacaagctcctggggggccagatcgggctggaggacttcatcttcgcccacgtgaaggggcagcgcaaggaggtggaggtgttcaagtcggaggatgcactcgggctcaccatcacggacaacggggctggctacgccttcatcaagcgcatcaaggagggcagcgtgatcgaccacatccacctcatcagcgtgggcgacatgatcgaggccattaacgggcagagcctgctgggctgccggcactacgaggtggcccggctgctcaaggagctgccccgaggccgtaccttcacgctgaagctcacggagcctcgcaaggccttcgacatgatcagccagcgttcagcgggtggccgccctggctctggcccacaactgggcactggccgagggaccctgcggctccgatcccggggccccgccacggtggaggatctgccctctgcctttgaagagaaggccattgagaaggtggatgacctgctggagagttacatgggtatcagggacacggagctggcggccaccatggtggagctgggaaaggacaaaaggaacccggatgagctggccgaggccctggacgaacggctgggtgactttgccttccctgacgagttcgtctttgacgtctggggcgccattggggacgccaaggtcggccgctactaggactgcccccggaccctgcgatgatgacccgggcgcaacctggtgggggcccccagcagggacactgacgtcaggacccgagcctccagcctgagcctagctcagcagcccaaggacgatggtgaggggaggtggggccaggccccctgccccgctccaatcggtaccatcccctccctggttcccagtctggccggggtccccggcccccctgtgccctgttccccacctacctcagctgggtcaggcacagggaggggagggatcagccaaattgggcggccacccccgcctccaccactttccaccatcagctgccaaactggtccctctgtctccctggggccttgggttctgtttgggggtcatgaccttcctagtttcctgacgcagggaatacaggggagagggttgtccttccccccagcaaatgcaataatgccctcacccctcctgagaggagccccctccctgtggagcctgttacctccgcatttgacacgagtctgctgtgaaccccgcaacctcctccccacctcccatctctccttccaggcccatccctggcccagagcaggagggagggagggacgatggcggtgggtttttgtatctgaatttgctgtcttgaacataaagaatctatctgctgtt

SEQ ID NO: 137051 - DNA, 484 bp, Homo sapiens
  Payload ID: 6832
  Gene Symbol: GIPC1
  Gene Name: GIPC PDZ domain containing family, member 1
  ENST ID: ENST00000587969
  CDS Start-End: 122-484
tgagttactgggatggaatccccctagtcctctcccagctctctcccttcgccctccagtggtgattagaaaagggggagggagggggaagaggtttcagcgtctcccacccctgcaggtgatgttctgcaccctgaacacccacaaagtggacatggacaagctcctggggggccagatcgggctggaggacttcatcttcgcccacgtgaaggggcagcgcaaggaggtggaggtgttcaagtcggaggatgcactcgggctcaccatcacggacaacggggctggctacgccttcatcaagcgcatcaaggagggcagcgtgatcgaccacatccacctcatcagcgtgggcgacatgatcgaggccattaacgggcagagcctgctgggctgccggcactacgaggtggcccggctgctcaaggagctgccccgaggccgtaccttcacgctgaagctcacggagcctcgcaaggccttc

SEQ ID NO: 137052 - DNA, 853 bp, Homo sapiens
  Payload ID: 6832
  Gene Symbol: GIPC1
  Gene Name: GIPC PDZ domain containing family, member 1
  ENST ID: ENST00000589497
  CDS Start-End: 164-352
ggcggcggcggagcagatgaagaaactgaggccctgtgatgtgaagtgacttgccccccagccacacagctggaccattctggctgctgtctggacaagaagtcgtagggggtgagggtggaagctgggaaacccacaggaggcaaccacactagtttaggtgatgttctgcaccctgaacacccacaaagtggacatggacaagctcctggggggccagatcgggctggaggacttcatcttcgcccacgtgaaggggcagcgcaaggaggtggaggtgttcaagtcggaggatgcactcgggctcaccatcacggacaacggggctggctacgccttcatcaagacatgatcagccagcgttcagcgggtggccgccctggctctggcccacaactgggcactggccgagggaccctgcggctccgatcccggggccccgccacggtggaggatctgccctctgcctttgaagagaaggccattgagaaggtggatgacctgctggagagttacatgggtatcagggacacggagctggcggccaccatggtggagctgggaaaggacaaaaggaacccggatgagctggccgaggccctggacgaacggctgggtgactttgccttccctgacgagttcgtctttgacgtctggggcgccattggggacgccaaggtcggccgctactaggactgcccccggaccctgcgatgatgacccgggcgcaacctggtgggggcccccagcagggacactgacgtcaggacccgagcctccagcctgagcctagctcagcagcccaaggacgatggtgaggggaggtggggccaggccccctgccccgctccaa

SEQ ID NO: 137053 - DNA, 265 bp, Homo sapiens
  Payload ID: 6832
  Gene Symbol: GIPC1
  Gene Name: GIPC PDZ domain containing family, member 1
  ENST ID: ENST00000591245
  CDS Start-End: 146-265
cttagtctgtcacccaggctagagtgcagtggtgcgatcttgggtcaccgcaacctccacctctccagttcaagctattcttgtgcctcagcctcccaagtagctgggattacagatcttctggtgaccccacttctcgctgctcatgccgctgggactggggcggcggaaaaaggcgccccctctagtggaaaatgaggaggctgagccaggccgtggagggctgggcgtgggggagccagggcctctgggcggaggtgggtcg

SEQ ID NO: 137054 - DNA, 799 bp, Homo sapiens
  Payload ID: 6832
  Gene Symbol: GIPC1
  Gene Name: GIPC PDZ domain containing family, member 1
  ENST ID: ENST00000589631
  CDS Start-End: 1-387
aagaggagacggactcaggcagctggagactcaggctgggacatgatcagccagcgttcagcgggtggccgccctggctctggcccacaactgggcactggccgagggaccctgcggctccgatcccggggccccgccacggtggaggatctgccctctgcctttgaagagaaggccattgagaaggtggatgacctgctggagagttacatgggtatcagggacacggagctggcggccaccatggtggagctgggaaaggacaaaaggaacccggatgagctggccgaggccctggacgaacggctgggtgactttgccttccctgacgagttcgtctttgacgtctggggcgccattggggacgccaaggtcggccgctactaggactgcccccggaccctgcgatgatgacccgggcgcaacctggtgggggcccccagcagggacactgacgtcaggacccgagcctccagcctgagcctagctcagcagcccaaggacgatggtgaggggaggtggggccaggccccctgccccgctccaatcggtaccatcccctccctggttcccagtctggccggggtccccggcccccctgtgccctgttccccacctacctcagctgggtcaggcacagggaggggagggatcagccaaattgggcggccacccccgcctccaccactttccaccatcagctgccaaactggtccctctgtctccctggggccttgggttctgtttgggggtcatgaccttcctagtttcctgacgcagggaatacaggggagagggt

SEQ ID NO: 137055 - DNA, 330 bp, Homo sapiens
  Payload ID: 6832
  Gene Symbol: GIPC1
  Gene Name: GIPC PDZ domain containing family, member 1
  ENST ID: ENST00000587934
  CDS Start-End: 210-330
gaccattctggctgctgtctggacaagaagtcgtagggggtgagggtggaagctgggaaacccacaggaggcaaccacactagtttagggatgggatttcgacatgttggtcaggcatctcgaactcctgacctcaagtgatcctcccgtctcagcctcccacagtgctgggattacagatcttctggtgaccccacttctcgctgctcatgccgctgggactggggcggcggaaaaaggcgccccctctagtggaaaatgaggaggctgagccaggccgtggagggctgggcgtgggggagccagggcctctgggcggaggtgggtcgg

SEQ ID NO: 137056 - DNA, 1386 bp, Homo sapiens
  Payload ID: 6832
  Gene Symbol: GIPC1
  Gene Name: GIPC PDZ domain containing family, member 1
  Uniprot ID: O14908
  ENST ID: ENST00000586027
  CDS Start-End: 215-1216
ggcccggtctggagtttgcggagggccgagccgggtgcgcacggggaggcggaggcagcggcggcggcggcggcggcggcggcggcggcggagcaggaccattctggctgctgtctggacaagaagtcgtagggggtgagggtggaagctgggaaacccacaggaggcaaccacactagtttagatcttctggtgaccccacttctcgctgctcatgccgctgggactggggcggcggaaaaaggcgccccctctagtggaaaatgaggaggctgagccaggccgtggagggctgggcgtgggggagccagggcctctgggcggaggtgggtcggggggcccccaaatgggcttgcccccccctcccccagccctgcggccccgcctcgtgttccacacccagctggcccatggcagtcccactggccgcatcgagggcttcaccaacgtcaaggagctgtatggcaagatcgccgaggccttccgcctgccaactgccgaggtgatgttctgcaccctgaacacccacaaagtggacatggacaagctcctggggggccagatcgggctggaggacttcatcttcgcccacgtgaaggggcagcgcaaggaggtggaggtgttcaagtcggaggatgcactcgggctcaccatcacggacaacggggctggctacgccttcatcaagcgcatcaaggagggcagcgtgatcgaccacatccacctcatcagcgtgggcgacatgatcgaggccattaacgggcagagcctgctgggctgccggcactacgaggtggcccggctgctcaaggagctgccccgaggccgtaccttcacgctgaagctcacggagcctcgcaaggccttcgacatgatcagccagcgttcagcgggtggccgccctggctctggcccacaactgggcactggccgagggaccctgcggctccgatcccggggccccgccacggtggaggatctgccctctgcctttgaagagaaggccattgagaaggtggatgacctgctggagagttacatgggtatcagggacacggagctggcggccaccatggtggagctgggaaaggacaaaaggaacccggatgagctggccgaggccctggacgaacggctgggtgactttgccttccctgacgagttcgtctttgacgtctggggcgccattggggacgccaaggtcggccgctactaggactgcccccggaccctgcgatgatgacccgggcgcaacctggtgggggcccccagcagggacactgacgtcaggacccgagcctccagcctgagcctagctcagcagcccaaggacgatggtgaggggaggtggggccaggccccctgccccgctccaatcggtaccat

SEQ ID NO: 137057 - DNA, 1068 bp, Homo sapiens
  Payload ID: 6832
  Gene Symbol: GIPC1
  Gene Name: GIPC PDZ domain containing family, member 1
  Uniprot ID: O14908
  ENST ID: ENST00000591349
  CDS Start-End: 188-898
ggcccggtctggagtttgcggagggccgagccgggtgcgcacggggaggcggaggcagcggcggcggcggcggcggcggcggcggcggcggagcaggaccattctggctgctgtctggacaagaagtcgtagggggtgagggtggaagctgggaaacccacaggaggcaaccacactagtttaggtgatgttctgcaccctgaacacccacaaagtggacatggacaagctcctggggggccagatcgggctggaggacttcatcttcgcccacgtgaaggggcagcgcaaggaggtggaggtgttcaagtcggaggatgcactcgggctcaccatcacggacaacggggctggctacgccttcatcaagcgcatcaaggagggcagcgtgatcgaccacatccacctcatcagcgtgggcgacatgatcgaggccattaacgggcagagcctgctgggctgccggcactacgaggtggcccggctgctcaaggagctgccccgaggccgtaccttcacgctgaagctcacggagcctcgcaaggccttcgacatgatcagccagcgttcagcgggtggccgccctggctctggcccacaactgggcactggccgagggaccctgcggctccgatcccggggccccgccacggtggaggatctgccctctgcctttgaagagaaggccattgagaaggtggatgacctgctggagagttacatgggtatcagggacacggagctggcggccaccatggtggagctgggaaaggacaaaaggaacccggatgagctggccgaggccctggacgaacggctgggtgactttgccttccctgacgagttcgtctttgacgtctggggcgccattggggacgccaaggtcggccgctactaggactgcccccggaccctgcgatgatgacccgggcgcaacctggtgggggcccccagcagggacactgacgtcaggacccgagcctccagcctgagcctagctcagcagcccaaggacgatggtgaggggaggtggggccaggccccctgccccgctccaatcggtaccat

SEQ ID NO: 137058 - DNA, 576 bp, Homo sapiens
  Payload ID: 6832
  Gene Symbol: GIPC1
  Gene Name: GIPC PDZ domain containing family, member 1
  ENST ID: ENST00000587210
  CDS Start-End: 100-576
ggcccggtctggagtttgcggagggccgagccgggtgcgcacggggaggcggaggcagcggcggcggcggcggcggcggcggcggcggcggagcaggtgatgttctgcaccctgaacacccacaaagtggacatggacaagctcctggggggccagatcgggctggaggacttcatcttcgcccacgtgaaggggcagcgcaaggaggtggaggtgttcaagtcggaggatgcactcgggctcaccatcacggacaacggggctggctacgccttcatcaagcgcatcaaggagggcagcgtgatcgaccacatccacctcatcagcgtgggcgacatgatcgaggccattaacgggcagagcctgctgggctgccggcactacgaggtggcccggctgctcaaggagctgccccgaggccgtaccttcacgctgaagctcacggagcctcgcaaggccttcgacatgatcagccagcgttcagcgggtggccgccctggctctggcccacaactgggcactggccgagggaccctgcggctccgatcccggggccccgccacggtggaggatctg

SEQ ID NO: 137059 - DNA, 3847 bp, Homo sapiens
  Payload ID: 6833
  Gene Symbol: GIPC2
  Gene Name: GIPC PDZ domain containing family, member 2
  Uniprot ID: Q8TF65
  ENST ID: ENST00000370759
  CDS Start-End: 194-1141
gctgggcgggcgggcggctgctccggtccaggggtggaggtcggggccctgacccgacgcagccaggcggaagcgcggctgccattggaggctgcttttacctgcgcggggcccggggcgcaaagtccgaggcgccggggggaggaggcggcggacggcagcgcaggtgggcccgcgctctcggccctgcaagatgcccctgaagctgcgggggaagaagaaggccaagtccaaggagaccgccgggctggtggagggcgagccgacgggcgcgggcggcgggagcctctcagcgtcccgggctcccgcacgcaggctggtcttccacgcgcagctggcgcacggtagtgccacgggccgagtggagggcttctccagcatccaggagctctacgcccagatcgcgggcgcgtttgaaatctcgccgtcggagatcttatattgcactttaaacacacctaaaattgacatggaaagactcttaggaggacaactaggactagaagatttcatatttgcccatgtgaaaggaatcgaaaaagaagtgaatgtgtataaatctgaggattcacttggtctcaccattacagataatggtgttggctatgcttttataaagagaattaaagatggtggtgttattgactcagttaaaacaatctgtgttggggatcatattgaatccataaatggagaaaatattgttgggtggcgtcactatgatgttgctaagaagttaaaggaattaaaaaaggaggaactctttactatgaagttaatagaacctaagaaggcatttgaaatagagctgaggtcaaaggctggaaagtcatcaggagaaaaaattggttgtggaagggcaacacttcgcctgagatcaaaaggtcctgccaccgtggaagaaatgccttctgaaaccaaagcaaaggcaattgaaaagattgatgatgttcttgagttgtacatgggaattcgagatattgatttagccaccacaatgtttgaagctggaaaggacaaagtaaatccagatgaatttgctgtggcacttgacgaaactcttggagactttgcgttcccagacgaatttgtctttgatgtttggggagtcattggtgatgccaaacgaagaggattatgatgtgtacactccatctctgaagaaacaacccatcgttcttttttttctcttttttaaaaagtcctataagatctgtttttggacacctttactaactctggtttaatttcatgtgtatggaatatattctttgaaatataattttggtaattttgatttctgggcactttttaacattgctgatgtagtatgcttaagagaaatgacctaaataaggatcaattgtaatattcattcaaaaggtttttaaaagtaagttttaaggagtatttctcgacagatgattttcttctccattaatacccatgctttgtttttcacatataaatagatgatttcaatagctttgtagttttttttcaaaatcttaatgtaaactaggattggagtatgatttacctcatagtatcttcactgtgttatcctagtttgaacaggatatgttcaggaaatgaaaggtgaattatgccccttattggtctagaagcattggtttttttttgatcctctgagtaagggaaggaagattcctgtggcatgttgatttctatggccaactttctctctttgtaaaacaaagattgattgattttcttgtatgcttctttatacatgctcttaaaacttgtggttgaaatctgtgctgtgtgtgtgtgtctctgcatgtgtaaaagaagggtaaaaaagagatgggtagggtagaactacttgcatttgatttttttttcagtccttaaaacattatttctttttttcactcatagccacttttatgttaccttttataagcactccagggaagattttatatttttttgtagagtttttggaaagatatttactcaaaataactatgctttagaactttttttttttttttttttttggttaaacagcagcactttttagttccctaaactttagaagaaatgctatcagaaatagatttccttccagtggaaagaaaggaggaagggagaattgagaaaatatattagtctattattttagagttctaatacactctaaattaaagagaaaattgagagtaaatgactgtcttatcactcttatttgacatttcgtaggtgtaagagaaatggaaatgaatggtttcaacaaagatcatttaatacagcagagcatggcatgaccaagcatctttgtaaagtgttagatggaaaatgctgtgtgctgccatggtaatcagaaataataacctgttagggatgtattctaggaaatcagaagtagttctcttttcttgctggattattgcttagataactcttgttttctggtaaaactttagttgtattgccatccactcctttttcaaatgagtttaatgccataaagctgatattctttgtccgattaatttgaaatctgcacagaagctgttttagtcattaatgtgtaacaaaagtagcttatagaatatggactgccttattgctgttgcttatcatttgaaaataaaatccagctcaggttgtaacttgttggtactcgtttagtgagttcgttttggaggttctgaaatacctattaattcttaatattacctctcttggaaagacacaaaaaaagagctgttatttttaggcataagatgacttaggaggcccatagaaacattctcgtttaaacaacaacaacaaaataaatttatcagcactagatattagatttgaaataagtcattgttcattattgatggttgtcagtttctccttcctttttgggcatgcataaagacacacttggtgctgattccatgtgatttatggaatgtcattttcacaatgatctttctagaatttgtgtgtaaggttgtgatatccatgtacagctgtaactatatatacttgtctgttagcattcagtggaccattatcattactatcatcacattacctgggcttcaactgggcccaagtactctatatactgcctgtaataggtttttccttgaaatatccttatctttcacctctacagctaaactgataacaaggtcagtttctttatgtcattttattcccatacctaaaattgcatctatttgtgagctttctgcctttttgtaacgctcagtgcaccaaaagcgtctgtttttagtgcagtcacataatatataagtgtgggatacccttctgcagcttcagtgagacaaatcactttttaaaaaacattccattttattggcatcactagatgtttttaggaccctgtccttttcacttttctgtaggctttttttttttaaatggaagatgattattttgtttgttcttgatttcctgttattgaaaacagcatcttccttcttgcaatggccactaatagcacacaatgcgttttctttgattgtagcagaaaatgcaaatgataattgtatgttgggctcgatgaggccttgaacatagctgagtcctaatcagatgtatatactctgatgattacaaataggtacatgttgggtttctgtgatgtttcaaaaatacaattatataattatgatgtaaactctttaagaattcaattataaaagcaataatcaggtaacctctatttggagctgctacatccaatattgtgactgaaaattaactaaagagagataatttttcaaatgatgtataatttgcaatattttcccttgcaactttagcaaatacacatattccaagtaaaacttta

SEQ ID NO: 137060 - DNA, 4335 bp, Homo sapiens
  Payload ID: 6834
  Gene Symbol: GIPC3
  Gene Name: GIPC PDZ domain containing family, member 3
  Uniprot ID: Q8TF64
  ENST ID: ENST00000322315
  CDS Start-End: 46-984
gcggcggcggcgagggcccgggtgggtggccgaacttctcccgccatggagggagcagcggcccgggaggcccgggggaccgagaccccgcgcgcgtctgcgcccccgcccgcgccctcggagcccccggccgcgccccgcgcccgcccgcgcctcgtcttccgcacgcagctggcgcacgggagccccacgggcaagatcgagggcttcaccaacgtccgcgagctgtacgccaagatcgccgaagccttcgggatcgcgcccaccgagattttattctgcaccctcaacagccacaaagtggacatgcagaagctcctggggggtcagataggcctggaggacttcatctttgcccacgtgcgaggcgagaccaaggaggtggaggtcactaagacagaggatgctctggggctgaccatcacggacaacggggctggctacgccttcatcaagagaatcaaggaaggcagtatcatcaaccggatcgaggcagtgtgcgtgggtgacagcatcgaagccatcaacgaccactccattgtgggctgccgccactacgaggtggccaagatgctccgggagctgcccaagtcccagcccttcaccctgcgcctggtgcagcccaagagggccttcgatatgattggccagagaagtcggtccagcaaatgtccagtagaggcgaaagtgaccagcgggagggagaccctgcggcttcgttctgggggggctgccacagtggaggaagcgcccagtgagtttgaggaggaggcatctcggaaggttgatgacctgctggaaagctacatgggcattcgggaccccgagctggcgtccaccatggtggagacgtccaagaagacagcgagcgcccaggagtttgcacgctgtttagactccgtcttgggcgagttcgccttccccgacgagtttgtggtggaagtgtgggccgccatcggcgaggccagagaggcctgtggctagtttgccctgggggggcccagcacagccccagcccggagcccagccccctgccccggccctgctccagaacccagcccagatcggaggacaagttcctctctagaacccaatccaatttggagccccagcccaactccagaacccaacccttctctagaatccagcccagatctgaggccaagctatgtgctagagcccaggccagctctgagaccaagcccagcattgagaataagctctgttctaaaactcaggccagccctgagaccaagcccagctctagaactcagatgagctttgagaccatgcccagcactgagaccaagccctgttctagaactcaggcctgctctgaggccaagcccagctctagaacccagatgagctctgagaccatgcccagctctagaactcagatgggctctgagaccatgcccagctctagaactcagatgggctctgagaccgagcccagctctagaactcagatgggctctgagaccgagcccagctctaaaactcagatgggctctgagaccatgcccagctctagaactcagatgggctctgagaccgagcccagctctagaactcagatgggctctgagaccgagcccagctctagaactcagatgggctctgagaccatgcccagctctagaactcagatgggctccgagaccaagcccagctctagaacccagatgagctctgagaccatgcccagctctagaactcagatgagctctgagacagagcccagtattgagaccaagccctgttctagagtccaggccagctccgagaccaagcccagctctagaacccagataagctctgaaaccaagcccagcatagagaccaagccgtgttctagaattcaggccacatctgaagccaagcccagctctagaactcaggtcagccctgagaccaagcccagctctagaacccagataagctctgaaaccaatcccagcattgagaccaagccctgttctagaactcaggccacctctgaggccaaacccagctctagaacccagataagatctgagaccaagccctgctctgaagcccaggccagctctgagacgaagcacatctctagaatccagctgagccctgacaacaagccaaactctggaacccagacacattttaagacccagaccagcttggagaccaatcccagttccagaatccaggctagctcggagaccaagccctgctggaaaactcaagctgactctggaactctggacagctccacgatgcagccacacctggacactcggtctagctccggaaccccagttaattttggaacccatgtgagattcatgaagcagcccagctctggaaccccagtcagctcaggattcagagacagctcccaaatcaaatcctattcaagaactcagaccagctcagaaacccaggtccacacggctgcccagtccagatcccaaccccagttgcatccaagtgcccatccccatcctgcagcccagtccagctccagtgatgattccagctctgagactgagcccagctctagaacctcgcctagtgctacaaccaggcccaactccaggattcagaccagctctggaaccccatccatcttggaagcaagacccagctccagcacacagcttggtgccaagccccactctccttgcacaatgcagctcagctctagaatgcagtttacttccaggacccagaccaatttcaaggcctggccaagctccagagctcaatccagcccaagcaccgcacccagctctggaactcagctcagttctggagcacaggctggttctgaaatcccagccagctccaaaacacagacagcagctgagacccagccaagttccagaatccagctaagctctggagtccaatctagtcctgggacccaggccatcgcagcaatagaattaagctccacagccctgtctagttccgacagcaggtccagctccaggacccagcgctgcccaggagctcgaccagcctctgggactcaattcgcctctaaaaccctgccaggttctagataccagctccagaccacagccccagacagctctggtattcaactggactttgggaagcagagcagttctgaaagtcagcttagctttggaactcagcccagctctgggacccagataagctcaagaattcaagccagctctggaagtcagcttagttcgggaacccagctgatttccggagcccaacccagctccagaactcagactagttctggaaaccagctcagctccgggacccagaccactgcaagaattcagctcagccctggagctcatcttagctccagaacccagtccagtcctgagaccaggctcagctctgaggctcagtccagctctggaacccagttcagttctgggattcagtttggctctgaaacccagaccggctcaagaattcagcccgactctggagcccaacttagttccagaacccagtccagctctgagaccgggctcagctctgaaacccagaccggctcaagaattcagcccagccctggagcccaccttagttctggaacccagcctgtttctggaacccaatccagttccagaactcacaccagttcaagaatctggctgagccctggaaatggaatctgcccacagacccctggccttgaccctagaatccagcttgaggcccctgccccagcccaacctcagcccccaggcccatcccccagagaccccaccccagcccctagcaaagacccccagcctctgcctcagccccatgatcaggtatgtggcatccaggccagccttggccccatcccaggcttaccccaagcctcctacctggccccacagtcacaggtctcctcaaccccccagaagccagccgtctctcccaagccccgggtgggaccccagaagtccaccccacccaccatatctgtcactcctagtcctgcccctagggcagccctcctgagttcccagctgtctgagtccccagctttggcgccagccctttgccccactctgggggagccaggagcccgcccttaccgcggggggccgtagcttggctgtgacttagccctggttcatgtggttctcgtcctctcctgtcccttccagcctggggcccccagaagcagcaagtgaccttatttctccagcaggcggtggtagggagtgtgcggtggtgaaaacaggggcttcaccggtcctggctcagatccaggtccttggagggaaaaggagggcaggagacgggttgcaccgcatgtaccctgagggctcatggtgaataaaggcaccttccatctctgca

SEQ ID NO: 137061 - DNA, 3321 bp, Homo sapiens
  Payload ID: 6835
  Gene Symbol: GLE1
  Gene Name: GLE1 RNA export mediator
  Uniprot ID: Q53GS7
  ENST ID: ENST00000309971
  CDS Start-End: 107-2203
gcgcgcgcgtcccggaagcagaagcctgtgtggccttcccggcggctgattcgagggcttgtttggtcagaaggggggcgtcagagaagctgccccttagccaaccatgccgtctgagggtcgctgctgggagaccttgaaggccctacgcagttccgacaaaggtcgcctttgctactaccgcgactggctgctgcggcgcgaggatgttttagaagaatgtatgtctcttcccaagctatcttcttattctggatgggtggtagagcacgtcctaccccatatgcaggagaaccaacctctgtctgagacttcgccatcctctacgtcagcttcagccctagatcaaccctcatttgttcccaaatctcctgacgcaagctctgccttttccccagcctcccctgcaacaccaaatggaaccaagggcaaagatgagtcccagcacacagaatctatggtacttcagtcctcacgggggatcaaagtggaaggctgcgtccgaatgtacgaactggtacacagaatgaaaggaacagagggcctgaggctatggcaggaggagcaggagaggaaggtgcaagccctctcggagatggcatctgaacaactgaagcggtttgatgaatggaaggaactgaagcagcataaagaattccaggacttgcgggaagtaatggagaagagctccagagaagccttgggacaccaagagaagctaaaagctgagcaccgtcacagagcaaagattctcaacctgaagctgcgggaagcagagcagcagcgcgtgaagcaagcagaacaggagcggcttcggaaggaagaaggccagatccgcctgcgggccctctatgctctgcaggaggagatgctgcagctcagccagcagctggatgcctctgagcagcacaaagccctgcttaaggtcgacctggctgccttccagacccgaggcaaccagctgtgcagcctcatctcagggatcatccgggcctcttcagagagcagctatcccacagcagagagtcaagctgaggctgagcgagctctgcgggaaatgcgggacctcctgatgaacttggggcaggagatcaccagagcctgcgaagacaagaggaggcaggatgaagaagaggcccaggtaaagctgcaagaggcacagatgcagcagggaccagaggcccacaaagagcccccagctcccagccagggcccaggagggaaacagaatgaagacctccaggtgaaggtacaagacattacaatgcagtggtaccagcagctgcaggatgcttccatgcagtgtgtgttgacctttgagggcctgaccaacagcaaggacagtcaggccaaaaagataaagatggacctccagaaggctgctaccatcccagtgagccaaatctctaccattgcaggctcaaaactgaaggagatctttgacaagatccacagcctgctctctggaaaacctgttcaatctggtgggcgctctgtgtctgtcacacttaacccacaggggctggactttgttcaatacaaactggcagagaaatttgtgaaacaaggcgaggaggaagtggcctctcaccatgaagcagcattccccattgcagttgtggcatccgggatctgggagctccaccccagagtgggggacctcattcttgctcatctacataagaagtgtccttactctgttcctttctatcccactttcaaggagggaatggctttggaagactatcagaggatgcttggttaccaagtaaaggattccaaagtggagcagcaagacaactttctaaaacgcatgtcagggatgatccgtctctacgctgctatcatccagctccggtggccatatggaaaccgacaggagattcaccctcatggcttaaatcatggatggcgctggttggcacagatcttaaacatggagcccttgtcagatgtgacagccaccctcctctttgacttcctggaggtgtgtgggaatgccctcatgaagcaataccaggttcagttctggaagatgctaattctcatcaaagaggactactttcccagaattgaagctatcacaagctcaggacagatgggctccttcatacgcctcaagcagttcttggagaaatgtttgcaacacaaggacattcctgtccccaagggctttctgacttcctccttctggcgctcctgatgtcactccatcacccaccatcaccgctgctgcaaagaggcaataataaaggaactgaagacagctgtatttgggagaagtcatgtcagattcagaaatttgccattatgtatttttatgtatttatgccttgtgactaggagaggagattttcatgggtcacaaaattcttggaggtcccttagtagatttggtagttccttaagagatccacgtgataaaataaatggagttggcctttcttgttttttgcaaaagtgataaaaggtctttagcacttggtctcctcccttgtctctagtgtctttcagaaagttggcaataccttaacaaatgcactctgagctggagggagcccaccatttgcacccacctacccaccctcacccctgttcagatgaatttccagaaagagctaaggctcataaggttcccttttaagtattatttaatagttgaggccagatacttacatgcaagtctgggttatggttgttttgcctttctcagcttgtgaagtcattctaaagctagaggaagtatgtgatatacacatggactaaggctcaggtgacactatggctagattaacatctgggattaggactggaaacacatgtcattttgaactaagggaaactctttgtcatcctaatttggaatttggtccctggatggctagggatccatgaaccaggcaggtaccttttttgtttttgttttgttttgtttcttttctgtttgaattaagatgggctaagatggggcttgcaacattaaacatgagctgagcatccataagcattgaattgggattaaataaagatgttgggcaggaactgaacactgctaatatgatgataaatatgcctgactaaagccactacagaaatccagagattggctgttaaaatttgttttgtggaaagactaattctctttgatactgcagaggcagtggccatggatctgttcctctgtgctaaatgtcttgtggcagggtgtgtttgtgggggagtgttcactggtactcttgagtggcctgaagtgacccattctatgaattgttaattaaggtgccaaaaaaaattaataataaagcttggttttttgaaaaa

SEQ ID NO: 137062 - DNA, 2218 bp, Homo sapiens
  Payload ID: 6835
  Gene Symbol: GLE1
  Gene Name: GLE1 RNA export mediator
  Uniprot ID: Q53GS7
  ENST ID: ENST00000372770
  CDS Start-End: 76-2055
ggccttcccggcggctgattcgagggcttgtttggtcagaaggggggcgtcagagaagctgccccttagccaaccatgccgtctgagggtcgctgctgggagaccttgaaggccctacgcagttccgacaaaggtcgcctttgctactaccgcgactggctgctgcggcgcgaggatgttttagaagaatgtatgtctcttcccaagctatcttcttattctggatgggtggtagagcacgtcctaccccatatgcaggagaaccaacctctgtctgagacttcgccatcctctacgtcagcttcagccctagatcaaccctcatttgttcccaaatctcctgacgcaagctctgccttttccccagcctcccctgcaacaccaaatggaaccaagggcaaagatgagtcccagcacacagaatctatggtacttcagtcctcacgggggatcaaagtggaaggctgcgtccgaatgtacgaactggtacacagaatgaaaggaacagagggcctgaggctatggcaggaggagcaggagaggaaggtgcaagccctctcggagatggcatctgaacaactgaagcggtttgatgaatggaaggaactgaagcagcataaagaattccaggacttgcgggaagtaatggagaagagctccagagaagccttgggacaccaagagaagctaaaagctgagcaccgtcacagagcaaagattctcaacctgaagctgcgggaagcagagcagcagcgcgtgaagcaagcagaacaggagcggcttcggaaggaagaaggccagatccgcctgcgggccctctatgctctgcaggaggagatgctgcagctcagccagcagctggatgcctctgagcagcacaaagccctgcttaaggtcgacctggctgccttccagacccgaggcaaccagctgtgcagcctcatctcagggatcatccgggcctcttcagagagcagctatcccacagcagagagtcaagctgaggctgagcgagctctgcgggaaatgcgggacctcctgatgaacttggggcaggagatcaccagagcctgcgaagacaagaggaggcaggatgaagaagaggcccaggtaaagctgcaagaggcacagatgcagcagggaccagaggcccacaaagagcccccagctcccagccagggcccaggagggaaacagaatgaagacctccaggtgaaggtacaagacattacaatgcagtggtaccagcagctgcaggatgcttccatgcagtgtgtgttgacctttgagggcctgaccaacagcaaggacagtcaggccaaaaagataaagatggacctccagaaggctgctaccatcccagtgagccaaatctctaccattgcaggctcaaaactgaaggagatctttgacaagatccacagcctgctctctggaaaacctgttcaatctggtgggcgctctgtgtctgtcacacttaacccacaggggctggactttgttcaatacaaactggcagagaaatttgtgaaacaaggcgaggaggaagtggcctctcaccatgaagcagcattccccattgcagttgtggcatccgggatctgggagctccaccccagagtgggggacctcattcttgctcatctacataagaagtgtccttactctgttcctttctatcccactttcaaggagggaatggctttggaagactatcagaggatgcttggttaccaagtaaaggattccaaagtggagcagcaagacaactttctaaaacgcatgtcagggatgatccgtctctacgctgctatcatccagctccggtggccatatggaaaccgacaggagattcaccctcatggcttaaatcatggatggcgctggttggcacagatcttaaacatggagcccttgtcagatgtgacagccaccctcctctttgacttcctggaggtgtgtgggaatgccctcatgaagcaataccaggttcagttctggaagatgctaattctcatcaaagaggactactttcccaggtatcaggcttgttgagcagacagcaggggattaagtaactcataaccaggcctcagatacccaagggtgctattacctgctggttttgattcaagttaaaaacacctgtactaagtatgacatctttcctactccagtccctctcgttgatatttgaataaatgcttttgaaccttaa

SEQ ID NO: 137063 - DNA, 3613 bp, Homo sapiens
  Payload ID: 6836
  Gene Symbol: GLI1
  Gene Name: GLI family zinc finger 1
  Uniprot ID: P08151
  ENST ID: ENST00000228682
  CDS Start-End: 92-3412
gcacaccccccagcccagactccagccctggaccgcgcatcccgagcccagcgcccagacagagtgtccccacaccctcctctgagacgccatgttcaactcgatgaccccaccaccaatcagtagctatggcgagccctgctgtctccggcccctccccagtcagggggcccccagtgtggggacagaaggactgtctggcccgcccttctgccaccaagctaacctcatgtccggcccccacagttatgggccagccagagagaccaacagctgcaccgagggcccactcttttcttctccccggagtgcagtcaagttgaccaagaagcgggcactgtccatctcacctctgtcggatgccagcctggacctgcagacggttatccgcacctcacccagctccctcgtagctttcatcaactcgcgatgcacatctccaggaggctcctacggtcatctctccattggcaccatgagcccatctctgggattcccagcccagatgaatcaccaaaaagggccctcgccttcctttggggtccagccttgtggtccccatgactctgcccggggtgggatgatcccacatcctcagtcccggggacccttcccaacttgccagctgaagtctgagctggacatgctggttggcaagtgccgggaggaacccttggaaggtgatatgtccagccccaactccacaggcatacaggatcccctgttggggatgctggatgggcgggaggacctcgagagagaggagaagcgtgagcctgaatctgtgtatgaaactgactgccgttgggatggctgcagccaggaatttgactcccaagagcagctggtgcaccacatcaacagcgagcacatccacggggagcggaaggagttcgtgtgccactgggggggctgctccagggagctgaggcccttcaaagcccagtacatgctggtggttcacatgcgcagacacactggcgagaagccacacaagtgcacgtttgaagggtgccggaagtcatactcacgcctcgaaaacctgaagacgcacctgcggtcacacacgggtgagaagccatacatgtgtgagcacgagggctgcagtaaagccttcagcaatgccagtgaccgagccaagcaccagaatcggacccattccaatgagaagccgtatgtatgtaagctccctggctgcaccaaacgctatacagatcctagctcgctgcgaaaacatgtcaagacagtgcatggtcctgacgcccatgtgaccaaacggcaccgtggggatggccccctgcctcgggcaccatccatttctacagtggagcccaagagggagcgggaaggaggtcccatcagggaggaaagcagactgactgtgccagagggtgccatgaagccacagccaagccctggggcccagtcatcctgcagcagtgaccactccccggcagggagtgcagccaatacagacagtggtgtggaaatgactggcaatgcagggggcagcactgaagacctctccagcttggacgagggaccttgcattgctggcactggtctgtccactcttcgccgccttgagaacctcaggctggaccagctacatcaactccggccaatagggacccggggtctcaaactgcccagcttgtcccacaccggtaccactgtgtcccgccgcgtgggccccccagtctctcttgaacgccgcagcagcagctccagcagcatcagctctgcctatactgtcagccgccgctcctccctggcctctcctttcccccctggctccccaccagagaatggagcatcctccctgcctggccttatgcctgcccagcactacctgcttcgggcaagatatgcttcagccagagggggtggtacttcgcccactgcagcatccagcctggatcggataggtggtcttcccatgcctccttggagaagccgagccgagtatccaggatacaaccccaatgcaggggtcacccggagggccagtgacccagcccaggctgctgaccgtcctgctccagctagagtccagaggttcaagagcctgggctgtgtccataccccacccactgtggcagggggaggacagaactttgatccttacctcccaacctctgtctactcaccacagccccccagcatcactgagaatgctgccatggatgctagagggctacaggaagagccagaagttgggacctccatggtgggcagtggtctgaacccctatatggacttcccacctactgatactctgggatatgggggacctgaaggggcagcagctgagccttatggagcgaggggtccaggctctctgcctcttgggcctggtccacccaccaactatggccccaacccctgtccccagcaggcctcatatcctgaccccacccaagaaacatggggtgagttcccttcccactctgggctgtacccaggccccaaggctctaggtggaacctacagccagtgtcctcgacttgaacattatggacaagtgcaagtcaagccagaacaggggtgcccagtggggtctgactccacaggactggcaccctgcctcaatgcccaccccagtgaggggcccccacatccacagcctctcttttcccattacccccagccctctcctccccaatatctccagtcaggcccctatacccagccaccccctgattatcttccttcagaacccaggccttgcctggactttgattcccccacccattccacagggcagctcaaggctcagcttgtgtgtaattatgttcaatctcaacaggagctactgtgggagggtgggggcagggaagatgcccccgcccaggaaccttcctaccagagtcccaagtttctggggggttcccaggttagcccaagccgtgctaaagctccagtgaacacatatggacctggctttggacccaacttgcccaatcacaagtcaggttcctatcccaccccttcaccatgccatgaaaattttgtagtgggggcaaatagggcttcacatagggcagcagcaccacctcgacttctgcccccattgcccacttgctatgggcctctcaaagtgggaggcacaaaccccagctgtggtcatcctgaggtgggcaggctaggagggggtcctgccttgtaccctcctcccgaaggacaggtatgtaaccccctggactctcttgatcttgacaacactcagctggactttgtggctattctggatgagccccaggggctgagtcctcctccttcccatgatcagcggggcagctctggacataccccacctccctctgggccccccaacatggctgtgggcaacatgagtgtcttactgagatccctacctggggaaacagaattcctcaactctagtgcctaaagagtagggaatctcatccatcacagatcgcatttcctaaggggtttctatccttccagaaaaattgggggagctgcagtcccatgcacaagatgccccagggatgggaggtatgggctgggggctatgtatagtctgtatacgttttgaggagaaatttgataatgacactgtttcctgataataaaggaactgcatcag

SEQ ID NO: 137064 - DNA, 3196 bp, Homo sapiens
  Payload ID: 6836
  Gene Symbol: GLI1
  Gene Name: GLI family zinc finger 1
  Uniprot ID: P08151
  ENST ID: ENST00000528467
  CDS Start-End: 1-3196
atgttcaactcgatgaccccaccaccaatcagtagctatggcgagccctgctgtctccggcccctccccagtcagggggcccccagtgtggggacagaagtcaagttgaccaagaagcgggcactgtccatctcacctctgtcggatgccagcctggacctgcagacggttatccgcacctcacccagctccctcgtagctttcatcaactcgcgatgcacatctccaggaggctcctacggtcatctctccattggcaccatgagcccatctctgggattcccagcccagatgaatcaccaaaaagggccctcgccttcctttggggtccagccttgtggtccccatgactctgcccggggtgggatgatcccacatcctcagtcccggggacccttcccaacttgccagctgaagtctgagctggacatgctggttggcaagtgccgggaggaacccttggaaggtgatatgtccagccccaactccacaggcatacaggatcccctgttggggatgctggatgggcgggaggacctcgagagagaggagaagcgtgagcctgaatctgtgtatgaaactgactgccgttgggatggctgcagccaggaatttgactcccaagagcagctggtgcaccacatcaacagcgagcacatccacggggagcggaaggagttcgtgtgccactgggggggctgctccagggagctgaggcccttcaaagcccagtacatgctggtggttcacatgcgcagacacactggcgagaagccacacaagtgcacgtttgaagggtgccggaagtcatactcacgcctcgaaaacctgaagacgcacctgcggtcacacacgggtgagaagccatacatgtgtgagcacgagggctgcagtaaagccttcagcaatgccagtgaccgagccaagcaccagaatcggacccattccaatgagaagccgtatgtatgtaagctccctggctgcaccaaacgctatacagatcctagctcgctgcgaaaacatgtcaagacagtgcatggtcctgacgcccatgtgaccaaacggcaccgtggggatggccccctgcctcgggcaccatccatttctacagtggagcccaagagggagcgggaaggaggtcccatcagggaggaaagcagactgactgtgccagagggtgccatgaagccacagccaagccctggggcccagtcatcctgcagcagtgaccactccccggcagggagtgcagccaatacagacagtggtgtggaaatgactggcaatgcagggggcagcactgaagacctctccagcttggacgagggaccttgcattgctggcactggtctgtccactcttcgccgccttgagaacctcaggctggaccagctacatcaactccggccaatagggacccggggtctcaaactgcccagcttgtcccacaccggtaccactgtgtcccgccgcgtgggccccccagtctctcttgaacgccgcagcagcagctccagcagcatcagctctgcctatactgtcagccgccgctcctccctggcctctcctttcccccctggctccccaccagagaatggagcatcctccctgcctggccttatgcctgcccagcactacctgcttcgggcaagatatgcttcagccagagggggtggtacttcgcccactgcagcatccagcctggatcggataggtggtcttcccatgcctccttggagaagccgagccgagtatccaggatacaaccccaatgcaggggtcacccggagggccagtgacccagcccaggctgctgaccgtcctgctccagctagagtccagaggttcaagagcctgggctgtgtccataccccacccactgtggcagggggaggacagaactttgatccttacctcccaacctctgtctactcaccacagccccccagcatcactgagaatgctgccatggatgctagagggctacaggaagagccagaagttgggacctccatggtgggcagtggtctgaacccctatatggacttcccacctactgatactctgggatatgggggacctgaaggggcagcagctgagccttatggagcgaggggtccaggctctctgcctcttgggcctggtccacccaccaactatggccccaacccctgtccccagcaggcctcatatcctgaccccacccaagaaacatggggtgagttcccttcccactctgggctgtacccaggccccaaggctctaggtggaacctacagccagtgtcctcgacttgaacattatggacaagtgcaagtcaagccagaacaggggtgcccagtggggtctgactccacaggactggcaccctgcctcaatgcccaccccagtgaggggcccccacatccacagcctctcttttcccattacccccagccctctcctccccaatatctccagtcaggcccctatacccagccaccccctgattatcttccttcagaacccaggccttgcctggactttgattcccccacccattccacagggcagctcaaggctcagcttgtgtgtaattatgttcaatctcaacaggagctactgtgggagggtgggggcagggaagatgcccccgcccaggaaccttcctaccagagtcccaagtttctggggggttcccaggttagcccaagccgtgctaaagctccagtgaacacatatggacctggctttggacccaacttgcccaatcacaagtcaggttcctatcccaccccttcaccatgccatgaaaattttgtagtgggggcaaatagggcttcacatagggcagcagcaccacctcgacttctgcccccattgcccacttgctatgggcctctcaaagtgggaggcacaaaccccagctgtggtcatcctgaggtgggcaggctaggagggggtcctgccttgtaccctcctcccgaaggacaggtatgtaaccccctggactctcttgatcttgacaacactcagctggactttgtggctattctggatgagccccaggggctgagtcctcctccttcccatgatcagcggggcagctctggacataccccacctccctctgggccccccaacatggctgtgggcaacatgagtgtcttactgagatccctacctggggaaacagaattcctcaactctagtgcct

SEQ ID NO: 137065 - DNA, 480 bp, Homo sapiens
  Payload ID: 6836
  Gene Symbol: GLI1
  Gene Name: GLI family zinc finger 1
  ENST ID: ENST00000528432
  CDS Start-End: 93-480
ggttaagtttaagaggctggagggatggctagctggaggtctgcgttgtagagaggtaaccccagtgtccccacaccctcctctgagacgccatgttcaactcgatgaccccaccaccaatcagtagctatggcgagccctgctgtctccggcccctccccagtcagggggcccccagtgtggggacagaaggactgtctggcccgcccttctgccaccaagctaacctcatgtccggcccccacagttatgggccagccagagagaccaacagctgcaccgagggcccactcttttcttctccccggagtgcagtcaagttgaccaagaagcgggcactgtccatctcacctctgtcggatgccagcctggacctgcagacggttatccgcacctcacccagctccctcgtagctttcatcaactcgcgatgcacatctccaggaggctcctacggtcatctctccattggcaccatga

SEQ ID NO: 137066 - DNA, 784 bp, Homo sapiens
  Payload ID: 6836
  Gene Symbol: GLI1
  Gene Name: GLI family zinc finger 1
  ENST ID: ENST00000532291
  CDS Start-End: 259-784
accgcacaccccccagcccagactccagccctggaccgcgcatcccgagcccagcgcccagacagaggcccactcttttcttctccccggagtgcagtcaagttgaccaagaagcgggcactgtccatctcacctctgtcggatgccagcctggacctgcagacggttatccgcacctcacccagctccctcgtagctttcatcaactcgcgatgcacatctccaggaggctcctacggtcatctctccattggcaccatgagcccatctctgggattcccagcccagatgaatcaccaaaaagggccctcgccttcctttggggtccagccttgtggtccccatgactctgcccggggtgggatgatcccacatcctcagtcccggggacccttcccaacttgccagctgaagtctgagctggacatgctggttggcaagtgccgggaggaacccttggaaggtgatatgtccagccccaactccacaggcatacaggatcccctgttggggatgctggatgggcgggaggacctcgagagagaggagaagcgtgagcctgaatctgtgtatgaaactgactgccgttgggatggctgcagccaggaatttgactcccaagagcagctggtgcaccacatcaacagcgagcacatccacggggagcggaaggagttcgtgtgccactgggggggctgctccagggagctgaggcccttcaaagcccagtacatgctggtggttcacatgcgcagacacactggcgagaagccacacaagtgca

SEQ ID NO: 137067 - DNA, 3394 bp, Homo sapiens
  Payload ID: 6836
  Gene Symbol: GLI1
  Gene Name: GLI family zinc finger 1
  Uniprot ID: P08151
  ENST ID: ENST00000543426
  CDS Start-End: 259-3195
accgcacaccccccagcccagactccagccctggaccgcgcatcccgagcccagcgcccagacagaggcccactcttttcttctccccggagtgcagtcaagttgaccaagaagcgggcactgtccatctcacctctgtcggatgccagcctggacctgcagacggttatccgcacctcacccagctccctcgtagctttcatcaactcgcgatgcacatctccaggaggctcctacggtcatctctccattggcaccatgagcccatctctgggattcccagcccagatgaatcaccaaaaagggccctcgccttcctttggggtccagccttgtggtccccatgactctgcccggggtgggatgatcccacatcctcagtcccggggacccttcccaacttgccagctgaagtctgagctggacatgctggttggcaagtgccgggaggaacccttggaaggtgatatgtccagccccaactccacaggcatacaggatcccctgttggggatgctggatgggcgggaggacctcgagagagaggagaagcgtgagcctgaatctgtgtatgaaactgactgccgttgggatggctgcagccaggaatttgactcccaagagcagctggtgcaccacatcaacagcgagcacatccacggggagcggaaggagttcgtgtgccactgggggggctgctccagggagctgaggcccttcaaagcccagtacatgctggtggttcacatgcgcagacacactggcgagaagccacacaagtgcacgtttgaagggtgccggaagtcatactcacgcctcgaaaacctgaagacgcacctgcggtcacacacgggtgagaagccatacatgtgtgagcacgagggctgcagtaaagccttcagcaatgccagtgaccgagccaagcaccagaatcggacccattccaatgagaagccgtatgtatgtaagctccctggctgcaccaaacgctatacagatcctagctcgctgcgaaaacatgtcaagacagtgcatggtcctgacgcccatgtgaccaaacggcaccgtggggatggccccctgcctcgggcaccatccatttctacagtggagcccaagagggagcgggaaggaggtcccatcagggaggaaagcagactgactgtgccagagggtgccatgaagccacagccaagccctggggcccagtcatcctgcagcagtgaccactccccggcagggagtgcagccaatacagacagtggtgtggaaatgactggcaatgcagggggcagcactgaagacctctccagcttggacgagggaccttgcattgctggcactggtctgtccactcttcgccgccttgagaacctcaggctggaccagctacatcaactccggccaatagggacccggggtctcaaactgcccagcttgtcccacaccggtaccactgtgtcccgccgcgtgggccccccagtctctcttgaacgccgcagcagcagctccagcagcatcagctctgcctatactgtcagccgccgctcctccctggcctctcctttcccccctggctccccaccagagaatggagcatcctccctgcctggccttatgcctgcccagcactacctgcttcgggcaagatatgcttcagccagagggggtggtacttcgcccactgcagcatccagcctggatcggataggtggtcttcccatgcctccttggagaagccgagccgagtatccaggatacaaccccaatgcaggggtcacccggagggccagtgacccagcccaggctgctgaccgtcctgctccagctagagtccagaggttcaagagcctgggctgtgtccataccccacccactgtggcagggggaggacagaactttgatccttacctcccaacctctgtctactcaccacagccccccagcatcactgagaatgctgccatggatgctagagggctacaggaagagccagaagttgggacctccatggtgggcagtggtctgaacccctatatggacttcccacctactgatactctgggatatgggggacctgaaggggcagcagctgagccttatggagcgaggggtccaggctctctgcctcttgggcctggtccacccaccaactatggccccaacccctgtccccagcaggcctcatatcctgaccccacccaagaaacatggggtgagttcccttcccactctgggctgtacccaggccccaaggctctaggtggaacctacagccagtgtcctcgacttgaacattatggacaagtgcaagtcaagccagaacaggggtgcccagtggggtctgactccacaggactggcaccctgcctcaatgcccaccccagtgaggggcccccacatccacagcctctcttttcccattacccccagccctctcctccccaatatctccagtcaggcccctatacccagccaccccctgattatcttccttcagaacccaggccttgcctggactttgattcccccacccattccacagggcagctcaaggctcagcttgtgtgtaattatgttcaatctcaacaggagctactgtgggagggtgggggcagggaagatgcccccgcccaggaaccttcctaccagagtcccaagtttctggggggttcccaggttagcccaagccgtgctaaagctccagtgaacacatatggacctggctttggacccaacttgcccaatcacaagtcaggttcctatcccaccccttcaccatgccatgaaaattttgtagtgggggcaaatagggcttcacatagggcagcagcaccacctcgacttctgcccccattgcccacttgctatgggcctctcaaagtgggaggcacaaaccccagctgtggtcatcctgaggtgggcaggctaggagggggtcctgccttgtaccctcctcccgaaggacaggtatgtaaccccctggactctcttgatcttgacaacactcagctggactttgtggctattctggatgagccccaggggctgagtcctcctccttcccatgatcagcggggcagctctggacataccccacctccctctgggccccccaacatggctgtgggcaacatgagtgtcttactgagatccctacctggggaaacagaattcctcaactctagtgcctaaagagtagggaatctcatccatcacagatcgcatttcctaaggggtttctatccttccagaaaaattgggggagctgcagtcccatgcacaagatgccccagggatgggaggtatgggctgggggctatgtatagtctgtatacgttttgaggagaaatttgataatgacactgtttcctgataataaaggaactgcatc

SEQ ID NO: 137068 - DNA, 3475 bp, Homo sapiens
  Payload ID: 6836
  Gene Symbol: GLI1
  Gene Name: GLI family zinc finger 1
  Uniprot ID: P08151
  ENST ID: ENST00000546141
  CDS Start-End: 79-3276
cccagactccagccctggaccgcgcatcccgagcccagcgcccagacagagtgtccccacaccctcctctgagacgccatgttcaactcgatgaccccaccaccaatcagtagctatggcgagccctgctgtctccggcccctccccagtcagggggcccccagtgtggggacagaagtcaagttgaccaagaagcgggcactgtccatctcacctctgtcggatgccagcctggacctgcagacggttatccgcacctcacccagctccctcgtagctttcatcaactcgcgatgcacatctccaggaggctcctacggtcatctctccattggcaccatgagcccatctctgggattcccagcccagatgaatcaccaaaaagggccctcgccttcctttggggtccagccttgtggtccccatgactctgcccggggtgggatgatcccacatcctcagtcccggggacccttcccaacttgccagctgaagtctgagctggacatgctggttggcaagtgccgggaggaacccttggaaggtgatatgtccagccccaactccacaggcatacaggatcccctgttggggatgctggatgggcgggaggacctcgagagagaggagaagcgtgagcctgaatctgtgtatgaaactgactgccgttgggatggctgcagccaggaatttgactcccaagagcagctggtgcaccacatcaacagcgagcacatccacggggagcggaaggagttcgtgtgccactgggggggctgctccagggagctgaggcccttcaaagcccagtacatgctggtggttcacatgcgcagacacactggcgagaagccacacaagtgcacgtttgaagggtgccggaagtcatactcacgcctcgaaaacctgaagacgcacctgcggtcacacacgggtgagaagccatacatgtgtgagcacgagggctgcagtaaagccttcagcaatgccagtgaccgagccaagcaccagaatcggacccattccaatgagaagccgtatgtatgtaagctccctggctgcaccaaacgctatacagatcctagctcgctgcgaaaacatgtcaagacagtgcatggtcctgacgcccatgtgaccaaacggcaccgtggggatggccccctgcctcgggcaccatccatttctacagtggagcccaagagggagcgggaaggaggtcccatcagggaggaaagcagactgactgtgccagagggtgccatgaagccacagccaagccctggggcccagtcatcctgcagcagtgaccactccccggcagggagtgcagccaatacagacagtggtgtggaaatgactggcaatgcagggggcagcactgaagacctctccagcttggacgagggaccttgcattgctggcactggtctgtccactcttcgccgccttgagaacctcaggctggaccagctacatcaactccggccaatagggacccggggtctcaaactgcccagcttgtcccacaccggtaccactgtgtcccgccgcgtgggccccccagtctctcttgaacgccgcagcagcagctccagcagcatcagctctgcctatactgtcagccgccgctcctccctggcctctcctttcccccctggctccccaccagagaatggagcatcctccctgcctggccttatgcctgcccagcactacctgcttcgggcaagatatgcttcagccagagggggtggtacttcgcccactgcagcatccagcctggatcggataggtggtcttcccatgcctccttggagaagccgagccgagtatccaggatacaaccccaatgcaggggtcacccggagggccagtgacccagcccaggctgctgaccgtcctgctccagctagagtccagaggttcaagagcctgggctgtgtccataccccacccactgtggcagggggaggacagaactttgatccttacctcccaacctctgtctactcaccacagccccccagcatcactgagaatgctgccatggatgctagagggctacaggaagagccagaagttgggacctccatggtgggcagtggtctgaacccctatatggacttcccacctactgatactctgggatatgggggacctgaaggggcagcagctgagccttatggagcgaggggtccaggctctctgcctcttgggcctggtccacccaccaactatggccccaacccctgtccccagcaggcctcatatcctgaccccacccaagaaacatggggtgagttcccttcccactctgggctgtacccaggccccaaggctctaggtggaacctacagccagtgtcctcgacttgaacattatggacaagtgcaagtcaagccagaacaggggtgcccagtggggtctgactccacaggactggcaccctgcctcaatgcccaccccagtgaggggcccccacatccacagcctctcttttcccattacccccagccctctcctccccaatatctccagtcaggcccctatacccagccaccccctgattatcttccttcagaacccaggccttgcctggactttgattcccccacccattccacagggcagctcaaggctcagcttgtgtgtaattatgttcaatctcaacaggagctactgtgggagggtgggggcagggaagatgcccccgcccaggaaccttcctaccagagtcccaagtttctggggggttcccaggttagcccaagccgtgctaaagctccagtgaacacatatggacctggctttggacccaacttgcccaatcacaagtcaggttcctatcccaccccttcaccatgccatgaaaattttgtagtgggggcaaatagggcttcacatagggcagcagcaccacctcgacttctgcccccattgcccacttgctatgggcctctcaaagtgggaggcacaaaccccagctgtggtcatcctgaggtgggcaggctaggagggggtcctgccttgtaccctcctcccgaaggacaggtatgtaaccccctggactctcttgatcttgacaacactcagctggactttgtggctattctggatgagccccaggggctgagtcctcctccttcccatgatcagcggggcagctctggacataccccacctccctctgggccccccaacatggctgtgggcaacatgagtgtcttactgagatccctacctggggaaacagaattcctcaactctagtgcctaaagagtagggaatctcatccatcacagatcgcatttcctaaggggtttctatccttccagaaaaattgggggagctgcagtcccatgcacaagatgccccagggatgggaggtatgggctgggggctatgtatagtctgtatacgttttgaggagaaatttgataatgacactgtttcctgataataaaggaactgcatc

SEQ ID NO: 137069 - DNA, 1964 bp, Homo sapiens
  Payload ID: 6837
  Gene Symbol: GLI2
  Gene Name: GLI family zinc finger 2
  ENST ID: ENST00000314490
  CDS Start-End: 383-1951
tgggtcggcgtttcccggctgggtttgggctcagtgttggtgagtgtctttgtcttctcttttaggattgccacccaggacgatgagcggctgagatggagacgtctgcctcagccactgcctccgagaagcaagaagccaaaagtgggatcctggaggccgctggcttccccgacccgggtaaaaaggcctctcctttggtggtggctgcagcggcagcagcagcggtagctgcccaaggagcccagccttcaccttcccccaccccatcaaccccgtggcctaccagcagattctgagccagcagaggggtctggggtcagcctttggacacacaccacccctgatccagccctcacccaccttcctggcccagcagcccatggccctcacctccatcaatgccacgcccacccagctcagcagcagcagcaactgtctgagtgacaccaaccagaacaagcagagcagtgagtcggccgtcagcagcaccgtcaaccctgtcgccattcacaagcgcagcaaggtcaagaccgagcctgagggcctgcggccggcctcccctctggcgctgacgcagggccaggtgctggacacggctcatgtgggtgtgcccttcccctctcccgagcagctggctgacctcaaggaagatctggacagggatgactgtaagcaggaggctgaggtggtcatctatgagaccaactgccactgggaagactgcaccaaggagtacgacacccaggagcagctggtgcatcacatcaacaacgagcacatccacggggagaagaaggagtttgtgtgccgctggcaggcctgcacgcgggagcagaagcccttcaaggcgcagtacatgctggtggtgcacatgcggcgacacacgggcgagaagccccacaagtgcacgttcgagggctgctcgaaggcctactcccgcctggagaacctgaagacacacctgcggtcccacaccggggagaagccatatgtgtgtgagcacgagggctgcaacaaagccttctccaacgcctcggaccgcgccaagcaccagaatcgcacccactccaacgagaaaccctacatctgcaagatcccaggctgcaccaagagatacacagaccccagctctctccggaagcatgtgaaaacggtccacggcccagatgcccacgtcaccaagaagcagcgcaatgacgtgcacctccgcacaccgctgctcaaagagaatggggacagtgaggccggcacggagcctggcggcccagagagcaccgaggccagcagcaccagccaggccgtggaggactgcctgcacgtcagagccatcaagaccgagagctccgggctgtgtcagtccagccccggggcccagtcgtcctgcagcagcgagccctctcctctgggcagtgcccccaacaatgacagtggcgtggagatgccggggacggggcccgggagcctgggagacctgacggcactggatgacacacccccaggggccgacacctcagccctggctgccccctccgctggtggcctccagctgcgcaaacacatgaccaccatgcaccggttcgagcagctcaagaaggagaagctcaagtcactcaaggattcctgctcatgggccgggccgactccacacacgcggacaccaagctgcctccctcccgggaagtggctccatcctggaaaacttcagtggcagtgggggcggcgggcccgcggggctgctgccgaacccgcggctgtcggagctgtccgcgagcgaggtgaccatgctgagccagctgcaggagcgccgcgacagctccaccagcacggtcagctcggcctacaccgtgagccgccgctcctccggcatctccccctacttctccagccgccgctccagcgaggcctcgcccctgggcgccggccgcccgcacaacgcgagctccgctgactcctacgacccc

SEQ ID NO: 137070 - DNA, 4904 bp, Homo sapiens
  Payload ID: 6837
  Gene Symbol: GLI2
  Gene Name: GLI family zinc finger 2
  ENST ID: ENST00000341310
  CDS Start-End: 187-390
tgaagttcgtggactcctacaataatgctataaatgcatagaagaaaagacacaggactgtgaaagaaagtgatgatgcgatgtctaaaacgttcaaggcaccgcatctgtgatcaagaatacatgtgctgctttaccgacacatcaaagagcaaggattgccacccaggacgatgagcggctgagatggagacgtctgcctcagccactgcctccgagaagcaagaagccaaaagtgggatcctggaggccgctggcttccccgacccgggtaaaaaggcctctcctttggtggtggctgcagcggcagcagcagcggtagctgcccaaggagcccagccttcaccttcccccaccccatcaaccccgtggcctaccagcagattctgagccagcagaggggtctggggtcagcctttggacacacaccacccctgatccagccctcacccaccttcctggcccagcagcccatggccctcacctccatcaatgccacgcccacccagctcagcagcagcagcaactgtctgagtgacaccaaccagaacaagcagagcagtgagtcggccgtcagcagcaccgtcaaccctgtcgccattcacaagcgcagcaaggtcaagaccgagcctgagggcctgcggccggcctcccctctggcgctgacgcaggagcagctggctgacctcaaggaagatctggacagggatgactgtaagcaggaggctgaggtggtcatctatgagaccaactgccactgggaagactgcaccaaggagtacgacacccaggagcagctggtgcatcacatcaacaacgagcacatccacggggagaagaaggagtttgtgtgccgctggcaggcctgcacgcgggagcagaagcccttcaaggcgcagtacatgctggtggtgcacatgcggcgacacacgggcgagaagccccacaagtgcacgttcgagggctgctcgaaggcctactcccgcctggagaacctgaagacacacctgcggtcccacaccggggagaagccatatgtgtgtgagcacgagggctgcaacaaagccttctccaacgcctcggaccgcgccaagcaccagaatcgcacccactccaacgagaaaccctacatctgcaagatcccaggctgcaccaagagatacacagaccccagctctctccggaagcatgtgaaaacggtccacggcccagatgcccacgtcaccaagaagcagcgcaatgacgtgcacctccgcacaccgctgctcaaagagaatggggacagtgaggccggcacggagcctggcggcccagagagcaccgaggccagcagcaccagccaggccgtggaggactgcctgcacgtcagagccatcaagaccgagagctccgggctgtgtcagtccagccccggggcccagtcgtcctgcagcagcgagccctctcctctgggcagtgcccccaacaatgacagtggcgtggagatgccggggacggggcccgggagcctgggagacctgacggcactggatgacacacccccaggggccgacacctcagccctggctgccccctccgctggtggcctccagctgcgcaaacacatgaccaccatgcaccggttcgagcagctcaagaaggagaagctcaagtcactcaaggattcctgctcatgggccgggccgactccacacacgcggaacaccaagctgcctcccctcccgggaagtggctccatcctggaaaacttcagtggcagtgggggcggcgggcccgcggggctgctgccgaacccgcggctgtcggagctgtccgcgagcgaggtgaccatgctgagccagctgcaggagcgccgcgacagctccaccagcacggtcagctcggcctacaccgtgagccgccgctcctccggcatctccccctacttctccagccgccgctccagcgaggcctcgcccctgggcgccggccgcccgcacaacgcgagctccgctgactcctacgaccccatctccacggacgcgtcgcggcgctcgagcgaggccagccagtgcagcggcggctccgggctgctcaacctcacgccggcgcagcagtacagcctgcgggccaagtacgcggcagccactggcggccccccgcccactccgctgccgggcctggagcgcatgagcctgcggaccaggctggcgctgctggacgcgcccgagcgcacgctgcccgccggctgcccacgcccactggggccgcggcgtggcagcgacgggccgacctatggccacggccacgcgggggctgcgcccgccttcccccacgaggctccaggcggcggagccaggcgggccagcgaccctgtgcggcggcccgatgccctgtccctgccgcgggtgcagcgcttccacagcacccacaacgtgaaccccggcccgctgccgccctgtgccgacaggcgaggcctccgcctgcagagccacccgagcaccgacggcggcctggcccgcggcgcctactcgccccggccgcctagcatcagcgagaacgtggcgatggaggccgtggcggcaggagtggacggcgcggggcccgaggccgacctggggctgccggaggacgacctggtgcttccagacgacgtggtgcagtacatcaaggcgcacgccagtggcgctctggacgagggcaccgggcaggtgtatcccacggaaagcactggcttctctgacaaccccagactacccagcccggggctgcacggccagcgcaggatggtggctgcggactccaacgtgggcccctccgcccctatgctgggaggatgccagttaggctttggggcgccctccagcctgaacaaaaataacatgcctgtgcagtggaatgaggtgagctccggcaccgtagacgccctggccagccaggtgaagcctccaccctttcctcagggcaacctggcggtggtgcagcagaagcctgcctttggccagtacccgggctacagtccgcaaggcctacaggctagccctgggggcctggacagcacgcagccacacctgcagccccgcagcggagccccctcccagggcatccccagggtaaactacatgcagcagctgcgacagccagtggcaggcagccagtgtcctggcatgactaccactatgagcccccatgcctgctatggccaagtccacccccagctgagccccagcaccatcagtggggccctcaaccagttcccccaatcctgcagcaacatgccagccaagccagggcatctggggcaccctcagcagacagaagtggcacctgaccccaccacgatgggcaatcgccacagggaacttggggtccccgattcagccctggctggagtgccaccacctcacccagtccagagctacccacagcagagccatcacctggcagcctccatgagccaggagggctaccaccaggtccccagccttctgcctgcccgccagcctggcttcatggagccccaaacaggcccgatgggggtggctacagcaggctttggcctagtgcagccccggcctcccctcgagcccagccccactggccgccaccgtggggtacgtgctgtgcagcagcagctggcctacgccagggccacaggccatgccatggctgccatgccgtccagtcaggaaacagcagaggctgtgcccaagggagcgatgggcaacatggggtcggtgcctccccagccgcctccgcaggacgcaggtggggccccggaccacagcatgctctactactacggccagatccacatgtacgaacaggatggaggcctggagaacctcgggagctgccaggtcatgcggtcccagccaccacagccacaggcctgtcaggacagcatccagccccagcccttgccctcaccaggggtcaaccaggtgtccagcactgtggactcccagctcctggaggccccccagattgacttcgatgccatcatggatgatggcgatcactcgagtttgttctcgggtgctctgagccccagcctcctccacagcctctcccagaactcctcccgcctcaccaccccccgaaactccttgaccctgccctccatccccgcaggcatcagcaacatggctgtcggggacatgagctccatgctcaccagcctcgccgaggagagcaagttcctgaacatgatgacctagaggcccgagcgcctggtgctgagtgcacccggaggggtcatcgctgcccagagcctggggattccagctgtcttgtctttttccaaaaaagtgttaaataggcttgaggggttgttgcgcaatggccgcttcagatgacagatgttgtaagagaaggtttatgggcatcctctctggtcttttggattattcctcagaacaatgaaaaaagtctccataggacaggaaggaatgcaaaactcatttacacagtgctttccagcctttggtgcttacaggaccgcgctgttccggcttcttcacggctgacattcggctaacgagggattactttggccaaaacctttcaaaggatatgcagaaagatggtagggagcatttgggtttgaatctgaatgctatactggatactctgctccggaaagatgagctttttattctactacttggaaggaaaaggaattcctggtccacctgaattcctctatgaagcctaactcttgaggtctctaacataccttgtcatagaggaaaagcacagattatacctggatgattcaggagcacattctgattccaggtttggtagagctggctcttctactccgtaaagccgagtctgggactggcagcccatccaagtgtatatgaatgaataaagcatccaagtatatatgaatgaataaagtatgtaagtatcaccag

SEQ ID NO: 137071 - DNA, 6768 bp, Homo sapiens
  Payload ID: 6837
  Gene Symbol: GLI2
  Gene Name: GLI family zinc finger 2
  Uniprot ID: P10070
  ENST ID: ENST00000361492
  CDS Start-End: 31-4791
gattgccacccaggacgatgagcggctgagatggagacgtctgcctcagccactgcctccgagaagcaagaagccaaaagtgggatcctggaggccgctggcttccccgacccgggtaaaaaggcctctcctttggtggtggctgcagcggcagcagcagcggtagctgcccaaggagtgccgcagcatctcttgccaccattccatgcgcccctaccgattgacatgcgacaccaggaaggaaggtaccattacgagcctcattctgtccacggtgtgcacgggccccctgccctcagcggcagccctgtcatctctgacatctccttgatccggctttccccgcacccggctggccctggggagtcccccttcaacgccccccacccgtacgtgaacccccacatggagcactacctccgttctgtgcacagcagccccacgctctccatgatctctgcagccaggggcctcagccccgctgatgtggcccaggagcaccttaaggagaggggactgtttggccttcctgctccaggcaccaccccctcagactattaccaccagatgaccctcgtggcaggccaccccgcgccctacggggacctgctgatgcagagcgggggcgctgccagcgcaccccatctccacgactacctcaaccccgtggacgtgtcccgtttctccagcccgcgggtgacgccccgcctgagccgcaagcgggcgctgtccatctccccactctcagacgccagcctggacctgcagcggatgatccgcacctcacccaactcgctagtggcctacatcaacaactcccgaagcagctcggcggccagcggttcctacgggcatctgtcagcgggtgccctcagcccagccttcaccttcccccaccccatcaaccccgtggcctaccagcagattctgagccagcagaggggtctggggtcagcctttggacacacaccacccctgatccagccctcacccaccttcctggcccagcagcccatggccctcacctccatcaatgccacgcccacccagctcagcagcagcagcaactgtctgagtgacaccaaccagaacaagcagagcagtgagtcggccgtcagcagcaccgtcaaccctgtcgccattcacaagcgcagcaaggtcaagaccgagcctgagggcctgcggccggcctcccctctggcgctgacgcagggccaggtgtctggacacggctcatgtgggtgtgcccttcccctctcccaggagcagctggctgacctcaaggaagatctggacagggatgactgtaagcaggaggctgaggtggtcatctatgagaccaactgccactgggaagactgcaccaaggagtacgacacccaggagcagctggtgcatcacatcaacaacgagcacatccacggggagaagaaggagtttgtgtgccgctggcaggcctgcacgcgggagcagaagcccttcaaggcgcagtacatgctggtggtgcacatgcggcgacacacgggcgagaagccccacaagtgcacgttcgagggctgctcgaaggcctactcccgcctggagaacctgaagacacacctgcggtcccacaccggggagaagccatatgtgtgtgagcacgagggctgcaacaaagccttctccaacgcctcggaccgcgccaagcaccagaatcgcacccactccaacgagaaaccctacatctgcaagatcccaggctgcaccaagagatacacagaccccagctctctccggaagcatgtgaaaacggtccacggcccagatgcccacgtcaccaagaagcagcgcaatgacgtgcacctccgcacaccgctgctcaaagagaatggggacagtgaggccggcacggagcctggcggcccagagagcaccgaggccagcagcaccagccaggccgtggaggactgcctgcacgtcagagccatcaagaccgagagctccgggctgtgtcagtccagccccggggcccagtcgtcctgcagcagcgagccctctcctctgggcagtgcccccaacaatgacagtggcgtggagatgccggggacggggcccgggagcctgggagacctgacggcactggatgacacacccccaggggccgacacctcagccctggctgccccctccgctggtggcctccagctgcgcaaacacatgaccaccatgcaccggttcgagcagctcaagaaggagaagctcaagtcactcaaggattcctgctcatgggccgggccgactccacacacgcggaacaccaagctgcctcccctcccgggaagtggctccatcctggaaaacttcagtggcagtgggggcggcgggcccgcggggctgctgccgaacccgcggctgtcggagctgtccgcgagcgaggtgaccatgctgagccagctgcaggagcgccgcgacagctccaccagcacggtcagctcggcctacaccgtgagccgccgctcctccggcatctccccctacttctccagccgccgctccagcgaggcctcgcccctgggcgccggccgcccgcacaacgcgagctccgctgactcctacgaccccatctccacggacgcgtcgcggcgctcgagcgaggccagccagtgcagcggcggctccgggctgctcaacctcacgccggcgcagcagtacagcctgcgggccaagtacgcggcagccactggcggccccccgcccactccgctgccgggcctggagcgcatgagcctgcggaccaggctggcgctgctggacgcgcccgagcgcacgctgcccgccggctgcccacgcccactggggccgcggcgtggcagcgacgggccgacctatggccacggccacgcgggggctgcgcccgccttcccccacgaggctccaggcggcggagccaggcgggccagcgaccctgtgcggcggcccgatgccctgtccctgccgcgggtgcagcgcttccacagcacccacaacgtgaaccccggcccgctgccgccctgtgccgacaggcgaggcctccgcctgcagagccacccgagcaccgacggcggcctggcccgcggcgcctactcgccccggccgcctagcatcagcgagaacgtggcgatggaggccgtggcggcaggagtggacggcgcggggcccgaggccgacctggggctgccggaggacgacctggtgcttccagacgacgtggtgcagtacatcaaggcgcacgccagtggcgctctggacgagggcaccgggcaggtgtatcccacggaaagcactggcttctctgacaaccccagactacccagcccggggctgcacggccagcgcaggatggtggctgcggactccaacgtgggcccctccgcccctatgctgggaggatgccagttaggctttggggcgccctccagcctgaacaaaaataacatgcctgtgcagtggaatgaggtgagctccggcaccgtagacgccctggccagccaggtgaagcctccaccctttcctcagggcaacctggcggtggtgcagcagaagcctgcctttggccagtacccgggctacagtccgcaaggcctacaggctagccctgggggcctggacagcacgcagccacacctgcagccccgcagcggagccccctcccagggcatccccagggtaaactacatgcagcagctgcgacagccagtggcaggcagccagtgtcctggcatgactaccactatgagcccccatgcctgctatggccaagtccacccccagctgagccccagcaccatcagtggggccctcaaccagttcccccaatcctgcagcaacatgccagccaagccagggcatctggggcaccctcagcagacagaagtggcacctgaccccaccacgatgggcaatcgccacagggaacttggggtccccgattcagccctggctggagtgccaccacctcacccagtccagagctacccacagcagagccatcacctggcagcctccatgagccaggagggctaccaccaggtccccagccttctgcctgcccgccagcctggcttcatggagccccaaacaggcccgatgggggtggctacagcaggctttggcctagtgcagccccggcctcccctcgagcccagccccactggccgccaccgtggggtacgtgctgtgcagcagcagctggcctacgccagggccacaggccatgccatggctgccatgccgtccagtcaggaaacagcagaggctgtgcccaagggagcgatgggcaacatggggtcggtgcctccccagccgcctccgcaggacgcaggtggggccccggaccacagcatgctctactactacggccagatccacatgtacgaacaggatggaggcctggagaacctcgggagctgccaggtcatgcggtcccagccaccacagccacaggcctgtcaggacagcatccagccccagcccttgccctcaccaggggtcaaccaggtgtccagcactgtggactcccagctcctggaggccccccagattgacttcgatgccatcatggatgatggcgatcactcgagtttgttctcgggtgctctgagccccagcctcctccacagcctctcccagaactcctcccgcctcaccaccccccgaaactccttgaccctgccctccatccccgcaggcatcagcaacatggctgtcggggacatgagctccatgctcaccagcctcgccgaggagagcaagttcctgaacatgatgacctagaggcccgagcgcctggtgctgagtgcacccggaggggtcatcgctgcccagagcctggggattccagctgtcttgtctttttccaaaaaagtgttaaataggcttgaggggttgttgcgcaatggccgcttcagatgacagatgttgtaagagaaggtttatgggcatcctctctggtcttttggattattcctcagaacaatgaaaaaagtctccataggacaggaaggaatgcaaaactcatttacacagtgctttccagcctttggtgcttacaggaccgcgctgttccggcttcttcacggctgacattcggctaacgagggattactttggccaaaacctttcaaaggatatgcagaaagatggtagggagcatttgggtttgaatctgaatgctatactggatactctgctccggaaagatgagctttttattctactacttggaaggaaaaggaattcctggtccacctgaattcctctatgaagcctaactcttgaggtctctaacataccttgtcatagaggaaaagcacagattatacctggatgattcaggagcacattctgattccaggtttggtagagctggctcttctactccgtaaagccgagtctgggactggcagcccatccaagtgtatatgaatgaataaagcatccaagtatatatgaatgaataaagtatgtaagtatcaccagaaaaaggaaagaaaaaatgtactccttggggcaagcccagaagctgccctggcctctccagaccgtgtttacagtgtttgcatgtagaatgtagcccttcctgaaaagaagacttgtttctaaatacctcggggctgctggagccgctgtgggttagggatggactgaggcctcgaggagtgagggtgcacccggggcccagcctcaggctgccctagggatctctcagtaggaagaggaagttgcgtgtttacccaatcctgtttctccaatgcaacgtccacccactttaccaccaaaaactccagggcctgacggcagcccggtcccccagcactcaccagcagcccagtgttctccaccaagccacagtgtgcatgcctggtatcctccggattcccttccttctgcccgctgagtcactgggcagagaatgatgacatgtgtaggtggtgtggttgggggtggaaaggggaaggggttgatcctcaggactctgagggagcatcgttgaattttcctgttcagtgtgaccaagacccacctggaaatggaatttggaactggcttcaggagacatcattcctgaacacactgtagggtgaattggtgcatcttccccaccatacacacacacacacacacacacacacacacacacacacacacaccccaaaccttttcatggggaatgtgtggcaaccttgccaaacagcaccactcagagtgtgactctgactgtgaccttggccttaatgaggaacttcttaggagagtttgaggacaaggccaacatcgtcatctgggctcgctgcgtcccagcacatcaaactctgtccagagacaaggccaactgcaaatgaaagccagggaacattgctaagggtctgtggctctgtggtggtgttcatcgccttcctgagataggatttcccttgccagtcccaacctgtatatattctgtacagaagacatccctgaatatactgtaggtgagtcgtccagccaaatttatatctccaaaacatttttagctttttctacatgctatgaattgagatgacatgctcaacttgtaaataagtctttttgtacattaaaaaagtaattttttcataatttatcttgtctatctgcttcccccttgacagtagttaatgagaacctgggcagtaaatttggtgcattcgagcagaaattaggctgtattttttcttaacagtgtcaaaattgactatcccgcctttgccaagaaatgtttaatgctgaggc

SEQ ID NO: 137072 - DNA, 6799 bp, Homo sapiens
  Payload ID: 6837
  Gene Symbol: GLI2
  Gene Name: GLI family zinc finger 2
  Uniprot ID: P10070
  ENST ID: ENST00000452319
  CDS Start-End: 61-4821
tgctgctttaccgacacatcaaagagcaaggattgccacccaggacgatgagcggctgagatggagacgtctgcctcagccactgcctccgagaagcaagaagccaaaagtgggatcctggaggccgctggcttccccgacccgggtaaaaaggcctctcctttggtggtggctgcagcggcagcagcagcggtagctgcccaaggagtgccgcagcatctcttgccaccattccatgcgcccctaccgattgacatgcgacaccaggaaggaaggtaccattacgagcctcattctgtccacggtgtgcacgggccccctgccctcagcggcagccctgtcatctctgacatctccttgatccggctttccccgcacccggctggccctggggagtcccccttcaacgccccccacccgtacgtgaacccccacatggagcactacctccgttctgtgcacagcagccccacgctctccatgatctctgcagccaggggcctcagccccgctgatgtggcccaggagcaccttaaggagaggggactgtttggccttcctgctccaggcaccaccccctcagactattaccaccagatgaccctcgtggcaggccaccccgcgccctacggggacctgctgatgcagagcgggggcgctgccagcgcaccccatctccacgactacctcaaccccgtggacgtgtcccgtttctccagcccgcgggtgacgccccgcctgagccgcaagcgggcgctgtccatctccccactctcagacgccagcctggacctgcagcggatgatccgcacctcacccaactcgctagtggcctacatcaacaactcccgaagcagctcggcggccagcggttcctacgggcatctgtcagcgggtgccctcagcccagccttcaccttcccccaccccatcaaccccgtggcctaccagcagattctgagccagcagaggggtctggggtcagcctttggacacacaccacccctgatccagccctcacccaccttcctggcccagcagcccatggccctcacctccatcaatgccacgcccacccagctcagcagcagcagcaactgtctgagtgacaccaaccagaacaagcagagcagtgagtcggccgtcagcagcaccgtcaaccctgtcgccattcacaagcgcagcaaggtcaagaccgagcctgagggcctgcggccggcctcccctctggcgctgacgcagggccaggtgtctggacacggctcatgtgggtgtgcccttcccctctcccaggagcagctggctgacctcaaggaagatctggacagggatgactgtaagcaggaggctgaggtggtcatctatgagaccaactgccactgggaagactgcaccaaggagtacgacacccaggagcagctggtgcatcacatcaacaacgagcacatccacggggagaagaaggagtttgtgtgccgctggcaggcctgcacgcgggagcagaagcccttcaaggcgcagtacatgctggtggtgcacatgcggcgacacacgggcgagaagccccacaagtgcacgttcgagggctgctcgaaggcctactcccgcctggagaacctgaagacacacctgcggtcccacaccggggagaagccatatgtgtgtgagcacgagggctgcaacaaagccttctccaacgcctcggaccgcgccaagcaccagaatcgcacccactccaacgagaaaccctacatctgcaagatcccaggctgcaccaagagatacacagaccccagctctctccggaagcatgtgaaaacggtccacggcccagatgcccacgtcaccaagaagcagcgcaatgacgtgcacctccgcacaccgctgctcaaagagaatggggacagtgaggccggcacggagcctggcggcccagagagcaccgaggccagcagcaccagccaggccgtggaggactgcctgcacgtcagagccatcaagaccgagagctccgggctgtgtcagtccagccccggggcccagtcgtcctgcagcagcgagccctctcctctgggcagtgcccccaacaatgacagtggcgtggagatgccggggacggggcccgggagcctgggagacctgacggcactggatgacacacccccaggggccgacacctcagccctggctgccccctccgctggtggcctccagctgcgcaaacacatgaccaccatgcaccggttcgagcagctcaagaaggagaagctcaagtcactcaaggattcctgctcatgggccgggccgactccacacacgcggaacaccaagctgcctcccctcccgggaagtggctccatcctggaaaacttcagtggcagtgggggcggcgggcccgcggggctgctgccgaacccgcggctgtcggagctgtccgcgagcgaggtgaccatgctgagccagctgcaggagcgccgcgacagctccaccagcacggtcagctcggcctacaccgtgagccgccgctcctccggcatctccccctacttctccagccgccgctccagcgaggcctcgcccctgggcgccggccgcccgcacaacgcgagctccgctgactcctacgaccccatctccacggacgcgtcgcggcgctcgagcgaggccagccagtgcagcggcggctccgggctgctcaacctcacgccggcgcagcagtacagcctgcgggccaagtacgcggcagccactggcggccccccgcccactccgctgccgggcctggagcgcatgagcctgcggaccaggctggcgctgctggacgcgcccgagcgcacgctgcccgccggctgcccacgcccactggggccgcggcgtggcagcgacgggccgacctatggccacggccacgcgggggctgcgcccgccttcccccacgaggctccaggcggcggagccaggcgggccagcgaccctgtgcggcggcccgatgccctgtccctgccgcgggtgcagcgcttccacagcacccacaacgtgaaccccggcccgctgccgccctgtgccgacaggcgaggcctccgcctgcagagccacccgagcaccgacggcggcctggcccgcggcgcctactcgccccggccgcctagcatcagcgagaacgtggcgatggaggccgtggcggcaggagtggacggcgcggggcccgaggccgacctggggctgccggaggacgacctggtgcttccagacgacgtggtgcagtacatcaaggcgcacgccagtggcgctctggacgagggcaccgggcaggtgtatcccacggaaagcactggcttctctgacaaccccagactacccagcccggggctgcacggccagcgcaggatggtggctgcggactccaacgtgggcccctccgcccctatgctgggaggatgccagttaggctttggggcgccctccagcctgaacaaaaataacatgcctgtgcagtggaatgaggtgagctccggcaccgtagacgccctggccagccaggtgaagcctccaccctttcctcagggcaacctggcggtggtgcagcagaagcctgcctttggccagtacccgggctacagtccgcaaggcctacaggctagccctgggggcctggacagcacgcagccacacctgcagccccgcagcggagccccctcccagggcatccccagggtaaactacatgcagcagctgcgacagccagtggcaggcagccagtgtcctggcatgactaccactatgagcccccatgcctgctatggccaagtccacccccagctgagccccagcaccatcagtggggccctcaaccagttcccccaatcctgcagcaacatgccagccaagccagggcatctggggcaccctcagcagacagaagtggcacctgaccccaccacgatgggcaatcgccacagggaacttggggtccccgattcagccctggctggagtgccaccacctcacccagtccagagctacccacagcagagccatcacctggcagcctccatgagccaggagggctaccaccaggtccccagccttctgcctgcccgccagcctggcttcatggagccccaaacaggcccgatgggggtggctacagcaggctttggcctagtgcagccccggcctcccctcgagcccagccccactggccgccaccgtggggtacgtgctgtgcagcagcagctggcctacgccagggccacaggccatgccatggctgccatgccgtccagtcaggaaacagcagaggctgtgcccaagggagcgatgggcaacatggggtcggtgcctccccagccgcctccgcaggacgcaggtggggccccggaccacagcatgctctactactacggccagatccacatgtacgaacaggatggaggcctggagaacctcgggagctgccaggtcatgcggtcccagccaccacagccacaggcctgtcaggacagcatccagccccagcccttgccctcaccaggggtcaaccaggtgtccagcactgtggactcccagctcctggaggccccccagattgacttcgatgccatcatggatgatggcgatcactcgagtttgttctcgggtgctctgagccccagcctcctccacagcctctcccagaactcctcccgcctcaccaccccccgaaactccttgaccctgccctccatccccgcaggcatcagcaacatggctgtcggggacatgagctccatgctcaccagcctcgccgaggagagcaagttcctgaacatgatgacctagaggcccgagcgcctggtgctgagtgcacccggaggggtcatcgctgcccagagcctggggattccagctgtcttgtctttttccaaaaaagtgttaaataggcttgaggggttgttgcgcaatggccgcttcagatgacagatgttgtaagagaaggtttatgggcatcctctctggtcttttggattattcctcagaacaatgaaaaaagtctccataggacaggaaggaatgcaaaactcatttacacagtgctttccagcctttggtgcttacaggaccgcgctgttccggcttcttcacggctgacattcggctaacgagggattactttggccaaaacctttcaaaggatatgcagaaagatggtagggagcatttgggtttgaatctgaatgctatactggatactctgctccggaaagatgagctttttattctactacttggaaggaaaaggaattcctggtccacctgaattcctctatgaagcctaactcttgaggtctctaacataccttgtcatagaggaaaagcacagattatacctggatgattcaggagcacattctgattccaggtttggtagagctggctcttctactccgtaaagccgagtctgggactggcagcccatccaagtgtatatgaatgaataaagcatccaagtatatatgaatgaataaagtatgtaagtatcaccagaaaaaggaaagaaaaaatgtactccttggggcaagcccagaagctgccctggcctctccagaccgtgtttacagtgtttgcatgtagaatgtagcccttcctgaaaagaagacttgtttctaaatacctcggggctgctggagccgctgtgggttagggatggactgaggcctcgaggagtgagggtgcacccggggcccagcctcaggctgccctagggatctctcagtaggaagaggaagttgcgtgtttacccaatcctgtttctccaatgcaacgtccacccactttaccaccaaaaactccagggcctgacggcagcccggtcccccagcactcaccagcagcccagtgttctccaccaagccacagtgtgcatgcctggtatcctccggattcccttccttctgcccgctgagtcactgggcagagaatgatgacatgtgtaggtggtgtggttgggggtggaaaggggaaggggttgatcctcaggactctgagggagcatcgttgaattttcctgttcagtgtgaccaagacccacctggaaatggaatttggaactggcttcaggagacatcattcctgaacacactgtagggtgaattggtgcatcttccccaccatacacacacacacacacacacacacacacacacacacacacacaccccaaaccttttcatggggaatgtgtggcaaccttgccaaacagcaccactcagagtgtgactctgactgtgaccttggccttaatgaggaacttcttaggagagtttgaggacaaggccaacatcgtcatctgggctcgctgcgtcccagcacatcaaactctgtccagagacaaggccaactgcaaatgaaagccagggaacattgctaagggtctgtggctctgtggtggtgttcatcgccttcctgagataggatttcccttgccagtcccaacctgtatatattctgtacagaagacatccctgaatatactgtaggtgagtcgtccagccaaatttatatctccaaaacatttttagctttttctacatgctatgaattgagatgacatgctcaacttgtaaataagtctttttgtacattaaaaaagtaattttttcataatttatcttgtctatctgcttcccccttgacagtagttaatgagaacctgggcagtaaatttggtgcattcgagcagaaattaggctgtattttttcttaacagtgtcaaaattgactatcccgcctttgccaagaaatgtttaatgctgaggca

SEQ ID NO: 137073 - DNA, 4955 bp, Homo sapiens
  Payload ID: 6837
  Gene Symbol: GLI2
  Gene Name: GLI family zinc finger 2
  ENST ID: ENST00000445186
  CDS Start-End: 187-390
tgaagttcgtggactcctacaataatgctataaatgcatagaagaaaagacacaggactgtgaaagaaagtgatgatgcgatgtctaaaacgttcaaggcaccgcatctgtgatcaagaatacatgtgctgctttaccgacacatcaaagagcaaggattgccacccaggacgatgagcggctgagatggagacgtctgcctcagccactgcctccgagaagcaagaagccaaaagtgggatcctggaggccgctggcttccccgacccgggtaaaaaggcctctcctttggtggtggctgcagcggcagcagcagcggtagctgcccaaggagcccagccttcaccttcccccaccccatcaaccccgtggcctaccagcagattctgagccagcagaggggtctggggtcagcctttggacacacaccacccctgatccagccctcacccaccttcctggcccagcagcccatggccctcacctccatcaatgccacgcccacccagctcagcagcagcagcaactgtctgagtgacaccaaccagaacaagcagagcagtgagtcggccgtcagcagcaccgtcaaccctgtcgccattcacaagcgcagcaaggtcaagaccgagcctgagggcctgcggccggcctcccctctggcgctgacgcagggccaggtgtctggacacggctcatgtgggtgtgcccttcccctctcccaggagcagctggctgacctcaaggaagatctggacagggatgactgtaagcaggaggctgaggtggtcatctatgagaccaactgccactgggaagactgcaccaaggagtacgacacccaggagcagctggtgcatcacatcaacaacgagcacatccacggggagaagaaggagtttgtgtgccgctggcaggcctgcacgcgggagcagaagcccttcaaggcgcagtacatgctggtggtgcacatgcggcgacacacgggcgagaagccccacaagtgcacgttcgagggctgctcgaaggcctactcccgcctggagaacctgaagacacacctgcggtcccacaccggggagaagccatatgtgtgtgagcacgagggctgcaacaaagccttctccaacgcctcggaccgcgccaagcaccagaatcgcacccactccaacgagaaaccctacatctgcaagatcccaggctgcaccaagagatacacagaccccagctctctccggaagcatgtgaaaacggtccacggcccagatgcccacgtcaccaagaagcagcgcaatgacgtgcacctccgcacaccgctgctcaaagagaatggggacagtgaggccggcacggagcctggcggcccagagagcaccgaggccagcagcaccagccaggccgtggaggactgcctgcacgtcagagccatcaagaccgagagctccgggctgtgtcagtccagccccggggcccagtcgtcctgcagcagcgagccctctcctctgggcagtgcccccaacaatgacagtggcgtggagatgccggggacggggcccgggagcctgggagacctgacggcactggatgacacacccccaggggccgacacctcagccctggctgccccctccgctggtggcctccagctgcgcaaacacatgaccaccatgcaccggttcgagcagctcaagaaggagaagctcaagtcactcaaggattcctgctcatgggccgggccgactccacacacgcggaacaccaagctgcctcccctcccgggaagtggctccatcctggaaaacttcagtggcagtgggggcggcgggcccgcggggctgctgccgaacccgcggctgtcggagctgtccgcgagcgaggtgaccatgctgagccagctgcaggagcgccgcgacagctccaccagcacggtcagctcggcctacaccgtgagccgccgctcctccggcatctccccctacttctccagccgccgctccagcgaggcctcgcccctgggcgccggccgcccgcacaacgcgagctccgctgactcctacgaccccatctccacggacgcgtcgcggcgctcgagcgaggccagccagtgcagcggcggctccgggctgctcaacctcacgccggcgcagcagtacagcctgcgggccaagtacgcggcagccactggcggccccccgcccactccgctgccgggcctggagcgcatgagcctgcggaccaggctggcgctgctggacgcgcccgagcgcacgctgcccgccggctgcccacgcccactggggccgcggcgtggcagcgacgggccgacctatggccacggccacgcgggggctgcgcccgccttcccccacgaggctccaggcggcggagccaggcgggccagcgaccctgtgcggcggcccgatgccctgtccctgccgcgggtgcagcgcttccacagcacccacaacgtgaaccccggcccgctgccgccctgtgccgacaggcgaggcctccgcctgcagagccacccgagcaccgacggcggcctggcccgcggcgcctactcgccccggccgcctagcatcagcgagaacgtggcgatggaggccgtggcggcaggagtggacggcgcggggcccgaggccgacctggggctgccggaggacgacctggtgcttccagacgacgtggtgcagtacatcaaggcgcacgccagtggcgctctggacgagggcaccgggcaggtgtatcccacggaaagcactggcttctctgacaaccccagactacccagcccggggctgcacggccagcgcaggatggtggctgcggactccaacgtgggcccctccgcccctatgctgggaggatgccagttaggctttggggcgccctccagcctgaacaaaaataacatgcctgtgcagtggaatgaggtgagctccggcaccgtagacgccctggccagccaggtgaagcctccaccctttcctcagggcaacctggcggtggtgcagcagaagcctgcctttggccagtacccgggctacagtccgcaaggcctacaggctagccctgggggcctggacagcacgcagccacacctgcagccccgcagcggagccccctcccagggcatccccagggtaaactacatgcagcagctgcgacagccagtggcaggcagccagtgtcctggcatgactaccactatgagcccccatgcctgctatggccaagtccacccccagctgagccccagcaccatcagtggggccctcaaccagttcccccaatcctgcagcaacatgccagccaagccagggcatctggggcaccctcagcagacagaagtggcacctgaccccaccacgatgggcaatcgccacagggaacttggggtccccgattcagccctggctggagtgccaccacctcacccagtccagagctacccacagcagagccatcacctggcagcctccatgagccaggagggctaccaccaggtccccagccttctgcctgcccgccagcctggcttcatggagccccaaacaggcccgatgggggtggctacagcaggctttggcctagtgcagccccggcctcccctcgagcccagccccactggccgccaccgtggggtacgtgctgtgcagcagcagctggcctacgccagggccacaggccatgccatggctgccatgccgtccagtcaggaaacagcagaggctgtgcccaagggagcgatgggcaacatggggtcggtgcctccccagccgcctccgcaggacgcaggtggggccccggaccacagcatgctctactactacggccagatccacatgtacgaacaggatggaggcctggagaacctcgggagctgccaggtcatgcggtcccagccaccacagccacaggcctgtcaggacagcatccagccccagcccttgccctcaccaggggtcaaccaggtgtccagcactgtggactcccagctcctggaggccccccagattgacttcgatgccatcatggatgatggcgatcactcgagtttgttctcgggtgctctgagccccagcctcctccacagcctctcccagaactcctcccgcctcaccaccccccgaaactccttgaccctgccctccatccccgcaggcatcagcaacatggctgtcggggacatgagctccatgctcaccagcctcgccgaggagagcaagttcctgaacatgatgacctagaggcccgagcgcctggtgctgagtgcacccggaggggtcatcgctgcccagagcctggggattccagctgtcttgtctttttccaaaaaagtgttaaataggcttgaggggttgttgcgcaatggccgcttcagatgacagatgttgtaagagaaggtttatgggcatcctctctggtcttttggattattcctcagaacaatgaaaaaagtctccataggacaggaaggaatgcaaaactcatttacacagtgctttccagcctttggtgcttacaggaccgcgctgttccggcttcttcacggctgacattcggctaacgagggattactttggccaaaacctttcaaaggatatgcagaaagatggtagggagcatttgggtttgaatctgaatgctatactggatactctgctccggaaagatgagctttttattctactacttggaaggaaaaggaattcctggtccacctgaattcctctatgaagcctaactcttgaggtctctaacataccttgtcatagaggaaaagcacagattatacctggatgattcaggagcacattctgattccaggtttggtagagctggctcttctactccgtaaagccgagtctgggactggcagcccatccaagtgtatatgaatgaataaagcatccaagtatatatgaatgaataaagtatgtaagtatcaccag

SEQ ID NO: 137074 - DNA, 315 bp, Homo sapiens
  Payload ID: 6837
  Gene Symbol: GLI2
  Gene Name: GLI family zinc finger 2
  ENST ID: ENST00000418323
  CDS Start-End: 70-315
ggccacctgcgtgctagaggcaaacttttgtctctctcggattgccacccaggacgatgagcggctgagatggagacgtctgcctcagccactgcctccgagaagcaagaagccaaaagtgggatcctggaggccgctggcttccccgacccgggtaaaaaggcctctcctttggtggtggctgcagcggcagcagcagcggtagctgcccaaggagtgccgcagcatctcttgccaccattccatgcgcccctaccgattgacatgcgacaccaggaaggaaggtaccattacgagcctcattctgtccacggt

SEQ ID NO: 137075 - DNA, 3724 bp, Homo sapiens
  Payload ID: 6837
  Gene Symbol: GLI2
  Gene Name: GLI family zinc finger 2
  ENST ID: ENST00000438299
  CDS Start-End: 187-390
tgaagttcgtggactcctacaataatgctataaatgcatagaagaaaagacacaggactgtgaaagaaagtgatgatgcgatgtctaaaacgttcaaggcaccgcatctgtgatcaagaatacatgtgctgctttaccgacacatcaaagagcaaggattgccacccaggacgatgagcggctgagatggagacgtctgcctcagccactgcctccgagaagcaagaagccaaaagtgggatcctggaggccgctggcttccccgacccgggtaaaaaggcctctcctttggtggtggctgcagcggcagcagcagcggtagctgcccaaggagcccagccttcaccttcccccaccccatcaaccccgtggcctaccagcagattctgagccagcagaggggtctggggtcagcctttggacacacaccacccctgatccagccctcacccaccttcctggcccagcagcccatggccctcacctccatcaatgccacgcccacccagctcagcagcagcagcaactgtctgagtgacaccaaccagaacaagcagagcagtgagtcggccgtcagcagcaccgtcaaccctgtcgccattcacaagcgcagcaaggtcaagaccgagcctgagggcctgcggccggcctcccctctggcgctgacgcagggccaggtgtctggacacggctcatgtgggtgtgcccttcccctctcccaggagcagctggctgacctcaaggaagatctggacagggatgactgtaagcaggaggctgaggtggtcatctatgagaccaactgccactgggaagactgcaccaaggagtacgacacccaggagcagctggtgcatcacatcaacaacgagcacatccacggggagaagaaggagtttgtgtgccgctggcaggcctgcacgcgggagcagaagcccttcaaggcgcagtacatgctggtggtgcacatgcggcgacacacgggcgagaagccccacaagtgcacgttcgagggctgctcgaaggcctactcccgcctggagaacctgaagacacacctgcggtcccacaccggggagaagccatatgtgtgtgagcacgagggctgcaacaaagccttctccaacgcctcggaccgcgccaagcaccagaatcgcacccactccaacgagaaaccctacatctgcaagatcccaggctgcaccaagagatacacagaccccagctctctccggaagcatgtgaaaacggtccacggcccagatgcccacgtcaccaagaagcagcgcaatgacgtgcacctccgcacaccgctgctcaaagagaatggggacagtgaggccggcacggagcctggcggcccagagagcaccgaggccagcagcaccagccaggccgtggaggactgcctgcacgtcagagccatcaagaccgagagctccgggctgtgtcagtccagccccggggcccagtcgtcctgcagcagcgagccctctcctctgggcagtgcccccaacaatgacagtggcgtggagatgccggggacggggcccgggagcctgggagacctgacggcactggatgacacacccccaggggccgacacctcagccctggctgccccctccgctggtggcctccagctgcgcaaacacatgaccaccatgcaccggttcgagcagctcaagaaggagaagctcaagtcactcaaggattcctgctcatgggccgggccgactccacacacgcggaacaccaagctgcctcccctcccgggaagtggctccatcctggaaaacttcagtggcagtgggggcggcgggcccgcggggctgctgccgaacccgcggctgtcggagctgtccgcgagcgaggtgaccatgctgagccagctgcaggagcgccgcgacagctccaccagcacggtcagctcggcctacaccgtgagccgccgctcctccggcatctccccctacttctccagccgccgctccagcgaggcctcgcccctgggcgccggccgcccgcacaacgcgagctccgctgactcctacgaccccatctccacggacgcgtcgcggcgctcgagcgaggccagccagtgcagcggcggctccgggctgctcaacctcacgccggcgcagcagtacagcctgcgggccaagtacgcggcagccactggcggccccccgcccactccgctgccgggcctggagcgcatgagcctgcggaccaggctggcgctgctggacgcgcccgagcgcacgctgcccgccggctgcccacgcccactggggccgcggcgtggcagcgacgggccgacctatggccacggccacgcgggggctgcgcccgccttcccccacgaggctccaggcggcggagccaggcgggccagcgaccctgtgcggcggcccgatgccctgtccctgccgcgggtgcagcgcttccacagcacccacaacgtgaaccccggcccgctgccgccctgtgccgacaggcgaggcctccgcctgcagagccacccgagcaccgacggcggcctggcccgcggcgcctactcgccccggccgcctagcatcagcgagaacgtggcgatggaggccgtggcggcaggagtggacggcgcggggcccgaggccgacctggggctgccggaggacgacctggtgcttccagacgacgtggtgcagtacatcaaggcgcacgccagtggcgctctggacgagggcaccgggcaggtgtatcccacggaaagcactggcttctctgacaaccccagactacccagcccggggctgcacggccagcgcaggatggtggctgcggactccaacgtgggcccctccgcccctatgctgggaggatgccagttaggctttggggcgccctccagcctgaacaaaaataacatgcctgtgcagtggaatgaggcatcagcaacatggctgtcggggacatgagctccatgctcaccagcctcgccgaggagagcaagttcctgaacatgatgacctagaggcccgagcgcctggtgctgagtgcacccggaggggtcatcgctgcccagagcctggggattccagctgtcttgtctttttccaaaaaagtgttaaataggcttgaggggttgttgcgcaatggccgcttcagatgacagatgttgtaagagaaggtttatgggcatcctctctggtcttttggattattcctcagaacaatgaaaaaagtctccataggacaggaaggaatgcaaaactcatttacacagtgctttccagcctttggtgcttacaggaccgcgctgttccggcttcttcacggctgacattcggctaacgagggattactttggccaaaacctttcaaaggatatgcagaaagatggtagggagcatttgggtttgaatctgaatgctatactggatactctgctccggaaagatgagctttttattctactacttggaaggaaaaggaattcctggtccacctgaattcctctatgaagcctaactcttgaggtctctaacataccttgtcatagaggaaaagcacagattatacctggatgattcaggagcacattctgattccaggtttggtagagctggctcttctactccgtaaagccgagtctgggactggcagcccatccaagtgtatatgaatgaataaagcatccaagtatatatgaatgaataaagtatgtaagtatcaccag

SEQ ID NO: 137076 - DNA, 1112 bp, Homo sapiens
  Payload ID: 6837
  Gene Symbol: GLI2
  Gene Name: GLI family zinc finger 2
  ENST ID: ENST00000433812
  CDS Start-End: 1-171
gcctccgagaagcaagaagccaaaagtgggatcctggaggccgctggcttccccgacccgggtaaaaaggcctctcctttggtggtggctgcagcggcagcagcagcggtagctgcccaaggaggccccctgccctcagcggcagccctgtcatctctgacatctccttgatccggctttccccgcacccggctggccctggggagtcccccttcaacgccccccacccgtacgtgaacccccacatggagcactacctccgttctgtgcacagcagccccacgctctccatgatctctgcagccaggggcctcagccccgctgatgtggcccaggagcaccttaaggagaggggactgtttggccttcctgctccaggcaccaccccctcagactattaccaccagatgaccctcgtggcaggccaccccgcgccctacggggacctgctgatgcagagcgggggcgctgccagcgcaccccatctccacgactacctcaaccccgtggacgtgtcccgtttctccagcccgcgggtgacgccccgcctgagccgcaagcgggcgctgtccatctccccactctcagacgccagcctggacctgcagcggatgatccgcacctcacccaactcgctagtggcctacatcaacaactcccgaagcagctcggcggccagcggttcctacgggcatctgtcagcgggtgccctcagcccagccttcaccttcccccaccccatcaaccccgtggcctaccagcagattctgagccagcagaggggtctggggtcagcctttggacacacaccacccctgatccagccctcacccaccttcctggcccagcagcccatggccctcacctccatcaatgccacgcccacccagctcagcagcagcagcaactgtctgagtgacaccaaccagaacaagcagagcagtgagtcggccgtcagcagcaccgtcaaccctgtcgccattcacaagcgcagcaaggtcaagaccgagcctgagggcctgcggccggcctcccctctggcgctgacgcaggagcagctggctgacctcaaggaagatctggacagggatgactgtaagcaggaggctgag

SEQ ID NO: 137077 - DNA, 3673 bp, Homo sapiens
  Payload ID: 6837
  Gene Symbol: GLI2
  Gene Name: GLI family zinc finger 2
  ENST ID: ENST00000452692
  CDS Start-End: 187-390
tgaagttcgtggactcctacaataatgctataaatgcatagaagaaaagacacaggactgtgaaagaaagtgatgatgcgatgtctaaaacgttcaaggcaccgcatctgtgatcaagaatacatgtgctgctttaccgacacatcaaagagcaaggattgccacccaggacgatgagcggctgagatggagacgtctgcctcagccactgcctccgagaagcaagaagccaaaagtgggatcctggaggccgctggcttccccgacccgggtaaaaaggcctctcctttggtggtggctgcagcggcagcagcagcggtagctgcccaaggagcccagccttcaccttcccccaccccatcaaccccgtggcctaccagcagattctgagccagcagaggggtctggggtcagcctttggacacacaccacccctgatccagccctcacccaccttcctggcccagcagcccatggccctcacctccatcaatgccacgcccacccagctcagcagcagcagcaactgtctgagtgacaccaaccagaacaagcagagcagtgagtcggccgtcagcagcaccgtcaaccctgtcgccattcacaagcgcagcaaggtcaagaccgagcctgagggcctgcggccggcctcccctctggcgctgacgcaggagcagctggctgacctcaaggaagatctggacagggatgactgtaagcaggaggctgaggtggtcatctatgagaccaactgccactgggaagactgcaccaaggagtacgacacccaggagcagctggtgcatcacatcaacaacgagcacatccacggggagaagaaggagtttgtgtgccgctggcaggcctgcacgcgggagcagaagcccttcaaggcgcagtacatgctggtggtgcacatgcggcgacacacgggcgagaagccccacaagtgcacgttcgagggctgctcgaaggcctactcccgcctggagaacctgaagacacacctgcggtcccacaccggggagaagccatatgtgtgtgagcacgagggctgcaacaaagccttctccaacgcctcggaccgcgccaagcaccagaatcgcacccactccaacgagaaaccctacatctgcaagatcccaggctgcaccaagagatacacagaccccagctctctccggaagcatgtgaaaacggtccacggcccagatgcccacgtcaccaagaagcagcgcaatgacgtgcacctccgcacaccgctgctcaaagagaatggggacagtgaggccggcacggagcctggcggcccagagagcaccgaggccagcagcaccagccaggccgtggaggactgcctgcacgtcagagccatcaagaccgagagctccgggctgtgtcagtccagccccggggcccagtcgtcctgcagcagcgagccctctcctctgggcagtgcccccaacaatgacagtggcgtggagatgccggggacggggcccgggagcctgggagacctgacggcactggatgacacacccccaggggccgacacctcagccctggctgccccctccgctggtggcctccagctgcgcaaacacatgaccaccatgcaccggttcgagcagctcaagaaggagaagctcaagtcactcaaggattcctgctcatgggccgggccgactccacacacgcggaacaccaagctgcctcccctcccgggaagtggctccatcctggaaaacttcagtggcagtgggggcggcgggcccgcggggctgctgccgaacccgcggctgtcggagctgtccgcgagcgaggtgaccatgctgagccagctgcaggagcgccgcgacagctccaccagcacggtcagctcggcctacaccgtgagccgccgctcctccggcatctccccctacttctccagccgccgctccagcgaggcctcgcccctgggcgccggccgcccgcacaacgcgagctccgctgactcctacgaccccatctccacggacgcgtcgcggcgctcgagcgaggccagccagtgcagcggcggctccgggctgctcaacctcacgccggcgcagcagtacagcctgcgggccaagtacgcggcagccactggcggccccccgcccactccgctgccgggcctggagcgcatgagcctgcggaccaggctggcgctgctggacgcgcccgagcgcacgctgcccgccggctgcccacgcccactggggccgcggcgtggcagcgacgggccgacctatggccacggccacgcgggggctgcgcccgccttcccccacgaggctccaggcggcggagccaggcgggccagcgaccctgtgcggcggcccgatgccctgtccctgccgcgggtgcagcgcttccacagcacccacaacgtgaaccccggcccgctgccgccctgtgccgacaggcgaggcctccgcctgcagagccacccgagcaccgacggcggcctggcccgcggcgcctactcgccccggccgcctagcatcagcgagaacgtggcgatggaggccgtggcggcaggagtggacggcgcggggcccgaggccgacctggggctgccggaggacgacctggtgcttccagacgacgtggtgcagtacatcaaggcgcacgccagtggcgctctggacgagggcaccgggcaggtgtatcccacggaaagcactggcttctctgacaaccccagactacccagcccggggctgcacggccagcgcaggatggtggctgcggactccaacgtgggcccctccgcccctatgctgggaggatgccagttaggctttggggcgccctccagcctgaacaaaaataacatgcctgtgcagtggaatgaggcatcagcaacatggctgtcggggacatgagctccatgctcaccagcctcgccgaggagagcaagttcctgaacatgatgacctagaggcccgagcgcctggtgctgagtgcacccggaggggtcatcgctgcccagagcctggggattccagctgtcttgtctttttccaaaaaagtgttaaataggcttgaggggttgttgcgcaatggccgcttcagatgacagatgttgtaagagaaggtttatgggcatcctctctggtcttttggattattcctcagaacaatgaaaaaagtctccataggacaggaaggaatgcaaaactcatttacacagtgctttccagcctttggtgcttacaggaccgcgctgttccggcttcttcacggctgacattcggctaacgagggattactttggccaaaacctttcaaaggatatgcagaaagatggtagggagcatttgggtttgaatctgaatgctatactggatactctgctccggaaagatgagctttttattctactacttggaaggaaaaggaattcctggtccacctgaattcctctatgaagcctaactcttgaggtctctaacataccttgtcatagaggaaaagcacagattatacctggatgattcaggagcacattctgattccaggtttggtagagctggctcttctactccgtaaagccgagtctgggactggcagcccatccaagtgtatatgaatgaataaagcatccaagtatatatgaatgaataaagtatgtaagtatcaccag

SEQ ID NO: 137078 - DNA, 1904 bp, Homo sapiens
  Payload ID: 6837
  Gene Symbol: GLI2
  Gene Name: GLI family zinc finger 2
  ENST ID: ENST00000437950
  CDS Start-End: 31-234
gattgccacccaggacgatgagcggctgagatggagacgtctgcctcagccactgcctccgagaagcaagaagccaaaagtgggatcctggaggccgctggcttccccgacccgggtaaaaaggcctctcctttggtggtggctgcagcggcagcagcagcggtagctgcccaaggagcccagccttcaccttcccccaccccatcaaccccgtggcctaccagcagattctgagccagcagaggggtctggggtcagcctttggacacacaccacccctgatccagccctcacccaccttcctggcccagcagcccatggccctcacctccatcaatgccacgcccacccagctcagcagcagcagcaactgtctgagtgacaccaaccagaacaagcagagcagtgagtcggccgtcagcagcaccgtcaaccctgtcgccattcacaagcgcagcaaggtcaagaccgagcctgagggcctgcggccggcctcccctctggcgctgacgcagggccaggtgtctggacacggctcatgtgggtgtgcccttcccctctcccaggagcagctggctgacctcaaggaagatctggacagggatgactgtaagcaggaggctgaggtggtcatctatgagaccaactgccactgggaagactgcaccaaggagtacgacacccaggagcagctggtgcatcacatcaacaacgagcacatccacggggagaagaaggagtttgtgtgccgctggcaggcctgcacgcgggagcagaagcccttcaaggcgcagtacatgctggtggtgcacatgcggcgacacacgggcgagaagccccacaagtgcacgttcgagggctgctcgaaggcctactcccgcctggagaacctgaagacacacctgcggtcccacaccggggagaagccatatgtgtgtgagcacgagggctgcaacaaagccttctccaacgcctcggaccgcgccaagcaccagaatcgcacccactccaacgagaaaccctacatctgcaagatcccaggctgcaccaagagatacacagaccccagctctctccggaagcatgtgaaaacggtccacggcccagatgcccacgtcaccaagaagcagcgcaatgacgtgcacctccgcacaccgctgctcaaagagaatggggacagtgaggccggcacggagcctggcggcccagagagcaccgaggccagcagcaccagccaggccgtggaggactgcctgcacgtcagagccatcaagaccgagagctccgggctgtgtcagtccagccccggggcccagtcgtcctgcagcagcgagccctctcctctgggcagtgcccccaacaatgacagtggcgtggagatgccggggacggggcccgggagcctgggagacctgacggcactggatgacacacccccaggggccgacacctcagccctggctgccccctccgctggtggcctccagctgcgcaaacacatgaccaccatgcaccggttcgagcagctcaagaaggagaagctcaagtcactcaaggattcctgctcatgggccgggccgactccacacacgcggaacaccaagctgcctcccctcccgggaagtggctccatcctggaaaacttcagtggcagtgggggcggcgggcccgcggggctgctgccgaacccgcggctgtcggagctgtccgcgagcgaggtgaccatgctgagccagctgcaggagcgccgcgacagctccaccagcacggtcagctcggcctacaccgtgagccgccgctcctccggcatctccccctacttctccagccgccgctccagcgaggcctcgcccctgggcgccggccgcccgcacaacgcgagctccgctgactcctacgacccc

SEQ ID NO: 137079 - DNA, 529 bp, Homo sapiens
  Payload ID: 6837
  Gene Symbol: GLI2
  Gene Name: GLI family zinc finger 2
  ENST ID: ENST00000360874
  CDS Start-End: 1-529
gcctccgagaagcaagaagccaaaagtgggatcctggaggccgctggcttccccgacccgggtaaaaaggcctctcctttggtggtggctgcagcggcagcagcagcggtagctgcccaaggagtgccgcagcatctcttgccaccattccatgcgcccctaccgattgacatgcgacaccaggaaggaaggtaccattacgagcctcattctgtccacggtgtgcacggtgtcccgtttctccagcccgcgggtgacgccccgcctgagccgcaagcgggcgctgtccatctccccactctcagacgccagcctggacctgcagcggatgatccgcacctcacccaactcgctagtggcctacatcaacaactcccgaagcagctcggcggccagcggttcctacgggcatctgtcagcgggtgccctcagcccagccttcaccttcccccaccccatcaaccccgtggcctaccagcagattctgagccagcagaggggtctggggtcagcctttggacacacacca

SEQ ID NO: 137080 - DNA, 8208 bp, Homo sapiens
  Payload ID: 6838
  Gene Symbol: GLI3
  Gene Name: GLI family zinc finger 3
  Uniprot ID: P10071
  ENST ID: ENST00000395925
  CDS Start-End: 86-4828
gtctatgggaagttcggggacttgacagccgctgccgccgcagggcatttttggtcgaagagagctgaagtaatgagaagacatcatggaggcccagtcccacagctccacgaccactgaaaagaaaaaagttgagaattccatagtgaagtgctccactcgaacagatgtgagcgagaaagccgttgcctccagcaccacttctaatgaggatgaaagtcctggacagacttatcacagagagagaagaaacgcaatcactatgcagccacagaatgtccaggggctcagcaaagtcagtgaggaaccttcaacatcgagtgacgagagggcctcattgatcaagaaagagatccatgggtccctgccacacgtggcggagccctctgtgccgtaccgcgggacggtgtttgccatggaccccaggaatggttacatggagccccactaccaccctcctcatcttttccctgccttccatcctcctgtaccaattgatgccagacatcatgagggccgttaccattacgatccatctccgattcctccattgcatatgacttccgccttatctagtagccctacgtatccggacctgcccttcattaggatctccccacaccggaaccccactgctgcttccgagtctcccttcagccctccacatccctacattaatccctacatggactatatccgctccttgcacagcagcccatcgctctccatgatctcagcaacccgtgggctgagccctacagatgcgccccatgcaggagtcagcccagcagaatactatcatcagatggccctgctaactggccagcgcagcccctatgcagacattattccctcagctgccaccgccggcacgggggccatccacatggaatatcttcatgctatggatagcaccagattctccagccccaggctgtcagccaggccgagccgaaaacgtacactgtccatatcaccactctccgatcatagctttgaccttcagaccatgataaggacgtctcccaactccttggtcacgattctcaataattcccgtagcagctcttcagcaagtggctcctatggtcacttatctgcaagtgcaatcagccctgccttgagcttcacctactcttccgcgcccgtctctctccacatgcatcagcagatcctaagccgacaacagagcttaggttcagcctttggacacagccctccactcatccaccctgccccaacttttccaacacagaggcctattccagggatccctacggttctgaaccccgtccaggtcagctccggcccttctgagtcctcacagaacaagcccacgagtgagtctgcagtgagcagcactggtgacccgatgcacaacaagaggtccaagatcaaacccgatgaagacctccccagcccaggggctcgggggcagcaggaacagcccgaaggaacaacccttgtcaaggaggaaggggacaaagatgaaagcaaacaggagcctgaagtcatctatgagacaaactgccactgggaaggctgcgcgagggagttcgacacccaagagcagcttgtgcaccatataaataacgaccatattcatggagagaagaaggagttcgtgtgcaggtggctggactgctcaagagagcagaaacccttcaaagcccagtatatgttggtagtgcatatgagaagacacacgggcgagaagcctcacaaatgcacttttgaaggttgcacaaaggcctactcgagactagaaaacttgaaaacacacttgagatctcacactggagagaaaccatacgtctgtgagcacgaaggttgcaacaaggctttctcaaatgcctctgatcgcgccaaacaccaaaacagaacgcattccaatgagaaaccatatgtgtgcaaaatcccaggctgcactaagcgttacacagacccaagctccctccggaaacatgtgaagacagtgcatggcccagaggctcatgtcaccaagaagcagcgaggggacatccatcctcggccgccacccccgagagattccggcagccattcacagtccaggtcgcctggccgaccgactcagggagcccttggtgagcagcaggacctcagcaacactacctcaaagcgggaagaatgcctccaggtgaaaaccgtcaaggcagagaagccaatgacatctcagccaagccctggtggtcagtcttcatgcagcagccaacagtcccccatcagcaactattccaacagtgggctcgagcttcctctgaccgatggaggtagtataggagacctcagtgccatcgatgaaaccccaatcatggactcaaccatttccactgcaaccacagcccttgctttgcaagccaggagaaacccggcagggaccaaatggatggagcacgtaaaactagaaaggctaaaacaagtgaatggaatgtttccgcgactgaaccccattctaccccctaaagcccctgcggtctctcctctcataggaaatggcacacagtccaacaacacctgcagcttgggtgggcccatgacgcttctcccgggcagaagcgacctctctggggtggacgtcactatgctgaacatgctcaacagaagggacagcagcgccagcaccatcagctcggcctacctgagcagccgccgctcctcagggatctcgccctgcttctccagccgccgctccagcgaggcgtcacaggccgagggccggccgcagaacgtgagcgtggccgactcctacgaccccatctccaccgacgcctcgcgccgctccagcgaagccagccagagcgacggcctgcccagcctgctcagcctcacgcccgcccagcagtaccgcctcaaggccaagtacgcggctgccacaggagggccgccgccgacgcccctgcccaacatggagaggatgagcctgaagacgcgcctggcgctgctcggggatgccctcgagcctggcgtggccctgcctccagttcatgccccgaggaggtgcagcgacgggggagcccacggctacgggcggcgccacctgcagccgcacgatgcgccgggccacggcgtgaggagggccagcgacccggtgcggacaggctccgagggcctggccctgcctcgtgtgccgcgcttcagcagcctcagcagctgcaaccccccggcgatggccacgtccgcggagaagcgcagtctcgtgcttcagaattacacgcggcccgagggcggccagtcccgaaacttccactcgtccccctgtcctcccagcatcaccgagaacgtcaccctggagtccctgaccatggacgctgatgccaacctgaacgatgaggatttcctgccggacgacgtggtgcagtatttaaattcccagaaccaagcagggtacgagcagcacttccccagcgccctcccggacgacagcaaagtgccccacgggcccggtgactttgacgcgcccgggctgccagacagccacgctggccagcagttccatgccctcgagcagccctgccccgagggcagcaaaaccgacctgcccattcagtggaacgaagtcagctccggaagcgccgacctgtcctcctccaagctcaagtgtgggccgcggcccgctgtgccgcagactcgcgcctttgggttctgcaacggcatggtcgtccacccgcagaaccccttgaggagcgggcctgctgggggctatcagaccctcggggagaacagcaacccctacggtggcccagagcacttgatgctccacaacagccccggaagtggcaccagtggaaacgccttccatgaacagccctgtaaggccccgcagtatgggaactgtctcaacaggcagccagtggcccctggtgcactcgacggtgcctgtggtgccgggattcaagcctcaaagctgaagagcacccccatgcaagggagcgggggccagctgaatttcggcctgccggtagcgccaaatgagtcagctggcagcatggtgaatggcatgcagaaccaggacccagtgggacaggggtacctggctcaccagctcctcggcgacagcatgcagcacccgggggcaggccgccccggtcagcagatgcttgggcagattagtgctacctcacacatcaacatctaccaagggccagagagctgcctgccaggggctcacggcatgggcagccagccgtcaagcttggcagttgtcaggggctaccagccatgtgccagctttgggggcagcaggcgccaggctatgccgagggacagccttgctctgcagtcaggacagctcagtgacacaagtcagacctgcagggtgaatggtatcaagatggagatgaaagggcagccccatccgctgtgctctaatctgcagaattactctggtcagttctatgaccaaaccgtgggcttcagtcagcaagacacgaaagctggttcattctctatttcagacgccagctgcctgctacaggggaccagcgccaaaaactctgagttactttccccaggtgctaatcaggtgacaagcacagtggacagcctcgacagccatgacctggaaggggtacagattgacttcgatgccatcatagacgatggggaccactccagcctgatgtcgggggccctgagcccaagtatcattcagaacctttcccatagctcctcccgcctcaccacgcctcgggcgtccctcccattcccagcgctgtccatgagcaccaccaacatggctatcggggacatgagttctttgctgacctccctagcggaagaaagcaaattccttgcagttatgcaataggctttaggaaaaaaagactgcaaccaacggaaatcaataggagttgaagagattaaactgactttgttttggctgtttttttagttctgtatgtattttagcaatctcatctcacctaactgagatgtgtttcaattatattccttttatggaaaaggactctgaaaaaccctaaagtattctagggagaaactgtcttccatttcagttttgaatcagtattgttacactcaaaccaccctctttttaaaaaaaaaaaaaaaaactgtaagccccgccccctttttagtaaaccgatgtaaatttgtgatgtgcatattcttctttcttttagaagagcagtcaaattaaaggatttgacatgttttgctgttgctcaaaggaaataggagttggtgtgcttgtgaccaaggggttacacttccagcttttaaaattctcctttacatgtgctcagtgttttgttttgtgttttggtttctgttttttattttaattcccacattgggcacaagaatcagaatatggatagctagtttaagaaacttttgtgggtgcactgtagcatagatgacagaatattgatgttccccccatctccaattcagttcagggcattccacagttaaacagaaatgggaacgtggggctcttataaatgaaatgggcgctcacagttttggttttcagctcttcatgtctgtaagtgtgctttgggggaggctatgtctgtatggtcgattctcagttatcacatttgcctctcctcccactaccttcatgaacattcagtgctgtttcgcactgcagttagagagaagggacggacagttggtgacactcagccacattgctacttttatctgttctggtaagaagttagatagatggtagattgaagcaattgggtagaattagttgggggaatatttatgagttgctgtgtttgttgattagttccatctctttcccattttaactgagaattgattatatatagctctaagtatataggtatttaaacaaccccacaagcggctgtatcagtaacatttattaattccactatagtgagggaggatttccattctaaataccttattttgagggatttataaaacttagttgtaaaagagaaagcccacatagtgggaataaattgcttcagccatttttagtatttgagagcactagggaagatgtttagtagctgtgtggatgccttttttcacaccctgtctattgaatgctgcatccattcacgaagttaaatgttacatgcagttagtccttaatgtggactggatctgtacttttgttttggattaaaacatttaaagatttttgaagtgcagctactccccacgtgcatttgatacacataaaagtcatactgtgtgtgcacaaagagtacatggattttccagcatattgctttaaaaaattatataaactgttaaaatattaacacctcaggctacctgctgtattctgtcccattgacccctggaattggatttactgcaagtgattgataattcaattatgtggcttttcccctttaatcttgccatttaaattacagtagaaagacaaaatcaagtaaaataaagtgttagataatagaaagagtgttaagaccagcccacttttctcatgtttatgttctttcatttggaccaagaatctccgcatggaggttgatttgccactggggactttggctaagactattaggtttgctttcaactagatgttcctgagacaagcagagggacactgcaattccccttccatgcctgctgttctcccccatgtaagtcttctttgaaattaacggatgtgtctcctttggaacagccccataacaaaagagaactactgatctgagcataggaaagtagaggctctaccacttttcagttgaaaaagcaagactttctctgtgtttctgaaacaaggcataatgttgtcacagaatcagagatccagtctcacttttccacaaatctccaaatctccagtcttatcttgtgtgctctaatggtttggttcaatccctttccaactcttgttttcaaagcatggggcctgagtgttctccactcctcctaagaaaggagcttgggtggaagggaccatgctgacctcctccatcagagggctcttccagtagtattctcggatgcaacctccatttctcagttaccattatttcctgtatcagctttgtccttcctggagggatgcacagtgatccggcccaccactgttgttgtcttgtgcttctgctctttcctatggtttcaggttattttctgggtttcccctattcttcttttatttctttttttttttatatttgctttcctttctactgcttttagatttgcaggagatgcaagtttcagctcaatgtttggcttctctcaatatggaaatttcagaaggacagaggagaggagggaggaagaagaaagtatactcctccagaatttcagtgatctgttgtggcagtccagtggaaggaaggtcttttgaggtcacttagaagcatctttttgggacatccttttgggatctctgtaggctaggcatctcatatcttgagactcacccccagcctccaagcctctctccatttctctaacctatgcattttagagcgagaggaccgcctcactagtgtcaccatcctgccttttctaaaacatgcaggctcacacattctactcctgcttaatgtctgtgttaaacgttttctaaccatttttgttttatttttctgaaaaagttaacccctcccaactcctcacacattggctcttcctcttgagccacaaagttttgattcttgcgatgtatgtgccttattttatgttaatcttgtcaatgagagggaccagttggtgttgcccaatcagcactccaaggctgtgtgtgcaccagccagagagcgcacggtggtagcagagtcgaggctgtcttgtatcctggtttcatgtgttgttttgaactgataggaggatgttctcttctgacaagttacccttgtgtatcctgcagacatgtaaaataaaatacaagttcatttttttcaccttttttagatttttttaaaaaataaaatgtgtaatcctttttttaaaagaaacacatgtaaatacatttaagtattgtaggcatagcgttcagatgtgactggcccaggcgttcctcggacaagcctgcattccccgtgatcacgcccacctcaagcccaggggctgcagcccagccacagatgaactctacctttgctttcagaaccacttagtccttttgtaacaaagaaaaaaaaatgtttcttacaatgtcaataaaaaattctttgtatggaa

SEQ ID NO: 137081 - DNA, 653 bp, Homo sapiens
  Payload ID: 6838
  Gene Symbol: GLI3
  Gene Name: GLI family zinc finger 3
  ENST ID: ENST00000448703
  CDS Start-End: 114-653
tgcggttctcttgctcgctttctgttctcttgcttactttcaaatgcagacgtgcactacagcgtcaccagggcatttttggtcgaagagagctgaagtaatgagaagacatcatggaggcccagtcccacagctccacgaccactgaaaagaaaaaagttgagaattccatagtgaagtgctccactcgaacagatgtgagcgagaaagccgttgcctccagcaccacttctaatgaggatgaaagtcctggacagacttatcacagagagagaagaaacgcaatcactatgcagccacagaatgtccaggggctcagcaaagtcagtgaggaaccttcaacatcgagtgacgagagggcctcattgatcaagaaagagatccatgggtccctgccacacgtggcggagccctctgtgccgtaccgcgggacggtgtttgccatggaccccaggaatggttacatggagccccactaccaccctcctcatcttttccctgccttccatcctcctgtaccaattgatgccagacatcatgagggccgttaccattacgatccatctccgattcctccattgcatatgacttccgccttatctagtagccctacgtatccggacctgcccttcattaggatctccccacaccgg

SEQ ID NO: 137082 - DNA, 451 bp, Homo sapiens
  Payload ID: 6838
  Gene Symbol: GLI3
  Gene Name: GLI family zinc finger 3
  ENST ID: ENST00000437480
  CDS Start-End: 132-422
gcggccgcgcggagcggggagccgccagcctgcgccccgtccgcgggtctatgggaagttcggggacttgacagccgctgccgccgcagggcatttttggtcgaagagagctgaagtaatgagaagacatcatggaggcccagtcccacagctccacgaccactgaaaagaaaaaagttgagaattccatagtgaagtgctccactcgaacagatgtgagcgagaaagccgttgcctccagcaccacttctaatggcaaccatttggaggcccaggccagaggctggaccaggaggattggatgcatccgcgctgtccatccctgctgctgcacaaacgactcagccacagatcctcttggatgggctaccttgaaagggggaagctccaaagaatgcgtacaaacccatacatttacctaggtgcgggatgattgcaagaccactttatt

SEQ ID NO: 137083 - DNA, 1012 bp, Homo sapiens
  Payload ID: 6839
  Gene Symbol: GLI4
  Gene Name: GLI family zinc finger 4
  ENST ID: ENST00000344692
  CDS Start-End: 40-270
aggtcccaggtgtgacaccttcagcaggtctcagggaagatggcagccctaggggacattcaggagtccccttctgtcccgtcccctgtcagtctctcatcaccggggacacctggaacccagcaccacgagcctcagcttcacctccatgggcatcaacatggctcccctggctccagccctaaggtgctctcccagccgtccgacctggatctccaagacgtagaggaagtggagatcggcagagacaccttctggcccggtgagtgagcagaatcgggttactgggggaccagagctctgcgcgtgccaggctcctcacaatgcccacctctgtggcacccccaatgctggcaccacccccttcctggggccccttttcttccctggcatcagctcacctctgccccgtggcccctcccccactctaatgccagtccagttactgatgcttcccgaggcggtgactgcagcccacagccacctgcgccagtggccccacgtggactcctgccggccccagctggacacagtgaatcaggaactcctccctcccctccacctgccttgggctggggcttctggctcagggcaccactgtccccccagatccacgagttatcctgtgtcccctcctcctcctgcatcccctagatggcctcccctcagcctggttggagctgtgtccaggtcccctgcacctcccccttgagaagctcccagggttccctctgggcgatgttagtgatatggctggatttaacagtgctgagccctcgcccacatctgggcggccctggggtggggagcaggtgtctgaggtcaggtccctggaaagagaccctgggccagagatttgcgtgggaagctcctggggtgggcatgggagctgggcggcagcacacttgccaccgaggcctggggcagccccatgaggagctgtgcccatatggaccacatcctcggcaagggctttgaggcgccctctggagctctggcgtcccccaggctc

SEQ ID NO: 137084 - DNA, 1341 bp, Homo sapiens
  Payload ID: 6839
  Gene Symbol: GLI4
  Gene Name: GLI family zinc finger 4
  Uniprot ID: P10075
  ENST ID: ENST00000340042
  CDS Start-End: 86-1216
ggccggacacttccgtccggcgcgcggcgtcctcctcccgctcggaaggtcccaggtgtgacaccttcagcaggtctcagggaagatggcagccctaggggacattcaggagtccccttctgtcccgtcccctgtcagtctctcatcaccggggacacctggaacccagcaccacgagcctcagcttcacctccatgggcatcaacatggctcccctggctccagccctaaggtgctctcccagccgtccgacctggatctccaagacgtagaggaagtggagatcggcagagacaccttctggcccgactccgagcccaagccggagcaggctccacgctctcctggctctcaggcccctgacgagggggcgggcggggcgctgcgcagcctcctgaggagccttccccgcagggcccggtgcagcgccggcttcgggcctgaatccagcgcggagcggccggcgggccagccgcctggggccgtcccttgcgcccagccgcggggcgcctggcgcgtgacgctcgtgcagcaagcagcggccgggcccgagggtgcgcccgagcgggctgccgagctgggagtcaacttcggtcggagccggcagggcagcgcgcggggggccaagccgcacaggtgcgaggcctgcggcaagagtttcaagtataactcgctgctcctgaagcaccagcgcatccacacgggcgagaagccctacgcctgccacgagtgcggcaagcgcttccgcggctggtcgggcttcatccagcaccaccgcatccacacgggcgagaagccctacgagtgcggccagtgcggccgcgccttcagccacagctcgcacttcacgcagcacctgcgcatccacaacggcgagaagccctacaagtgcggcgagtgcggccaggccttcagccagagctccaacctggtgcgccaccagcggctgcacacgggtgagaagccctacgcctgcagccagtgcggcaaggccttcatctggagctccgtgctcatcgagcaccagcgcatccacactggcgagaagccctacgagtgctccgactgcggcaaagccttccgcggccgctcgcacttcttccggcacctgcggacccacacgggcgagaagcccttcgcgtgtggcgcctgcggcaaggccttcggccagagctcccagctcatccagcaccagcgggtgcactaccgcgagtagccgggcgggggctcggggctcggcctcctacctgcccccaacccaccctccaccccgtcccccacggtgggcactgcccagcaccgcatgccacgtgtccggaataaattctttttgattgttgg

SEQ ID NO: 137085 - DNA, 361 bp, Homo sapiens
  Payload ID: 6839
  Gene Symbol: GLI4
  Gene Name: GLI family zinc finger 4
  ENST ID: ENST00000520021
  CDS Start-End: 28-361
tgacaccttcagcaggtctcagggaagatggcagccctaggggacattcaggagtccccttctgtcccgtcccctgtcagtctctcatcaccggggacacctggaacccagcaccacgagcctcagcttcacctccatgggcatcaacatggctcccctggctccagccctaaggtgctctcccagccgtccgacctggatctccaagacgtagaggaagtggagatcggcagagacaccttctggcccgatggcctcccctcagcctggttggagctgtgtccaggtcccctgcacctcccccttgagaagctcccagggttccctctgggcgatgttagtgatatggctggatttaaca

SEQ ID NO: 137086 - DNA, 963 bp, Homo sapiens
  Payload ID: 6839
  Gene Symbol: GLI4
  Gene Name: GLI family zinc finger 4
  ENST ID: ENST00000517468
  CDS Start-End: 40-210
aggtcccaggtgtgacaccttcagcaggtctcagggaagatggcagccctaggggacattcaggagtccccttctgtcccgtcccctgtcagtctctcatcaccggggacacctggaacccagcaccacgagcctcagcttcacctccatgggcatcaacatgccctaaggtgctctcccagccgtccgacctggatctccaagacgtagaggaagtggagatcggcagagacaccttctggcccgtccagttactgatgcttcccgaggcggtgactgcagcccacagccacctgcgccagtggccccacgtggactcctgccggccccagctggacacagtgaatcaggaactcctccctcccctccacctgccttgggctggggcttctggctcagggcaccactgtccccccagatccacgagttatcctgtgtcccctcctcctcctgcatcccctagatggcctcccctcagcctggttggagctgtgtccaggtcccctgcacctcccccttgagaagctcccagggttccctctgggcgatgttagtgatatggctggatttaacagtgctgagccctcgcccacatctgggcggccctggggtggggagcaggtgtctgaggtcaggtccctggaaagagaccctgggccagagatttgcgtgggaagctcctggggtgggcatgggagctgggcggcagcacacttgccaccgaggcctggggcagccccatgaggagctgtgcccatatggaccacatcctcggcaagggctttgaggcgccctctggagctctggcgtcccccaggctccgggtcctcaccaacacttagtgcttcctcctggctaagggtgaccccatggtctgtcttgccactgtggctccgtgcaccggcacggccgccgtggtgactgtggatggtcccagcagctctgggtcaccctgcaacgccc

SEQ ID NO: 137087 - DNA, 563 bp, Homo sapiens
  Payload ID: 6839
  Gene Symbol: GLI4
  Gene Name: GLI family zinc finger 4
  ENST ID: ENST00000517530
  CDS Start-End: 1-261
acacctggaacccagcaccacgagcctcagcttcacctccatgggcatcaacatggctcccctggctccagccctaaggtgctctcccagccgtccgacctggatctccaagacgtagaggaagtggagatcggcagagacaccttctggcccgggcccggtgcagcgccggcttcgggcctgaatccagcgcggagcggccggcgggccagccgcctggggccgtcccttgcgcccagccgcggggcgcctggcgcgtgacgctcgtgcagcaagcagcggccgggcccgagggtgcgcccgagcgggctgccgagctgggagtcaacttcggtcggagccggcagggcagcgcgcggggggccaagccgcacaggtgcgaggcctgcggcaagagtttcaagtataactcgctgctcctgaagcaccagcgcatccacacgggcgagaagccctacgcctgccacgagtgcggcaagcgcttccgcggctggtcgggcttcatccagcaccaccgcatccacacgggcgagaagccctacgagtgcggccagtgcggccgc

SEQ ID NO: 137088 - DNA, 1082 bp, Homo sapiens
  Payload ID: 6839
  Gene Symbol: GLI4
  Gene Name: GLI family zinc finger 4
  ENST ID: ENST00000521682
  CDS Start-End: 86-583
ggccggacacttccgtccggcgcgcggcgtcctcctcccgctcggaaggtcccaggtgtgacaccttcagcaggtctcagggaagatggcagccctaggggacattcaggagtccccttctgtcccgtcccctgtcagtctctcatcaccggggacacctggaacccagcaccacgagcctcagcttcacctccatgggcatcaacatggctcccctggctccagccctaaggtgctctcccagccgtccgacctggatctccaagacgtagaggaagtggagatcggcagagacaccttctggcccgtccagttactgatgcttcccgaggcggtgactgcagcccacagccacctgcgccagtggccccacgtggactcctgccggccccagctggacacagtgaatcaggaactcctccctcccctccacctgccttgggctggggcttctggctcagggcaccactgtccccccagatccacgagttatcctgtgtcccctcctcctcctgcatcccctagatggcctcccctcagcctggttggagctgtgtccaggtcccctgcacctcccccttgagaagctcccagggttccctctgggcgatgttagtgatatggctggatttaacagtgctgagccctcgcccacatctgggcggccctggggtggggagcaggtgtctgaggtcaggtccctggaaagagaccctgggccagagatttgcgtgggaagctcctggggtgggcatgggagctgggcggcagcacacttgccaccgaggcctggggcagccccatgaggagctgtgcccatatggaccacatcctcggcaagggctttgaggcgccctctggagctctggcgtcccccaggctccgggtcctcaccaacacttagtgcttcctcctggctaagggtgaccccatggtctgtcttgccactgtggctccgtgcaccggcacggccgccgtggtgactgtggatggtcccagcagctctgggtcaccctgcaacgccccccacccctgtgtctatgtcagctctcctgggcacggcactccgagcccctgtccgc

SEQ ID NO: 137089 - DNA, 1297 bp, Homo sapiens
  Payload ID: 6839
  Gene Symbol: GLI4
  Gene Name: GLI family zinc finger 4
  Uniprot ID: P10075
  ENST ID: ENST00000523522
  CDS Start-End: 40-1170
aggtcccaggtgtgacaccttcagcaggtctcagggaagatggcagccctaggggacattcaggagtccccttctgtcccgtcccctgtcagtctctcatcaccggggacacctggaacccagcaccacgagcctcagcttcacctccatgggcatcaacatggctcccctggctccagccctaaggtgctctcccagccgtccgacctggatctccaagacgtagaggaagtggagatcggcagagacaccttctggcccgactccgagcccaagccggagcaggctccacgctctcctggctctcaggcccctgacgagggggcgggcggggcgctgcgcagcctcctgaggagccttccccgcagggcccggtgcagcgccggcttcgggcctgaatccagcgcggagcggccggcgggccagccgcctggggccgtcccttgcgcccagccgcggggcgcctggcgcgtgacgctcgtgcagcaagcagcggccgggcccgagggtgcgcccgagcgggctgccgagctgggagtcaacttcggtcggagccggcagggcagcgcgcggggggccaagccgcacaggtgcgaggcctgcggcaagagtttcaagtataactcgctgctcctgaagcaccagcgcatccacacgggcgagaagccctacgcctgccacgagtgcggcaagcgcttccgcggctggtcgggcttcatccagcaccaccgcatccacacgggcgagaagccctacgagtgcggccagtgcggccgcgccttcagccacagctcgcacttcacgcagcacctgcgcatccacaacggcgagaagccctacaagtgcggcgagtgcggccaggccttcagccagagctccaacctggtgcgccaccagcggctgcacacgggtgagaagccctacgcctgcagccagtgcggcaaggccttcatctggagctccgtgctcatcgagcaccagcgcatccacactggcgagaagccctacgagtgctccgactgcggcaaagccttccgcggccgctcgcacttcttccggcacctgcggacccacacgggcgagaagcccttcgcgtgtggcgcctgcggcaaggccttcggccagagctcccagctcatccagcaccagcgggtgcactaccgcgagtagccgggcgggggctcggggctcggcctcctacctgcccccaacccaccctccaccccgtcccccacggtgggcactgcccagcaccgcatgccacgtgtccggaataaattctttttgattgttggaa

SEQ ID NO: 137090 - DNA, 5877 bp, Homo sapiens
  Payload ID: 6840
  Gene Symbol: GLIPR1
  Gene Name: GLI pathogenesis-related 1
  Uniprot ID: P48060
  ENST ID: ENST00000266659
  CDS Start-End: 202-1002
agaacacaaagtgagctgcacaccatatatggagaaacccgtttcttaaaactagtgatgaactcatgctctgttctgttttctcaaagctgaagtcggctaggtttgcaaagctgtgggctgagcactcaggcaatcacactctcagaaactgcggcggctctggactgcagcctcccaaggctccatgccagacaaagcatgcgtgtcacacttgctacaatagcctggatggtttcttttgtctccaattattcacacacagcaaatattttgccagatatcgaaaatgaagatttcatcaaagactgcgttcgaatccataacaagttccgatcagaggtgaaaccaacagccagtgatatgctatacatgacttgggacccagcactagcccaaattgcaaaagcatgggccagcaattgccagttttcacataatacacggctgaagccaccccacaagctgcacccaaacttcacttcactgggagagaacatctggactgggtctgtgcccattttttctgtgtcttccgccatcacaaactggtatgacgaaatccaggactatgacttcaagactcggatatgcaaaaaagtctgtggccactacactcaggttgtttgggcagatagttacaaagttggctgcgcagttcaattttgccctaaagtttctggctttgacgctctttccaatggagcacattttatatgcaactacggaccaggagggaattacccaacttggccatataagagaggagccacctgcagtgcctgccccaataatgacaagtgtttggacaatctctgtgttaaccgacagcgagaccaagtcaaacgttactactctgttgtatatccaggctggcccatatatccacgtaacagatacacttctctctttctcattgttaattcagtaattctaatactgtctgttataattaccattttggtacagcacaagtaccctaatttagttcttttggactaatacaattcaggaaagaaaaaacccaaaaaccaacctcattcacatatggctttttttttaaccaataacaattaggtgtacttctattttaaaacatttcagaaaaaaatatatgttatagcaatactcttactcaaaagaagaaatttcctaactctatcagataaactcatctttagtataaataagcattatttgcaggttgccacaggtggacttttagtaagtaacctaacccatgtttcagcttctaaatctgcaaaatgagcaaggtacagtagcacatttttaggtgattcttagtaactccagtagccttcattagttaaaaacattattattttttgcatgctgcttcgactctaaatatctggttttccctgtctttttggtttactacttccccagattcagaacagaggagtaactaggggatctgattttagaggccttaattttctgttcatggactgttaaaagtaaaaccaaactttcaaaagggataaacctaaatatttacttgttatcattagagagggaacatcaaatgctgggacatcattactaaccaatagcatcagacactggatttaatggataatcacaatggtcgtaatgtatacaaagacttatataccactttctcgtataaatttttcaaaaaatacaataataatataatttataaagaacactcttctatgaacaaccaccaccaccaaaaaaaaaaaaagccctcagaaaatttctcacaaataaggcaactaatgcctgatatctcaaaatcctttacaaaaggagatagttctagtcaaggagttttgggtatgttacttttttttcttctttttcttttcatctgcctccatcttaagtgcaatttcttcagctgtaagagctcccagtttcttattctttgctttcttaaccttttccttgatgctggccacatcaattttagtttcagtagaagctagacaaattaaaagcacaacacatgtaatactttagattttaccaagtaaaacaaagaatatatgtttaacaaagaatatatgtttaaggcagttaacttcagagtattcttataattgaataattgaaaggtgatcacagtataaaatataaaaacacttgcctaaagcagttagaaatttcttcagattaagataaaacaaatcataaaatactttatatattagtacaagtatacataaaaatggcataaatggcataattgaaccaattactggattcaactatattaagactatttccttaaatcctacttcagactaaattattttacctacattcttttccatattttggaacttctgagtcattattttccatcttgcacattaaaataatttaaaattacatgtatcccttctcaataagtttaatcagctaaccctaagctagaggtcaaaatctacttcctctaatatcaaaacgaaaatttaaagttttccaaatattaattcaatattaattgaatattcaatgaattaattcatttaatgttagattaattcattgaatattaattcaatgaatgactaattaatagtattttaacaagattttggtatatttaacaacattttggtaataaagacaataatttgagagtgtgtggaagtccccctaatagaagccaactatctaatcaatgccaaaagtgtgaacaaaatagagaaaggaagcagtgaaaaagaatgcaactttttcttaccattcaaagtacaggatcacagcataaaagaatcataagataaaacatcaaactacccagcaacctgagaagcacagagtgttaaagcctccaccgtgtggagaaactaaattagggtaactagctattgagtatattgagtaccttcaaagcactcaactgacaggttttacagactggaaattataatacttatgacatttctaccttttatataaccaataatctaccatagaatgtagtatttttaaagctattaacaagcaatatattaaaataataatgtattatatctgtttctgacccagtctatgtacaatattgctggtgagccctctcccttcagtgtgtcactgttcactttggagggttactttaggaagaggataagtgttaccacaggggaaaaaaatgcagaagaggatgcatcagaagaaatggcatgacaatgttttctcttagtgtcttttaaatactaggttagtgcgaaagtgatttctgccatttaaaaaccacaatcactttcgcactaatagctcctgaataagacctgtcagcatcctttagtctaaggtgatgagaaatccatgttaccgatatagaagccaaactctaagccaagatcacataaagagaagaaaaagtacaacttctgataattcctctttgagaggcatgacagcagagctcagggatcttcttgcatttctacagaagatgcactggctgccctgggtttgtatctttcacaacaaagagtcttttccaagcacagaccagaggtcaggagaggactgtcaatccagtttgcactgaaataggcattagctgcctctaaattataaattatctcagccatcccttgtccttaggattagtaattaatgaaatgctaagagaactgatgaaaagatacaactgtttcttaaaaagattcagacaaatttattatgggtttacttttcctaattaataaagacttttacatcatagaaagcattaccttccttaggtttcacaattggtttttccttaggtggaataaatgctttgtttctttcctcttgtctcttactgatggcttctgcttgtttagcctacattaataaataaaaaatatatcagttaaatgtatttatagttaaataattcaagtatctatgaactttgctattcatgtgagccagacataaagtgccgtacctttattgcttccattttctgccgcttcttctgatttgccttcaaaaagtattcaccactagccaattctttatcgatctgttgaaaacggtatttacaattacatcagaaataatgtagaggagaagtcatgtcctaagcaagtcacaatatccttagggtaaaaacaatggggtcaaactgatttattaataaaaatggtagtgacataaaggaaacagagtctaagctgaggggaatacatacacaaaagtgtggaggtaggaaagcacctccatggaatacaacccagagtagttcagggatatggcatggaaggtcactgattcagaaaagtgtgagaagaaactggagagagagttttggggaaaatttgaagaagcttcaatggcagacaaagtaggagggataagatttagaaatgactgtaggtttctgagaagactgtaaagaccaaagaataattttaatggagaggaatgaagaatagatgagagcctggaataaaggtagtggcatgcagaataaaagccagaactatcaggaattggtgactaattagcaaaagcaacagcttgttcattcaatatacagccaacatgtaaaatgtgtataactgacctgtctcccacttacatagcattattatatctaaggcactgttctaagctctttataattactcatttaatcctcactaacaattctttaagataggtattaccattactcccactttaggtatggggaaacttaagtatggatgggataaataactcgcccagtcacataatgaattaagtgttaagaacaagtcaatcgagacatcactgtttcaagaagcttacacagctacagaagaaagataagtcaattactacaagaaagggccataagaaataaggcaggtgttatggaagcatggtttaatgactgcatcactccactttccccctaactactatcaatttcctccatgatccaaaacttccattgttttttcactatgatcatcattttccccgtcaatcacaaatcttccctgaaagactccaaccatggttgtggaaaaaagagatgtagaaagcaatgagttcacatgctgagcagaagtagaaagggaaggctttaggatatagccaaggaagggaataatgaagcaagaacccccaggagacaggtgaagatggaattcaaagaacacatagaagaggctgatgcaggtggaagaaaacccatacgtgagagaagaggaaacagaaaggggttcttatctggtggtctcaaatatttcaataaaatgcaatgtcatatgctaaacatgggagggcactgagagaattaagaggaaacatgaattttgaatgaaattaatccaaagataaaactttctctaacttaatttggtagccacgttgcaaggaagaagtcaagtttttagactgatccaagttttagagctttgctgagaaggtgggacagaagtaaaaaggggcatgaatcaaaacaatgatgtgcaagaacaaaatggaaactggtcatggtgggaaaggaaatgaagcagaagacacctgacaaaaggaatcataacttagaaaaacggtgggtgttacaatttacaatttaagatttcagaacaagaacaaccatagagcacacagtcacaataatgttgccaaatcagagaaaagagtattgcagactaaacgaacttttatccatggaacatttacagtggctacagggtcacaaacctcctggatgcagtttataatcaatgtgaacgccccactgcacacccccatgcactcagctcaaaatatgcctatttatatttaccctcagtttcttatagctctgcacacacacacacaatatatatatatacacatatcccacctgaaatactttcaataaagtttctgaccaaa

SEQ ID NO: 137091 - DNA, 714 bp, Homo sapiens
  Payload ID: 6840
  Gene Symbol: GLIPR1
  Gene Name: GLI pathogenesis-related 1
  ENST ID: ENST00000456650
  CDS Start-End: 1-714
atgcgtgtcacacttgctacaatagcctggatggtttcttttgtctccaattattcacacacagcaaatattttgccagatatcgaaaatgaagatttcatcaaagactgcgttcgaatccataacaagttccgatcagaggtgaaaccaacagccagtgatatgctatacatgacttgggacccagcactagcccaaattgcaaaagcatgggccagcaattgccagttttcacataatacacggctgaagccaccccacaagctgcacccaaacttcacttcactgggagagaacatctggactgggtctgtgcccattttttctgtgtcttccgccatcacaaactggtatgacgaaatccaggactatgacttcaagactcggatatgcaaaaaagtctgtggccactacactcaggtgtcacaggaaaggggtcgggatccaaaccccaagagagggttcttgaatctcgcgcgagaaaatccagggttgtttgggcagatagttacaaagttggctgcgcagttcaattttgccctaaagtttctggctttgacgctctttccaatggagcacattttatatgcaactacggaccaggagggaattacccaacttggccatataagagaggagccacctgcagtgcctgccccaataatgacaagtgtttggacaatctctgtgttaaccgacagcgagaccaagtca

SEQ ID NO: 137092 - DNA, 1234 bp, Homo sapiens
  Payload ID: 6840
  Gene Symbol: GLIPR1
  Gene Name: GLI pathogenesis-related 1
  ENST ID: ENST00000536703
  CDS Start-End: 129-575
ttctgttttctcaaagctgaagtcggctaggtttgcaaagctgtgggctgagcactcaggcaatcacactctcagaaactgcggcggctctggactgcagcctcccaaggctccatgccagacaaagcatgcgtgtcacacttgctacaatagcctggatggtttcttttgtctccaattattcacacacagcaaatattttgccagatatcgaaaatgaagatttcatcaaagactgcgttcgaatccataacaagttccgatcagaggtgaaaccaacagccagtgatatgctatacatgacttgggacccagcactagcccaaattgcaaaagcatgggccagcaattgccagttttcacataatacacggctgaagccaccccacaagctgcacccaaacttcacttcactgggagagaacatctggactgggtctgtgcccattttttctgtgtcttccgccatcacaaactggtatgacgaaatccaggactatgacttcaagactcggatatgcaaaaaagtctgtggccactacactcagagggaattacccaacttggccatataagagaggagccacctgcagtgcctgccccaataatgacaagtgtttggacaatctctgtgttaaccgacagcgagaccaagtcaaacgtacgtacatcaatcttaaattgtttcattaagagctatgtgaattctgtcagtgcattatgaggaacaatgtctaagaggatattctatgtttgtttcacaggttactactctgttgtatatccaggctggcccatatatccacgtaacagatacacttctctctttctcattgttaattcagtaattctaatactgtctgttataattaccattttggtacagcacaagtaccctaatttagttcttttggactaatacaattcaggaaagaaaaaacccaaaaaccaacctcattcacatatggctttttttttaaccaataacaattaggtgtacttctattttaaaacatttcagaaaaaaatatatgttatagcaatactcttactcaaaagaagaaatttcctaactctatcagataaactcatctttagtataaataagcattatttgcaggttgccacaggtggacttttagtaagtaacctaacccatgtttcagcttctaaatctgcaaaatgagcaaggtacagtagcacatttttaggtgattcttagtaactccagtag

SEQ ID NO: 137093 - DNA, 667 bp, Homo sapiens
  Payload ID: 6840
  Gene Symbol: GLIPR1
  Gene Name: GLI pathogenesis-related 1
  ENST ID: ENST00000550491
  CDS Start-End: 401-667
atccagtttagctctgtctacccaactgttgttataagcaagtgccacagcacattttacttctctttggacacttcctgttttctggttttcagtggattttacttctctttttgttatcttcctccctgttaatttttgtgatttggttttctttttttttttttttttttgtctctaaatttactttttttgctgctgacaaagtactgagttgctcagacttgggacccagcactagcccaaattgcaaaagcatgggccagcaattgccagttttcacataatacacggctgaagccaccccacaagctgcacccaaacttcacttcactgggagagaacatctggactgggtctgtgcccattttttctgtgtcttccgccatcacaaactggtatgacgaaatccaggactatgacttcaagactcggatatgcaaaaaagtctgtggccactacactcaggttgtttgggcagatagttacaaagttggctgcgcagttcaattttgccctaaagtttctggctttgacgctctttccaatggagcacattttatatgcaactacggaccaggagggaattacccaacttggccatataagagaggagccacctgcagtgcctgccccaataatgacaagtgtttggacaatctctgtg

SEQ ID NO: 137094 - DNA, 1132 bp, Homo sapiens
  Payload ID: 6841
  Gene Symbol: GLIPR1L1
  Gene Name: GLI pathogenesis-related 1 like 1
  Uniprot ID: Q6UWM5
  ENST ID: ENST00000312442
  CDS Start-End: 47-748
ctggtccgcgcagtcagggcatcctccgcatcctccacatccttccatggctctgaagaataaattcagttgtttatggatcttgggtctgtgtttggtagccactacatcttccaaaatcccatccatcactgacccacactttatagacaactgcatagaagcccacaacgaatggcgtggcaaagtcaaccctcccgcggccgacatgaaatacatgatttgggataaaggtttagcaaagatggctaaagcatgggcaaaccagtgcaaatttgaacataatgactgtttggataaatcatataaatgctatgcagcttttgaatatgttggagaaaatatctggttaggtggaataaagtcattcacaccaagacatgccattacggcttggtataatgaaacccaattttatgattttgatagtctatcatgctccagagtctgtggccattatacacagttagtttgggccaattcattttatgtcggttgtgcagttgcaatgtgtcctaaccttgggggagcttcaactgcaatatttgtatgcaactacggacctgcaggaaattttgcaaatatgcctccttacgtaagaggagaatcttgctctctctgctcaaaagaagagaaatgtgtaaagaacctctgcaaaaatccatttctgaagccaacggggagagcacctcagcagacagcctttaatccattcagcttaggttttcttcttctgagaatcttttaatgtcatttatatacaaaagaaattctcaaatgttaaaataaaggaatagtttattgcttaatataacttatcatcactttgcttctttactgaatcttctacactcttgcctgatacctaaatttaatgtttgtttttaactcaaaaaatgtactgtagtatggaaaatggatagcagtagaataaagtcttaagattattttttaattacaaatccatatgtgtatcaaaagtgttccactctttaattttctaatgagaatggattatcattttagttatagtacatttagagaactaaagacttttcacatatcaaatagtttccttagataccaatagtttcctttatgaataccatcaacatcattcagaaacaaaatg

SEQ ID NO: 137095 - DNA, 885 bp, Homo sapiens
  Payload ID: 6841
  Gene Symbol: GLIPR1L1
  Gene Name: GLI pathogenesis-related 1 like 1
  Uniprot ID: Q6UWM5
  ENST ID: ENST00000378695
  CDS Start-End: 91-819
gcgtggtgcgggggcgtggggaaatcgggttgccccagccgttactggtccgcgcagtcagggcatcctccgcatcctccacatccttccatggctctgaagaataaattcagttgtttatggatcttgggtctgtgtttggtagccactacatcttccaaaatcccatccatcactgacccacactttatagacaactgcatagaagcccacaacgaatggcgtggcaaagtcaaccctcccgcggccgacatgaaatacatgatttgggataaaggtttagcaaagatggctaaagcatgggcaaaccagtgcaaatttgaacataatgactgtttggataaatcatataaatgctatgcagcttttgaatatgttggagaaaatatctggttaggtggaataaagtcattcacaccaagacatgccattacggcttggtataatgaaacccaattttatgattttgatagtctatcatgctccagagtctgtggccattatacacagttagtttgggccaattcattttatgtcggttgtgcagttgcaatgtgtcctaaccttgggggagcttcaactgcaatatttgtatgcaactacggacctgcaggaaattttgcaaatatgcctccttacgtaagaggagaatcttgctctctctgctcaaaagaagagaaatgtgtaaagaacctctgcaggactccacaacttattatacctaaccaaaatccatttctgaagccaacggggagagcacctcagcagacagcctttaatccattcagcttaggttttcttcttctgagaatcttttaatgtcatttatatacaaaagaaattctcaaatgttaaaataaaggaatagtttattgcttaatataa

SEQ ID NO: 137096 - DNA, 404 bp, Homo sapiens
  Payload ID: 6841
  Gene Symbol: GLIPR1L1
  Gene Name: GLI pathogenesis-related 1 like 1
  ENST ID: ENST00000547144
  CDS Start-End: 1-119
cactcagtccccagtcacccaaggggcagcttgcagcttgcagtaacaaaatgtcctttctcttcagagctgaggagggactccacaacttattatacctaaccaaaatccatttctgaagccaacggggagagcacctcagcagacagcctttaatccattcagcttaggttttcttcttctgagaatcttttaatgtcatttatatacaaaagaaattctcaaatgttaaaataaaggaatagtttattgcttaatataacttatcatcactttgcttctttactgaatcttctacactcttgcctgatacctaaatttaatgtttgtttttaactcaaaaaatgtactgtagtatggaaaatggatagcagtagaataaagtcttaagattattttttaat

SEQ ID NO: 137097 - DNA, 484 bp, Homo sapiens
  Payload ID: 6841
  Gene Symbol: GLIPR1L1
  Gene Name: GLI pathogenesis-related 1 like 1
  ENST ID: ENST00000548623
  CDS Start-End: 23-196
cagctctatatgcatttcttgaatgagtcttttaaaactaattttgttgagggttccctgtagggccactgcatgtcaaaaggggttaaccacccagacattcccactcagtccccagtcacccaaggggcagcttgcagcttgcagtaacaaaatgtcctttctcttcagagctgaggagaaaatccatttctgaagccaacggggagagcacctcagcagacagcctttaatccattcagcttaggttttcttcttctgagaatcttttaatgtcatttatatacaaaagaaattctcaaatgttaaaataaaggaatagtttattgcttaatataacttatcatcactttgcttctttactgaatcttctacactcttgcctgatacctaaatttaatgtttgtttttaactcaaaaaatgtactgtagtatggaaaatggatagcagtagaataaagtcttaagattattttttaattac

SEQ ID NO: 137098 - DNA, 1729 bp, Homo sapiens
  Payload ID: 6842
  Gene Symbol: GLIPR1L2
  Gene Name: GLI pathogenesis-related 1 like 2
  Uniprot ID: Q4G1C9
  ENST ID: ENST00000320460
  CDS Start-End: 9-770
ggtggaccatggaggccgcaaggcccttcgcccgggagtggagggcccagtccctacccctggcagtagggggcgttttgaagctgcggctctgtgagctgtggctactgctactgggttctagtttgaacgccagatttttgccagacgaggaggacgtagactttatcaacgagtacgtgaacctccacaatgagctgcggggcgacgtcattccccgagggtctaacttgcgcttcatgacttgggatgtagctttatcacggactgctagagcatggggaaaaaaatgtttgtttacgcataatatttatttacaagatgtacaaatggtccatcctaaattttatggtattggtgaaaatatgtgggtcggccctgaaaatgaatttactgcaagtattgctatcagaagttggcatgcagagaagaaaatgtacaattttgaaaatggcagttgctctggagactgttctaattatattcagcttgtttgggaccactcttacaaagttggttgtgctgttactccatgttcaaaaattggacatattatacatgcagcaattttcatatgcaactatgcgccaggaggaacactgacgagaagaccttatgaaccaggaatattttgtactcgatgtggcagacgtgacaaatgcacagattttctatgcagtaagataaagaaaataaacatgaaaaaaatgcataatggattggacaagaaaaataagcgattgaacactagttttttatggtcatgttaatattattcctttgatcagaatgctactattatgttatcaaaggatggttgacacagtatcatctttagatttttctaaactgcagagctttttctgttctatcttaaccctattccttcccctgaggacataccagagtgtcagaaagaaagaatgagaactaacagttatacccttaaaaagcttcacagtttatgcccaaacagcagcctgtttgataataactgctttaaaggatagtatattccaaaatatttatgaagtagcatatatttaatacccttttcttttagtttttcctccaaaaagctgaaatctccaaatatttcaaaagtaaaaagtagaaaatatgtttgattacatttttcttttagtttttccaaacatgagagaatatactccaaaagtataactgtagctaaaatatacaatgcttagaggaatatggtaggagataaatttggataataagtaaatagcatattatgttgttttttaattattatactttaagttctggggtacctgtgcagaacgtgcaggtttgttacataggtatatacatgccatggtggtttgctgcacccatgaacccatcatctacattagatatttctcctaagctattcctcccctagccctgaccccctgacaggccccagtgtgtgatgttcttctccctgtgtccatgtgttctcattgttcaactcccacttatgagtgagaacatgcagtgtttggttttctgttcttgtgatagtttgctgagaatgatggtttgcagcttcatccatgtccctgaaaaggaaatgaactcatccttttttatggctgcatagtattccatggtgtatatgtgccacactttctttatccagtctatcattgatgggcatttgggttggttccaagtatttgctattgtgaacagtgctgcaataaacatatgtttgcaggtg

SEQ ID NO: 137099 - DNA, 1903 bp, Homo sapiens
  Payload ID: 6842
  Gene Symbol: GLIPR1L2
  Gene Name: GLI pathogenesis-related 1 like 2
  Uniprot ID: Q4G1C9
  ENST ID: ENST00000378692
  CDS Start-End: 468-1181
cagcggccggtggaccatggaggccgcaaggcccttcgcccgggagtggagggcccagtccctacccctggcagtagggggcgttttgaagctgcggctctgtgagctgtggctactgctactgggttctagtttgaacgccagatttttgccagacgaggaggacgtagactttatcaacgagtacgtgaacctccacaatgagctgcggggcgacgtcattccccgagggtctaacttgcgcttcatgttatggtactgctgtgactccgatggtagcagattcatcattggatttccaaacctctcacccaggactccaagtgcacccctttgaagactttgtcttcactcctgaatgattgattggggatccattgacttgggatgtagctttatcacggactgctagagcatggggaaaaaaatgtttgtttacgcataatatttatttacaagatgtacaaatggtccatcctaaattttatggtattggtgaaaatatgtgggtcggccctgaaaatgaatttactgcaagtattgctatcagaagttggcatgcagagaagaaaatgtacaattttgaaaatggcagttgctctggagactgttctaattatattcagcttgtttgggaccactcttacaaagttggttgtgctgttactccatgttcaaaaattggacatattatacatgcagcaattttcatatgcaactatgcgccaggaggaacactgacgagaagaccttatgaaccaggaatattttgtactcgatgtggcagacgtgacaaatgcacagattttctatgcagtaatgcagatcgtgaccaagccacatattaccgattttggtatccaaaatgggaaatgccccggccagttgtgtgtgatccactgtgcacattcattttattattgagaatattatgttttatcctgtgtgtcataactgttttgatagtacagtctcagtttccaaatatcttgttggaacaacaaatgatatttacccctgaggaatctgaagcagggaatgaagaggaggaaaaagaggaagagaagaaagagaaagaggaaatggaaatggaaataatggaaatggaggaggaaaaagaagagagagaggaggaggaggaggaaacacaaaaagaaaagatggaggaagaggaaaaataagagtagaaagaggaggaaaaagatgtatcaccaatataaaccaaaagtgtaatacaaaaaaagacagaaaaaaaaaaaaagtaaaacactgagttttaacaagaaagaaaatatgcaaaccaccattggaatgttttttattcccttctctcctatacttattcaatcaatttaaatttgtaaaacaaagaaacaaaaaacatgtaaggtgggctctttgacactaagaacagataaagacatgacaggaaaaacactgaaaaacatttgaccagtctaattaatcttaagatttcaccatgttattctaataaagtagggaattttcattttctaaacatgtttccatctctgtgttttaaatagtaaggtgcttaagatcattccaagttcataacaaccattgaataaaatttgtatttttttgtttttactgttactgtcatagtttttattggtggtagtggtattttcatgtgatattaaggtatctaatattattatttgtctttgtggtttttggaatagtttaagtggtacctgtacatcctgctaggatgcaaacttattatttataattaatgttcaatatttcattaaagacttgctgtaattttctgccaccaagggctaataaatgccataattttaattagttgtggtagaggaatctgggtgcttccaaatttatatgataaaataaataaattttttaaaaacta

SEQ ID NO: 137100 - DNA, 509 bp, Homo sapiens
  Payload ID: 6842
  Gene Symbol: GLIPR1L2
  Gene Name: GLI pathogenesis-related 1 like 2
  Uniprot ID: Q4G1C9
  ENST ID: ENST00000547164
  CDS Start-End: 1-507
atggaggccgcaaggcccttcgcccgggagtggagggcccagtccctacccctggcagtagggggcgttttgaagctgcggctctgtgagctgtggctactgctactgggttctagtttgaacgccagatttttgccagacgaggaggacgtagactttatcaacgagtacgtgaacctccacaatgagctgcggggcgacgtcattccccgagggtctaacttgcgcttcatgacttgggatgtagctttatcacggactgctagagcatggggaaaaaaatgtttgtttacgcataatatttatttacaagatgtacaaatggtccatcctaaattttatggtattggtgaaaatatgtgggtcggccctgaaaatgaatttactgcaagtattgctatcagaagttggcatgcagagaagaaaatgtacaattttgaaaatggcagttgctctggagactgttctaattatattcagaggaacactgacgagaagaccttatgaac

SEQ ID NO: 137101 - DNA, 2609 bp, Homo sapiens
  Payload ID: 6842
  Gene Symbol: GLIPR1L2
  Gene Name: GLI pathogenesis-related 1 like 2
  Uniprot ID: Q4G1C9
  ENST ID: ENST00000550916
  CDS Start-End: 48-1082
tgggacggccagcgcgtgcgcactggcctgtcagcggccggtggaccatggaggccgcaaggcccttcgcccgggagtggagggcccagtccctacccctggcagtagggggcgttttgaagctgcggctctgtgagctgtggctactgctactgggttctagtttgaacgccagatttttgccagacgaggaggacgtagactttatcaacgagtacgtgaacctccacaatgagctgcggggcgacgtcattccccgagggtctaacttgcgcttcatgacttgggatgtagctttatcacggactgctagagcatggggaaaaaaatgtttgtttacgcataatatttatttacaagatgtacaaatggtccatcctaaattttatggtattggtgaaaatatgtgggtcggccctgaaaatgaatttactgcaagtattgctatcagaagttggcatgcagagaagaaaatgtacaattttgaaaatggcagttgctctggagactgttctaattatattcagcttgtttgggaccactcttacaaagttggttgtgctgttactccatgttcaaaaattggacatattatacatgcagcaattttcatatgcaactatgcgccaggaggaacactgacgagaagaccttatgaaccaggaatattttgtactcgatgtggcagacgtgacaaatgcacagattttctatgcagtaatgcagatcgtgaccaagccacatattaccgattttggtatccaaaatgggaaatgccccggccagttgtgtgtgatccactgtgcacattcattttattattgagaatattatgttttatcctgtgtgtcataactgttttgatagtacagtctcagtttccaaatatcttgttggaacaacaaatgatatttacccctgaggaatctgaagcagggaatgaagaggaggaaaaagaggaagagaagaaagagaaagaggaaatggaaatggaaataatggaaatggaggaggaaaaagaagagagagaggaggaggaggaggaaacacaaaaagaaaagatggaggaagaggaaaaataagagtagaaagaggaggaaaaagatgtatcaccaatataaaccaaaagtgtaatacaaaaaaagacagaaaaaaaaaaaaagtaaaacactgagttttaacaagaaagaaaatatgcaaaccaccattggaatgttttttattcccttctctcctatacttattcaatcaatttaaatttgtaaaacaaagaaacaaaaaacatgtaaggtgggctctttgacactaagaacagataaagacatgacaggaaaaacactgaaaaacatttgaccagtctaattaatcttaagatttcaccatgttattctaataaagtagggaattttcattttctaaacatgtttccatctctgtgttttaaatagtaaggtgcttaagatcattccaagttcataacaaccattgaataaaatttgtatttttttgtttttactgttactgtcatagtttttattggtggtagtggtattttcatgtgatattaaggtatctaatattattatttgtctttgtggtttttggaatagtttaagtggtacctgtacatcctgctaggatgcaaacttattatttataattaatgttcaatatttcattaaagacttgctgtaattttctgccaccaagggctaataaatgccataattttaattagttgtggtagaggaatctgggtgcttccaaatttatatgataaaataaataaattttttaaaaactattaacttgttattcaataggtatagtaaaagttaacagattaataagataactgcttaccactagtaatactaataaatgaactaaataaaaatacctagcataggagatttctttatctataaaataaatggatagcactagatgaccactaagacctcttccatcaatgaatattcatggatcaactttgtaaaggaatcaatagtagttgtgaagtacactaagcaaacacctgagggaaaaacttgattcccatgaaaatattcctgaactcagcaccttatatggcaaaataataaataccttttattactcaattttaaaataggcaaaaagcaatgtataatatttttccaattgccattccatactcagctgtcttattgttgcacacttattagaactcaatgtgactgagatgtgaaaggttgatataattctatttatgacagggacttagggaacttattctaattgagaatcagaggcttaataaacctgaaggtttaagtgaaagaaatgacattgaaagaatcactgcatatctgatgttttcaaataaaacaatctctgttttctggttttgatagaatattgtgttctaaagctatatttctcaatgtgtggttccactgagggaaagaaaaaaaaaaaaacctagcatagccaaatacctcaaatggtataaatgctatgtgtatttactctgttgttctttagttgtatcaatattctgttaaaaacctgttcgaagtagggcaagatgagaattatattaaaaagccctgagctatcctcttgga

SEQ ID NO: 137102 - DNA, 812 bp, Homo sapiens
  Payload ID: 6843
  Gene Symbol: GLIPR2
  Gene Name: GLI pathogenesis-related 2
  ENST ID: ENST00000377959
  CDS Start-End: 38-424
cgcagccgcggggagcgaggagcgcgcggagccggccatgggcaagtcagcttccaaacagtttcataatgaggtcctgaaggcccacaatgagtaccggcagaagcacggcgtccccccactgaagctctgcaagaacctcaaccgggaggctcaacagtattctgaggccctggccagcacgaggatcctcaagcacagcccggagtccagccgtggccagtgtggggagaaccttgcatgggcatcctatgatcagacaggacacttcacggccatggtatggaagaacaccaagaagatgggcgtggggaaggcgtccgcaagtgacgggtcctcctttgtggtggccagatacttcccagcggggaatgttgtcaatgagggcttcttcgaagaaaacgtcctgccgccgaagaagtaacttgttaaatgtaatgggaaggtggcagacttaagaacgtggatatgaagtgcctagaaccaccacaacctggctgtgcgtctgtccctgtgggtgtatgtgcttgtgtgtgtgatgcatgtgagcgtctctggcacacacacttggacatacagttctgtgtgcgctcattcttattacaggagtgagcaaaggaagcatttaccccgatggttacctagaccacgattatttggattggggggaggggggatccgttttttttttttaattttttgttatttctaagcaaacctcttttgtacttttcttacttctaatatccatccctggactttttgtattccaaatgtttgtgatgctgagaagtgaagttcattttatgtga

SEQ ID NO: 137103 - DNA, 1890 bp, Homo sapiens
  Payload ID: 6843
  Gene Symbol: GLIPR2
  Gene Name: GLI pathogenesis-related 2
  Uniprot ID: Q9H4G4
  ENST ID: ENST00000377960
  CDS Start-End: 35-499
agccgcggggagcgaggagcgcgcggagccggccatgggcaagtcagcttccaaacagtttcataatgaggtcctgaaggcccacaatgagtaccggcagaagcacggcgtccccccactgaagctctgcaagaacctcaaccgggaggctcaacagtattctgaggccctggccagcacgaggatcctcaagcacagcccggagtccagccgtggccagtgtggggagaaccttgcatgggcatcctatgatcagacaggaaaggaggtggctgatagatggtacagtgaaatcaagaactataacttccagcagcctggcttcacctcggggactggacacttcacggccatggtatggaagaacaccaagaagatgggcgtggggaaggcgtccgcaagtgacgggtcctcctttgtggtggccagatacttcccagcggggaatgttgtcaatgagggcttcttcgaagaaaacgtcctgccgccgaagaagtaacttgttaaatgtaatgggaaggtggcagacttaagaacgtggatatgaagtgcctagaaccaccacaacctggctgtgcgtctgtccctgtgggtgtatgtgcttgtgtgtgtgatgcatgtgagcgtctctggcacacacacttggacatacagttctgtgtgcgctcattcttattacaggagtgagcaaaggaagcatttaccccgatggttacctagaccacgattatttggattggggggaggggggatccgttttttttttttaattttttgttatttctaagcaaacctcttttgtacttttcttacttctaatatccatccctggactttttgtattccaaatgtttgtgatgctgagaagtgaagttcattttatgtgatcttcatgcgtcgtaatctacttttggtagataattaagattattaaaccctcatttaaatgtgacataaaatacagctttaagcacataaatacaaagcagcttccatcaggaacatggagcaggcagggactccattttacagaattactgagatttctcagttgtaaaacatgatgtcatcctgcatgcctcctggaattctccaatggggtcgccaaacaacaaatggagaaaaaaagttttacttccttgcattcttctacctttaaatagcaaagtaccactaccaccaccacctcttgcccccttccctcttttcttaaacttctggcatttcagagctcagcaggctacccctggtttctggagagttgggctaggcctgaagctccccctcccccacctctgctaggcagcccaggcctggtctgggagacagcccctcaccctgcctgggctcttggccaagcggccttggatggatgaagtcagagaggtggggtgagggtgagcttactcagggcccccagaggaagccctcagcctctgccctccccccacacagggcgggagcccaggcctgttcctggcagctgtggctgcagctgtgctcctgctccctcctggaatgtgcgacaagcccaaatgttccggggaggcggccggggcagggggcttagaagtgctaatatggttctgtgttttgcctgaaacgataccaggttcccctgaatagcaactttacaaggtccatgtgggagggaccaacccagatgccctgctgagtgtccctgaaaccatggcagctccatctgtcaagatggcaggggccggagtgagggggctgctggcttaacagcaggcatctgggcaggccagtcctcaaagcagctcctgaaggtctgtgttgcactgtcaccagtctcaagctatgcctctaatttcaccagggatattgactaagaagacaataaaatctttttctttgtgtaataacctc

SEQ ID NO: 137104 - DNA, 1917 bp, Homo sapiens
  Payload ID: 6843
  Gene Symbol: GLIPR2
  Gene Name: GLI pathogenesis-related 2
  ENST ID: ENST00000396613
  CDS Start-End: 244-432
cggccgcatccggggagccctcggcagtcgcggagctgcttcccaggggtgagctctccgggaggcccacggggtggccccgggcgcctccgccctcagctgtcgctccttataaggcgggggccgggcggcgccggaggaggggccgcggcatcagcccggtcctgggctctggggcggcgctgggccgggcgagcgcagtgcagcgcagccgcggggagcgaggagcgcgcggagccggccatgggcaagtcagcttccaaacagtttcataatgaggtcctgaaggcccacaatgagtaccggcagaagcacggcgtccccccactgaagctctgcaagaacctcaaccgggaggctcaacagacacttcacggccatggtatggaagaacaccaagaagatgggcgtggggaaggcgtccgcaagtgacgggtcctcctttgtggtggccagatacttcccagcggggaatgttgtcaatgagggcttcttcgaagaaaacgtcctgccgccgaagaagtaacttgttaaatgtaatgggaaggtggcagacttaagaacgtggatatgaagtgcctagaaccaccacaacctggctgtgcgtctgtccctgtgggtgtatgtgcttgtgtgtgtgatgcatgtgagcgtctctggcacacacacttggacatacagttctgtgtgcgctcattcttattacaggagtgagcaaaggaagcatttaccccgatggttacctagaccacgattatttggattggggggaggggggatccgttttttttttttaattttttgttatttctaagcaaacctcttttgtacttttcttacttctaatatccatccctggactttttgtattccaaatgtttgtgatgctgagaagtgaagttcattttatgtgatcttcatgcgtcgtaatctacttttggtagataattaagattattaaaccctcatttaaatgtgacataaaatacagctttaagcacataaatacaaagcagcttccatcaggaacatggagcaggcagggactccattttacagaattactgagatttctcagttgtaaaacatgatgtcatcctgcatgcctcctggaattctccaatggggtcgccaaacaacaaatggagaaaaaaagttttacttccttgcattcttctacctttaaatagcaaagtaccactaccaccaccacctcttgcccccttccctcttttcttaaacttctggcatttcagagctcagcaggctacccctggtttctggagagttgggctaggcctgaagctccccctcccccacctctgctaggcagcccaggcctggtctgggagacagcccctcaccctgcctgggctcttggccaagcggccttggatggatgaagtcagagaggtggggtgagggtgagcttactcagggcccccagaggaagccctcagcctctgccctccccccacacagggcgggagcccaggcctgttcctggcagctgtggctgcagctgtgctcctgctccctcctggaatgtgcgacaagcccaaatgttccggggaggcggccggggcagggggcttagaagtgctaatatggttctgtgttttgcctgaaacgataccaggttcccctgaatagcaactttacaaggtccatgtgggagggaccaacccagatgccctgctgagtgtccctgaaaccatggcagctccatctgtcaagatggcaggggccggagtgagggggctgctggcttaacagcaggcatctgggcaggccagtcctcaaagcagctcctgaaggtctgtgttgcactgtcaccagtctcaagctatgcctctaatttcaccagggatattgactaagaagacaataaaatctttttctttgtgtaataacctc

SEQ ID NO: 137105 - DNA, 1645 bp, Homo sapiens
  Payload ID: 6843
  Gene Symbol: GLIPR2
  Gene Name: GLI pathogenesis-related 2
  ENST ID: ENST00000619700
  CDS Start-End: 36-254
aagtcaggtgagcccgcgggctcgcccgctgcggaatggttcggaaccccgcgctcccggacctcgccgtctccctcgtccgccgcaagccaggacacttcacggccatggtatggaagaacaccaagaagatgggcgtggggaaggcgtccgcaagtgacgggtcctcctttgtggtggccagatacttcccagcggggaatgttgtcaatgagggcttcttcgaagaaaacgtcctgccgccgaagaagtaacttgttaaatgtaatgggaaggtggcagacttaagaacgtggatatgaagtgcctagaaccaccacaacctggctgtgcgtctgtccctgtgggtgtatgtgcttgtgtgtgtgatgcatgtgagcgtctctggcacacacacttggacatacagttctgtgtgcgctcattcttattacaggagtgagcaaaggaagcatttaccccgatggttacctagaccacgattatttggattggggggaggggggatccgttttttttttttaattttttgttatttctaagcaaacctcttttgtacttttcttacttctaatatccatccctggactttttgtattccaaatgtttgtgatgctgagaagtgaagttcattttatgtgatcttcatgcgtcgtaatctacttttggtagataattaagattattaaaccctcatttaaatgtgacataaaatacagctttaagcacataaatacaaagcagcttccatcaggaacatggagcaggcagggactccattttacagaattactgagatttctcagttgtaaaacatgatgtcatcctgcatgcctcctggaattctccaatggggtcgccaaacaacaaatggagaaaaaaagttttacttccttgcattcttctacctttaaatagcaaagtaccactaccaccaccacctcttgcccccttccctcttttcttaaacttctggcatttcagagctcagcaggctacccctggtttctggagagttgggctaggcctgaagctccccctcccccacctctgctaggcagcccaggcctggtctgggagacagcccctcaccctgcctgggctcttggccaagcggccttggatggatgaagtcagagaggtggggtgagggtgagcttactcagggcccccagaggaagccctcagcctctgccctccccccacacagggcgggagcccaggcctgttcctggcagctgtggctgcagctgtgctcctgctccctcctggaatgtgcgacaagcccaaatgttccggggaggcggccggggcagggggcttagaagtgctaatatggttctgtgttttgcctgaaacgataccaggttcccctgaatagcaactttacaaggtccatgtgggagggaccaacccagatgccctgctgagtgtccctgaaaccatggcagctccatctgtcaagatggcaggggccggagtgagggggctgctggcttaacagcaggcatctgggcaggccagtcctcaaagcagctcctgaaggtctgtgttgcactgtcaccagtctcaagctatgcctctaatttcaccagggatattgactaagaagacaataaaatctttttctttgtgtaataacctc

SEQ ID NO: 137106 - DNA, 4301 bp, Homo sapiens
  Payload ID: 6844
  Gene Symbol: GMFB
  Gene Name: glia maturation factor, beta
  Uniprot ID: P60983
  ENST ID: ENST00000358056
  CDS Start-End: 270-698
acttgcagccaggcagagcgtcctcctctagagggagcagggaaaagaaaaaaaaaaaaaaaaaaaaaaaaaaaaaaatcaggcgatcgcattctgtctaattttgagccgcgccttttgccgtccgccatcacgtgccggcccgctgaggccgcgttgataggtgggggcgactgggccaggcgccggggcaggaagggaggcggccgccgtgccattcttaaaggcgcccgagtgtaggcgacaggccgctgacggccggaaggaaaatgagtgagtctttggttgtttgtgatgttgccgaagatttagtggaaaagctgagaaagtttcgttttcgcaaagaaacgaacaacgctgctattataatgaagattgacaaggataaacgcctggtggtactggatgaggagcttgagggcatttcaccagatgaacttaaagatgaactacctgaacgacaacctcgcttcattgtgtatagttataaatatcaacatgatgatggaagagtttcatatcctctgtgctttattttctccagtcctgttggatgtaagcctgaacaacagatgatgtatgctggaagtaagaataagctagtccagacagctgaactaaccaaggtatttgaaataagaaataccgaagacctaactgaagaatggttacgtgagaaacttggattttttcactaatgtgaacttctgtgtttctaaagtatttatgtattaacctgaccatactggaatcagacataaatacttatttatgcctaaaaatgcactgttacttacagtttgtttcctgcagtaaagaaaaattcttcatttgtgcaaaatttgaacaaagaggaaatcatcttcatagtaatgaaactttgtaaagtgtttccttatattggtaattgttaggtggactacttttctccagggactttttgcactcttgtgactaatttctataacttatggttcggaatttgttactatttacagacaccattggaaagtggatatattagattgtgagagacaacagttgcctccttttgacaaatactggatattagcagtttatttatgaaaatagcgtattatcacttgtcaaatcattgaaattcatttggggtcaaagacttgagtgacccagtattgagccatgaataatttagtgtaacctgtattacaagtacattgatgaattctgtatcttctttggtttcctgtatctttttaatcaagtctagaaactatgttcatcagtcactcatttttaaggtcgggagttagattttatgatagaattatgactgttagcttttctccttatagcatcttagtcttagaaattggtgggttgtaataatcaagggcttcattccttttatgtcatttctagacagttttgaatctaggttaataacactttatttataaagcacctcaatgtcctgtgaacactaattattttaaatgtgttaatactgtgcctttgatttgttagctttaaagttagtttaagacttttacactgccagtattccacatttggtgaaattaatacttttttaaagggtccaaataaaataattttctaatgtgtatatctgaaatttgtaataaaatcaacttcatattttaaaaattccaactatctgcttgcattggtgaatatatggcagtcgagagttataattttgggtatacttgtggttagttttgtgccataggaaaaaattatcttaaaactttggccatagttaataacattaacacttcaatagcaatcacatcttatatcctaaatgtcagaagatattctgaactggatgcctgaatagttaactaaaccagtcttgttagatgatggtactcttggcataaagcgaggattctgatatttggcatacttgtaaaaacaaatacataagtaaccattgaacattaatttgataataggtctagagactctaaaaactaaccaaacttggtgagtgtattcttatattaagaatatcttagtcatctcaaaactagcaaaatttaaattttggcatgttttccattcatatgttctttgcattttatttttgaggtttctgtgagaagtaaagatagttggaatttttgcgatattgaatagaacatcttctgttcccaacactgtttggcttcactaatttagaagtcaggaagcaatagaaagttggagatgaggaagtgctagagtaggtgtttgttttggttcttggagggaaaagattctttattccaatttccagagagaagagaaaactcacccaggaagtttaaaaattctttaaacaggtattttgatattggagaataacatgcatataattctgtaggaatgcacatgtaatccaagtgagtggagagtgtttttaatgtttttgaatgaaggaaatgaggttttgtttcacctgttttgcagcagtaagagaaactagtgctgcaagaatgtattttttaatgaagttccttattttgtcttgcatgttttagttttgcttatttttaaatttggaggtcctccataatgtcagataatattgacctgccatacgttagcactcttagttccgctactgtctttaacaggagcaaagagctgtgataaaccatgcttttttgagcttgtctgactcctaattaataacatgtttttggcaagacaacagattgaggttagaggatcagtaggacatttttattccatctgtcctatggggaaatttacaaatcccgtgctctaaaatgttctcaaacatttatatagatttccctttcatcttactaaattttgcattgttcttttcaagtatgtttcgtatttactgtctttttttctgccatttcccaaataataactccagatttcataattccagtttttacattccgttatctttctggtacaaccattcccattcagccttaaatctgagtcctttttagcagcaacttttttcctgggatcctccttcgtggtcttctaagtcagtgttagttttgaaatttttggccctgcataagttctgcatagcatctaatgtcaaaatagaaccaactggtaatcacagtattatttagtgtggtttccatgacaacaaaaatacatacgaagaaaacttctcaggttactatgctgaaattccaaaatgtctgagttttgaatagtgatcactttgttctggtattgacgcaattatattaggaaaaaagttggttgactgtttttgtttaattgacttctaaaatgttcaaattgtctagttctaaaagtttactaaatgcctagtgcagttaaacatactcttgtttaagtgtgtgttgctaaattttttactgtcattactaaataatctgtgtggcaaaatgtgtgtcagcacttttccctccttttttatctcctattttcaggagtcaaatgtagccataaactgtatccttgtctgacactttagctaaaaatttccagttaggggagtttattgccaaattaaatttggctgttccccccaacccatatagatattaaggaaggtgtacttaaaaaatgtttggactgcttttaaaacctgagcaatgtcattaatccatatgtggactagtgatgaatagatattttcataagagtttaaatgctgatatttggtggaagtagagagtaactcatattctatcaattcaagtattcttactatggttgctttccctatttgttcaatagactgataatactggaatttatagagtttgagccattacaacttttgtgaggatgtgtttcaaacatttctggacaaatcttattttgtatttctggaagaatgtagtaatcttctagaccgcttaaaaccaatgctcccaagctgaatattcttgagaaatttgtttttattatgccatttgacatttcaaatcagtgctcatatacagtaaacttgtgatagaaattgtattttattgctttttggattataattcatataaatataattacttgaatattgtttgagatcattaacatgccagggcagttcccactgatttagatggtccaagataatctcattcaggaggcttgaaacattaatggtttagtcttgtgaattttaacagttctctgtcatcgtttaacaaaaccaacaactgacacaactccttaagctgtggtttcagtctctgctagttcatattgcatgtttattttggacagtcttttgttaagcatggtgcttgtactggtttaaataaaatgttaacattaaaaga

SEQ ID NO: 137107 - DNA, 605 bp, Homo sapiens
  Payload ID: 6844
  Gene Symbol: GMFB
  Gene Name: glia maturation factor, beta
  ENST ID: ENST00000554247
  CDS Start-End: 54-170
attcttaaaggcgcccgagtgtaggcgacaggccgctgacggccggaaggaaaatgagtgagtctttggttgtttgtgatgttgccgaagatttagtggaaaagctgagaaagtttcgttttcgcaaagaaacgaacaacgctgctattataaggcatttcaccagatgaacttaaagatgaactacctgaacgacaacctcgatatccttttcttagtgctttaaaagatttattttctttagtggtcagacctgtttgtgagctcatttgttaaacatctaaaattataaatatcaacatgatgatggaagagtttcatatcctctgtgctttattttctccagtcctgttggatgtaagcctgaacaacagatgatgtatgctggaagtaagaataagctagtccagacagctgaactaaccaaggtatttgaaataagaaataccgaagacctaactgaagaatggttacgtgagaaacttggattttttcactaatgtgaacttctgtgtttctaaagtatttatgtattaacctgaccatactggaatcagacataaatacttatttatgcctaaaaatgcactgttacttacagtttg

SEQ ID NO: 137108 - DNA, 591 bp, Homo sapiens
  Payload ID: 6844
  Gene Symbol: GMFB
  Gene Name: glia maturation factor, beta
  ENST ID: ENST00000553333
  CDS Start-End: 142-591
ggggaggccccacgccaggtccttctggttggagggcttcagcttctgagctttctgatgacattgcacattattatgtgtgtggtttttgagacattcattagccaaagagaaagttaaaatataccttacatatatgagatgaacaaatttgtaggattaagcaatgtagatccaaagagtgagtctttggttgtttgtgatgttgccgaagatttagtggaaaagctgagaaagtttcgttttcgcaaagaaacgaacaacgctgctattataatgaagattgacaaggataaacgcctggtggtactggatgaggagcttgagggcatttcaccagatgaacttaaagatgaactacctgaacgacaacctcgaaccttcattgtgtatagttataaatatcaacatgatgatggaagagtttcatatcctctgtgctttattttctccagtcctgttggatgtaagcctgaacaacagatgatgtatgctggaagtaagaataagctagtccagacagctgaactaaccaaggtatttgaaataagaaataccgaagacctaactgaagaatggttacgtgagaaa

SEQ ID NO: 137109 - DNA, 6721 bp, Homo sapiens
  Payload ID: 6844
  Gene Symbol: GMFB
  Gene Name: glia maturation factor, beta
  ENST ID: ENST00000554908
  CDS Start-End: 99-215
gactgggccaggcgccggggcaggaagggaggcggccgccgtgccattcttaaaggcgcccgagtgtaggcgacaggccgctgacggccggaaggaaaatgagtgagtctttggttgtttgtgatgttgccgaagatttagtggaaaagctgagaaagtttcgttttcgcaaagaaacgaacaacgctgctattataaggcatttcaccagatgaacttaaagatgaactacctgaacgacaacctcgcttcattgtgtatagttataaatatcaacatgatgatggaagagtttcatatcctctgtgctttattttctccagtcctgttggtaagtgaatttctttaaataacacatatttggcttagatccaattaagccattttatactagacaaattttctgctgtttttaaagatgaacattgttgaataacctaaattgaggagggtctgtgtctatgtgtgtccatgtgcctgtgtgcatgcatccctagaaagaatgaagcatcatctcttagaacttattttcttaggataaatttctagacgtgtaattgttgactcaaatcatacatgtattttaaggattttgaaacgtgatgacattctaatatagcagaagtattttctttttatattttaatcatataaaaatgtgaacttcacatataattgcatatatttgtgtttcttttaaatagtagttaacagtgatatgcttataatcttgagaatggtcctagagtaatttacattgggtattaaaatgggttactggtatttaaggaattcattatcaccagaacttctatcaccactgttcaggcctgcaataaaaactgcattcactgagctattctccaaacttcataatttgtataatttacttcccactcaaaatatactgcagtatatttttaacttaatatatcggcagagtgaaacttttatcagagcagatctccctgccctactggtccactaccatcccaaaaccttgtgtattttagtcatccataaaattgatcttgatatttagtgtcaaagttaagatagtgcagaaagtttttaattgtttgcaaggctctaaaagtcaggatctacaaatgtctagaatctttatttttgccaacctgtagacttgttcttgtttatttataacttaactgtctctttctgtaggcagtgtgcaatgtaagactcaaaatacaacccatatatattctgtaaactcaatagcaaaggaaatcctaaatgtgtcattttaaaaaataaaaataatgataacccatacctttctcaaaatctgtgtctcatttctacactaatctctcttttccaggatgtaagcctgaacaacagatgatgtatgctggaagtaagaataagctagtccagacagctgaactaaccaaggtggtatttatatttgactgacttgttgagacaatattttcctttagactataaagcaatagctaaaatagtctaaaggagtattttttatgcaggtgaaggttatttagaccagattagtaagttagccaaagctttttgttaactggaaatagaatgagatagaagcgtttgaaccaaagtgtattttttgaataagttgattggaagaaatcacattcaaaatataggcagtgttagaaagccactgtaactattaaatctattgagagttagtttatctgccataaggtaatttctaatagataagggtcagcattgaagtttctctgaaccctttaccatagtctaaaatgaaccgagttctgtgctggaattcagtattatgcagttaattgtattgtttccaaatataaaattgttaagaatattaataaagttagaacattctgttttatatgagaacttgctttaagatttaacatgtccctattttatggtatttttgaaagttaaaggtaagaggtacttggctctcaaactttatttaacttccacatattagtttgaattgaaaaagtatatgcacttaaggttttgaaataggatattatattgccaaaactgtgttagacagtatttcctttcaagttttattttaagaacagcatcagtattttccccttgggtgcttaataatcaactctggaatgcctttaagtgccctctgctgtttccccttagcccatgtgattgttaccactgctttatagacattactttttcctgatttgtaacacagggacactggagttgctctaacggtttgggtggttaagaaggagctgttaacggcctcaagtctgttctaatcctggggatgccctacagtgctgaagttgagacattacagtttaccagttacttttacagataatctcattgaatccttacaacagccctgtgagatattctgtagataggaaaacagacccagtggatgaatgacttgctcagggttgcataacagtaaatttagacagagctaggatttagctctgtctaggacttaggattcacatctggctccaaatcctatcctttctgctgtaatacattgcttttctatagccgttatgctttctgggcctgattcagattcttgctggagatttgtggctgatctccatctccctctgatatttccatttgacattcagactctggaagaccagcgtatgttcctcagttcctaactagattgattttagttgtgtttacttgggatgtcttctaggagataagatttacagaactgctcttttagactatttgtagatttgtgcttttgggagagttttggtttcatgttgtcttgattgctgtactttggtaactgagtacttagcatttaaaagaagtgaagttctacctaaaaggtatatctcatttacacaggttaagtcatgaacaatatgaaaggaagcagaatttggtatttaatactcaaatatataaccaaaaatagtttggtgtataatactcaaatatattttaaaaaattcaaatatttgactttttttttggagtgtcaaagtatgacccaagttttttttttttttaaaggtatttgaaataagaaataccgaagacctaactgaagaatggttacgtgagaaacttggattttttcactaatgtgaacttctgtgtttctaaagtatttatgtattaacctgaccatactggaatcagacataaatacttatttatgcctaaaaatgcactgttacttacagtttgtttcctgcagtaaagaaaaattcttcatttgtgcaaaatttgaacaaagaggaaatcatcttcatagtaatgaaactttgtaaagtgtttccttatattggtaattgttaggtggactacttttctccagggactttttgcactcttgtgactaatttctataacttatggttcggaatttgttactatttacagacaccattggaaagtggatatattagattgtgagagacaacagttgcctccttttgacaaatactggatattagcagtttatttatgaaaatagcgtattatcacttgtcaaatcattgaaattcatttggggtcaaagacttgagtgacccagtattgagccatgaataatttagtgtaacctgtattacaagtacattgatgaattctgtatcttctttggtttcctgtatctttttaatcaagtctagaaactatgttcatcagtcactcatttttaaggtcgggagttagattttatgatagaattatgactgttagcttttctccttatagcatcttagtcttagaaattggtgggttgtaataatcaagggcttcattccttttatgtcatttctagacagttttgaatctaggttaataacactttatttataaagcacctcaatgtcctgtgaacactaattattttaaatgtgttaatactgtgcctttgatttgttagctttaaagttagtttaagacttttacactgccagtattccacatttggtgaaattaatacttttttaaagggtccaaataaaataattttctaatgtgtatatctgaaatttgtaataaaatcaacttcatattttaaaaattccaactatctgcttgcattggtgaatatatggcagtcgagagttataattttgggtatacttgtggttagttttgtgccataggaaaaaattatcttaaaactttggccatagttaataacattaacacttcaatagcaatcacatcttatatcctaaatgtcagaagatattctgaactggatgcctgaatagttaactaaaccagtcttgttagatgatggtactcttggcataaagcgaggattctgatatttggcatacttgtaaaaacaaatacataagtaaccattgaacattaatttgataataggtctagagactctaaaaactaaccaaacttggtgagtgtattcttatattaagaatatcttagtcatctcaaaactagcaaaatttaaattttggcatgttttccattcatatgttctttgcattttatttttgaggtttctgtgagaagtaaagatagttggaatttttgcgatattgaatagaacatcttctgttcccaacactgtttggcttcactaatttagaagtcaggaagcaatagaaagttggagatgaggaagtgctagagtaggtgtttgttttggttcttggagggaaaagattctttattccaatttccagagagaagagaaaactcacccaggaagtttaaaaattctttaaacaggtattttgatattggagaataacatgcatataattctgtaggaatgcacatgtaatccaagtgagtggagagtgtttttaatgtttttgaatgaaggaaatgaggttttgtttcacctgttttgcagcagtaagagaaactagtgctgcaagaatgtattttttaatgaagttccttattttgtcttgcatgttttagttttgcttatttttaaatttggaggtcctccataatgtcagataatattgacctgccatacgttagcactcttagttccgctactgtctttaacaggagcaaagagctgtgataaaccatgcttttttgagcttgtctgactcctaattaataacatgtttttggcaagacaacagattgaggttagaggatcagtaggacatttttattccatctgtcctatggggaaatttacaaatcccgtgctctaaaatgttctcaaacatttatatagatttccctttcatcttactaaattttgcattgttcttttcaagtatgtttcgtatttactgtctttttttctgccatttcccaaataataactccagatttcataattccagtttttacattccgttatctttctggtacaaccattcccattcagccttaaatctgagtcctttttagcagcaacttttttcctgggatcctccttcgtggtcttctaagtcagtgttagttttgaaatttttggccctgcataagttctgcatagcatctaatgtcaaaatagaaccaactggtaatcacagtattatttagtgtggtttccatgacaacaaaaatacatacgaagaaaacttctcaggttactatgctgaaattccaaaatgtctgagttttgaatagtgatcactttgttctggtattgacgcaattatattaggaaaaaagttggttgactgtttttgtttaattgacttctaaaatgttcaaattgtctagttctaaaagtttactaaatgcctagtgcagttaaacatactcttgtttaagtgtgtgttgctaaattttttactgtcattactaaataatctgtgtggcaaaatgtgtgtcagcacttttccctccttttttatctcctattttcaggagtcaaatgtagccataaactgtatccttgtctgacactttagctaaaaatttccagttaggggagtttattgccaaattaaatttggctgttccccccaacccatatagatattaaggaaggtgtacttaaaaaatgtttggactgcttttaaaacctgagcaatgtcattaatccatatgtggactagtgatgaatagatattttcataagagtttaaatgctgatatttggtggaagtagagagtaactcatattctatcaattcaagtattcttactatggttgctttccctatttgttcaatagactgataatactggaatttatagagtttgagccattacaacttttgtgaggatgtgtttcaaacatttctggacaaatcttattttgtatttctggaagaatgtagtaatcttctagaccgcttaaaaccaatgctcccaagctgaatattcttgagaaatttgtttttattatgccatttgacatttcaaatcagtgctcatatacagtaaacttgtgatagaaattgtattttattgctttttggattataattcatataaatataattacttgaatattgtttgagatcattaacatgccagggcagttcccactgatttagatggtccaagataatctcattcaggaggcttgaaacattaatggtttagtcttgtgaattttaacagttctctgtcatcgtttaacaaaaccaacaactgacacaactccttaagctgtggtttcagtctctgctagttcatattgcatgtttattttggacagtcttttgttaagcatggtgcttgtactggtttaaataaaatgttaacattaaaagac

SEQ ID NO: 137110 - DNA, 4125 bp, Homo sapiens
  Payload ID: 6844
  Gene Symbol: GMFB
  Gene Name: glia maturation factor, beta
  Uniprot ID: P60983
  ENST ID: ENST00000616146
  CDS Start-End: 100-528
cgactgggccaggcgccggggcaggaagggaggcggccgccgtgccattcttaaaggcgcccgagtgtaggcgacaggccgctgacggccggaaggaaaatgagtgagtctttggttgtttgtgatgttgccgaagatttagtggaaaagctgagaaagtttcgttttcgcaaagaaacgaacaacgctgctattataatgaagattgacaaggataaacgcctggtggtactggatgaggagcttgagggcatttcaccagatgaacttaaagatgaactacctgaacgacaacctcgattcattgtgtatagttataaatatcaacatgatgatggaagagtttcatatcctctgtgctttattttctccagtcctgttggatgtaagcctgaacaacagatgatgtatgctggaagtaagaataagctagtccagacagctgaactaaccaaggtatttgaaataagaaataccgaagacctaactgaagaatggttacgtgagaaacttggattttttcactaatgtgaacttctgtgtttctaaagtatttatgtattaacctgaccatactggaatcagacataaatacttatttatgcctaaaaatgcactgttacttacagtttgtttcctgcagtaaagaaaaattcttcatttgtgcaaaatttgaacaaagaggaaatcatcttcatagtaatgaaactttgtaaagtgtttccttatattggtaattgttaggtggactacttttctccagggactttttgcactcttgtgactaatttctataacttatggttcggaatttgttactatttacagacaccattggaaagtggatatattagattgtgagagacaacagttgcctccttttgacaaatactggatattagcagtttatttatgaaaatagcgtattatcacttgtcaaatcattgaaattcatttggggtcaaagacttgagtgacccagtattgagccatgaataatttagtgtaacctgtattacaagtacattgatgaattctgtatcttctttggtttcctgtatctttttaatcaagtctagaaactatgttcatcagtcactcatttttaaggtcgggagttagattttatgatagaattatgactgttagcttttctccttatagcatcttagtcttagaaattggtgggttgtaataatcaagggcttcattccttttatgtcatttctagacagttttgaatctaggttaataacactttatttataaagcacctcaatgtcctgtgaacactaattattttaaatgtgttaatactgtgcctttgatttgttagctttaaagttagtttaagacttttacactgccagtattccacatttggtgaaattaatacttttttaaagggtccaaataaaataattttctaatgtgtatatctgaaatttgtaataaaatcaacttcatattttaaaaattccaactatctgcttgcattggtgaatatatggcagtcgagagttataattttgggtatacttgtggttagttttgtgccataggaaaaaattatcttaaaactttggccatagttaataacattaacacttcaatagcaatcacatcttatatcctaaatgtcagaagatattctgaactggatgcctgaatagttaactaaaccagtcttgttagatgatggtactcttggcataaagcgaggattctgatatttggcatacttgtaaaaacaaatacataagtaaccattgaacattaatttgataataggtctagagactctaaaaactaaccaaacttggtgagtgtattcttatattaagaatatcttagtcatctcaaaactagcaaaatttaaattttggcatgttttccattcatatgttctttgcattttatttttgaggtttctgtgagaagtaaagatagttggaatttttgcgatattgaatagaacatcttctgttcccaacactgtttggcttcactaatttagaagtcaggaagcaatagaaagttggagatgaggaagtgctagagtaggtgtttgttttggttcttggagggaaaagattctttattccaatttccagagagaagagaaaactcacccaggaagtttaaaaattctttaaacaggtattttgatattggagaataacatgcatataattctgtaggaatgcacatgtaatccaagtgagtggagagtgtttttaatgtttttgaatgaaggaaatgaggttttgtttcacctgttttgcagcagtaagagaaactagtgctgcaagaatgtattttttaatgaagttccttattttgtcttgcatgttttagttttgcttatttttaaatttggaggtcctccataatgtcagataatattgacctgccatacgttagcactcttagttccgctactgtctttaacaggagcaaagagctgtgataaaccatgcttttttgagcttgtctgactcctaattaataacatgtttttggcaagacaacagattgaggttagaggatcagtaggacatttttattccatctgtcctatggggaaatttacaaatcccgtgctctaaaatgttctcaaacatttatatagatttccctttcatcttactaaattttgcattgttcttttcaagtatgtttcgtatttactgtctttttttctgccatttcccaaataataactccagatttcataattccagtttttacattccgttatctttctggtacaaccattcccattcagccttaaatctgagtcctttttagcagcaacttttttcctgggatcctccttcgtggtcttctaagtcagtgttagttttgaaatttttggccctgcataagttctgcatagcatctaatgtcaaaatagaaccaactggtaatcacagtattatttagtgtggtttccatgacaacaaaaatacatacgaagaaaacttctcaggttactatgctgaaattccaaaatgtctgagttttgaatagtgatcactttgttctggtattgacgcaattatattaggaaaaaagttggttgactgtttttgtttaattgacttctaaaatgttcaaattgtctagttctaaaagtttactaaatgcctagtgcagttaaacatactcttgtttaagtgtgtgttgctaaattttttactgtcattactaaataatctgtgtggcaaaatgtgtgtcagcacttttccctccttttttatctcctattttcaggagtcaaatgtagccataaactgtatccttgtctgacactttagctaaaaatttccagttaggggagtttattgccaaattaaatttggctgttccccccaacccatatagatattaaggaaggtgtacttaaaaaatgtttggactgcttttaaaacctgagcaatgtcattaatccatatgtggactagtgatgaatagatattttcataagagtttaaatgctgatatttggtggaagtagagagtaactcatattctatcaattcaagtattcttactatggttgctttccctatttgttcaatagactgataatactggaatttatagagtttgagccattacaacttttgtgaggatgtgtttcaaacatttctggacaaatcttattttgtatttctggaagaatgtagtaatcttctagaccgcttaaaaccaatgctcccaagctgaatattcttgagaaatttgtttttattatgccatttgacatttcaaatcagtgctcatatacagtaaacttgtgatagaaattgtattttattgctttttggattataattcatataaatataattacttgaatattgtttgagatcattaacatgccagggcagttcccactgatttagatggtccaagataatctcattcaggaggcttgaaacattaatggtttagtcttgtgaattttaacagttctctgtcatcgtttaacaaaaccaacaactgacacaactccttaagctgtggtttcagtctctgctagttcatattgcatgtttattttggacagtcttttgttaagcatggtgcttgtactggtttaaataaaatgttaacatt

SEQ ID NO: 137111 - DNA, 639 bp, Homo sapiens
  Payload ID: 6844
  Gene Symbol: GMFB
  Gene Name: glia maturation factor, beta
  ENST ID: ENST00000628554
  CDS Start-End: 31-147
ggcgacaggccgctgacggccggaaggaaaatgagtgagtctttggttgtttgtgatgttgccgaagatttagtggaaaagctgagaaagtttcgttttcgcaaagaaacgaacaacgctgctattataaggcatttcaccagatgaacttaaagatgaactacctgaacgacaacctcgcttcattgtgtatagttataaatatcaacatgatgatggaagagtttcatatcctctgtgctttattttctccagtcctgttggatgtaagcctgaacaacagatgatgtatgctggaagtaagaataagctagtccagacagctgaactaaccaaggtatttgaaataagaaataccgaagacctaactgaagaatggttacgtgagaaacttggattttttcactaatgtgaacttctgtgtttctaaagtatttatgtattaacctgaccatactggaatcagacataaatacttatttatgcctaaaaatgcactgttacttacagtttgtttcctgcagtaaagaaaaattcttcatttgtgcaaaatttgaacaaagaggaaatcatcttcatagtaatgaaactttgtaaagtgtttccttatattggtaattgttaggtggactacttttc

SEQ ID NO: 137112 - DNA, 616 bp, Homo sapiens
  Payload ID: 6845
  Gene Symbol: GMFG
  Gene Name: glia maturation factor, gamma
  ENST ID: ENST00000253054
  CDS Start-End: 175-504
gcctagaagacagcggaactaagaaaagaagaggcctgtggacagaacaatcatgctcttcctgggtccctccggcagtctgactccctggtggtgtgcgaggtagacccagagctaacagaaaagctgaggaaattccgcttccgaaaagagacagacaatgcagccatcataatgaaggtggacaaagaccggcagatggtggtgctggaggaagaatttcagaacatttccccagaggagctcaaaatggagttgccggagagacagcccaggttcgtggtttacagctacaagtacgtgcatgacgatggccgagtgtcctaccctttgtgtttcatcttctccagccctgtgggctgcaagccggaacaacagatgatgtatgcagggagtaaaaacaggctggtgcagacagcagagctcacaaaggtgttcgaaatccgcaccactgatgacctcactgaggcctggctccaagaaaagttgtctttctttcgttgatctctgggctggggactgaattcctgatgtctgagtcctcaaggtgactggggacttggaacccctaggacctgaacaaccaagactttaaataaattttaaaatgcaaaaa

SEQ ID NO: 137113 - DNA, 397 bp, Homo sapiens
  Payload ID: 6845
  Gene Symbol: GMFG
  Gene Name: glia maturation factor, gamma
  ENST ID: ENST00000594700
  CDS Start-End: 64-285
ccggtccccacgcctagaagacagcggaactaagaaaagaagaggcctgtggacagaacaatcatgtctgactccctggtggtgtgcgaggtagacccagagctaacagaaaagctgaggaaattccgcttccgaaaagagacagacaatgcagccatcataatgaaggtggacaaagaccggcagatggtggtgctggaggaagaatttcaggtgttcgaaatccgcaccactgatgacctcactgaggcctggctccaagaaaagttgtctttctttcgttgatctctgggctggggactgaattcctgatgtctgagtcctcaaggtgactggggacttggaacccctaggacctgaacaaccaagactttaaataaattttaaaatgcaaaaa

SEQ ID NO: 137114 - DNA, 487 bp, Homo sapiens
  Payload ID: 6845
  Gene Symbol: GMFG
  Gene Name: glia maturation factor, gamma
  ENST ID: ENST00000595636
  CDS Start-End: 49-288
agaagacagcggaactaagaaaagaagaggcctgtggacagaacaatcatgtctgactccctggtggtgtgcgaggtagacccagagctaacagaaaagctgaggaaattccgcttccgaaaagagacagacaatgcagccatcataatgaaggtggacaaagaccggcagatggtggtgctggaggaagaatttcagaacatttccccagaggagctcaaaatggagttgccggagagacagcccaggctgcaagccggaacaacagatgatgtatgcagggagtaaaaacaggctggtgcagacagcagagctcacaaaggtgttcgaaatccgcaccactgatgacctcactgaggcctggctccaagaaaagttgtctttctttcgttgatctctgggctggggactgaattcctgatgtctgagtcctcaaggtgactggggacttggaacccctaggacctgaacaaccaagactttaaat

SEQ ID NO: 137115 - DNA, 490 bp, Homo sapiens
  Payload ID: 6845
  Gene Symbol: GMFG
  Gene Name: glia maturation factor, gamma
  ENST ID: ENST00000596583
  CDS Start-End: 1-180
tctgactccctggtggtgtgcgaggtagacccagagctaacagaaaagctgaggaaattccgcttccgaaaagagacagacaatgcagccatcataaaacatttccccagaggagctcaaaatggagttgccggagagacagcccaggttcgtggtttacagctacaagtacgtgcatgacgatggccgagtgtcctaccctttgtgtttcatcttctccagccctgctgcaagccggaacaacagatgatgtatgcagggagtaaaaacaggctggtgcagacagcagagctcacaaaggtgttcgaaatccgcaccactgatgacctcactgaggcctggctccaagaaaagttgtctttctttcgttgatctctgggctggggactgaattcctgatgtctgagtcctcaaggtgactggggacttggaacccctaggacctgaacaaccaagactttaaataaattttaaaatgcaaaaactcgga

SEQ ID NO: 137116 - DNA, 405 bp, Homo sapiens
  Payload ID: 6845
  Gene Symbol: GMFG
  Gene Name: glia maturation factor, gamma
  ENST ID: ENST00000601731
  CDS Start-End: 62-97
ggtccccacgcctagaagacagcggaactaagaaaagaagaggcctgtggacagaacaatcatggttcgtggtttacagctacaagtacgtgcatgacgatggccgagtgtcctaccctttgtgtttcatcttctccagccctgtgggctgcaagccggaacaacagatgatgtatgcagggagtaaaaacaggctggtgcagacagcagagctcacaaaggtgttcgaaatccgcaccactgatgacctcactgaggcctggctccaagaaaagttgtctttctttcgttgatctctgggctggggactgaattcctgatgtctgagtcctcaaggtgactggggacttggaacccctaggacctgaacaaccaagactttaaataaattttaaaatgcaaaaa

SEQ ID NO: 137117 - DNA, 423 bp, Homo sapiens
  Payload ID: 6845
  Gene Symbol: GMFG
  Gene Name: glia maturation factor, gamma
  ENST ID: ENST00000602185
  CDS Start-End: 30-311
aaaagaagaggcctgtggacagaacaatcatgaacatttccccagaggagctcaaaatggagttgccggagagacagcccaggttcgtggtttacagctacaagtacgtgcatgacgatggccgagtgtcctaccctttgtgtttcatcttctccagccctgtgggctgcaagccggaacaacagatgatgtatgcagggagtaaaaacaggctggtgcagacagcagagctcacaaaggtgttcgaaatccgcaccactgatgacctcactgaggcctggctccaagaaaagttgtctttctttcgttgatctctgggctggggactgaattcctgatgtctgagtcctcaaggtgactggggacttggaacccctaggacctgaacaaccaagactttaaataaattttaaaatgcaaaaa

SEQ ID NO: 137118 - DNA, 1028 bp, Homo sapiens
  Payload ID: 6845
  Gene Symbol: GMFG
  Gene Name: glia maturation factor, gamma
  ENST ID: ENST00000598034
  CDS Start-End: 31-447
gaaaagaagaggcctgtggacagaacaatcatgtctgactccctggtggtgtgcgaggtagacccagagctaacagaaaagctgaggaaattccgcttccgaaaagagacagacaatgcagccatcataatgaaggtggacaaagaccggcagatggtggtgctggaggaagaatttcagaacatttccccagaggagctcaaaatggagttgccggagagacagcccaggttcgtggtttacagctacaagtacgtgcatgacgatggccgagtgtcctaccctttgtgtttcatcttctccagccctgtgggctgcaagccggaacaacagatgatgtatgcagggagtaaaaacaggctggtgcagacagcagagctcacaaaggttcagactgggatggggctccagagtgttagggagaggtggtgtgggtcctgggtctgagggaagagggactagagtcctcactgtctcagtggtttttgtttttgtttttgtttttttaaagaactgggtctcgctctgtcatccaggctggagtgcagtggcacaacctcggctcactgcaacctcctcctcctgggttcaagcaattctcctgcctcagcctcccaagtagtgggacgacaggcacacgccaccacacctggctactttttgtatttttagtagagtcagggtttcaccatattggccaggctggtctcgaactcctgaccttaagtgatccacccacctcagcctcccaaagtgctctcttacaggtgagccaccgtgcccagccactgtctcagtgtttgagtagatcataatgccgagacctctctctgcccaggtgttcgaaatccgcaccactgatgacctcactgaggcctggctccaagaaaagttgtctttctttcgttgatctctgggctggggactgaattcctgatgtctgagtcctcaaggtgactggggacttggaacccctaggacctgaacaaccaagactttaaataaattttaaaatgcaaaaactcgga

SEQ ID NO: 137119 - DNA, 622 bp, Homo sapiens
  Payload ID: 6845
  Gene Symbol: GMFG
  Gene Name: glia maturation factor, gamma
  ENST ID: ENST00000600322
  CDS Start-End: 178-507
attagctcacgcccgggtgacgaacggcgcgccagccaacgggcggcgagggcagcccgaagggcgggaggtgtgagccgatctgactccctggtggtgtgcgaggtagacccagagctaacagaaaagctgaggaaattccgcttccgaaaagagacagacaatgcagccatcataatgaaggtggacaaagaccggcagatggtggtgctggaggaagaatttcagaacatttccccagaggagctcaaaatggagttgccggagagacagcccaggttcgtggtttacagctacaagtacgtgcatgacgatggccgagtgtcctaccctttgtgtttcatcttctccagccctgtgggctgcaagccggaacaacagatgatgtatgcagggagtaaaaacaggctggtgcagacagcagagctcacaaaggtgttcgaaatccgcaccactgatgacctcactgaggcctggctccaagaaaagttgtctttctttcgttgatctctgggctggggactgaattcctgatgtctgagtcctcaaggtgactggggacttggaacccctaggacctgaacaaccaagactttaaataaattttaaaatgcaaaaactc

SEQ ID NO: 137120 - DNA, 497 bp, Homo sapiens
  Payload ID: 6845
  Gene Symbol: GMFG
  Gene Name: glia maturation factor, gamma
  ENST ID: ENST00000601387
  CDS Start-End: 68-373
agcggaactaagaaaagaagaggcctgtggacagaacaatcatgtgaaggtggacaaagaccggcagatggtggtgctggaggaagaatttcagaacatttccccagaggagctcaaaatggagttgccggagagacagcccaggttcgtggtttacagctacaagtacgtgcatgacgatggccgagtgtcctaccctttgtgtttcatcttctccagccctgtgggctgcaagccggaacaacagatgatgtatgcagggagtaaaaacaggctggtgcagacagcagagctcacaaaggtgttcgaaatccgcaccactgatgacctcactgaggcctggctccaagaaaagttgtctttctttcgttgatctctgggctggggactgaattcctgatgtctgagtcctcaaggtgactggggacttggaacccctaggacctgaacaaccaagactttaaataaattttaaaatgcaaaaactcggagatcct

SEQ ID NO: 137121 - DNA, 758 bp, Homo sapiens
  Payload ID: 6845
  Gene Symbol: GMFG
  Gene Name: glia maturation factor, gamma
  Uniprot ID: O60234
  ENST ID: ENST00000597595
  CDS Start-End: 210-638
gagcgatttcctgacaggtcctggcagatgaggggaaggaaggagggggaggagccctctgtgacagttgtcccagaaagggcataaacaggatgtggtgttggatgaaaccttcctcctactgcacagcccgcccccctacagccccggtccccacgcctagaagacagcggaactaagaaaagaagaggcctgtggacagaacaatcatgtctgactccctggtggtgtgcgaggtagacccagagctaacagaaaagctgaggaaattccgcttccgaaaagagacagacaatgcagccatcataatgaaggtggacaaagaccggcagatggtggtgctggaggaagaatttcagaacatttccccagaggagctcaaaatggagttgccggagagacagcccaggttcgtggtttacagctacaagtacgtgcatgacgatggccgagtgtcctaccctttgtgtttcatcttctccagccctgtgggctgcaagccggaacaacagatgatgtatgcagggagtaaaaacaggctggtgcagacagcagagctcacaaaggtgttcgaaatccgcaccactgatgacctcactgaggcctggctccaagaaaagttgtctttctttcgttgatctctgggctggggactgaattcctgatgtctgagtcctcaaggtgactggggacttggaacccctaggacctgaacaaccaagactttaaataaattttaaaatgcaaaaactcggaga

SEQ ID NO: 137122 - DNA, 526 bp, Homo sapiens
  Payload ID: 6845
  Gene Symbol: GMFG
  Gene Name: glia maturation factor, gamma
  ENST ID: ENST00000595207
  CDS Start-End: 30-212
aaaagaagaggcctgtggacagaacaatcatgtctgactccctggtggtgtgcgaggtagacccagagctaacagaaaagctgaggaaattccgcttccgaaaagagacagacaatgcagccatcataaaacatttccccagaggagctcaaaatggagttgccggagagacagcccaggttcgtggtttacagctacaagtacgtgcatgacgatggccgagtgtcctaccctttgtgtttcatcttctccagccctgtgggctgcaagccggaacaacagatgatgtatgcagggagtaaaaacaggctggtgcagacagcagagctcacaaaggtgttcgaaatccgcaccactgatgacctcactgaggcctggctccaagaaaagttgtctttctttcgttgatctctgggctggggactgaattcctgatgtctgagtcctcaaggtgactggggacttggaacccctaggacctgaacaaccaagactttaaataaattttaaaatgcaaaaactcgga

SEQ ID NO: 137123 - DNA, 3810 bp, Homo sapiens
  Payload ID: 6846
  Gene Symbol: GDNF
  Gene Name: glial cell derived neurotrophic factor
  Uniprot ID: P39905
  ENST ID: ENST00000326524
  CDS Start-End: 201-836
ccgcctccagcgcgcccttgctgccccgcgcgaccccaggattgcgaactcttgcccctgacctgttgggcggggctccgcgctccagccatcagcccggatgggtctcctggctgggacttggggcacctggagttaatgtccaacctagggtctgcggagacccgatccgaggtgccgccgccggacgggactttaagatgaagttatgggatgtcgtggctgtctgcctggtgctgctccacaccgcgtccgccttcccgctgcccgccggtaagaggcctcccgaggcgcccgccgaagaccgctccctcggccgccgccgcgcgcccttcgcgctgagcagtgactcaaatatgccagaggattatcctgatcagttcgatgatgtcatggattttattcaagccaccattaaaagactgaaaaggtcaccagataaacaaatggcagtgcttcctagaagagagcggaatcggcaggctgcagctgccaacccagagaattccagaggaaaaggtcggagaggccagaggggcaaaaaccggggttgtgtcttaactgcaatacatttaaatgtcactgacttgggtctgggctatgaaaccaaggaggaactgatttttaggtactgcagcggctcttgcgatgcagctgagacaacgtacgacaaaatattgaaaaacttatccagaaatagaaggctggtgagtgacaaagtagggcaggcatgttgcagacccatcgcctttgatgatgacctgtcgtttttagatgataacctggtttaccatattctaagaaagcattccgctaaaaggtgtggatgtatctgactccggctccagagactgctgtgtattgcattcctgctacagtgcaaagaaagggaccaaggttcccaggaaatgtttgcccagaatggaagatgaggaccaaggaggcggaggaggaggaagaagaagaggaggaggaggaggaggaggaggaggaggaggaaggcagccatcatgggagcctggtagagggagatccagctacagacaactggacaggagagagagaaaacagccctctggattctccaggatggcagccgatgtcactagaagctcagggctgatgttcctggttggctattgccaccatttcagctgatacagtccaccatcactgattaccggcgcggttgcggtggatgcacttgaaccaaaccagtgtatctcctgtgatttgttttcatgtgtccgaagacaccagggaaacagagatcctggtgttgttccttgttattacgttttactgctgaaagtaagaggtttatttttctgtcactcagtggagacataccctggaaaggagaggggaaaaaaaaagcaaagatacaagagataatcacctttgcatttgaaagttgaggcccgaggtttactacaaccagcatttttgccaacggttggtgattgatttccatcacggtgtgtggggtgggaagaagttggctaggaaccaaaaaggctgtgctcatgattaaacacaaacctgaaggtatttcctttatgtccttggaaacaggaaacgagttgtggttttcgccagcattcttgtaggagagaatcggggaaggccccgaactgcccccgggcagggagagcccctcaggcctgttggtttacagagagacagatgttacataaccagctccgttgatgcgtggtcaccagtgaccagagaagctactcgatgcaatgcatctgtttcagatacagaaatatagagaagatatttattgaaatttaagttattgttatttattaccgttcactaatgaatttctcttttttcccttatttattaaagtttcttttcaaaggtgccaaagtatatgtgctcgcaaaatgcaaagaaaggtgacaaaaggaaatttgaattgggaacaagggtccatgcttttcaaagtattaaaaagttttttgccaggcaaaaatcacttactttacctttttaagaaaatttgtcattaattttccccagatttcagcatttttcccaatttttatttgtggagcatctcaggcaagccccctttcctggagcagcgtgcagagaccactggcacttgactttatttcttccttgctccattgctgaacagaaatgtcgtgggctccacttcctgttgtctttaagctcttagtcccctccacgtatacctatctgtactatgcataaccatatgtagaaaaggttcagttccttttagtaggtagtcctggatttaatgctgacctaaaagtaatgtcgacaatgctgtcaggtagctgccgttctaccgactccctccatccctgcccacccactgccctcccgagaatatgctggctgcccagtgcagcccgggagacacaggggccttccagaggtagggtctaccaggtcctgtacaacccctgggctgtcaccgggggtcaacagctgctgctcctatatacccaaacacctgacagctccctggggagcagatggctgagaagggtgctgaggaagccatattgggaccagccacagccacacacatggagcctcatacttaggagcgtgctgcctttaaatgaaggtggtcggggccagtgcagcggctcacacccataatcccaacactttggaaagccaaggtgggaggatctcttgaacccaggagtttgagaccagcttgggcaacatagggagaccctgtctctacagaaactttaaaaattaggcaggcatgatggtgcacacctgtggtcccagctactcaagaggctgaaggaggatcacttgagtccagaaggtcgaggctgcagtgagctgtgatcatgccactgcactccagcctaagtgacagtgcggtaccctgtctcaaaaaaaaaaaaaaaaaaaaaaagaggttggagcaggaggaagcataggggcgggaacagccacctcctccatgccctagattgtgaatttatcgggcagccaacacatgtatgacacactaggccctgtattacagcttgttacgcatttcataaaagggattttcattaaggagataatctattactacctaccttagtggctactagtataaaactatgacagatttagcaattaaatgaaatactggcctccatcaaataatcatagtaacaagaagcagcagttaccagacatctgatccccttcccccaaaatacccaaattcttcatggttctgcccttctctgtcctttctgctccccttgctcgcctgggaaatggaggaaaggccttccctctcacactgtcttgggatcttgctgagaattcagactgctcgaaacagtgacaaaccccagccatccagtcattcgtggagcacaatttggatgtggccccaggggcatctgtcccattcagagaaccttggcagtgcgatggccactgttcccaggcttcaacctcagtgaccccccccaacaactccccatggagagtccctgcccaaaaaagctgtaggatccaaggggtgtcaatagctcgttcccggcatcacctacacaccacaagcaggttttaatggaagcaagttgctccaccaaatccacaaaagggtaaagtttgtgatttttctttatcattgcgatcaccatctgataccgtaaggagtgcacttgtttggaagttctgacttctctgatctgtcttggtcgtttgtgttataaaaccaaagttctctacagactttatttttgtacaatatcattttgtaactttttacaaataaaaactcatttctattgc

SEQ ID NO: 137124 - DNA, 3655 bp, Homo sapiens
  Payload ID: 6846
  Gene Symbol: GDNF
  Gene Name: glial cell derived neurotrophic factor
  Uniprot ID: P39905
  ENST ID: ENST00000344622
  CDS Start-End: 124-681
catacaggccaaaagtctccaagtccctgctaacttcttgctctcgcaacagaatacctatttaggtgggaagaatgaggtgtgggcggcaggctgggtgccgccgccggacgggactttaagatgaagttatgggatgtcgtggctgtctgcctggtgctgctccacaccgcgtccgccttcccgctgcccgccgcaaatatgccagaggattatcctgatcagttcgatgatgtcatggattttattcaagccaccattaaaagactgaaaaggtcaccagataaacaaatggcagtgcttcctagaagagagcggaatcggcaggctgcagctgccaacccagagaattccagaggaaaaggtcggagaggccagaggggcaaaaaccggggttgtgtcttaactgcaatacatttaaatgtcactgacttgggtctgggctatgaaaccaaggaggaactgatttttaggtactgcagcggctcttgcgatgcagctgagacaacgtacgacaaaatattgaaaaacttatccagaaatagaaggctggtgagtgacaaagtagggcaggcatgttgcagacccatcgcctttgatgatgacctgtcgtttttagatgataacctggtttaccatattctaagaaagcattccgctaaaaggtgtggatgtatctgactccggctccagagactgctgtgtattgcattcctgctacagtgcaaagaaagggaccaaggttcccaggaaatgtttgcccagaatggaagatgaggaccaaggaggcggaggaggaggaagaagaagaggaggaggaggaggaggaggaggaggaggaggaaggcagccatcatgggagcctggtagagggagatccagctacagacaactggacaggagagagagaaaacagccctctggattctccaggatggcagccgatgtcactagaagctcagggctgatgttcctggttggctattgccaccatttcagctgatacagtccaccatcactgattaccggcgcggttgcggtggatgcacttgaaccaaaccagtgtatctcctgtgatttgttttcatgtgtccgaagacaccagggaaacagagatcctggtgttgttccttgttattacgttttactgctgaaagtaagaggtttatttttctgtcactcagtggagacataccctggaaaggagaggggaaaaaaaaagcaaagatacaagagataatcacctttgcatttgaaagttgaggcccgaggtttactacaaccagcatttttgccaacggttggtgattgatttccatcacggtgtgtggggtgggaagaagttggctaggaaccaaaaaggctgtgctcatgattaaacacaaacctgaaggtatttcctttatgtccttggaaacaggaaacgagttgtggttttcgccagcattcttgtaggagagaatcggggaaggccccgaactgcccccgggcagggagagcccctcaggcctgttggtttacagagagacagatgttacataaccagctccgttgatgcgtggtcaccagtgaccagagaagctactcgatgcaatgcatctgtttcagatacagaaatatagagaagatatttattgaaatttaagttattgttatttattaccgttcactaatgaatttctcttttttcccttatttattaaagtttcttttcaaaggtgccaaagtatatgtgctcgcaaaatgcaaagaaaggtgacaaaaggaaatttgaattgggaacaagggtccatgcttttcaaagtattaaaaagttttttgccaggcaaaaatcacttactttacctttttaagaaaatttgtcattaattttccccagatttcagcatttttcccaatttttatttgtggagcatctcaggcaagccccctttcctggagcagcgtgcagagaccactggcacttgactttatttcttccttgctccattgctgaacagaaatgtcgtgggctccacttcctgttgtctttaagctcttagtcccctccacgtatacctatctgtactatgcataaccatatgtagaaaaggttcagttccttttagtaggtagtcctggatttaatgctgacctaaaagtaatgtcgacaatgctgtcaggtagctgccgttctaccgactccctccatccctgcccacccactgccctcccgagaatatgctggctgcccagtgcagcccgggagacacaggggccttccagaggtagggtctaccaggtcctgtacaacccctgggctgtcaccgggggtcaacagctgctgctcctatatacccaaacacctgacagctccctggggagcagatggctgagaagggtgctgaggaagccatattgggaccagccacagccacacacatggagcctcatacttaggagcgtgctgcctttaaatgaaggtggtcggggccagtgcagcggctcacacccataatcccaacactttggaaagccaaggtgggaggatctcttgaacccaggagtttgagaccagcttgggcaacatagggagaccctgtctctacagaaactttaaaaattaggcaggcatgatggtgcacacctgtggtcccagctactcaagaggctgaaggaggatcacttgagtccagaaggtcgaggctgcagtgagctgtgatcatgccactgcactccagcctaagtgacagtgcggtaccctgtctcaaaaaaaaaaaaaaaaaaaaaaagaggttggagcaggaggaagcataggggcgggaacagccacctcctccatgccctagattgtgaatttatcgggcagccaacacatgtatgacacactaggccctgtattacagcttgttacgcatttcataaaagggattttcattaaggagataatctattactacctaccttagtggctactagtataaaactatgacagatttagcaattaaatgaaatactggcctccatcaaataatcatagtaacaagaagcagcagttaccagacatctgatccccttcccccaaaatacccaaattcttcatggttctgcccttctctgtcctttctgctccccttgctcgcctgggaaatggaggaaaggccttccctctcacactgtcttgggatcttgctgagaattcagactgctcgaaacagtgacaaaccccagccatccagtcattcgtggagcacaatttggatgtggccccaggggcatctgtcccattcagagaaccttggcagtgcgatggccactgttcccaggcttcaacctcagtgaccccccccaacaactccccatggagagtccctgcccaaaaaagctgtaggatccaaggggtgtcaatagctcgttcccggcatcacctacacaccacaagcaggttttaatggaagcaagttgctccaccaaatccacaaaagggtaaagtttgtgatttttctttatcattgcgatcaccatctgataccgtaaggagtgcacttgtttggaagttctgacttctctgatctgtcttggtcgtttgtgttataaaaccaaagttctctacagactttatttttgtacaatatcattttgtaactttttacaaataaaaactcatttctattgc

SEQ ID NO: 137125 - DNA, 778 bp, Homo sapiens
  Payload ID: 6846
  Gene Symbol: GDNF
  Gene Name: glial cell derived neurotrophic factor
  Uniprot ID: P39905
  ENST ID: ENST00000381826
  CDS Start-End: 170-778
ccaaagcgtccgagactgggtacagtcgtccaggcgtgacgggggcgcggggagccagtgactcctctgggaggggaagggattagggccagaatctctcaaaggtgcaaaaatccagtcaagagagggttttcgggtataccacggaggattaaaactttcaagacaaatgcagtctttgcctaacagcaatggtgccgccgccggacgggactttaagatgaagttatgggatgtcgtggctgtctgcctggtgctgctccacaccgcgtccgccttcccgctgcccgccgcaaatatgccagaggattatcctgatcagttcgatgatgtcatggattttattcaagccaccattaaaagactgaaaaggtcaccagataaacaaatggcagtgcttcctagaagagagcggaatcggcaggctgcagctgccaacccagagaattccagaggaaaaggtcggagaggccagaggggcaaaaaccggggttgtgtcttaactgcaatacatttaaatgtcactgacttgggtctgggctatgaaaccaaggaggaactgatttttaggtactgcagcggctcttgcgatgcagctgagacaacgtacgacaaaatattgaaaaacttatccagaaatagaaggctggtgagtgacaaagtagggcaggcatgttgcagacccatcgcctttgatgatgacctgtcgtttttagatgataacctggtttaccatattctaagaaagcattccgctaaaaggtgtggatgtatctga

SEQ ID NO: 137126 - DNA, 856 bp, Homo sapiens
  Payload ID: 6846
  Gene Symbol: GDNF
  Gene Name: glial cell derived neurotrophic factor
  Uniprot ID: P39905
  ENST ID: ENST00000427982
  CDS Start-End: 170-856
ccaaagcgtccgagactgggtacagtcgtccaggcgtgacgggggcgcggggagccagtgactcctctgggaggggaagggattagggccagaatctctcaaaggtgcaaaaatccagtcaagagagggttttcgggtataccacggaggattaaaactttcaagacaaatgcagtctttgcctaacagcaatggtgccgccgccggacgggactttaagatgaagttatgggatgtcgtggctgtctgcctggtgctgctccacaccgcgtccgccttcccgctgcccgccggtaagaggcctcccgaggcgcccgccgaagaccgctccctcggccgccgccgcgcgcccttcgcgctgagcagtgactcaaatatgccagaggattatcctgatcagttcgatgatgtcatggattttattcaagccaccattaaaagactgaaaaggtcaccagataaacaaatggcagtgcttcctagaagagagcggaatcggcaggctgcagctgccaacccagagaattccagaggaaaaggtcggagaggccagaggggcaaaaaccggggttgtgtcttaactgcaatacatttaaatgtcactgacttgggtctgggctatgaaaccaaggaggaactgatttttaggtactgcagcggctcttgcgatgcagctgagacaacgtacgacaaaatattgaaaaacttatccagaaatagaaggctggtgagtgacaaagtagggcaggcatgttgcagacccatcgcctttgatgatgacctgtcgtttttagatgataacctggtttaccatattctaagaaagcattccgctaaaaggtgtggatgtatctga

SEQ ID NO: 137127 - DNA, 306 bp, Homo sapiens
  Payload ID: 6846
  Gene Symbol: GDNF
  Gene Name: glial cell derived neurotrophic factor
  ENST ID: ENST00000502572
  CDS Start-End: 124-306
catacaggccaaaagtctccaagtccctgctaacttcttgctctcgcaacagaatacctatttaggtgggaagaatgaggtgtgggcggcaggctgggtgccgccgccggacgggactttaagatgaagttatgggatgtcgtggctgtctgcctggtgctgctccacaccgcgtccgccttcccgctgcccgccgcaaatatgccagaggattatcctgatcagttcgatgatgtcatggattttattcaagccaccattaaaagactgaaaaggtcaccagataaacaaatggcagtgcttcct

SEQ ID NO: 137128 - DNA, 295 bp, Homo sapiens
  Payload ID: 6846
  Gene Symbol: GDNF
  Gene Name: glial cell derived neurotrophic factor
  ENST ID: ENST00000510177
  CDS Start-End: 113-295
tggagaggggcgcagggacccgcagggagcccaggcttaacgtgcattctgcggttctctcccccacctcccgcctgcccgcgcaggtgccgccgccggacgggactttaagatgaagttatgggatgtcgtggctgtctgcctggtgctgctccacaccgcgtccgccttcccgctgcccgccgcaaatatgccagaggattatcctgatcagttcgatgatgtcatggattttattcaagccaccattaaaagactgaaaaggtcaccagataaacaaatggcagtgcttcct

SEQ ID NO: 137129 - DNA, 764 bp, Homo sapiens
  Payload ID: 6846
  Gene Symbol: GDNF
  Gene Name: glial cell derived neurotrophic factor
  Uniprot ID: P39905
  ENST ID: ENST00000515058
  CDS Start-End: 207-764
tggccgccgcctccagcgcgcccttgctgccccgcgcgaccccaggattgcgaactcttgcccctgacctgttgggcggggctccgcgctccagccatcagcccggatgggtctcctggctgggacttggggcacctggagttaatgtccaacctagggtctgcggagacccgatccgaggtgccgccgccggacgggactttaagatgaagttatgggatgtcgtggctgtctgcctggtgctgctccacaccgcgtccgccttcccgctgcccgccgcaaatatgccagaggattatcctgatcagttcgatgatgtcatggattttattcaagccaccattaaaagactgaaaaggtcaccagataaacaaatggcagtgcttcctagaagagagcggaatcggcaggctgcagctgccaacccagagaattccagaggaaaaggtcggagaggccagaggggcaaaaaccggggttgtgtcttaactgcaatacatttaaatgtcactgacttgggtctgggctatgaaaccaaggaggaactgatttttaggtactgcagcggctcttgcgatgcagctgagacaacgtacgacaaaatattgaaaaacttatccagaaatagaaggctggtgagtgacaaagtagggcaggcatgttgcagacccatcgcctttgatgatgacctgtcgtttttagatgataacctggtttaccatattctaagaaagcattccgctaaaaggtgtggatgtatctga

SEQ ID NO: 137130 - DNA, 3638 bp, Homo sapiens
  Payload ID: 6846
  Gene Symbol: GDNF
  Gene Name: glial cell derived neurotrophic factor
  Uniprot ID: P39905
  ENST ID: ENST00000620847
  CDS Start-End: 185-664
gtgccgccgccggacgggactttaagatgaagttatgggatgtcgtggctgtctgcctggtgctgctccacaccgcgtccgccttcccgctgcccgccgggcacaggaagatgacttgatgatttaagagaagattgatgacggtcatttcaaatgtagccgagacattcagccaagagcaaatatgccagaggattatcctgatcagttcgatgatgtcatggattttattcaagccaccattaaaagactgaaaaggtcaccagataaacaaatggcagtgcttcctagaagagagcggaatcggcaggctgcagctgccaacccagagaattccagaggaaaaggtcggagaggccagaggggcaaaaaccggggttgtgtcttaactgcaatacatttaaatgtcactgacttgggtctgggctatgaaaccaaggaggaactgatttttaggtactgcagcggctcttgcgatgcagctgagacaacgtacgacaaaatattgaaaaacttatccagaaatagaaggctggtgagtgacaaagtagggcaggcatgttgcagacccatcgcctttgatgatgacctgtcgtttttagatgataacctggtttaccatattctaagaaagcattccgctaaaaggtgtggatgtatctgactccggctccagagactgctgtgtattgcattcctgctacagtgcaaagaaagggaccaaggttcccaggaaatgtttgcccagaatggaagatgaggaccaaggaggcggaggaggaggaagaagaagaggaggaggaggaggaggaggaggaggaggaggaaggcagccatcatgggagcctggtagagggagatccagctacagacaactggacaggagagagagaaaacagccctctggattctccaggatggcagccgatgtcactagaagctcagggctgatgttcctggttggctattgccaccatttcagctgatacagtccaccatcactgattaccggcgcggttgcggtggatgcacttgaaccaaaccagtgtatctcctgtgatttgttttcatgtgtccgaagacaccagggaaacagagatcctggtgttgttccttgttattacgttttactgctgaaagtaagaggtttatttttctgtcactcagtggagacataccctggaaaggagaggggaaaaaaaaagcaaagatacaagagataatcacctttgcatttgaaagttgaggcccgaggtttactacaaccagcatttttgccaacggttggtgattgatttccatcacggtgtgtggggtgggaagaagttggctaggaaccaaaaaggctgtgctcatgattaaacacaaacctgaaggtatttcctttatgtccttggaaacaggaaacgagttgtggttttcgccagcattcttgtaggagagaatcggggaaggccccgaactgcccccgggcagggagagcccctcaggcctgttggtttacagagagacagatgttacataaccagctccgttgatgcgtggtcaccagtgaccagagaagctactcgatgcaatgcatctgtttcagatacagaaatatagagaagatatttattgaaatttaagttattgttatttattaccgttcactaatgaatttctcttttttcccttatttattaaagtttcttttcaaaggtgccaaagtatatgtgctcgcaaaatgcaaagaaaggtgacaaaaggaaatttgaattgggaacaagggtccatgcttttcaaagtattaaaaagttttttgccaggcaaaaatcacttactttacctttttaagaaaatttgtcattaattttccccagatttcagcatttttcccaatttttatttgtggagcatctcaggcaagccccctttcctggagcagcgtgcagagaccactggcacttgactttatttcttccttgctccattgctgaacagaaatgtcgtgggctccacttcctgttgtctttaagctcttagtcccctccacgtatacctatctgtactatgcataaccatatgtagaaaaggttcagttccttttagtaggtagtcctggatttaatgctgacctaaaagtaatgtcgacaatgctgtcaggtagctgccgttctaccgactccctccatccctgcccacccactgccctcccgagaatatgctggctgcccagtgcagcccgggagacacaggggccttccagaggtagggtctaccaggtcctgtacaacccctgggctgtcaccgggggtcaacagctgctgctcctatatacccaaacacctgacagctccctggggagcagatggctgagaagggtgctgaggaagccatattgggaccagccacagccacacacatggagcctcatacttaggagcgtgctgcctttaaatgaaggtggtcggggccagtgcagcggctcacacccataatcccaacactttggaaagccaaggtgggaggatctcttgaacccaggagtttgagaccagcttgggcaacatagggagaccctgtctctacagaaactttaaaaattaggcaggcatgatggtgcacacctgtggtcccagctactcaagaggctgaaggaggatcacttgagtccagaaggtcgaggctgcagtgagctgtgatcatgccactgcactccagcctaagtgacagtgcggtaccctgtctcaaaaaaaaaaaaaaaaaaaaaaagaggttggagcaggaggaagcataggggcgggaacagccacctcctccatgccctagattgtgaatttatcgggcagccaacacatgtatgacacactaggccctgtattacagcttgttacgcatttcataaaagggattttcattaaggagataatctattactacctaccttagtggctactagtataaaactatgacagatttagcaattaaatgaaatactggcctccatcaaataatcatagtaacaagaagcagcagttaccagacatctgatccccttcccccaaaatacccaaattcttcatggttctgcccttctctgtcctttctgctccccttgctcgcctgggaaatggaggaaaggccttccctctcacactgtcttgggatcttgctgagaattcagactgctcgaaacagtgacaaaccccagccatccagtcattcgtggagcacaatttggatgtggccccaggggcatctgtcccattcagagaaccttggcagtgcgatggccactgttcccaggcttcaacctcagtgaccccccccaacaactccccatggagagtccctgcccaaaaaagctgtaggatccaaggggtgtcaatagctcgttcccggcatcacctacacaccacaagcaggttttaatggaagcaagttgctccaccaaatccacaaaagggtaaagtttgtgatttttctttatcattgcgatcaccatctgataccgtaaggagtgcacttgtttggaagttctgacttctctgatctgtcttggtcgtttgtgttataaaaccaaagttctctacagactttatttttgtacaatatcattttgtaactttttacaaataaaaactcatttctattgc

SEQ ID NO: 137131 - DNA, 2765 bp, Homo sapiens
  Payload ID: 6847
  Gene Symbol: GCM1
  Gene Name: glial cells missing homolog 1 (Drosophila)
  Uniprot ID: Q9NP62
  ENST ID: ENST00000259803
  CDS Start-End: 213-1523
gagcctgctgggacttgaaccagcagtaagattttcacgacacagtgctgtctgcttctccgtaagaagttagaagccctagaaaacaatctcctggtccaaggtgcttgagtgggccgatccagctatatcaagaacctttgagaacaaaattctcaagcatttctgaggggagtcgaataggtgaaaaccttggctggcctgaccttatcatggaacctgacgactttgattctgaagacaaagagatattaagctgggatattaatgatgtgaaactgccacagaacgtgaaaaaaaccgactggttccaggagtggccagattcctatgccaaacacatctacagctcggaggacaagaatgcgcagcggcacctgagcagctgggccatgcgcaataccaacaaccacaactcccgcatcctcaagaagtcctgcctgggtgtggtggtgtgcggccgcgactgtctcgcagaggaggggcgcaagatctacctgagacctgccatctgtgacaaggcccggcagaagcagcagcggaaacgctgtcccaactgtgacgggcctctgaagctcatcccttgccgaggtcatgggggcttcccggtcaccaacttctggaggcacgacggacgctttatatttttccagtcaaagggagagcatgatcatccaaaaccagaaaccaagttagaagctgaggcaagaagagccatgaagaaagtgaacacagcaccttcctccgtctcattgagcctgaaggggagcacagagaccaggtctcttccaggtgaaacacaaagtcaggggagtttacctttaacttggtctttccaggaaggcgtccaattgcctggtagttacagtggacatttaatagctaacactcctcagcagaactcactaaatgattgcttttccttctccaagagttatggtctgggaggaatcacagatctgactgaccagacttccactgtggaccccatgaagctctatgaaaagcgcaaattgtccagtagcagaacctacagtagtggagacctgcttcctccttctgcctccggagtctactctgatcatggcgatctacaagcgtggagtaaaaatgctgctttggggagaaatcatcttgctgacaactgttattccaattatccttttcctctgaccagctggccttgcagcttctctccttcccaaaactcttcagaacccttttaccagcagcttccattggagccacctgcagccaaaactggctgtcccccattatggccaaatccagcgggtaatctttatgaagagaaagtacatgtggattttaacagctacgtccagtctcctgcataccattcacctcaagaagacccctttctcttcacctacgcctctcatcctcatcagcaatattcactgccaagcaagagcagcaaatgggattttgaggaagaaatgacatacttgggtttggatcactgcaacaatgatatgcttctgaacctgtgtcctttgagatgacccaaatctttcactatgtgcaccccagcccctcaaaaatggggaagggctgaaagaatttccttaggaaataatttttaaaacataaccacagataaatgagaatcatgataagcagtagacaaggcttttttctttttcttttttccttctttttttttttttttttttttttttgagacagagtcttgctcttttgcccaggcaggaatgcagtggcgccatctcggctcactgcaacctctgcctcccgggtttgagtgattctcctgcgtcagcctcccgagtagctgggattacaggcacctgccactgcgcctggctaatttttctatttttagtagagacagggttttgccatgttggtcaggctgctctcaaactcctgatctcaagtgatctgcccacctcaccatcccaaagtgctgggattacaggcgtgagccattgtgcccggctgacaaggcttttttcttcacatgagtaatttttttggcttcttctcctccactctagtatttccaccctcagtaaggaatggaaacctgtcccgtctggggtgtgaagtgccctctgctttttcccccacattgtttggggttcccagcacctcagccacattgcatgctgggttttcattgtcattgttgcaaatgaaatggagtagacatgtgaaatgctaacctatctaggacctgatctatgccttcttgggaactgagaatgaagaaacagaaatagatggtggaagaactgcctaaggtgtgaaaagctgaagattctaccactgaagtactgaatatgttgtctagttgtgagactagtgtgtaaaatatatgttttctagatgatttctgagacttgtgatgacaaggaacctgacctaaccccatttttcataaagacaaagaacagcaatgttaaattgccatatgaagagaaacactagtgatgtgcgtggtctccttgcctcttgtttccttccctcttcctcactgacttccccttgcacaggggcttctgttttatcccatttattatttgtggcacctatatcaatgtggggtttgtaataggtgagaaatatttgcttggagaagctcttgtgcaattagcctggcaatgattggccggccatgtttgaatgccagtttctcttctttgctgaagtactttatgataaaagtaagcctagacataaaatctggagagaaccatgcaataaacaagtatttttgaaat

SEQ ID NO: 137132 - DNA, 2441 bp, Homo sapiens
  Payload ID: 6848
  Gene Symbol: GCM2
  Gene Name: glial cells missing homolog 2 (Drosophila)
  Uniprot ID: O75603
  ENST ID: ENST00000379491
  CDS Start-End: 149-1669
cctctctctctttctctctctctgcacctccccttcacacaccccactttcttctttaaagagaagaaaaaaaacccacctggcgcacctgtccttttttcttctatttttcagaaccctgggcggaaagcgcgagcgagttgggcagatgccggcggccgcggtgcaggaagcggtcggcgtgtgctcctacgggatgcagctcagctgggacatcaacgatccgcagatgcctcaggagctggccctctttgaccaattccgagagtggcctgacggctatgtgcgcttcatctacagcagcgatgagaagaaggcacagcgtcacctgagcggctgggccatgcgcaacaccaacaaccacaatggccacatcctcaagaagtcgtgcctgggtgtggtggtgtgtacacaggcctgcaccctgcccgacggttcccgcctgcagctgaggccggccatctgcgacaaggcacggctgaaacagcagaagaaggcatgccctaactgtcattctgctttggagttgattccttgtcgagggcacagcggataccccgtaaccaacttttggcggcttgatggcaacgcgatcttttttcaggccaagggagttcatgatcatccaagaccagagagcaaatcagagacagaagctagaagaagcgccatcaagagacaaatggcctctttctaccaaccccagaaaaagagaattcgagaatccgaggcagaagaaaatcaagacagcagtggtcatttcagcaacatacctcccttggaaaatccagaagactttgatatagttactgaaaccagcttccctattccagggcagccttgcccttccttcccaaagtctgatgtttacaaagctacctgtgacctagccacctttcaaggagacaaaatgccacccttccagaaatactcaagcccaagaatctatttgcctaggccaccttgcagctatgaattggcaaaccctggttatacaaattcaagcccatatcccaccctttataaggattccaccagtatccctaatgacacagactgggttcatctgaacacactacaatgtaatgtcaattcatacagcagctatgagagaagctttgatttcaccaacaaacagcatggctggaaaccagctcttggaaaacccagccttgtggaaaggactaaccatgggcagtttcaggccatggccactcgcccttattataacccagagcttccctgcaggtacctcacgactccaccaccaggtgcccctgccctacaaaccgtgatcaccaccaccactaaagtgtcctaccaggcctaccagccccctgctatgaaatacagtgacagtgtgcgagaggtgaagagcctttcgagctgtaactatgctcctgaagatactgggatgtctgtctatccagaaccctggggtcctccggtgacagtcaccagggcagcctctccttcagggccacctcctatgaaaattgcaggagattgccgggccatcagacccactgtggctattccccacgagccagtttcctctaggacagatgaagcagagacttgggatgtgtgtctgtctgggctgggctccgcagtcagttactcagacagagtgggtcccttctttacctacaacaatgaggatttttgaaagacaatccaggggacataatagcagtgtgcatgcaggcaggaggcagggaaatgtgaaatggcaatgatctcttattgagttgggagattcaccttgtgtgcaaagaaacacagatagtagtaaaaattctgagtaactgagaaaataatcagttggaaatgattagataatatgggaaatttcacacagcattttgaaactggctacaatacatagaagtagtgaggaaagtgtgagtctctcaaatgaacaaataagcaaactgtaggaggttaaatactgacctaagttcacttagcttattagcaggagtagaagtcaaggattctggttcttattctaggacttttcccattagagcaccttagggaatttcacatccctagaggctgccaaaatagcttcaggaagaaatttttacaatcttatcacctgagtcatttcatgaaatttttgtttagcatttagaacctgttaaactagcttcaggaagtaattttgattgttttatctccaacgtgtgtatctacagcttttcaaaaaatctctagcaatggtaaagttcagttgtttttaaaagattcaatattagcttttcataacatgatagtttcctaaccttttcataaccttttcataacatgatagtttccataacagagacagcctaacaatgatgagttgtatttaatggattaccattgtactaaatacattttttttctgattaggtttcagaattataattaaaatgttttgctgaaataca

SEQ ID NO: 137133 - DNA, 3086 bp, Homo sapiens
  Payload ID: 6849
  Gene Symbol: GFAP
  Gene Name: glial fibrillary acidic protein
  Uniprot ID: P14136
  ENST ID: ENST00000253408
  CDS Start-End: 67-1365
atcgccagtctagcccactccttcataaagccctcgcatcccaggagcgagcagagccagagcaggatggagaggagacgcatcacctccgctgctcgccgctcctacgtctcctcaggggagatgatggtggggggcctggctcctggccgccgtctgggtcctggcacccgcctctccctggctcgaatgccccctccactcccgacccgggtggatttctccctggctggggcactcaatgctggcttcaaggagacccgggccagtgagcgggcagagatgatggagctcaatgaccgctttgccagctacatcgagaaggttcgcttcctggaacagcaaaacaaggcgctggctgctgagctgaaccagctgcgggccaaggagcccaccaagctggcagacgtctaccaggctgagctgcgagagctgcggctgcggctcgatcaactcaccgccaacagcgcccggctggaggttgagagggacaatctggcacaggacctggccactgtgaggcagaagctccaggatgaaaccaacctgaggctggaagccgagaacaacctggctgcctatagacaggaagcagatgaagccaccctggcccgtctggatctggagaggaagattgagtcgctggaggaggagatccggttcttgaggaagatccacgaggaggaggttcgggaactccaggagcagctggcccgacagcaggtccatgtggagcttgacgtggccaagccagacctcaccgcagccctgaaagagatccgcacgcagtatgaggcaatggcgtccagcaacatgcatgaagccgaagagtggtaccgctccaagtttgcagacctgacagacgctgctgcccgcaacgcggagctgctccgccaggccaagcacgaagccaacgactaccggcgccagttgcagtccttgacctgcgacctggagtctctgcgcggcacgaacgagtccctggagaggcagatgcgcgagcaggaggagcggcacgtgcgggaggcggccagttatcaggaggcgctggcgcggctggaggaagaggggcagagcctcaaggacgagatggcccgccacttgcaggagtaccaggacctgctcaatgtcaagctggccctggacatcgagatcgccacctacaggaagctgctagagggcgaggagaaccggatcaccattcccgtgcagaccttctccaacctgcagattcgagaaaccagcctggacaccaagtctgtgtcagaaggccacctcaagaggaacatcgtggtgaagaccgtggagatgcgggatggagaggtcattaaggagtccaagcaggagcacaaggatgtgatgtgaggcaggacccacctggtggcctctgccccgtctcatgaggggcccgagcagaagcaggatagttgctccgcctctgctggcacatttccccagacctgagctccccaccaccccagctgctcccctccctcctctgtccctaggtcagcttgctgccctaggctccgtcagtatcaggcctgccagacggcacccacccagcacccagcaactccaactaacaagaaactcacccccaaggggcagtctggaggggcatggccagcagcttgcgttagaatgaggaggaaggagagaaggggaggagggcggggggcacctactacatcgccctccacatccctgattcctgttgttatggaaactgttgccagagatggaggttctctcggagtatctgggaactgtgcctttgagtttcctcaggctgctggaggaaaactgagactcagacaggaaagggaaggccccacagacaaggtagccctggccagaggcttgttttgtcttttggtttttatgaggtgggatatccctatgctgcctaggctgaccttgaactcctgggctcaagcagtctacccacctcagcctcctgtgtagctgggattatagattggagccaccatgcccagctcagagggttgttctcctagactgaccctgatcagtctaagatgggtggggacgtcctgccacctggggcagtcacctgcccagatcccagaaggacctcctgagcgatgactcaagtgtctcagtccacctgagctgccatccagggatgccatctgtgggcacgctgtgggcaggtgggagcttgattctcagcacttgggggatctgttgtgtacgtggagagggatgaggtgctgggagggatagaggggggctgcctggcccccagctgtgggtacagagaggtcaagcccaggaggactgccccgtgcagactggaggggacgctggtagagatggaggaggaggcaattgggatggcgctaggcatacaagtaggggttgtgggtgaccagttgcacttggcctctggattgtgggaattaaggaagtgactcatcctcttgaagatgctgaaacaggagagaaaggggatgtatccatgggggcagggcatgactttgtcccatttctaaaggcctcttccttgctgtgtcataccaggccgccccagcctctgagcccctgggactgctgcttcttaaccccagtaagccactgccacacgtctgaccctctccaccccatagtgaccggctgcttttccctaagccaagggcctcttgcggtcccttcttactcacacacaaaatgtacccagtattctaggtagtgccctattttacaattgtaaaactgaggcacgagcaaagtgaagacactggctcatattcctgcagcctggaggccgggtgctcagggctgacacgtccaccccagtgcacccactctgctttgactgagcagactggtgagcagactggtgggatctgtgcccagagatgggactgggagggcccacttcagggttctcctctcccctctaaggccgaagaagggtccttccctctccccaagacttggtgtcctttccctccactccttcctgccacctgctgctgctgctgctgctaatcttcagggcactgctgctgcctttagtcgctgaggaaaaataaagacaaatgctgcgcccttcccca

SEQ ID NO: 137134 - DNA, 1013 bp, Homo sapiens
  Payload ID: 6849
  Gene Symbol: GFAP
  Gene Name: glial fibrillary acidic protein
  ENST ID: ENST00000376990
  CDS Start-End: 15-554
agagccagagcaggatggagaggagacgcatcacctccgctgctcgccgctcctacgtctcctcaggggagatgatggtggggggcctggctcctggccgccgtctgggtcctggcacccgcctctccctggctcgaatgccccctccactcccgacccgggtggatttctccctggctggggcactcaatgctggcttcaaggagacccgggccagtgagcgggcagagatgatggagctcaatgaccgctttgccagctacatcgagaaggttcgcttcctggaacagcaaaacaaggcgctggctgctgagctgaaccagctgcgggccaaggagcccaccaagctggcagacgtctaccaggctgagctgcgagagctgcggctgcggctcgatcaactcaccgccaacagcgcccggctggaggttgagagggacaatctggcacaggacctggccactgtgaggcagaagaagcagatgaagccaccctggcccgtctggatctggagaggaagattgagtcgctggaggaggagatccggttcttgaggaagatccacgaggaggaggttcgggaactccaggagcagctggcccgacagcaggtccatgtggagcttgacgtggccaagccagacctcaccgcagccctgaaagagatccgcacgcagtatgaggcaatggcgtccagcaacatgcatgaagccgaagagtggtaccgctccaagtttgcagacctgacagacgctgctgcccgcaacgcggagctgctccgccaggccaagcacgaagccaacgactaccggcgccagttgcagtccttgacctgcgacctggagtctctgcgcggcacgaacgagtccctggagaggcagatgcgcgagcaggaggagcggcacgtgcgggaggcggccagttatcaggaggcgctggcgcggctggaggaagaggggcagagcctcaaggacgagatggcccgccacttgcaggagtaccaggacctgctca

SEQ ID NO: 137135 - DNA, 1773 bp, Homo sapiens
  Payload ID: 6849
  Gene Symbol: GFAP
  Gene Name: glial fibrillary acidic protein
  Uniprot ID: P14136
  ENST ID: ENST00000435360
  CDS Start-End: 9-1304
agagcaggatggagaggagacgcatcacctccgctgctcgccgctcctacgtctcctcaggggagatgatggtggggggcctggctcctggccgccgtctgggtcctggcacccgcctctccctggctcgaatgccccctccactcccgacccgggtggatttctccctggctggggcactcaatgctggcttcaaggagacccgggccagtgagcgggcagagatgatggagctcaatgaccgctttgccagctacatcgagaaggttcgcttcctggaacagcaaaacaaggcgctggctgctgagctgaaccagctgcgggccaaggagcccaccaagctggcagacgtctaccaggctgagctgcgagagctgcggctgcggctcgatcaactcaccgccaacagcgcccggctggaggttgagagggacaatctggcacaggacctggccactgtgaggcagaagctccaggatgaaaccaacctgaggctggaagccgagaacaacctggctgcctatagacaggaagcagatgaagccaccctggcccgtctggatctggagaggaagattgagtcgctggaggaggagatccggttcttgaggaagatccacgaggaggaggttcgggaactccaggagcagctggcccgacagcaggtccatgtggagcttgacgtggccaagccagacctcaccgcagccctgaaagagatccgcacgcagtatgaggcaatggcgtccagcaacatgcatgaagccgaagagtggtaccgctccaagtttgcagacctgacagacgctgctgcccgcaacgcggagctgctccgccaggccaagcacgaagccaacgactaccggcgccagttgcagtccttgacctgcgacctggagtctctgcgcggcacgaacgagtccctggagaggcagatgcgcgagcaggaggagcggcacgtgcgggaggcggccagttatcaggaggcgctggcgcggctggaggaagaggggcagagcctcaaggacgagatggcccgccacttgcaggagtaccaggacctgctcaatgtcaagctggccctggacatcgagatcgccacctacaggaagctgctagagggcgaggagaaccggatcaccattcccgtgcagaccttctccaacctgcagattcgagggggcaaaagcaccaaagacggggaaaatcacaaggtcacaagatatctcaaaagcctcacaatacgagttataccaatacaggctcaccagattgtaaatggaacgccgccggctcgcggttagctgcctgcctctcagacacggcgctttgcccagcttgacagggagtgagcctcacccaccccatcctcccaatccccctgagttccctcttcccaggcttcccctaaagggcctggactgcgtcattttcccaggaactgcagtgcccagcccaggacgtggtacagagtaactgtacattaaactggcagagcttgttagtggtaaaggtggtgagtccttgggtgcgcagtggagctgctctggggcctctgagcaagcagcagcctctgtctcacctcttcctgtcactgggagggccccttgggtctcgctgtgcctggacgccaggctctctgctttattctttcatccctgaggctccatcgctcagctcagtgctgactcagttcagaggattcttccctcaggaccgcagctcttgcagtgaataaagttttatgttccctgctcttaatgttaaatatta

SEQ ID NO: 137136 - DNA, 524 bp, Homo sapiens
  Payload ID: 6849
  Gene Symbol: GFAP
  Gene Name: glial fibrillary acidic protein
  ENST ID: ENST00000586127
  CDS Start-End: 489-524
gtgtgtgtgtgcaacagtgagtgtatgcttgtggatgcgcctgtgtgagcagaagcaggtgcaccaaccctgataaggcaccttagtaatgagttaaggcaaaagcccacatctgctcatcctccagacaagtcctctgtctaaggccccccaacccttaatcctcctgctgctctactggtcctgggtgggggtggtctctgtgacagctgcctcaagggagactgaggcaggtattcaagtgtcctcagaagagcctggacccaggaatgtgtccccccactccaggctccaggatgaaaccaacctgaggctggaagccgagaacaacctggctgcctatagacaggaagcagatgaagccaccctggcccgtctggatctggagaggaagattgagtcgctggaggaggagatccggttcttgaggaagatccacgaggaggaggttcgggaactccaggagcagctggcccgacagcaggtccatgtggagcttgacgtggccaagccagacctcaccg

SEQ ID NO: 137137 - DNA, 580 bp, Homo sapiens
  Payload ID: 6849
  Gene Symbol: GFAP
  Gene Name: glial fibrillary acidic protein
  ENST ID: ENST00000585728
  CDS Start-End: 15-200
agagccagagcaggatggagaggagacgcatcacctccgctgctcgccgctcctacgtctcctcaggggagatgatggtggggggcctggctcctggccgccgtctgggtcctggcacccgcctctccctggctcgaatgccccctccactcccgacccgggtggatttctccctggctggggcactcaatgctggctgagctgcgagagctgcggctgcggctcgatcaactcaccgccaacagcgcccggctggaggttgagagggacaatctggcacaggacctggccactgtgaggcagaagctccaggatgaaaccaacctgaggctggaagccgagaacaacctggctgcctatagacaggaagcagatgaagccaccctggcccgtctggatctggagaggaagattgagtcgctggaggaggagatccggttcttgaggaagatccacgaggaggaggttcgggaactccaggagcagctggcccgacagcaggtccatgtggagcttgacgtggccaagccagacctcaccgcagccctgaaagagatccgcacgcagtatgaggcaatgg

SEQ ID NO: 137138 - DNA, 762 bp, Homo sapiens
  Payload ID: 6849
  Gene Symbol: GFAP
  Gene Name: glial fibrillary acidic protein
  ENST ID: ENST00000592320
  CDS Start-End: 19-762
gagcagagccagagcaggatggagaggagacgcatcacctccgctgctcgccgctcctacgtctcctcaggggagatgatggtggggggcctggctcctggccgccgtctgggtcctggcacccgcctctccctggctcgaatgccccctccactcccgacccgggtggatttctccctggctggggcactcaatgctggcttcaaggagacccgggccagtgagcgggcagagatgatggagctcaatgaccgctttgccagctacatcgagaaggttcgcttcctggaacagcaaaacaaggcgctggctgctgagctgaaccagctgcgggccaaggagcccaccaagctggcagacgtctaccaggctgagctgcgagagctgcggctgcggctcgatcaactcaccgccaacagcgcccggctggaggttgagagggacaatctggcacaggacctggccactgtgaggcagaagctccaggatgaaaccaacctgaggctggaagccgagaacaacctggctgcctatagacaggaagcagatgaagccaccctggcccgtctggatctggagaggaagattgagtcgctggaggaggagatccggttcttgaggaagatccacgaggaggagtaccaggacctgctcaatgtcaagctggccctggacatcgagatcgccacctacaggaagctgctagagggcgaggagaaccggatcaccattcccgtgcagaccttctccaacctgcagatt

SEQ ID NO: 137139 - DNA, 578 bp, Homo sapiens
  Payload ID: 6849
  Gene Symbol: GFAP
  Gene Name: glial fibrillary acidic protein
  ENST ID: ENST00000588957
  CDS Start-End: 407-578
aaacacagctcactgcagcctcaacctactgggctcaagcaatcctccagcctcagcctcccaaagtgctgggattacaagcatgagccaccccactcagccctttccttcctttttaattgatgcataataattgctccaggatgaaaccaacctgaggctggaagccgagaacaacctggctgcctatagacaggaagcagatgaagccaccctggcccgtctggatctggagaggaagattgagtcgctggaggaggagatccggttcttgaggaagatccacgaggaggaggttcgggaactccaggagcagctggcccgacagcaggtccatgtggagcttgacgtggccaagccagacctcaccgcagccctgaaagagatccgcacgcagtatgaggcaatggcgtccagcaacatgcatgaagccgaagagtggtaccgctccaagtttgcagacctgacagacgctgctgcccgcaacgcggagctgctccgccaggccaagcacgaagccaacgactaccggcgccagttgcagtccttgacctgcgacctggagtctctgcgcggca

SEQ ID NO: 137140 - DNA, 571 bp, Homo sapiens
  Payload ID: 6849
  Gene Symbol: GFAP
  Gene Name: glial fibrillary acidic protein
  ENST ID: ENST00000587997
  CDS Start-End: 1-571
cacagagattgcaactgagagagggagagacagagacagagaagctgagactgagagagacactcagagagaggagagaaacagagattggcaggaggttcgggaactccaggagcagctggcccgacagcaggtccatgtggagcttgacgtggccaagccagacctcaccgcagccctgaaagagatccgcacgcagtatgaggcaatggcgtccagcaacatgcatgaagccgaagagtggtaccgctccaagtttgcagacctgacagacgctgctgcccgcaacgcggagctgctccgccaggccaagcacgaagccaacgactaccggcgccagttgcagtccttgacctgcgacctggagtctctgcgcggcacgaacgagtccctggagaggcagatgcgcgagcaggaggagcggcacgtgcgggaggcggccagttatcaggaggcgctggcgcggctggaggaagaggggcagagcctcaaggacgagatggcccgccacttgcaggagtaccaggacctgctcaatgtcaagctggccctggacatcgagatcgccacc

SEQ ID NO: 137141 - DNA, 787 bp, Homo sapiens
  Payload ID: 6849
  Gene Symbol: GFAP
  Gene Name: glial fibrillary acidic protein
  ENST ID: ENST00000588316
  CDS Start-End: 3-787
ggatggagaggagacgcatcacctccgctgctcgccgctcctacgtctcctcaggggagatgatggtggggggcctggctcctggccgccgtctgggtcctggcacccgcctctccctggctcgaatgccccctccactcccgacccgggtggatttctccctggctggggcactcaatgctggcttcaaggagacccgggccagtgagcgggcagagatgatggagctcaatgaccgctttgccagctacatcgagaaggttcgcttcctggaacagcaaaacaaggcgctggctgctgagctgaaccagctgcgggccaaggagcccaccaagctggcagacgtctaccaggctgagctgcgagagctgcggctgcggctcgatcaactcaccgccaacagcgcccggctggaggttgagagggacaatctggcacaggacctggccactgtgaggcagaagctccaggatgaaaccaacctgaggctggaagccgagaacaacctggctgcctatagacaggaggttcgggaactccaggagcagctggcccgacagcaggtccatgtggagcttgacgtggccaagccagacctcaccgcagccctgaaagagatccgcacgcagtatgaggcaatggcgtccagcaacatgcatgaagccgaagagtggtaccgctccaagtttgcagacctgacagacgctgctgcccgcaacgcggagctgctccgccaggccaagcacgaagccaacgactaccggcgccagttgcagtccttgacctg

SEQ ID NO: 137142 - DNA, 585 bp, Homo sapiens
  Payload ID: 6849
  Gene Symbol: GFAP
  Gene Name: glial fibrillary acidic protein
  ENST ID: ENST00000588037
  CDS Start-End: 18-585
agcagagccagagcaggatggagaggagacgcatcacctccgctgctcgccgctcctacgtctcctcaggggagatgatggtggggggcctggctcctggccgccgtctgggtcctggcacccgcctctccctggctcgaatgccccctccactcccgacccgggtggatttctccctggctggggcactcaatgctggcttcaaggagacccgggccagtgagcgggcagagatgatggagctcaatgaccgctttgccagctacatcgagaaggttcgcttcctggaacagcaaaacaaggcgctggctgctgagctgaaccagctgcgggccaaggagcccaccaagctggcagacgtctaccaggctgagctgcgagagctgcggctgcggctcgatcaactcaccgccaacagcgcccggctggaggttgagagggacaatctggcacaggacctggccactgtgaggcagaagaatgtgtccccccactccaggctccaggatgaaaccaacctgaggctggaagccgagaacaacctggctgcctatagacaggaagcagatgaagccaccctggccc

SEQ ID NO: 137143 - DNA, 564 bp, Homo sapiens
  Payload ID: 6849
  Gene Symbol: GFAP
  Gene Name: glial fibrillary acidic protein
  ENST ID: ENST00000588735
  CDS Start-End: 15-191
agagccagagcaggatggagaggagacgcatcacctccgctgctcgccgctcctacgtctcctcaggggagatgatggtggggggcctggctcctggccacctcaagaggaacatcgtggtgaagaccgtggagatgcgggatggagaggtcattaaggagtccaagcaggagcacaaggatgtgatgtgaggcaggacccacctggtggcctctgccccgtctcatgaggggcccgagcagaagcaggatagttgctccgcctctgctggcacatttccccagacctgagctccccaccaccccagctgctcccctccctcctctgtccctaggtcagcttgctgccctaggctccgtcagtatcaggcctgccagacggcacccacccagcacccagcaactccaactaacaagaaactcacccccaaggggcagtctggaggggcatggccagcagcttgcgttagaatgaggaggaaggagagaaggggaggagggcggggggcacctactacatcgccctccacatccctgattcctgttgttatggaaactgttgcca

SEQ ID NO: 137144 - DNA, 370 bp, Homo sapiens
  Payload ID: 6849
  Gene Symbol: GFAP
  Gene Name: glial fibrillary acidic protein
  ENST ID: ENST00000593179
  CDS Start-End: 345-370
agcacagccccctaggggctgcccttgctgtgtggcgccaccggcggtggagaacaaggctctattcagcctgtgcccaggaaaggggatcaggggatgcccaggcatggacagtgggtggcagggggggagaggagggctgtctgcttcccagaagtccaaggacacaaatgggctggagtggcgcaaacacagctcactgcagcctcaacctactgggctcaagcaatcctccagcctcagcctcccaaagtgctgggattacaagcatgagccaccccactcagccctttccttcctttttaattgatgcataataattgagcgagcagagccagagcaggatggagaggagacgcatcacctccgc

SEQ ID NO: 137145 - DNA, 193 bp, Homo sapiens
  Payload ID: 6849
  Gene Symbol: GFAP
  Gene Name: glial fibrillary acidic protein
  ENST ID: ENST00000586125
  CDS Start-End: 1-193
ttctccaacctgcagattcgagggggcaaaagcaccaaagacggggaaaatcacaaggtcacaagatatctcaaaagcctcacaatacgagttataccaatacaggctcaccagattgtaaatggaacgccgccggctcgcgaaaccagcctggacaccaagtctgtgtcagaaggccacctcaagaggaaca

SEQ ID NO: 137146 - DNA, 537 bp, Homo sapiens
  Payload ID: 6849
  Gene Symbol: GFAP
  Gene Name: glial fibrillary acidic protein
  ENST ID: ENST00000591880
  CDS Start-End: 1-306
attcccgtgcagaccttctccaacctgcagattcgagaaaccagcctggacaccaagtctgtgtcagaaggccacctcaagaggaacatcgtggtgaagaccgtggagatgcgggatggagaggtaaggagggatttgggcccagtcaggctctggctggccccagggattctcaaggccaggccatggaggaaagcctggggctggcacatagaaggttcccagcaactcccagtagctccccagggaattctggaggagagcaaggaaactgaatgtaattccgtttcctcagtccctccataggctgttctaaggggagccttggtaccaaagccactagatgggatcctaatacacactctctctttctcaccctcaaactcgggggccttgcttgccagggagagaaagagaattaaagttagtagctttcacttccaactctagcagacacagttggggatggggagggctttccatttccagcttggtaaaaggaaactaccaggggaatgggaagaggggatttggcgt

SEQ ID NO: 137147 - DNA, 1445 bp, Homo sapiens
  Payload ID: 6849
  Gene Symbol: GFAP
  Gene Name: glial fibrillary acidic protein
  Uniprot ID: P14136
  ENST ID: ENST00000586793
  CDS Start-End: 9-1325
agagcaggatggagaggagacgcatcacctccgctgctcgccgctcctacgtctcctcaggggagatgatggtggggggcctggctcctggccgccgtctgggtcctggcacccgcctctccctggctcgaatgccccctccactcccgacccgggtggatttctccctggctggggcactcaatgctggcttcaaggagacccgggccagtgagcgggcagagatgatggagctcaatgaccgctttgccagctacatcgagaaggttcgcttcctggaacagcaaaacaaggcgctggctgctgagctgaaccagctgcgggccaaggagcccaccaagctggcagacgtctaccaggctgagctgcgagagctgcggctgcggctcgatcaactcaccgccaacagcgcccggctggaggttgagagggacaatctggcacaggacctggccactgtgaggcagaagctccaggatgaaaccaacctgaggctggaagccgagaacaacctggctgcctatagacaggaagcagatgaagccaccctggcccgtctggatctggagaggaagattgagtcgctggaggaggagatccggttcttgaggaagatccacgaggaggaggttcgggaactccaggagcagctggcccgacagcaggtccatgtggagcttgacgtggccaagccagacctcaccgcagccctgaaagagatccgcacgcagtatgaggcaatggcgtccagcaacatgcatgaagccgaagagtggtaccgctccaagtttgcagacctgacagacgctgctgcccgcaacgcggagctgctccgccaggccaagcacgaagccaacgactaccggcgccagttgcagtccttgacctgcgacctggagtctctgcgcggcacgaacgagtccctggagaggcagatgcgcgagcaggaggagcggcacgtgcgggaggcggccagttatcaggaggcgctggcgcggctggaggaagaggggcagagcctcaaggacgagatggcccgccacttgcaggagtaccaggacctgctcaatgtcaagctggccctggacatcgagatcgccacctacaggaagctgctagagggcgaggagaaccggatcaccattcccgtgcagaccttctccaacctgcagattcgaggtcagtacagcagggcctcgtgggaagggcactggagtcctgccccctcctccagggcctgtaggttgctccagactgggactgaggatcagggcaaagggatccagctctccctgggggccttcgtgacactgcagcgctcctagccagagcctatcataccagggtacttctaggtggggcttgcagctgcccctgtcctgctaggccctggtccctcttcccctccctgcaccccattcgacagcagaactgggtgagagctt

SEQ ID NO: 137148 - DNA, 1999 bp, Homo sapiens
  Payload ID: 6850
  Gene Symbol: GBAS
  Gene Name: glioblastoma amplified sequence
  Uniprot ID: O75323
  ENST ID: ENST00000322090
  CDS Start-End: 30-890
gggcggtgggagccgaggcgccgagcaagatggcggcgcgagtgctgcgcgcccgcggagcggcctgggccggcggcctcctgcagcgggcggccccctgcagcctcctgcccaggctccggacatggacatcttccagcaacagatctcgagaagacagctggctaaaatccttatttgtccggaaagttgatccaagaaaagatgcccactccaatctcctagccaaaaaggaaacaagcaatctatacaaattacagtttcacaatgttaaaccggaatgcctagaagcatacaacaaaatttgtcaagaggtgttgccaaagattcacgaagataaacactacccttgtactttggtggggacttggaacacgtggtatggcgagcaggaccaagctgtccacctctggaggtatgaaggaggctatccagccctcacagaagtcatgaataaactcagagaaaataaggaatttttggaatttcgtaaggcaagaagtgacatgcttctctccaggaagaatcagctcctgttggagttcagtttctggaatgagcctgtgccaagatccggacctaatatatatgaactcaggtcttaccaactccgaccaggaaccatgattgaatggggcaattactgggctcgtgcaatccgcttcagacaggatggtaacgaagccgtcggaggattcttctctcagattgggcagctgtacatggtgcaccatctttgggcttacagggatcttcagaccagggaagacatacggaatgcagcatggcacaaacatggctgggaggaattggtatattacacagttccacttattcaggaaatggaatccagaatcatgatcccactgaagacctcgcccctccagtaaagctgtagagtttctatgtgcctacatacatttctgtgacaagtatttgtcgtaaattaattttaattgtgtatcaagtgaaaaagaaacactgaggttttaagctgctgtatatagcttgtgagaaacctcttttctttaaaatttacataatcacaagaaaggaaagaattacagttggactgattgtgacagtgccttgtcgtcctctttgaaacaccccgtgttgtccagtataccttataacactgagccacttctccccaccctccagaaggggtccacgttgaattctgaatcatcttgaaaataagattccaaccacaaaaaaaatttagccatttctttactaaaaaaaaccaaaaaacaaatctgttttataatcacagatttttagacaaatttcttgtatcaggaagaaatacaaattttgtcatgtttctcaagcagtttttctgagtagtttctgaggaggaacaaattacaagtgtacccaataactgaaaatgttttaactcactctcatttgtaagcagtccacatagtagacaatgggttttccaagctgggcaaggtacatttaatcagtaaatcagtttcacatcatgtattgtgatgtttcaatgtgagacacaaaaacaatggcttgaaacttgtgtatcatatgtgattttgaaatgaacaccttgaatagcactaatttttatttgtggtatttttctataacaaaacaagtagctctaggaaaagaggttttattttgtaaacgatcatttgtgacctcagacactctctggctaatattttaataagctcacagcagataattctgagatcatgggtgaggggtggtgcatgttgagatttaaattggcataaagctgcatactttttgtctagctgtttgatttcattttttaatatagtatgccaattttgtgactgttaccatgtgaaagtcctgttgaaatgaacaattgtctgccccacaatcaagaatgtatgtgtaaagtgtgaataaatctcatatcaaatgtcaaacttttacatgtgaatgattttctcaaagaacatagaaaagtcaataaaatcctcttaatttccacata

SEQ ID NO: 137149 - DNA, 660 bp, Homo sapiens
  Payload ID: 6850
  Gene Symbol: GBAS
  Gene Name: glioblastoma amplified sequence
  ENST ID: ENST00000456204
  CDS Start-End: 5-442
caagatggcggcgcgagtgctgcgcgcccgcggagcggcctgggccggcggcctcctgcagcgggcggccccctgcagcctcctgcccaggctccggacatggacatcttccagcaacagatctcgagaagacagctggctaaaatccttatttgtccggaaagttgatccaagaaaagatgcccactccaatctcctagccaaaaaggaaacaagcaatctatacaaattacagtttcacaatgttaaaccggaatgcctagaagcatacaacaaaatttgcagctccctgtttgcagaacataaagacttaactcctgcctggtttttaggggtcccaataatgggattctgcccaacccatccagttctgggtacaagtactgcctgccttacaatctccattcagtcaagaggtgttgccaaagattcacgaagataaacactacccttgtactttggtggggacttggaacacgtggtatggcgagcaggaccaagctgtccacctctggaggtatgaaggaggctatccagccctcacagaagtcatgaataaactcagagaaaataaggaatttttggaatttcgtaaggcaagaagtgacatgcttctctccaggaagaatcagctcctgttggagttcagtttctggaatg

SEQ ID NO: 137150 - DNA, 818 bp, Homo sapiens
  Payload ID: 6850
  Gene Symbol: GBAS
  Gene Name: glioblastoma amplified sequence
  ENST ID: ENST00000437587
  CDS Start-End: 577-818
ggccacatcctccccgcggcgctggcccggcctgcagggccctgaccggcgcgacccgtggccagggacagggacagcgcgcgcctgaggccgcaggccccggacgccgtctgctgggtcctcgccggaggctgttccaagcctgagtggctgcgtctgccgaggacgttggtgaccctggtctctgaggtgccgggagtagggaataaaagagtaaagcattgtcccgggccagctctccgcggagcgacatggacatcttccagcaacagatctcgagaagacagctggctaaaatccttatttgtccggaaagttgatccaagaaaagatgcccactccaatctcctagccaaaaaggaaacaagcaatctatacaaattacagtttcacaatgttaaaccggaatgcctagaagcatacaacaaaatttgtcaagaggtgttgccaaagattcacgaagataaacactacccttgtactttggtggggacttggaacacgtggtatggcgagcaggaccaagctgtccacctctggaggtatgaaggaggctatccagccctcacagaagtcatgaataaactcagagaaaataaggaatttttggaatttcgtaaggcaagaagtgacatgcttctctccaggaagaatcagctcctgttggagttcagtttctggaatgagcctgtgccaagatccggacctaatatatatgaactcaggtcttaccaactccgaccaggaaccatgattgaatggggcaattactgggctcgtgcaatccgcttcagacaggatggtaacgaagccgtcgg

SEQ ID NO: 137151 - DNA, 662 bp, Homo sapiens
  Payload ID: 6850
  Gene Symbol: GBAS
  Gene Name: glioblastoma amplified sequence
  ENST ID: ENST00000446692
  CDS Start-End: 467-662
ctttaactccgcccacggctaaggagatgcacggcctacgagaggggtagtgtgggactgagccaatgcgtacggcgtgacgccatcccgctgcgaccggcgctccccggggcaggtggctgcatagtcttggcggaggacatggacatcttccagcaacagatctcgagaagacagctggctaaaatccttatttgtccggaaagttgatccaagaaaagatgcccactccaatctcctagccaaaaaggaaacaagcaatctatacaaattacagtttcacaatgttaaaccggaatgcctagaagcatacaacaaaatttgtcaagaggtgttgccaaagattcacgaagataaacactacccttgtactttggtggggacttggaacacgtggtatggcgagcaggaccaagctgtccacctctggaggtatgaaggaggctatccagccctcacagaagtcatgaataaactcagagaaaataaggaatttttggaatttcgtaaggcaagaagtgacatgcttctctccaggaagaatcagctcctgttggagttcagtttctggaatgagcctgtgccaagatccggacctaatatatatgaactcaggtcttaccaactccgaccaggaaccatgattgaatggggcaattact

SEQ ID NO: 137152 - DNA, 1882 bp, Homo sapiens
  Payload ID: 6850
  Gene Symbol: GBAS
  Gene Name: glioblastoma amplified sequence
  Uniprot ID: O75323
  ENST ID: ENST00000446778
  CDS Start-End: 30-773
gggcggtgggagccgaggcgccgagcaagatggcggcgcgagtgctgcgcgcccgcggagcggcctgggccggcggcctcctgcagcgggcggccccctgcagcctcctgcccaggctccggacatggacatcttccagcaacagatctcgagaagacagctggctaaaatccttatttgtccggaaagttgatccaagaaaagatgcccactccaatctcctagccaaaaaggaaacaagcaatctatacaaattacagttcaagaggtgttgccaaagattcacgaagataaacactacccttgtactttggtggggacttggaacacgtggtatggcgagcaggaccaagctggaatttttggaatttcgtaaggcaagaagtgacatgcttctctccaggaagaatcagctcctgttggagttcagtttctggaatgagcctgtgccaagatccggacctaatatatatgaactcaggtcttaccaactccgaccaggaaccatgattgaatggggcaattactgggctcgtgcaatccgcttcagacaggatggtaacgaagccgtcggaggattcttctctcagattgggcagctgtacatggtgcaccatctttgggcttacagggatcttcagaccagggaagacatacggaatgcagcatggcacaaacatggctgggaggaattggtatattacacagttccacttattcaggaaatggaatccagaatcatgatcccactgaagacctcgcccctccagtaaagctgtagagtttctatgtgcctacatacatttctgtgacaagtatttgtcgtaaattaattttaattgtgtatcaagtgaaaaagaaacactgaggttttaagctgctgtatatagcttgtgagaaacctcttttctttaaaatttacataatcacaagaaaggaaagaattacagttggactgattgtgacagtgccttgtcgtcctctttgaaacaccccgtgttgtccagtataccttataacactgagccacttctccccaccctccagaaggggtccacgttgaattctgaatcatcttgaaaataagattccaaccacaaaaaaaatttagccatttctttactaaaaaaaaccaaaaaacaaatctgttttataatcacagatttttagacaaatttcttgtatcaggaagaaatacaaattttgtcatgtttctcaagcagtttttctgagtagtttctgaggaggaacaaattacaagtgtacccaataactgaaaatgttttaactcactctcatttgtaagcagtccacatagtagacaatgggttttccaagctgggcaaggtacatttaatcagtaaatcagtttcacatcatgtattgtgatgtttcaatgtgagacacaaaaacaatggcttgaaacttgtgtatcatatgtgattttgaaatgaacaccttgaatagcactaatttttatttgtggtatttttctataacaaaacaagtagctctaggaaaagaggttttattttgtaaacgatcatttgtgacctcagacactctctggctaatattttaataagctcacagcagataattctgagatcatgggtgaggggtggtgcatgttgagatttaaattggcataaagctgcatactttttgtctagctgtttgatttcattttttaatatagtatgccaattttgtgactgttaccatgtgaaagtcctgttgaaatgaacaattgtctgccccacaatcaagaatgtatgtgtaaagtgtgaataaatctcatatcaaatgtcaaacttttacatgtgaatgattttctcaaagaacatagaaaagtcaataaaatcctcttaatttccacata

SEQ ID NO: 137153 - DNA, 872 bp, Homo sapiens
  Payload ID: 6850
  Gene Symbol: GBAS
  Gene Name: glioblastoma amplified sequence
  ENST ID: ENST00000415967
  CDS Start-End: 1-343
tcaagaggtgttgccaaagattcacgaagataaacactacccttgtactttggtggggacttggaacacgtggtatggcgagcaggaccaagctgtccacctctggaggtatgaaggaggctatccagccctcacagaagtcatgaataaactcagagaaaataaggaatttttggaatttcgtaaggcaagaagtgacatgcttctctccaggaagaatcagctcctgttggagttcagtttctggaatgagcctgtgccaagatccggacctaatatatatgaactcaggtcttaccaactccgaccaggaaccatgattgaatggggcaattactggtaactaagatggtgaccacctcgtctgtacaggcttctgattgttaccaggctaagggctcgtgcaatccgcttcagacaggatggtaacgaagccgtcggaggattcttctctcagattgggcagctgtacatggtgcaccatctttgggcttacagggatcttcagaccagggaagacatacggaatgcagcatggcacaaacatggctgggaggaattggtatattacacagttccacttattcaggaaatggaatccagaatcatgatcccactgaagacctcgcccctccagtaaagctgtagagtttctatgtgcctacatacatttctgtgacaagtatttgtcgtaaattaattttaattgtgtatcaagtgaaaaagaaacactgaggttttaagctgctgtatatagcttgtgagaaacctcttttctttaaaatttacataatcacaagaaaggaaagaattacagttggactgattgtgacagtgccttgtcgtcctctttgaaacaccccgtgttgtcc

SEQ ID NO: 137154 - DNA, 5739 bp, Homo sapiens
  Payload ID: 6851
  Gene Symbol: GLTSCR1
  Gene Name: glioma tumor suppressor candidate region gene 1
  Uniprot ID: Q9NZM4
  ENST ID: ENST00000396720
  CDS Start-End: 195-4877
gcgcggccagagcggccggggacaggctccgaggcaggcccgacccgcctccccggcgccgccgtggctcgacggagaccagctaggctggcccccaagaggaccctttccaagtccccagctgggggccctgtgtagacctggagtggacacgcccctccttcccttcatgattcgtttgtagcgcagtggcgatggatgatgaggatgggagatgcttactagacgtgatttgtgacccacaggccctcaatgacttcttgcatggatccgagaagcttgacagtgatgacctcctggataatcccggggaggcccaaagtgccttctatgaaggtcctgggctccatgtgcaagaagcttccggcaaccacctgaacccagagcccaaccagccggcccccagtgtggacctagacttcctggaagatgacatcctgggctctcctgcgacagggggcggcggcgggggcagtgggggcgctgaccagccctgtgacatcctccagcagagcctccaagaggccaacatcacggagcagacgctggaggccgaggctgagctggacctgggtcccttccagctgcccaccctgcagcctgcggatggcggggcaggcccgacgggcgctggaggggcagcggccgtggctgcggggccccaagccctcttcccaggcagcaccgacctgctggggctgcagggcccgcctaccgtgctgacccaccaggccctggtgccgccccaggacgtggtcaacaaggccctgagtgtgcagcccttcctgcagcctgtgggcctgggcaatgtgacactgcagcccatcccgggcctccaaggcctgcccaatggcagccctgggggtgccacggcggccacactgggcctggcgcccatccaggtggtgggccagcccgtcatggcgctcaacacgcccacctcccagctcctggccaagcaggtgcccgtcagcggctacctggcctcggcggctggcccctcggagcccgtgacgctggcgtcggccggtgtctcgccacagggggctggcctggtcatccagaagaacctctcggccgctgtggccaccacgctcaatgggaactctgtgttcggaggcgcgggggccgcctcggctcccaccgggacgccctcgggacagccgctggcggtggccccaggcctcggctcgtcgccactggtcccggcgcccaacgtgatcctgcatcgcacacccacgcccatccagcccaagcccgcgggggtgctgccgcccaagctctaccagctgacgcccaagccgtttgcgcccgcgggcgccacgctcaccatccagggcgagccgggggcgctcccgcagcagcccaaggccccgcagaacctgacgttcatggcggcggggaaggcgggccagaacgtggtgctgtcgggcttccccgcgcctgcgctgcaagcgaacgtcttcaagcagccaccggccaccaccaccggagcggccccgccgcagccccccggggccctgagcaaacccatgagcgtccacctcctgaaccaaggcagcagcatcgtcatccccgcccagcacatgctgccgggccagaaccagttcctactgcctggcgccccggcggtccagctcccgcagcagctctcagccctgccggccaacgtgggcgggcagatcctggcggccgctgccccccacacaggtggacagctcatcgcgaaccccatcctcacaaaccagaacctggcgggcccactgagcctgggccccgtgttggccccccactccggggcccacagcgcgcacatcctctccgccgctcccatccaggtgggccagcctgcgctcttccagatgcccgtgtcgctggcggcgggcagcctgcccacgcagagccagccagcgcccgccgggccggccgccaccactgtcctccagggggtcaccctgccccccagcgccgtggccatgctcaacacccccgacggcctggtgcagccggccacccctgccgctgccaccggggaggccgcgcctgtcctcacggtgcagcctgccccccaggcgccccccgcggtcagcacacccctgcccctgggcctccagcagccgcaggcgcagcagcccccgcaggcccccaccccacaggccgccgccccgcctcaggccaccaccccccagcccagccctggcctggcgtctagcccggagaagatcgtcctggggcagccgccctctgccacccccacggccatcctcactcaggactccctgcagatgttcctgccccaggagaggagccagcagcccctctccgcagagggcccccacctctccgtgcctgcctcggtcatagtcagcgccccgcctcccgcccaagacccagccccagccacccccgtcgccaaaggagctggcctcggccctcaggcccccgacagccaggcttccccggctccggccccccagatcccggcagcggctccgctgaagggcccaggcccctcttcgtccccgtcactacctcaccaggcccctctgggggacagcccccacctgccctccccacaccccacccggcccccttcccgcccaccctcccggccacagagtgtgtcccgccctccctcagagccacccttgcacccttgccccccaccccaggcccccccaactctgcctggcatctttgtcatccaaaaccagctaggcgttcccccgcctgccagcaacccggcccctactgccccaggcccgccgcagccgcctctccgcccccagtcccagccgcctgagggaccgctgcccccagccccccacctccctccatcctccacctcctctgctgtggcctcctcctctgagacgtcctccaggttgccagcccctacgccatccgacttccagctccagttcccacccagccaggggccccacaagtcccccactccccctccaaccctccacctggtccctgagccggcagcaccccccccaccgcctcctcggaccttccagatggtgaccacccccttcccagcgctgccccagccgaaggctcttctcgagagatttcaccaggtgccgtccggaatcatcctccagaacaaggctgggggggcccctgccgccccgcagacctccaccagcctggggcccctcaccagccccgctgcgtctgtgctggtcagtgggcaggccccatctgggacccccactgcccccagccacgcccccgccccggcacccatggccgccacaggcctccctcctctgcttccagccgagaacaaggcttttgccagcaacctcccgaccctgaatgtggccaaggccgcttcctccgggccagggaagccctccgggctgcagtatgagagcaaactgagtggcctgaagaagccccccacgcttcagcccagcaaggaagcctgtttcctggagcatttgcacaaacaccagggctccgtcctgcaccccgactacaagacggccttcccctcctttgaggacgccctgcatcgcctcctgccctaccatgtctaccagggcgccctcccctcccccagtgactaccacaaagtggacgaggagtttgagacggtctccacgcagctgctgaaacgcacccaggccatgctcaataaatatcggctcctgctcctggaggagtcccggagggtgagcccctcagcggagatggtaatgatcgaccgaatgttcattcaggaggagaagaccacccttgccttggataaacagctggccaaggagaagccggacgagtacgtgtcttcctcccgctcgctcggcctccccatcgcagcctcttccgagggtcatcggcttcccggccacggccccctgtcgtcttcagctcccggggcctccacccagccccctccacacctgcccaccaagcttgtgatccggcacggcggggcaggcggctccccttcggtcacctgggcccgggcgtcctcctccctgtcctcctcttcctcctcctcctctgccgcctcctccttggacgccgacgaggacggccccatgccctcccgcaaccgcccgcccatcaagacctacgaggcccggagccgcatcgggctcaagctcaagatcaagcaggaagccgggctcagcaaggtcgtgcacaacacggccctggaccccgtgcaccagcccccgccaccccccgctaccctcaaggtggccgagcccccgccacggccgccaccaccaccgccgcccacgggccagatgaacggcacggtggaccacccgccgcctgccgcccccgagcgcaagcccctgggcaccgccccgcactgcccgcgcctgccactgcgcaagacctaccgcgagaacgtggggggccctggcgcgccggaggggacgcccgcaggcagggcacggggaggcagcccggcgccgctgcccgccaaagtggacgaggccaccagcgggctcatccgcgagctggcggccgtggaggacgagctgtaccagcgtatgctgaagggccccccgccagagcccgcagccagcgccgcccaaggcaccggggaccccgactgggaggcgcccgggctgccccctgccaagcggcgcaagtccgagtcgcccgacgtggaccaggccagcttctccagcgacagcccgcaggatgacacgctcaccgagcacctgcagagcgccatcgacagcatcctgaacctgcagcaggcccccggccggacgcccgcgccctcgtacccccacgctgcctcggccggcacccccgcatccccgccgcccctgcacaggcccgaggcctacccaccctccagtcacaacggtggcctcggcgccaggacgttgaccagataacaccgggccgcctccccttccccgtcccctcctcccgaagacgccgggacagtcgggtgtccgccctcagcctcctggggactcgagccggggatcccctgacggtttttcttgcctaagttatttgagtcacaaaggcctccttccctgccgcctgcttcagctgggttgctggggggtgggcgtggatttagggagggggctgtgatgtaaaacgtctcccctgccaaaggaggggcaaagtgctgtgtcagttcctgtttcttcccatttcctggcacactctgcccctctgtccgggggacacgcgcatgtgtttgccagggatggggccaccgggttgatgccaacgctccgggtgcctgtcttgtctgtgtggcttctcagatggtggagggtgctgggagctggcagggtccttccagacagtctcagcctctccccgccgcccccaacaggctgtcaaacaaaaccggagagggggtgggggagccagcctcccagcgtgctgtgcccgcaggcacccgtgtgacatccgcacgtccagctccgtgacctgtgtgtgtgtgtgtgtgcacaagtgagtgagagatttcgaacgcccacccctcgactttgaaatctgagcaaaacaagaaactggggtcttcctctcccccgaacctctccccagctagtcttccctctgttcttcctgcctccagccgcccgcgccagattttgaaatctcggagacaaaactagtactgtaagataaatttttttgtactgtatttattgtgtataacgatttttttaaaggagaattctgtacatttagaactcttgtaaattaaaaaccgatcctttttttaaaactgta

SEQ ID NO: 137155 - DNA, 532 bp, Homo sapiens
  Payload ID: 6851
  Gene Symbol: GLTSCR1
  Gene Name: glioma tumor suppressor candidate region gene 1
  ENST ID: ENST00000594866
  CDS Start-End: 154-532
ggggccgtctcggagaccccgcgccgacggctgctcaaacatcaggctggcccccaagaggaccctttccaagtccccagctgggggccctgtgtagacctggagtggacacgcccctccttcccttcatgattcgtttgtagcgcagtggcgatggatgatgaggatgggagatgcttactagacgtgatttgtgacccacaggccctcaatgacttcttgcatggatccgagaagcttgacagtgatgacctcctggataatcccggggaggcccaaagtgccttctatgaaggtcctgggctccatgtgcaagaagcttccggcaaccacctgaacccagagcccaaccagccggcccccagtgtggacctagacttcctggaagatgacatcctgggctctcctgcgacagggggcggcggcgggggcagtgggggcgctgaccagccctgtgacatcctccagcagagcctccaagaggccaacatcacggagcagacgctggaggccgaggctgagctggacctgg

SEQ ID NO: 137156 - DNA, 5697 bp, Homo sapiens
  Payload ID: 6851
  Gene Symbol: GLTSCR1
  Gene Name: glioma tumor suppressor candidate region gene 1
  ENST ID: ENST00000614245
  CDS Start-End: 364-4890
ctcgtagctccactctgcagcctcaaactcctgggctccagtgatcctctcacctcagcctcccaagtagctaagaccacaggcacatgctgccacccctgactaatttttcttttttaaaatttttttctcactgcgttgcccaggctggtctcaaactctttggctcaagccatccatcctcctacctcagcctcccaaagtgctgagattacaagcgtgaaccaccatgccaggagggaatgttctttcttgaacgtggctgccctgtcacctcagcattctttgcggcagctgtggcctaagcgtagccccttgctaacctcagctctttccttcccacctttcccggcctgcagctccatgtgcaaggcttccggcaaccacctgaacccagagcccaaccagccggcccccagtgtggacctagacttcctggaagatgacatcctgggctctcctgcgacagggggcggcggcgggggcagtgggggcgctgaccagccctgtgacatcctccagcagagcctccaagaggccaacatcacggagcagacgctggaggccgaggctgagctggacctgggtcccttccagctgcccaccctgcagcctgcggatggcggggcaggcccgacgggcgctggaggggcagcggccgtggctgcggggccccaagccctcttcccaggcagcaccgacctgctggggctgcagggcccgcctaccgtgctgacccaccaggccctggtgccgccccaggacgtggtcaacaaggccctgagtgtgcagcccttcctgcagcctgtgggcctgggcaatgtgacactgcagcccatcccgggcctccaaggcctgcccaatggcagccctgggggtgccacggcggccacactgggcctggcgcccatccaggtggtgggccagcccgtcatggcgctcaacacgcccacctcccagctcctggccaagcaggtgcccgtcagcggctacctggcctcggcggctggcccctcggagcccgtgacgctggcgtcggccggtgtctcgccacagggggctggcctggtcatccagaagaacctctcggccgctgtggccaccacgctcaatgggaactctgtgttcggaggcgcgggggccgcctcggctcccaccgggacgccctcgggacagccgctggcggtggccccaggcctcggctcgtcgccactggtcccggcgcccaacgtgatcctgcatcgcacacccacgcccatccagcccaagcccgcgggggtgctgccgcccaagctctaccagctgacgcccaagccgtttgcgcccgcgggcgccacgctcaccatccagggcgagccgggggcgctcccgcagcagcccaaggccccgcagaacctgacgttcatggcggcggggaaggcgggccagaacgtggtgctgtcgggcttccccgcgcctgcgctgcaagcgaacgtcttcaagcagccaccggccaccaccaccggagcggccccgccgcagccccccggggccctgagcaaacccatgagcgtccacctcctgaaccaaggcagcagcatcgtcatccccgcccagcacatgctgccgggccagaaccagttcctactgcctggcgccccggcggtccagctcccgcagcagctctcagccctgccggccaacgtgggcgggcagatcctggcggccgctgccccccacacaggtggacagctcatcgcgaaccccatcctcacaaaccagaacctggcgggcccactgagcctgggccccgtgttggccccccactccggggcccacagcgcgcacatcctctccgccgctcccatccaggtgggccagcctgcgctcttccagatgcccgtgtcgctggcggcgggcagcctgcccacgcagagccagccagcgcccgccgggccggccgccaccactgtcctccagggggtcaccctgccccccagcgccgtggccatgctcaacacccccgacggcctggtgcagccggccacccctgccgctgccaccggggaggccgcgcctgtcctcacggtgcagcctgccccccaggcgccccccgcggtcagcacacccctgcccctgggcctccagcagccgcaggcgcagcagcccccgcaggcccccaccccacaggccgccgccccgcctcaggccaccaccccccagcccagccctggcctggcgtctagcccggagaagatcgtcctggggcagccgccctctgccacccccacggccatcctcactcaggactccctgcagatgttcctgccccaggagaggagccagcagcccctctccgcagagggcccccacctctccgtgcctgcctcggtcatagtcagcgccccgcctcccgcccaagacccagccccagccacccccgtcgccaaaggagctggcctcggccctcaggcccccgacagccaggcttccccggctccggccccccagatcccggcagcggctccgctgaagggcccaggcccctcttcgtccccgtcactacctcaccaggcccctctgggggacagcccccacctgccctccccacaccccacccggcccccttcccgcccaccctcccggccacagagtgtgtcccgccctccctcagagccacccttgcacccttgccccccaccccaggcccccccaactctgcctggcatctttgtcatccaaaaccagctaggcgttcccccgcctgccagcaacccggcccctactgccccaggcccgccgcagccgcctctccgcccccagtcccagccgcctgagggaccgctgcccccagccccccacctccctccatcctccacctcctctgctgtggcctcctcctctgagacgtcctccaggttgccagcccctacgccatccgacttccagctccagttcccacccagccaggggccccacaagtcccccactccccctccaaccctccacctggtccctgagccggcagcaccccccccaccgcctcctcggaccttccagatggtgaccacccccttcccagcgctgccccagccgaaggctcttctcgagagatttcaccaggtgccgtccggaatcatcctccagaacaaggctgggggggcccctgccgccccgcagacctccaccagcctggggcccctcaccagccccgctgcgtctgtgctggtcagtgggcaggccccatctgggacccccactgcccccagccacgcccccgccccggcacccatggccgccacaggcctccctcctctgcttccagccgagaacaaggcttttgccagcaacctcccgaccctgaatgtggccaaggccgcttcctccgggccagggaagccctccgggctgcagtatgagagcaaactgagtggcctgaagaagccccccacgcttcagcccagcaaggaagcctgtttcctggagcatttgcacaaacaccagggctccgtcctgcaccccgactacaagacggccttcccctcctttgaggacgccctgcatcgcctcctgccctaccatgtctaccagggcgccctcccctcccccagtgactaccacaaagtggacgaggagtttgagacggtctccacgcagctgctgaaacgcacccaggccatgctcaataaatatcggctcctgctcctggaggagtcccggagggtgagcccctcagcggagatggtaatgatcgaccgaatgttcattcaggaggagaagaccacccttgccttggataaacagctggccaaggagaagccggacgagtacgtgtcttcctcccgctcgctcggcctccccatcgcagcctcttccgagggtcatcggcttcccggccacggccccctgtcgtcttcagctcccggggcctccacccagccccctccacacctgcccaccaagcttgtgatccggcacggcggggcaggcggctccccttcggtcacctgggcccgggcgtcctcctccctgtcctcctcttcctcctcctcctctgccgcctcctccttggacgccgacgaggacggccccatgccctcccgcaaccgcccgcccatcaagacctacgaggcccggagccgcatcgggctcaagctcaagatcaagcaggaagccgggctcagcaaggtcgtgcacaacacggccctggaccccgtgcaccagcccccgccaccccccgctaccctcaaggtggccgagcccccgccacggccgccaccaccaccgccgcccacgggccagatgaacggcacggtggaccacccgccgcctgccgcccccgagcgcaagcccctgggcaccgccccgcactgcccgcgcctgccactgcgcaagacctaccgcgagaacgtggggggccctggcgcgccggaggggacgcccgcaggcagggcacggggaggcagcccggcgccgctgcccgccaaagtggacgaggccaccagcgggctcatccgcgagctggcggccgtggaggacgagctgtaccagcgtatgctgaagggccccccgccagagcccgcagccagcgccgcccaaggcaccggggaccccgactgggaggcgcccgggctgccccctgccaagcggcgcaagtccgagtcgcccgacgtggaccaggccagcttctccagcgacagcccgcaggatgacacgctcaccgagcacctgcagagcgccatcgacagcatcctgaacctgcagcaggcccccggccggacgcccgcgccctcgtacccccacgctgcctcggccggcacccccgcatccccgccgcccctgcacaggcccgaggcctacccaccctccagtcacaacggtggcctcggcgccaggacgttgaccagataacaccgggccgcctccccttccccgtcccctcctcccgaagacgccgggacagtcgggtgtccgccctcagcctcctggggactcgagccggggatcccctgacggtttttcttgcctaagttatttgagtcacaaaggcctccttccctgccgcctgcttcagctgggttgctggggggtgggcgtggatttagggagggggctgtgatgtaaaacgtctcccctgccaaaggaggggcaaagtgctgtgtcagttcctgtttcttcccatttcctggcacactctgcccctctgtccgggggacacgcgcatgtgtttgccagggatggggccaccgggttgatgccaacgctccgggtgcctgtcttgtctgtgtggcttctcagatggtggagggtgctgggagctggcagggtccttccagacagtctcagcctctccccgccgcccccaacaggctgtcaaacaaaaccggagagggggtgggggagccagcctcccagcgtgctgtgcccgcaggcacccgtgtgacatccgcacgtccagctccgtgacctgtgtgtgtgtgtgtgtgcacaagtgagtgagagatttcgaacgcccacccctcgactttgaaatctgagcaaaacaagaaactggggtcttcctctcccccgaacctctccccagctagtcttccctctgttcttcctgcctccagccgcccgcgccagattttgaaatctcggagacaaaactagtactgtaagataaatttttttgtactgtatttattgtgtataacgatttttttaaaggagaat

SEQ ID NO: 137157 - DNA, 1528 bp, Homo sapiens
  Payload ID: 6852
  Gene Symbol: GLTSCR2
  Gene Name: glioma tumor suppressor candidate region gene 2
  Uniprot ID: Q9NZM5
  ENST ID: ENST00000246802
  CDS Start-End: 39-1475
ttttgggacgccagtggctgagttcttcctttgacaagatggcggcaggaggcagtggcgttggtgggaagcgcagctcgaaaagcgatgccgattctggtttcctggggctgcggcccacttcggtggacccagcgctgaggcggcggcggcgaggcccaagaaataagaagcggggctggcggcggcttgctcaggagccgctggggctggaggttgaccagttcctggaagacgtgcggctacaggagcgcacgagcggtggcttgttgtcagaggccccaaatgaaaaactcttcttcgtggacactggctccaaggaaaaagggctgacaaagaagagaaccaaagtccagaagaagtcactgcttctcaagaaaccccttcgggttgacctcatcctcgagaacacatccaaagtccctgcccccaaagacgtcctcgcccaccaggtccccaacgccaagaagctcaggcggaaggagcagctatgggagaagctggccaagcagggcgagctgccccgggaggtgcgcagggcccaggcccggctcctcaacccttctgcaacaagggccaagcccgggccccaggacaccgtagagcggcccttctacgacctctgggcctcagacaaccccctggacaggccgttggttggccaggatgagtttttcctggagcagaccaagaagaaaggagtgaagcggccagcacgcctgcacaccaagccgtcccaggcacccgccgtggaggtggcgcctgccggagcttcctacaatccatcctttgaagaccaccagaccctgctctcagcggcccacgaggtggagttgcagcggcagaaggaggcggagaagctggagcggcagctggccctgcccgccacggagcaggccgccacccaggagtccacattccaggagctgtgcgaggggctgctggaggagtcggatggtgagggggagccaggccagggcgaggggccggaggctggggatgccgaggtctgtcccacgcccgcccgcctggccaccacagagaagaagacggagcagcagcggcggcgggagaaggctgtgcacaggctgcgggtacagcaggccgcgttgcgggccgcccggctccggcaccaggagctgttccggctgcgcgggatcaaggcccaggtggccctgaggctggcggagctggcgcggcggcagaggcggcggcaggcgcggcgggaggctgaggctgacaagccccgaaggctggggcggctcaagtaccaggcacctgacatcgacgtgcagctgagctcggagctgacagactcgctcaggaccctgaagcccgagggcaacatccttcgagaccggttcaagagcttccagaggaggaatatgatcgagcctcgagagagagccaagttcaaacgcaagtacaaggtgaagctggtggagaagcgggcgttccgtgagatccagttgtagctgccatcagatgccggagactcgcccttcaataaaaaatctcttctagctga

SEQ ID NO: 137158 - DNA, 810 bp, Homo sapiens
  Payload ID: 6852
  Gene Symbol: GLTSCR2
  Gene Name: glioma tumor suppressor candidate region gene 2
  ENST ID: ENST00000595143
  CDS Start-End: 1-797
ggctgacaaagaagagaaccaaagtccagaagaagtcactgcttctcaagaaaccccttcgggttgacctcatcctcgagaacacatccaaagtccctgcccccaaagacgtcctcgcccaccaggtccccaacgccaagaagctcaggcggaaggagcagctatgggagaagctggccaagcagggcgagctgccccgggaggtgcgcagggcccaggcccggctcctcaacccttctgcaacaagggccaagcccgggccccaggacaccgtagagcggcccttctacgacctctgggcctcagacaaccccctggacaggccgttggttggccaggatgagtttttcctggagcagaccaagaagaaaggagtgaagcggccagcacgcctgcacaccaagccgtcccaggcacccgccgtggaggtggcgcctgccggagcttcctacaatccatcctttgaagaccaccagaccctgctctcagcggcccacgaggtggagttgcagcggcagaaggaggcggagaagctggagcggcagctggccctgcccgccacggagcaggccgccacccaggagtccacattccaggagctgtgcgaggggctgctggaggagtcggatgctgagctcggagctgacagactcgctcaggaccctgaagcccgagggcaacatccttcgagaccggttcaagagcttccagaggaggaatatgatcgagcctcgagagagagccaagttcaaacgcaagtacaaggtgaagctggtggagaagcgggcgttccgtgagatccagttgtag

SEQ ID NO: 137159 - DNA, 501 bp, Homo sapiens
  Payload ID: 6852
  Gene Symbol: GLTSCR2
  Gene Name: glioma tumor suppressor candidate region gene 2
  ENST ID: ENST00000598959
  CDS Start-End: 1-448
tgcaacaagggccaagcccgggccccaggacaccgtagagcggcccttctacgacctctgggcctcagacaaccccctggacaggccgttggttggccaggatgagtttttcctggagcagaccaagaagaaaggagtgaagcggccagcacgcctgcacaccaagccgtcccaggcacccgccgtggaggcgcggcgggaggctgaggctgacaagccccgaaggctggggcggctcaagtaccaggcacctgacatcgacgtgcagctgagctcggagctgacagactcgctcaggaccctgaagcccgagggcaacatccttcgagaccggttcaagagcttccagaggaggaatatgatcgagcctcgagagagagccaagttcaaacgcaagtacaaggtgaagctggtggagaagcgggcgttccgtgagatccagttgtagctgccatcagatgccggagactcgcccttcaataaaaaatctcttctagctga

SEQ ID NO: 137160 - DNA, 656 bp, Homo sapiens
  Payload ID: 6852
  Gene Symbol: GLTSCR2
  Gene Name: glioma tumor suppressor candidate region gene 2
  ENST ID: ENST00000597985
  CDS Start-End: 1-603
ctcatcctcgagaacacatccaaagtccctgcccccaaagacgtcctcgcccaccaggtccccaacgccaagaagctcaggcggaaggagcagctatgggagaagctggccaagcagggcgagctgccccgggaggtgcgcagggcccaggcccggctcctcaacccttctgcaacaagggccaagcccgggccccaggacaccgtagagcggcccttctacgacctctgggcctcagacaaccccctggacaggccgttggttggccaggatgagtttttcctggagcagaccaagaagaaaggagtgaagcggccagcacgcctgcacaccaagccgtcccaggcgcggcgggaggctgaggctgacaagccccgaaggctggggcggctcaagtaccaggcacctgacatcgacgtgcagctgagctcggagctgacagactcgctcaggaccctgaagcccgagggcaacatccttcgagaccggttcaagagcttccagaggaggaatatgatcgagcctcgagagagagccaagttcaaacgcaagtacaaggtgaagctggtggagaagcgggcgttccgtgagatccagttgtagctgccatcagatgccggagactcgcccttcaataaaaaatctcttctagctga

SEQ ID NO: 137161 - DNA, 303 bp, Homo sapiens
  Payload ID: 6852
  Gene Symbol: GLTSCR2
  Gene Name: glioma tumor suppressor candidate region gene 2
  ENST ID: ENST00000594182
  CDS Start-End: 1-300
gcgcggcgggaggctgaggctgacaagccccgaaggctggggcggctcaagtaccaggcacctgacatcgacgtgcagctgagctcggagctgacagactcgctcaggaccctgaagcccgagggcaacatccttcgagaccggttcaagagcttccagaggaggaatatgatcgagcctcgagagagagccaagttcaaacgcaagtacaaggtgaagctggtggagaagcgggcgttccgtgagatccactgccatcagatgccggagactcgcccttcaataaaaaatctcttctagctg

SEQ ID NO: 137162 - DNA, 4971 bp, Homo sapiens
  Payload ID: 6853
  Gene Symbol: GLDN
  Gene Name: gliomedin
  Uniprot ID: Q6ZMI3
  ENST ID: ENST00000335449
  CDS Start-End: 57-1712
aaaggctgccagggccgcaggctgccaagccctgccctgcccaaggcgcatagagcatggcccgaggcgctgagggaggccgtggggacgcgggttggggcctgcgtggcgccctggcggccgtggcgctgctctcggcgctcaacgctgcgggcacggtgttcgcgctgtgccagtggcgcgggctgagctcggcgctgcgggctttggaggcgcagcggggccgggagcagcgcgaggacagtgccctgcgctccttcctggccgagttgagccgcgcgccgcgcggggcgtccgcaccaccccaagacccggccagctcagctcgcaacaagcgcagccacagcggcgagcccgcgccgcatatccgcgccgagagccatgacatgctgatgatgatgacctactccatggtgccgatccgagtgatggtggacctgtgcaacagcaccaagggcatctgcctcacaggaccttctggaccaccaggacctccgggagccggcgggttgccaggacacaacggattggatggacagcctggtcctcagggcccaaaaggagaaaaaggagcaaatggaaaaagaggaaaaatggggatacctggagctgcaggaaatccaggggaaaggggagaaaagggagaccatggtgaactgggcctgcagggaaatgagggcccaccagggcagaagggagaaaagggtgacaaaggagatgtgtccaacgacgtgctcctggcaggtgccaaaggtgaccaaggcccacccggtccacctgggcccccaggccctccaggtcctccagggccccctggaagcagaagagccaaaggccctcggcagccaagcatgttcaacggccagtgcccaggtgagacttgtgccataccaaatgatgataccttggttggaaaagctgatgagaaagccagtgaacaccattccccacaagcagaatccatgatcacttccattggaaacccagtgcaagtactgaaagtgacagagacatttgggacttggataagagagtctgctaacaagagtgatgaccggatttgggtgacagagcatttttcaggcatcatggttaaggaattcaaggatcagccctcacttctgaatggcagttacacgttcatccaccttccatactatttccatggctgtgggcacgttgtttacaacaactctctctactaccacaaagggggttctaataccctagtgagatttgaatttggccaggaaacatcccaaactctgaagcttgaaaatgccttgtattttgatcgaaaatacctttttgcaaattccaaaacttacttcaatctagctgtagatgaaaagggcctttggattatctatgcgtcaagtgtggacggctcgagcattcttgtagcacaactggatgagaggacattctcagtggtgcaacacgtcaataccacgtaccctaaatccaaggctggcaacgccttcattgcccgaggaatcctctatgtcacagacaccaaagatatgagggtcacatttgcctttgatttgttaggagggaaacagatcaatgcaaactttgatttaagaacttcccagtctgttcttgccatgttagcatacaacatgagagatcagcatttatattcatgggaagatggccatttaatgctttatcctgtgcagtttttgtcaactaccttaaatcagtgatgtgctgcattcggctcccttcagcaaatttcaggggttttctgggaccagttctcccccaacaggaaacttgtttttttaacgtcagccagatatttagaaaataacctcaaaagtgtttatatggtcagtgagccccgcttagtgaaatagcaacagattggaagttgaaatggctgagatttggtgatctccccacagctggctctgcaagttacctctttctccttgggccttagtttccccattggtaatctgaattggctaagatgattggggagattttctgtacctgtaggtaatttggtgattcttggtggctgctcttctcacaacttttatgtatctgcttctgtcgtttagcttttttagccacatgctgaccaaatttacctttgagttgataagtccagtggcttgagtagtgaatccctcagtgctgacttatatcttgttctttgaaaaaatgcattgactctttaagacatctaaagtatcacattatccataatttattgcttttctttgcatctgcacctgccaccacagaataaccattaccctcagctgctgattgggcagctctgagattagcaaaagccagggacagctacatgttcaggtttttttttttttttttttttcaataagctattttttttcttttcttattttaaatagagagagagtcttgctatgtttcccaggctggtcttgaactcctggggctcaagtgatcctcctgccttggcctcccaaaatgctggattacaggcatgtgtgcctggcccaggtttcttaataaaacagaatcatgatcttccaggttccccccagtttctgatcatgttgatttgtagctgtggatcatgaacactgaatcctcagatcactctgacttcttatgcttctcctgtggatccactatcaaagtactaaatgctgtgtaagtagacgttaatctggctggaaccatgggaagcactttgcagtgttcagaagagaggctccatttgtggctattatgtagaactgggccagagccagtccattgcctgtttttttaaataaggttttactgagcacagccacactcatttgtttatgcagtacggcctgacattgcttttgctctgcaacagcagagtcgagtcattgcaacaaagagcatatggccccacagtgcctaaaatattgaccagctacccctttatggaaaaagattgctgactcctgataaagaatataaagtgagcctgattcttgaaaaaatcagaaccagagcctgttttgttttgttctaaactaagaagccgcataggatgtgacttgcgttttgagtagaggggaaggctgataacggcgtaagatgaagtggccctccacaaaggctggttaggggacagttctttctctaacatagttttaaaggatgtgatctggtccccttggatgccaggagagaatccagttgaacttgctcctaaatgctcttaaatatgcatattttctgccaactcacttctttaaacatctttcagcccagcgctgcggccccgggaagggccactgcgaatagagaggaagctggaaaagttcctggggctctgcagccaggaaggggaaccagggcaaatcttatgtaaagatttttcagcaacttgtcccaatttgtgtgtattctgaaactttctctttgggaccaaattcattctcaatggccctgagttcaatatattattaacagcagtattttaaaacttagggttgaactgggcatggtggcacataactgcaatcccagctactttggaggcagggatgggaggatcacttgaggccaggatctcaggaccagcctagagagatcccatctctaaaaaataaaatataagaaaataaaacttaggggatatacagatttaaatattcaaatctccctgctcccctgaaagtccccaggcagctgtcaatgacttgtttgttgtgttctcaatatgatggctatttgaaacttcacctacttttcattagattggttgtaccatgtcaccttagcttttaaaaatactcttttcagattcacgttctctaacaaagagtctcatgttcaagatcaatatgtctaataagtgctggtgtccttttaaagtatttaaatatatatgttgctgttgctgaatacaggagaccaggttaggaatatagtttcataataatagtacatacaatactaattgtatataaggtagcaaccaaaagaggttgttaattagcacatattccttttagaaaaatgtttcagaaacctcagtcttgatatctgagctatctgggctcccttacttgtgagtaagggatcatgctcaccactggagaagcttacaccgggactttttttcttttttcttttttttttgctatgacagagtaatgctaacgtaaggacaactgagtttgatcagtgtttaatcgcagtgggtaatcttatctgattgtctttaaaagtgaaaaggattaagattttattctttcttgtaaacattacttgattttttaaagaagttttgggctcactgctaaaatagagtatacaactgaatgtttttaagtcaagatactgttttaggagtttaccctctcatttataaccaaagttgctctaaaacactttccaaatatctgcacttctgatgtcagaatcaaaccagataattctctaattcttctttaatctaaagtagatagcttcccactggaaagtaaacaaaaccatccctcccaacctcaaagctaggccacactctatttcaaggcattttctttcagctgataaggtgtcctcctgaagccaagtaggtggttctggtctccaagtatcgttaagcacaggtgctatgacagaaaaagttctggggtggaagttttaagatgaggagttctgatcttaggcatcttaacagtcacaaggtgaaaagtcaaatgaaacagtacaattcttgatgagtgaggtgtcatcttccaaccacacagaggacgttttggctatgatcatctgatggcaagtgaaggagaaatgagtgatagggctttgcgttttcatccagatgctgtggccctgtgtttcacagcattaagagccataatttccaacctgcacagatcctgaacaacaaatgaataacgatgaatgtctttttggttgtaatttaacaagtcaaataaaataatcattgctgagcacaatcacatgttgaaa

SEQ ID NO: 137163 - DNA, 4584 bp, Homo sapiens
  Payload ID: 6853
  Gene Symbol: GLDN
  Gene Name: gliomedin
  Uniprot ID: Q6ZMI3
  ENST ID: ENST00000396399
  CDS Start-End: 50-1333
accattgtgtatgattcgttgttgactgcagcatcactagatccgagtgatggtggacctgtgcaacagcaccaagggcatctgcctcacaggaccttctggaccaccaggacctccgggagccggcgggttgccaggacacaacggattggatggacagcctggtcctcagggcccaaaaggagaaaaaggagcaaatggaaaaagaggaaaaatggggatacctggagctgcaggaaatccaggggaaaggggagaaaagggagaccatggtgaactgggcctgcagggaaatgagggcccaccagggcagaagggagaaaagggtgacaaaggagatgtgtccaacgacgtgctcctggcaggtgccaaaggtgaccaaggcccacccggtccacctgggcccccaggccctccaggtcctccagggccccctggaagcagaagagccaaaggccctcggcagccaagcatgttcaacggccagtgcccaggtgagacttgtgccataccaaatgatgataccttggttggaaaagctgatgagaaagccagtgaacaccattccccacaagcagaatccatgatcacttccattggaaacccagtgcaagtactgaaagtgacagagacatttgggacttggataagagagtctgctaacaagagtgatgaccggatttgggtgacagagcatttttcaggcatcatggttaaggaattcaaggatcagccctcacttctgaatggcagttacacgttcatccaccttccatactatttccatggctgtgggcacgttgtttacaacaactctctctactaccacaaagggggttctaataccctagtgagatttgaatttggccaggaaacatcccaaactctgaagcttgaaaatgccttgtattttgatcgaaaatacctttttgcaaattccaaaacttacttcaatctagctgtagatgaaaagggcctttggattatctatgcgtcaagtgtggacggctcgagcattcttgtagcacaactggatgagaggacattctcagtggtgcaacacgtcaataccacgtaccctaaatccaaggctggcaacgccttcattgcccgaggaatcctctatgtcacagacaccaaagatatgagggtcacatttgcctttgatttgttaggagggaaacagatcaatgcaaactttgatttaagaacttcccagtctgttcttgccatgttagcatacaacatgagagatcagcatttatattcatgggaagatggccatttaatgctttatcctgtgcagtttttgtcaactaccttaaatcagtgatgtgctgcattcggctcccttcagcaaatttcaggggttttctgggaccagttctcccccaacaggaaacttgtttttttaacgtcagccagatatttagaaaataacctcaaaagtgtttatatggtcagtgagccccgcttagtgaaatagcaacagattggaagttgaaatggctgagatttggtgatctccccacagctggctctgcaagttacctctttctccttgggccttagtttccccattggtaatctgaattggctaagatgattggggagattttctgtacctgtaggtaatttggtgattcttggtggctgctcttctcacaacttttatgtatctgcttctgtcgtttagcttttttagccacatgctgaccaaatttacctttgagttgataagtccagtggcttgagtagtgaatccctcagtgctgacttatatcttgttctttgaaaaaatgcattgactctttaagacatctaaagtatcacattatccataatttattgcttttctttgcatctgcacctgccaccacagaataaccattaccctcagctgctgattgggcagctctgagattagcaaaagccagggacagctacatgttcaggtttttttttttttttttttttcaataagctattttttttcttttcttattttaaatagagagagagtcttgctatgtttcccaggctggtcttgaactcctggggctcaagtgatcctcctgccttggcctcccaaaatgctggattacaggcatgtgtgcctggcccaggtttcttaataaaacagaatcatgatcttccaggttccccccagtttctgatcatgttgatttgtagctgtggatcatgaacactgaatcctcagatcactctgacttcttatgcttctcctgtggatccactatcaaagtactaaatgctgtgtaagtagacgttaatctggctggaaccatgggaagcactttgcagtgttcagaagagaggctccatttgtggctattatgtagaactgggccagagccagtccattgcctgtttttttaaataaggttttactgagcacagccacactcatttgtttatgcagtacggcctgacattgcttttgctctgcaacagcagagtcgagtcattgcaacaaagagcatatggccccacagtgcctaaaatattgaccagctacccctttatggaaaaagattgctgactcctgataaagaatataaagtgagcctgattcttgaaaaaatcagaaccagagcctgttttgttttgttctaaactaagaagccgcataggatgtgacttgcgttttgagtagaggggaaggctgataacggcgtaagatgaagtggccctccacaaaggctggttaggggacagttctttctctaacatagttttaaaggatgtgatctggtccccttggatgccaggagagaatccagttgaacttgctcctaaatgctcttaaatatgcatattttctgccaactcacttctttaaacatctttcagcccagcgctgcggccccgggaagggccactgcgaatagagaggaagctggaaaagttcctggggctctgcagccaggaaggggaaccagggcaaatcttatgtaaagatttttcagcaacttgtcccaatttgtgtgtattctgaaactttctctttgggaccaaattcattctcaatggccctgagttcaatatattattaacagcagtattttaaaacttagggttgaactgggcatggtggcacataactgcaatcccagctactttggaggcagggatgggaggatcacttgaggccaggatctcaggaccagcctagagagatcccatctctaaaaaataaaatataagaaaataaaacttaggggatatacagatttaaatattcaaatctccctgctcccctgaaagtccccaggcagctgtcaatgacttgtttgttgtgttctcaatatgatggctatttgaaacttcacctacttttcattagattggttgtaccatgtcaccttagcttttaaaaatactcttttcagattcacgttctctaacaaagagtctcatgttcaagatcaatatgtctaataagtgctggtgtccttttaaagtatttaaatatatatgttgctgttgctgaatacaggagaccaggttaggaatatagtttcataataatagtacatacaatactaattgtatataaggtagcaaccaaaagaggttgttaattagcacatattccttttagaaaaatgtttcagaaacctcagtcttgatatctgagctatctgggctcccttacttgtgagtaagggatcatgctcaccactggagaagcttacaccgggactttttttcttttttcttttttttttgctatgacagagtaatgctaacgtaaggacaactgagtttgatcagtgtttaatcgcagtgggtaatcttatctgattgtctttaaaagtgaaaaggattaagattttattctttcttgtaaacattacttgattttttaaagaagttttgggctcactgctaaaatagagtatacaactgaatgtttttaagtcaagatactgttttaggagtttaccctctcatttataaccaaagttgctctaaaacactttccaaatatctgcacttctgatgtcagaatcaaaccagataattctctaattcttctttaatctaaagtagatagcttcccactggaaagtaaacaaaaccatccctcccaacctcaaagctaggccacactctatttcaaggcattttctttcagctgataaggtgtcctcctgaagccaagtaggtggttctggtctccaagtatcgttaagcacaggtgctatgacagaaaaagttctggggtggaagttttaagatgaggagttctgatcttaggcatcttaacagtcacaaggtgaaaagtcaaatgaaacagtacaattcttgatgagtgaggtgtcatcttccaaccacacagaggacgttttggctatgatcatctgatggcaagtgaaggagaaatgagtgatagggctttgcgttttcatccagatgctgtggccctgtgtttcacagcattaagagccataatttccaacctgcacagatcctgaacaacaaatgaataacgatgaatgtctttttggttgtaatttaacaagtcaaataaaataatcattgctgagcacaatcaca

SEQ ID NO: 137164 - DNA, 571 bp, Homo sapiens
  Payload ID: 6853
  Gene Symbol: GLDN
  Gene Name: gliomedin
  ENST ID: ENST00000558426
  CDS Start-End: 77-571
ggtgactttttatgattgctttctgctcgtctgaataaaggatgagcccagggcctgctgcccactgtctgctctgatgaccctctctcccctgcagatccgagtgatggtggacctgtgcaacagcaccaagggcatctgcctcacaggaccttctggaccaccaggacctccgggagccggcgggttgccaggacacaacggattggatggacagcctggtcctcagggcccaaaaggagaaaaaggagcaaatggaaaaagaggaaaaatggggatacctggagctgcaggaaatccaggggaaaggggagaaaagggagaccatggtgaactgggcctgcagggaaatgagggcccaccagggcagaagggagaaaagggtgacaaaggagatgtgtccaacgacgtgctcctggcaggtgccaaaggtgaccaaggcccacccggtccacctgggcccccaggccctccaggtcctccagggccccctggaagcagaagagccaaaggccctcggcagccaagcatgttcaacggccagtgcccaggtgagacttgtgccatacca

SEQ ID NO: 137165 - DNA, 1676 bp, Homo sapiens
  Payload ID: 6853
  Gene Symbol: GLDN
  Gene Name: gliomedin
  Uniprot ID: Q6ZMI3
  ENST ID: ENST00000612989
  CDS Start-End: 3-1286
tgatggtggacctgtgcaacagcaccaagggcatctgcctcacaggaccttctggaccaccaggacctccgggagccggcgggttgccaggacacaacggattggatggacagcctggtcctcagggcccaaaaggagaaaaaggagcaaatggaaaaagaggaaaaatggggatacctggagctgcaggaaatccaggggaaaggggagaaaagggagaccatggtgaactgggcctgcagggaaatgagggcccaccagggcagaagggagaaaagggtgacaaaggagatgtgtccaacgacgtgctcctggcaggtgccaaaggtgaccaaggcccacccggtccacctgggcccccaggccctccaggtcctccagggccccctggaagcagaagagccaaaggccctcggcagccaagcatgttcaacggccagtgcccaggtgagacttgtgccataccaaatgatgataccttggttggaaaagctgatgagaaagccagtgaacaccattccccacaagcagaatccatgatcacttccattggaaacccagtgcaagtactgaaagtgacagagacatttgggacttggataagagagtctgctaacaagagtgatgaccggatttgggtgacagagcatttttcaggcatcatggttaaggaattcaaggatcagccctcacttctgaatggcagttacacgttcatccaccttccatactatttccatggctgtgggcacgttgtttacaacaactctctctactaccacaaagggggttctaataccctagtgagatttgaatttggccaggaaacatcccaaactctgaagcttgaaaatgccttgtattttgatcgaaaatacctttttgcaaattccaaaacttacttcaatctagctgtagatgaaaagggcctttggattatctatgcgtcaagtgtggacggctcgagcattcttgtagcacaactggatgagaggacattctcagtggtgcaacacgtcaataccacgtaccctaaatccaaggctggcaacgccttcattgcccgaggaatcctctatgtcacagacaccaaagatatgagggtcacatttgcctttgatttgttaggagggaaacagatcaatgcaaactttgatttaagaacttcccagtctgttcttgccatgttagcatacaacatgagagatcagcatttatattcatgggaagatggccatttaatgctttatcctgtgcagtttttgtcaactaccttaaatcagtgatgtgctgcattcggctcccttcagcaaatttcaggggttttctgggaccagttctcccccaacaggaaacttgtttttttaacgtcagccagatatttagaaaataacctcaaaagtgtttatatggtcagtgagccccgcttagtgaaatagcaacagattggaagttgaaatggctgagattttctgtacctgtaggtaatttggtgattcttggtggctgctcttctcacaacttttatgtatctgcttctgtcgtttagcttttttagccacatgctgaccaaatttacctttgagttgataagtccagtggcttgagtagtgaatccctcagtgctgacttatatcttgttctttgaaaaaatgcattgactctttaagacatct

SEQ ID NO: 137166 - DNA, 2088 bp, Homo sapiens
  Payload ID: 6853
  Gene Symbol: GLDN
  Gene Name: gliomedin
  ENST ID: ENST00000560215
  CDS Start-End: 1-454
gtgccagtggcgcgggctgagctcggcgctgcgggctttggaggcgcagcggggccgggagcagcgcgaggacagtgccctgcgctccttcctggccgagttgagccgcgcgccgcgcggggcgtccgcaccaccccaagacccggccagctcagctcgcaacaagcgcagccacagcggcgagcccgcgccgcatatccgcgccgagagccatgacatgctgatgatgatgacctactccatggtgccgatccgagtgatggtggacctgtgcaacagcaccaagggcatctgcctcacaggaccttctggaccaccaggacctccgggagccggcgggttgccaggacacaacggattggatggacagcctggtcctcagggcccaaaaggagaaaaaggagcaaatggaaaaagaggaaaaatgggtatttttggcaactcttctaattaatttccctgttatttatctccatgattgcatttgggtcgactaaaactgtgtgcagcaggggtaaggtgtttcatctctgcacagtttaaggccggtttaactcttacctagaagccattgcgttccgggataccaagggtatacttcttggtcccaccttgacagatgtttatttcaaactggagaagccgtctcctgggaactgactcgcacccttctgctgcagatgggaggtggaaggagcaggagcccacagccctgggaggggcattctgtgggccgtgtgacagctggtgctggtgcatgctctttcgaggctcagctcctgccttgccctctattgcctcctcctgcccagcgaatctgtgtttggttgaaaatcaatgaactgatgttggcccctggtaaggcatttcttggctagaggaatagctcaaactgcttgagtggaaaggcagcatcctggcctccctgtggccggcactcaggtcaaagggtctcctcttcaggggctacaggataactatgaagatatggctggcatctcggaggagcttcctttgccctgttatgagcaggccatcaccactggagaaaaggcccagaagcaccaaggcacgagatgtgcccagggagcagtaagaatcaggggctggtgcagggcctggcaggaggctggggcacaaaggggaagattctgaagggctctgagcaccagtcctggggagccggggtcagggcagatccacctgaagaaagctggcacatgctgtggtgggagctcaaagacagagggtaagaaactactcaggaggctcctacgaaggcctggctctcagccacccgtcaaagccactgctgagggcagagggaggttgttttcagccggagactccactgcaccatcttattttcaacctcttggctctgctacccaaactcacttggactggccctggacgagaagaaatggtagaaaattcttccagacagcaattactcctttggtcacctccactcttattctcattagcaattgaagtaagggccagtggagagggaaaaattgtcgagcacctctgacacttggcagtgcctacctgcttgtgttccagagggcagcttcagagaaaacgggcacacaccgtccaagccagctcaatcctcagaaggccagtaattaccattggaattacacagcagcaatggatcgttcatataggataataattataattatacatgagcatcgctgtagaataatgatgcctattggcttatcctgggaagactccaaaaatgtgattcagtcctgaggcctcggcaatgggcatgatgagggcaggctcaggggcaggagggcaccctgctagagctgggtgtggggcacgtaggaaaggggtggttttcaaaaaggcttgagacagatccctggccttgaggatgtgcttcgcatgcagcctgcaacccagggagtgcagaaaagaaaaagtgcatttgtttatggagcacatatttgtgtggcaggtaccattctagatgctggagattcagaaataagcccccctcctccaccttcacgaggcttacatcctagctgggagagacggataataaataagataaataaatag

SEQ ID NO: 137167 - DNA, 2812 bp, Homo sapiens
  Payload ID: 6854
  Gene Symbol: GLIS1
  Gene Name: GLIS family zinc finger 1
  Uniprot ID: Q8NBF1
  ENST ID: ENST00000312233
  CDS Start-End: 568-2430
cactgtgtactgagactggatgcatccttgcaataaaaaagaggttgatcacgacaaatgtgaaccccgccgttataaaaacagccatcatggctgtaaatgccaaaaagcagtcagtcttgtaacttgaaaaaaaaaaaaaaggaattgtagattgtgcgcatggactcggagtgggggcggtggacagtaagtcatgatgttttggtggtaccacctggttgaatttcttcatctgaataagaagctcctgtgatgttctggggaggccttggaaggctagcgcatccctcatagaaagtgaatgggagctacggacaccgtaccccgggctcagagaagagcctgctggacctggaccttgctgagggccctggccccacctgctgccagggcctgtttctccctgcaggaagcccaccgccccgggctcacccccaagcttgtgagaggctgctgcatttcccccaccctgacaggtcacctagaccccaggccacgtatgtgaacggcagcctcccaaccacacaacacatcaaacaggagtccttgcccgactaccaagccatggcagaggcccgcacatccctgtctgcccactgtcggggcccgctggccactggcctgcacccagacctggacctcccgggccgaagcctcgccacccctgcgccttcctgctaccttctgggcagcgaacccagctctggcctgggcctccagcccgagacccacctccccgagggcagcctgaagcggtgctgcgtcttgggcctaccccccacctccccagcctcctcctcaccctgtgcctcctccgacgtcacctccatcatccgctcctcccagacgtctctggtcacctgtgtaaatggactccggagcccccctctgacgggagatctggggggcccttccaagcgggcccggcctggccctgcatcgacggacagccatgagggcagcttgcaacttgaagcctgccggaaggcgagcttcctgaagcaggaacccgcggatgagttttcagagctctttgggcctcaccagcagggcctgccgcccccctatcccctgtctcagttgccgcctggcccaagccttggaggcctggggctgggcctggcaggcagggtggtggccgggcggcaggcgtgccgctgggtggactgctgtgcagcctatgagcagcaggaggagctggtgcggcacatcgagaagagccacatcgaccagcgcaagggcgaggacttcacctgcttctgggctggctgcgtgcgccgctacaagcccttcaacgcccgctacaagctgctcatccacatgcgagtgcactcgggcgagaagcccaacaagtgcatgtttgaaggctgcagcaaggccttctcacggctggagaacctcaagatccacctgaggagccacacgggcgagaagccgtacctgtgccagcacccgggttgccagaaggccttcagcaactccagcgaccgcgccaagcaccagcgcacccacctagacacgaagccgtacgcctgtcagatccctggctgctccaagcgctacacagaccccagctccctccgcaagcacgtcaaggcccattcagccaaagagcagcaggtgcgtaagaagctgcatgcgggccctgacaccgaggccgacgtcctgaccgagtgtctggtcctgcagcagctccacacgtccacacagctggctgccagcgacggcaagggtggctgtggcctgggccaggagctgctcccaggtgtgtatcctggctccatcaccccccataacggacttgcatcgggcctcctgcccccagcgcacgacgtaccttccaggcaccacccgctggatgccaccaccagttcccaccaccatctgtcccctctgcccatggctgagagcacccgggatgggttggggcccggcctcctctcaccaatagtcagccccctgaaggggctggggccaccgccgctgcccccatcctctcagagccattctccggggggccagcccttccccacactccccagcaagccgtcctacccacccttccagagccctccacccccgcctctgcccagcccacaaggttaccagggcagtttccactccatccagagttgcttcccctatggcgactgctaccggatggctgaaccagcagccggtggggacggactggtcggggagacccacggtttcaaccccctgcggcccaatggctaccacagcctcagcacgcccttgcctgccacaggctatgaggccctggctgaggcctcatgccccacagcgctgccacagcagccatctgaagatgtggtgtccagcggccccgaggactgtggcttcttccccaatggagcctttgaccactgcctgggccacatcccctccatctacacagacacctgaaggagcccccacatgcgcctgcccatccagcactgcagatgccacctcgcccacctgctgtcgctcccaccctccgtgcacctagcaggagtgccaggccacagccggaacagccaggccatgacccaggggagccagcgctgccaccccacccagcgctgccagggagccgccatccgagcttgagctgggcgcacagaggtgcccgccaggatctgtggccctgtaacattccctcgatcttgtcttcccgttcctccccgcagtggttttgaaatcacagacctcgtgtatataaaatatgcagaacttgttttccgttcccctgccagttttatatttttggttttacaagaaaaaacattaaaaactggaaaggaga

SEQ ID NO: 137168 - DNA, 2807 bp, Homo sapiens
  Payload ID: 6854
  Gene Symbol: GLIS1
  Gene Name: GLIS family zinc finger 1
  ENST ID: ENST00000628545
  CDS Start-End: 43-2430
gagcccggcgcgacccccagccgtgcgccccgccccggcgccatgcattgcgaggtggctgaggcacactcggacaagaggcctaaggaggcccctggtgcgcccggccccgaccgcggccccgccagcctcggcgcgcacatggccttcagggtcaccgtgagtggcggcggctgcggggacaggggcccgcgggacctgctagcccggccgcctgcgccgccaccgcgcgcccacgacctcctccggccccgcagtccccgagactacggtccatccaaggccgccgccgccgggaaggtgaatgggagctacggacaccgtaccccgggctcagagaagagcctgctggacctggaccttgctgagggccctggccccacctgctgccagggcctgtttctccctgcaggaagcccaccgccccgggctcacccccaagcttgtgagaggctgctgcatttcccccaccctgacaggtcacctagaccccaggccacgtatgtgaacggcagcctcccaaccacacaacacatcaaacaggagtccttgcccgactaccaagccatggcagaggcccgcacatccctgtctgcccactgtcggggcccgctggccactggcctgcacccagacctggacctcccgggccgaagcctcgccacccctgcgccttcctgctaccttctgggcagcgaacccagctctggcctgggcctccagcccgagacccacctccccgagggcagcctgaagcggtgctgcgtcttgggcctaccccccacctccccagcctcctcctcaccctgtgcctcctccgacgtcacctccatcatccgctcctcccagacgtctctggtcacctgtgtaaatggactccggagcccccctctgacgggagatctggggggcccttccaagcgggcccggcctggccctgcatcgacggacagccatgagggcagcttgcaacttgaagcctgccggaaggcgagcttcctgaagcaggaacccgcggatgagttttcagagctctttgggcctcaccagcagggcctgccgcccccctatcccctgtctcagttgccgcctggcccaagccttggaggcctggggctgggcctggcaggcagggtggtggccgggcggcaggcgtgccgctgggtggactgctgtgcagcctatgagcagcaggaggagctggtgcggcacatcgagaagagccacatcgaccagcgcaagggcgaggacttcacctgcttctgggctggctgcgtgcgccgctacaagcccttcaacgcccgctacaagctgctcatccacatgcgagtgcactcgggcgagaagcccaacaagtgcatgtttgaaggctgcagcaaggccttctcacggctggagaacctcaagatccacctgaggagccacacgggcgagaagccgtacctgtgccagcacccgggttgccagaaggccttcagcaactccagcgaccgcgccaagcaccagcgcacccacctagacacgaagccgtacgcctgtcagatccctggctgctccaagcgctacacagaccccagctccctccgcaagcacgtcaaggcccattcagccaaagagcagcaggtgcgtaagaagctgcatgcgggccctgacaccgaggccgacgtcctgaccgagtgtctggtcctgcagcagctccacacgtccacacagctggctgccagcgacggcaagggtggctgtggcctgggccaggagctgctcccaggtgtgtatcctggctccatcaccccccataacggacttgcatcgggcctcctgcccccagcgcacgacgtaccttccaggcaccacccgctggatgccaccaccagttcccaccaccatctgtcccctctgcccatggctgagagcacccgggatgggttggggcccggcctcctctcaccaatagtcagccccctgaaggggctggggccaccgccgctgcccccatcctctcagagccattctccggggggccagcccttccccacactccccagcaagccgtcctacccacccttccagagccctccacccccgcctctgcccagcccacaaggttaccagggcagtttccactccatccagagttgcttcccctatggcgactgctaccggatggctgaaccagcagccggtggggacggactggtcggggagacccacggtttcaaccccctgcggcccaatggctaccacagcctcagcacgcccttgcctgccacaggctatgaggccctggctgaggcctcatgccccacagcgctgccacagcagccatctgaagatgtggtgtccagcggccccgaggactgtggcttcttccccaatggagcctttgaccactgcctgggccacatcccctccatctacacagacacctgaaggagcccccacatgcgcctgcccatccagcactgcagatgccacctcgcccacctgctgtcgctcccaccctccgtgcacctagcaggagtgccaggccacagccggaacagccaggccatgacccaggggagccagcgctgccaccccacccagcgctgccagggagccgccatccgagcttgagctgggcgcacagaggtgcccgccaggatctgtggccctgtaacattccctcgatcttgtcttcccgttcctccccgcagtggttttgaaatcacagacctcgtgtatataaaatatgcagaacttgttttccgttcccctgccagttttatatttttggttttacaagaaaaaacattaaaaactggaaa

SEQ ID NO: 137169 - DNA, 4469 bp, Homo sapiens
  Payload ID: 6855
  Gene Symbol: GLIS2
  Gene Name: GLIS family zinc finger 2
  Uniprot ID: Q9BZE0
  ENST ID: ENST00000262366
  CDS Start-End: 822-2396
agatgcctcacctctaggggatgctgattctgggatgcctttttcgtctcctaggctcctcaaggccaactgcgctgggaagagggggtgtccaacagcaggagggctgtttttttgaactacaatttgccagcatacagcagagcagcaagaagataacagggcggggggcacgggattagcccaaacaaaacacactcaagaacgcgagtctgtggttcaacacgaggcagaaaacagctgggccgggtgcggggcttctccctcgcgtgtatccgctcactgcactcgctgccctggccgcgggcgccgcgcagggtgctgatgtccaggagggatctagacctcccgcggcgctcgggctagtggacgcaggtggtcccaaatgctgggaccaagctaggaaccaagcggaagctcggattgctcggcatcgggcctcgtcgttattctaccgtgagggaaactgagaccgagggcacggcagggagtcgcccgccgtctcaccagcgtgaggggttgcgccgggccccgaaaactggtttgcgccgcccggcatcgggatccgggacctctgcccgccgggcgctgcctgcgcgttcctggaactgggctgggcggagaaatcagggcccgcagagaggcattcctgccgccttccccgccgcccggggccgcaggggggcctggccaaggcttccagcacagaggagcttcggggaggctggattgcgcctgtgtctaaaaataaacaggttcctgcgtgaagaccagctgggagcccactgcctgctgccacctccaactccggccccctcaccatgcactccctggacgagccgctcgacctgaagctgagtatcaccaagctccgggcggcaagagagaagcgggagaggacgctgggtgtggtccggccccgtgctctgcacagggagctgggcctggtggatgacagccccacacctggctctccaggctccccgccctcaggcttcctgctgaactccaagttccccgagaaggtggagggacgcttttcagcagcccctctcgtggacctcagcctgtcaccaccatctgggctggactcccccaatggcagcagctcgctgtcccccgagcgccagggcaacggggacctgcctccagtgcccagtgcctcggacttccagccactgcgctatttggatggtgtccccagctccttccagttcttcctgcccctcggctccgggggggccctgcacctgcctgcctcctccttccttacccctcccaaggacaagtgcctctcgccagacctgcccctgcccaagcagctggtgtgtcgctgggccaagtgtaaccagctctttgagctcctgcaagacctggtggaccatgtcaacgattaccatgtcaagcccgagaaggatgcggggtactgctgccactgggagggctgcgcccgccatggccgaggtttcaacgccaggtacaagatgctcatccacatccgcacacacaccaacgagaagccacaccgctgtccgacctgcagcaagagcttctcccgcctggagaacctgaagatccacaaccggtcgcacacaggtgagaagccctacgtctgcccctacgagggctgcaacaagcgctattccaactccagtgaccgctttaagcacacgcgcacccactatgtggacaagccctactactgcaagatgcccggctgccacaagcgctacacggaccccagctcactgcgcaagcacatcaaggcccatggccactttgtgtcccacgagcagcaagagctcctgcagctgcgcccaccccccaagccgccactgcccgcccccgacggcggcccctatgtcagtggggcccagatcatcatccccaacccagctgccctctttggaggccctggcctgcccggcttacccctacccctggcccccggcccccttgacctcagtgccctggcctgtggcaacggtgggggcagtgggggtggggggggcatgggccctgggctgccaggccccgtcctgcctctcaatctggccaagaacccgctgctgccctcgccctttggggctggcggactgggcttgcctgtggtctccctccttgctggcgcagctggtggcaaggccgagggggagaaggggcgtgggtcggtgcccaccagggccctgggcatggagggccacaagacgccccttgaaaggacggagagcagctgctcccggccaagccccgatggactccccctgctgccaggcaccgtgctggacctgtccacgggcgtcaactcagctgccagcagcccagaggcgttggcccctggctgggtggtcatcccgccgggctcggtgctgctcaaaccggctgtggtgaactgagcccatcctgcggacagttgtggtgcccccccggcagctcccggcactgcccccgacgaacggaaactcttctgtgaaatagcaataatgtcctactgcccgggcagccccagcccagcccgccgggagcaaggatggtgctaggtcattcatggctggcctcccagcccccgggtggggacctggcctgtcatgcagggagagctgtgctcctgggtgctgaagcctcgctcctgtctgtcccccaccacctggccctcagcttctgagaggctttcccctgcccgacctcctcccgtttccctctcccaccctggcacctccctcacctagtgaccacccatggcaagttgccctctcccagcagagggggtgggtggggtggcatctgccctccctgctagcaccaggctcccccttcctgagaggagcccccagggaccagaggcctgcccttccctcctaggcttacccagcccctgccctgggggctccttggacccctttccctctgaccctgcctccagagggaaagcaagacagatgcaggcccctgcaaagccccaggtagaagcatgccccccaggacaaggcgcctcccactagttaggaggaggcccgctctgcagccgccgtcctcaccccaggccaggcctgcagtaccagacgggatagctggccactccacccctgcaccccagggtctcctccctctaccttttggggcaccctgggagcgtgggaagcaggtccgagggcccctgagctggcaaggggaggtgccaggccagctgtggtgccaagatactgagtgacctgggccctggctcagggagcatgtggggccaggcccagcgccccgtcttcctccttctacccccgctgggcctggcctgggcagcgccccctgcagaggcctttgggtccttggtcctgtaacaggaagggggaggctggctggggacgaccgaccacaggctgggacacagctcctggtctgggggctccaagtgacagcatgcaggggagggggctcccagtcagtgctgtgttgggagctttctggaggctgtggactgaaggccttgagggaagcagtggctggaggagggtgctggacccatgacacgttgcttcctctggcttttccctgctgggccgctttctcagaggcacttccccacccctaacacccagtgggcccccccaggttctgtgccactcagagggaccctggcaggggccagaaccacttaagggtggtgctggagggccttgtgccccagtcccatcccaggacgccctgagggatggacgcagccatgcaccccccatctggggcctctccctgctccctctcccacctggcagctgggagttctggcttctaggcctgccctgtcaccaggcctctgagtggccaggcccttccacctccccatctgtaaaacgaggcagctgcccggacagccttggggtccttagtggccctgcaggtcctctggcagctctgctgaccccaccctctcccggactgcccttctgtcccagaggggtcaccctgacccggcccaccttgccactgggctttggactccagccctgacagggcccagccacactggctctgcccctcgaaggggctatgagcaaggtaggagggagctggtctcctttcttcgggccccacccaggccctgagcaccccccacccctgtgagggccccaggccttaagtccctggcggggtcatgggtttgcgacttgagcagagcggaggaacagggcactggaaggccgacgagctcagcatgcgactcggtgacggaccaggctcggcagggccggtgtactttttgtggttgtcattggtgtgttgttgcacattccaggacgtcagtattttaacaggttctaagtgcctttctatcgtagcttatgttttcctcctcttggctccattgctgttagcatagagttttaaaaaaagagataagctaatgactataacaatatattcctccatgggagaggaagtttataaagaaacaataaaagtgagttgcaaagatg

SEQ ID NO: 137170 - DNA, 3705 bp, Homo sapiens
  Payload ID: 6855
  Gene Symbol: GLIS2
  Gene Name: GLIS family zinc finger 2
  Uniprot ID: Q9BZE0
  ENST ID: ENST00000433375
  CDS Start-End: 58-1632
tgaagaccagctgggagcccactgcctgctgccacctccaactccggccccctcaccatgcactccctggacgagccgctcgacctgaagctgagtatcaccaagctccgggcggcaagagagaagcgggagaggacgctgggtgtggtccggccccgtgctctgcacagggagctgggcctggtggatgacagccccacacctggctctccaggctccccgccctcaggcttcctgctgaactccaagttccccgagaaggtggagggacgcttttcagcagcccctctcgtggacctcagcctgtcaccaccatctgggctggactcccccaatggcagcagctcgctgtcccccgagcgccagggcaacggggacctgcctccagtgcccagtgcctcggacttccagccactgcgctatttggatggtgtccccagctccttccagttcttcctgcccctcggctccgggggggccctgcacctgcctgcctcctccttccttacccctcccaaggacaagtgcctctcgccagacctgcccctgcccaagcagctggtgtgtcgctgggccaagtgtaaccagctctttgagctcctgcaagacctggtggaccatgtcaacgattaccatgtcaagcccgagaaggatgcggggtactgctgccactgggagggctgcgcccgccatggccgaggtttcaacgccaggtacaagatgctcatccacatccgcacacacaccaacgagaagccacaccgctgtccgacctgcagcaagagcttctcccgcctggagaacctgaagatccacaaccggtcgcacacaggtgagaagccctacgtctgcccctacgagggctgcaacaagcgctattccaactccagtgaccgctttaagcacacgcgcacccactatgtggacaagccctactactgcaagatgcccggctgccacaagcgctacacggaccccagctcactgcgcaagcacatcaaggcccatggccactttgtgtcccacgagcagcaagagctcctgcagctgcgcccaccccccaagccgccactgcccgcccccgacggcggcccctatgtcagtggggcccagatcatcatccccaacccagctgccctctttggaggccctggcctgcccggcttacccctacccctggcccccggcccccttgacctcagtgccctggcctgtggcaacggtgggggcagtgggggtggggggggcatgggccctgggctgccaggccccgtcctgcctctcaatctggccaagaacccgctgctgccctcgccctttggggctggcggactgggcttgcctgtggtctccctccttgctggcgcagctggtggcaaggccgagggggagaaggggcgtgggtcggtgcccaccagggccctgggcatggagggccacaagacgccccttgaaaggacggagagcagctgctcccggccaagccccgatggactccccctgctgccaggcaccgtgctggacctgtccacgggcgtcaactcagctgccagcagcccagaggcgttggcccctggctgggtggtcatcccgccgggctcggtgctgctcaaaccggctgtggtgaactgagcccatcctgcggacagttgtggtgcccccccggcagctcccggcactgcccccgacgaacggaaactcttctgtgaaatagcaataatgtcctactgcccgggcagccccagcccagcccgccgggagcaaggatggtgctaggtcattcatggctggcctcccagcccccgggtggggacctggcctgtcatgcagggagagctgtgctcctgggtgctgaagcctcgctcctgtctgtcccccaccacctggccctcagcttctgagaggctttcccctgcccgacctcctcccgtttccctctcccaccctggcacctccctcacctagtgaccacccatggcaagttgccctctcccagcagagggggtgggtggggtggcatctgccctccctgctagcaccaggctcccccttcctgagaggagcccccagggaccagaggcctgcccttccctcctaggcttacccagcccctgccctgggggctccttggacccctttccctctgaccctgcctccagagggaaagcaagacagatgcaggcccctgcaaagccccaggtagaagcatgccccccaggacaaggcgcctcccactagttaggaggaggcccgctctgcagccgccgtcctcaccccaggccaggcctgcagtaccagacgggatagctggccactccacccctgcaccccagggtctcctccctctaccttttggggcaccctgggagcgtgggaagcaggtccgagggcccctgagctggcaaggggaggtgccaggccagctgtggtgccaagatactgagtgacctgggccctggctcagggagcatgtggggccaggcccagcgccccgtcttcctccttctacccccgctgggcctggcctgggcagcgccccctgcagaggcctttgggtccttggtcctgtaacaggaagggggaggctggctggggacgaccgaccacaggctgggacacagctcctggtctgggggctccaagtgacagcatgcaggggagggggctcccagtcagtgctgtgttgggagctttctggaggctgtggactgaaggccttgagggaagcagtggctggaggagggtgctggacccatgacacgttgcttcctctggcttttccctgctgggccgctttctcagaggcacttccccacccctaacacccagtgggcccccccaggttctgtgccactcagagggaccctggcaggggccagaaccacttaagggtggtgctggagggccttgtgccccagtcccatcccaggacgccctgagggatggacgcagccatgcaccccccatctggggcctctccctgctccctctcccacctggcagctgggagttctggcttctaggcctgccctgtcaccaggcctctgagtggccaggcccttccacctccccatctgtaaaacgaggcagctgcccggacagccttggggtccttagtggccctgcaggtcctctggcagctctgctgaccccaccctctcccggactgcccttctgtcccagaggggtcaccctgacccggcccaccttgccactgggctttggactccagccctgacagggcccagccacactggctctgcccctcgaaggggctatgagcaaggtaggagggagctggtctcctttcttcgggccccacccaggccctgagcaccccccacccctgtgagggccccaggccttaagtccctggcggggtcatgggtttgcgacttgagcagagcggaggaacagggcactggaaggccgacgagctcagcatgcgactcggtgacggaccaggctcggcagggccggtgtactttttgtggttgtcattggtgtgttgttgcacattccaggacgtcagtattttaacaggttctaagtgcctttctatcgtagcttatgttttcctcctcttggctccattgctgttagcatagagttttaaaaaaagagataagctaatgactataacaatatattcctccatgggagaggaagtttataaagaaacaataaaagtgagttgcaaagatg

SEQ ID NO: 137171 - DNA, 3705 bp, Homo sapiens
  Payload ID: 6855
  Gene Symbol: GLIS2
  Gene Name: GLIS family zinc finger 2
  Uniprot ID: Q9BZE0
  ENST ID: ENST00000612491
  CDS Start-End: 58-1632
tgaagaccagctgggagcccactgcctgctgccacctccaactccggccccctcaccatgcactccctggacgagccgctcgacctgaagctgagtatcaccaagctccgggcggcaagagagaagcgggagaggacgctgggtgtggtccggccccgtgctctgcacagggagctgggcctggtggatgacagccccacacctggctctccaggctccccgccctcaggcttcctgctgaactccaagttccccgagaaggtggagggacgcttttcagcagcccctctcgtggacctcagcctgtcaccaccatctgggctggactcccccaatggcagcagctcgctgtcccccgagcgccagggcaacggggacctgcctccagtgcccagtgcctcggacttccagccactgcgctatttggatggtgtccccagctccttccagttcttcctgcccctcggctccgggggggccctgcacctgcctgcctcctccttccttacccctcccaaggacaagtgcctctcgccagacctgcccctgcccaagcagctggtgtgtcgctgggccaagtgtaaccagctctttgagctcctgcaagacctggtggaccatgtcaacgattaccatgtcaagcccgagaaggatgcggggtactgctgccactgggagggctgcgcccgccatggccgaggtttcaacgccaggtacaagatgctcatccacatccgcacacacaccaacgagaagccacaccgctgtccgacctgcagcaagagcttctcccgcctggagaacctgaagatccacaaccggtcgcacacaggtgagaagccctacgtctgcccctacgagggctgcaacaagcgctattccaactccagtgaccgctttaagcacacgcgcacccactacgtggacaagccctactactgcaagatgcccggctgccacaagcgctacacggaccccagctcactgcgcaagcacatcaaggcccatggccactttgtgtcccacgagcagcaagagctcctgcagctgcgcccaccccccaagccgccactgcccgcccccgacggcggcccctatgtcagtggggcccagatcatcatccccaacccagctgccctctttggaggccctggcctgcccggcttacccctacccctggcccccggcccccttgacctcagtgccctggcctgtggcaacggtgggggcagtgggggtggggggggcatgggccctgggctgccaggccccgtcctgcctctcaatctggccaagaacccgctgctgccctcgccctttggggctggcggactgggcttgcctgtggtctccctccttgctggcgcagctggtggcaaggccgagggggagaaggggcgtgggtcggtgcccaccagggccctgggcatggagggccacaagacgccccttgaaaggacggagagcagctgctcccggccaagccccgatggactccccctgctgccaggcaccgtgctggacctgtccacgggcgtcaactcagctgccagcagcccagaggcgttggcccctggctgggtggtcatcccgccgggctcggtgctgctcaaaccggctgtggtgaactgagcccatcctgcggacagttgtggtgcccccccggcagctcccggcactgcccccgacgaacggaaactcttctgtgaaatagcaataatgtcctactgcccgggcagccccagcccagcccgccgggagcaaggatggtgctaggtcattcatggctggcctcccagcccccgggtggggacctggcctgtcatgcagggagagctgtgctcctgggtgctgaagcctcgctcctgtctgtcccccaccacctggccctcagcttctgagaggctttcccctgcccgacctcctcccgtttccctctcccaccctggcacctccctcacctagtgaccacccatggcaagttgccctctcccagcagagggggtgggtggggtggcatctgccctccctgctagcaccaggctcccccttcctgagaggagcccccagggaccagaggcctgcccttccctcctaggcttacccagcccctgccctgggggctccttggacccctttccctctgaccctgcctccagagggaaagcaagacagatgcaggcccctgcaaagccccaggtagaagcatgccccccaggacaaggcgcctcccactagttaggagaaggcccgctctgcagccgccgtcctcaccccaggccaggcctgcagtaccagacgggatagctggccactccacccctgcaccccagggtctcctccctctaccttttggggcaccctgggagcgtgggaagcaggtccgagggcccctgagctggcaaggggaggtgccaggccagctgtggtgccaagatactgagtgacctgggccctggctcagggagcatgtggggccaggcccagcgccccgtcttcctccttctacccccgctgggcctggcctgggcagcgccccctgcagaggcctttgggtccttggtcctgtaacaggaagggggaggctggctggggacgaccgaccacaggctgggacacagctcctggtctgggggctccaagtgacagcatgcaggggagggggctcccagtcagtgctgtgttgggagctttctggaggctgtggactgaaggccttgagggaagcagtggctggaggagggtgctggacccatgacacgttgcttcctctggcttttccctgctgggccgctttctcagaggcacttccccacccctaacacccagtgggcccccccaggttctgtgccactcagagggaccctggcaggggccagaaccacttaagggtggtgctggagggccttgtgccccagtcccatcccaggacgccctgagggatggacgcagccatgcaccccccatctggggcctctccctgctccctctcccacctggcagctgggagttctggcttctaggcctgccctgtcaccaggcctctgagtggccaggcccttccacctccccatctgtaaaacgaggcagctgcccggacagccttggggtccttagtggccctgcaggtcctctggcagctctgctgaccccaccctctcccggactgcccttctgtcccagaggggtcaccctgacccggcccaccttgccactgggctttggactccagccctgacagggcccagccacactggctctgcccctcgaaggggctatgagcaaggtaggagggagctggtctcctttcttcgggccccacccaggccctgagcaccccccacccctgtgagggccccaggccttaagtccctggcggggtcatgggtttgcgacttgagcagagcggaggaacagggcactggaaggccgacgagctcagcatgcgactcggtgacggaccaggctcggcagggccggtgtactttttgtggttgtcattggtgtgttgttgcacattccaggacgtcagtattttaacaggttctaagtgcctttctatcgtagcttatgttttcctcctcttggctccattgctgttagcatagagttttaaaaaaagagataagctaatgactataacaatatattcctccatgggagaggaagtttataaagaaacaataaaagtgagttgcaaagatg

SEQ ID NO: 137172 - DNA, 4469 bp, Homo sapiens
  Payload ID: 6855
  Gene Symbol: GLIS2
  Gene Name: GLIS family zinc finger 2
  Uniprot ID: Q9BZE0
  ENST ID: ENST00000633051
  CDS Start-End: 822-2396
agatgcctcacctctaggggatgctgattctgggatgcctttttcgtctcctaggctcctcaaggccaactgcgctgggaagagggggtgtccaacagcaggagggctgtttttttgaactacaatttgccagcatacagcagagcagcaagaagataacagggcggggggcacgggattagcccaaacaaaacacactcaagaacgcgagtctgtggttcaacacgaggcagaaaacagctgggccgggtgcggggcttctccctcgcgtgtatccgctcactgcactcgctgccctggccgcgggcgccgcgcagggtgctgatgtccaggagggatctagacctcccgcggcgctcgggctagtggacgcaggtggtcccaaatgctgggaccaagctaggaaccaagcggaagctcggattgctcggcatcgggcctcgtcgttattctaccgtgagggaaactgagaccgagggcacggcagggagtcgcccgccgtctcaccagcgtgaggggttgcgccgggccccgaaaactggtttgcgccgcccggcatcgggatccgggacctctgcccgccgggcgctgcctgcgcgttcctggaactgggctgggcggagaaatcagggcccgcagagaggcattcctgccgccttccccgccgcccggggccgcaggggggcctggccaaggcttccagcacagaggagcttcggggaggctggattgcgcctgtgtctaaaaataaacaggttcctgcgtgaagaccagctgggagcccactgcctgctgccacctccaactccggccccctcaccatgcactccctggacgagccgctcgacctgaagctgagtatcaccaagctccgggcggcaagagagaagcgggagaggacgctgggtgtggtccggccccgtgctctgcacagggagctgggcctggtggatgacagccccacacctggctctccaggctccccgccctcaggcttcctgctgaactccaagttccccgagaaggtggagggacgcttttcagcagcccctctcgtggacctcagcctgtcaccaccatctgggctggactcccccaatggcagcagctcgctgtcccccgagcgccagggcaacggggacctgcctccagtgcccagtgcctcggacttccagccactgcgctatttggatggtgtccccagctccttccagttcttcctgcccctcggctccgggggggccctgcacctgcctgcctcctccttccttacccctcccaaggacaagtgcctctcgccagacctgcccctgcccaagcagctggtgtgtcgctgggccaagtgtaaccagctctttgagctcctgcaagacctggtggaccatgtcaacgattaccatgtcaagcccgagaaggatgcggggtactgctgccactgggagggctgcgcccgccatggccgaggtttcaacgccaggtacaagatgctcatccacatccgcacacacaccaacgagaagccacaccgctgtccgacctgcagcaagagcttctcccgcctggagaacctgaagatccacaaccggtcgcacacaggtgagaagccctacgtctgcccctacgagggctgcaacaagcgctattccaactccagtgaccgctttaagcacacgcgcacccactacgtggacaagccctactactgcaagatgcccggctgccacaagcgctacacggaccccagctcactgcgcaagcacatcaaggcccatggccactttgtgtcccacgagcagcaagagctcctgcagctgcgcccaccccccaagccgccactgcccgcccccgacggcggcccctatgtcagtggggcccagatcatcatccccaacccagctgccctctttggaggccctggcctgcccggcttacccctacccctggcccccggcccccttgacctcagtgccctggcctgtggcaacggtgggggcagtgggggtggggggggcatgggccctgggctgccaggccccgtcctgcctctcaatctggccaagaacccgctgctgccctcgccctttggggctggcggactgggcttgcctgtggtctccctccttgctggcgcagctggtggcaaggccgagggggagaaggggcgtgggtcggtgcccaccagggccctgggcatggagggccacaagacgccccttgaaaggacggagagcagctgctcccggccaagccccgatggactccccctgctgccaggcaccgtgctggacctgtccacgggcgtcaactcagctgccagcagcccagaggcgttggcccctggctgggtggtcatcccgccgggctcggtgctgctcaaaccggctgtggtgaactgagcccatcctgcggacagttgtggtgcccccccggcagctcccggcactgcccccgacgaacggaaactcttctgtgaaatagcaataatgtcctactgcccgggcagccccagcccagcccgccgggagcaaggatggtgctaggtcattcatggctggcctcccagcccccgggtggggacctggcctgtcatgcagggagagctgtgctcctgggtgctgaagcctcgctcctgtctgtcccccaccacctggccctcagcttctgagaggctttcccctgcccgacctcctcccgtttccctctcccaccctggcacctccctcacctagtgaccacccatggcaagttgccctctcccagcagagggggtgggtggggtggcatctgccctccctgctagcaccaggctcccccttcctgagaggagcccccagggaccagaggcctgcccttccctcctaggcttacccagcccctgccctgggggctccttggacccctttccctctgaccctgcctccagagggaaagcaagacagatgcaggcccctgcaaagccccaggtagaagcatgccccccaggacaaggcgcctcccactagttaggagaaggcccgctctgcagccgccgtcctcaccccaggccaggcctgcagtaccagacgggatagctggccactccacccctgcaccccagggtctcctccctctaccttttggggcaccctgggagcgtgggaagcaggtccgagggcccctgagctggcaaggggaggtgccaggccagctgtggtgccaagatactgagtgacctgggccctggctcagggagcatgtggggccaggcccagcgccccgtcttcctccttctacccccgctgggcctggcctgggcagcgccccctgcagaggcctttgggtccttggtcctgtaacaggaagggggaggctggctggggacgaccgaccacaggctgggacacagctcctggtctgggggctccaagtgacagcatgcaggggagggggctcccagtcagtgctgtgttgggagctttctggaggctgtggactgaaggccttgagggaagcagtggctggaggagggtgctggacccatgacacgttgcttcctctggcttttccctgctgggccgctttctcagaggcacttccccacccctaacacccagtgggcccccccaggttctgtgccactcagagggaccctggcaggggccagaaccacttaagggtggtgctggagggccttgtgccccagtcccatcccaggacgccctgagggatggacgcagccatgcaccccccatctggggcctctccctgctccctctcccacctggcagctgggagttctggcttctaggcctgccctgtcaccaggcctctgagtggccaggcccttccacctccccatctgtaaaacgaggcagctgcccggacagccttggggtccttagtggccctgcaggtcctctggcagctctgctgaccccaccctctcccggactgcccttctgtcccagaggggtcaccctgacccggcccaccttgccactgggctttggactccagccctgacagggcccagccacactggctctgcccctcgaaggggctatgagcaaggtaggagggagctggtctcctttcttcgggccccacccaggccctgagcaccccccacccctgtgagggccccaggccttaagtccctggcggggtcatgggtttgcgacttgagcagagcggaggaacagggcactggaaggccgacgagctcagcatgcgactcggtgacggaccaggctcggcagggccggtgtactttttgtggttgtcattggtgtgttgttgcacattccaggacgtcagtattttaacaggttctaagtgcctttctatcgtagcttatgttttcctcctcttggctccattgctgttagcatagagttttaaaaaaagagataagctaatgactataacaatatattcctccatgggagaggaagtttataaagaaacaataaaagtgagttgcaaagatg

SEQ ID NO: 137173 - DNA, 6667 bp, Homo sapiens
  Payload ID: 6856
  Gene Symbol: GLIS3
  Gene Name: GLIS family zinc finger 3
  Uniprot ID: Q8NEA6
  ENST ID: ENST00000324333
  CDS Start-End: 195-2522
atcctttatggttgaagggtgttggaggaagcagagttttcatcagctgctgaagtggcaactaatagaggtttgaatggccgtagaaaaatattgtgttacttgtttgttgtctaggggctcttggctttgggcctcagtgcaagtccattggaaaaggcagctgcaacaatctagtggtcaccagcagtcccatgatggttcagcgactgggactcatttcacctccagcaagccaggtctctacagcatgcaaccagatcagtcctagcttacagagggcaatgaatgcagccaacctgaatatacctccttcagataccaggtcccttatttcgcgtgagtctttggcgtccacgaccttgagtctgacggaaagtcagtcggcctcaagcatgaagcaggagtggtcccagggctacagggccctcccttcgctctccaaccacggctctcagaatggccttgatctaggggatctccttagccttcctcccgggacatccatgtccagcaatagtgtctctaactcattaccatcctacctttttggcacggaaagtagccactctccttaccctagtcctcggcactcatccaccaggtcccactcggcccgctccaagaagagagcgctgtccttgtccccgctgtccgatggcatcgggatagatttcaataccatcatccgcacgtcgcccacgtccttggtggcctacatcaacgggtcgagggcttcgccggccaacctgtccccgcagccggaggtctacgggcatttcctgggcgtgcgcggcagctgcattccccagccgcgcccggtgcccggcagccagaagggcgtgctggtggcccctggaggcctggcgctgccggcctacggcgaggacggggccctggagcacgagcgcatgcaacagctggagcacggcggcctgcagccaggcctggtcaaccacatggtggtgcagcatggcctgccgggccccgacagccagtcggccggcctgttcaagaccgaacgcctggaggagttcccgggcagcaccgtagacctaccccccgcgcctccgctccctcctctgccgccgcccccaggccccccacccccttaccatgcccatgcgcaccttcaccacccggagctcgggccccacgcccagcagctggccttgccccaggccaccctggacgacgacggggagatggacggcatcgggggcaagcattgctgccgctggatcgactgcagcgccctgtacgaccagcaggaggagctcgtgcggcacatcgagaaggtccacatcgaccagcgcaaaggggaggacttcacttgcttctgggccggttgccctcgaagatacaagcccttcaacgcccgctataaactgctgatccacatgagagtccactctggggagaagcccaacaagtgtacgtttgaaggttgcgagaaggccttttcaaggcttgaaaatctcaagatccacttgcggagccacacaggcgagaagccgtatttgtgccagcatccgggttgtcagaaggccttcagtaactccagtgaccgcgccaaacaccagcggacgcatctggacaccaaaccttatgcttgtcaaattccaggatgtaccaaacgctacacagacccaagttccctaagaaagcatgtgaaggcacattcttccaaagagcaacaagcaaggaaaaagttgcggtccagcacagagctccatccagacctgctcacagattgcctcaccgtgcagtccctgcagccggccacttcccctagagatgctgctgctgaagggaccgtgggacgctcccctggacccgggcctgacctctattcagctcccattttctccagcaattattcaagccgaagtggaacagctgctggggccgtaccacccccacatcctgtcagtcacccttctccaggacataatgtacaggggagccctcacaacccctcctcccagttacctccactcacagctgtggacgcaggagctgagaggtttgcaccttctgctccatctcctcaccacatcagcccccggagagttccagctccttcttcaatactgcaaagaacacagcctccctatacccagcagccatcaggttcacacctgaagtcctatcagccagaaacaaactcttcttttcaaccaaatggtatccatgtccatggattttatgggcagctgcagaagttctgtcccccacactaccccgattcccagagaattgtgccgcctgtcagctcctgcagtgtggtgccttcgtttgaggactgcctagtccctacatccatgggccaggccagttttgatgttttccacagagccttctcgactcactcgggcattacagtgtatgatttaccttcaagttcctcgagcctctttggggagtctctccgcagcggggctgaagatgctaccttcttgcagatcagcaccgtggaccgctgtcctagccagctctcctctgtctacaccgaaggctaaaagctctcttggccactcctgcacacccaggaccttgatgttgcttgccaccttttgttttcgtactctcacagactgcttgaggaaggatgtcagcccaatcagcgggccctgcagagttactgatgttctttcagaaggcaggactgaatggcagagctagctttgcaggaatcattacagttgctcctttttctctctggttttcctggactatgtgaccaggaggactgtcttttcaaagggaatttagagcctcactctcctggatacctgttacttcctggctgtcaacccttaaaggaccccagtgaaatgatgtgcatatgaaaatgtagtttggggatgactctacctgaaaactccaaacagggaaaaagacctcaattacgagaggcatagtgacctgcctcacctaatcctcacccttgctgctcctgatgcaaagccaggcacaacaagggaaatccatgtccaaagcatagtgtggtctcaactcttagaaactccctgggtttcccttttctcttagccacatgctaaccagttgcttctcagtgtttctcttcaatagaaaaataaggttttatatgccagcagcctatccttgtttttgcattttaaagacttagttatttatacgtattttaaaatgaaaaaaaaatgtaaaggtctgtgctttggatggaaatcattattattgtaatcaccccagctatagacattttgcacagctgtggttctgcctggccccacctctagcatgttagttttgcagttagcaaaggttacctgagggaaatggagtgggcacctcccgcaccaacagtcctgtagctggaaccttcctgagttgactgtttagtaactccacctcaaagactgtgttcaaagaaaaatgttgtttgactggtttacccattgcctccactctggtgctgcacccagagaagtgccagatgtgagaactgggacagactgagtcatgtgccagcttcccttggaaaaccaaacctagtgatacttgacttccagtgctcagattttactaacgtttttcaggatatccactcatctgtctgtctcttccctacacttctctccaccctctttttgcatccctcttaccctcttcctgactgtggttcatatatccccaccagccgccattgtctgatcatcttgggaaggtagaggtgacagttctcgaaaagtctacagaaagaggcaattctttttctgagttccagtttgaaggcctggaattttcacatagcacttggtcgaaaatatcaagcctaaataggaagtcattttctgtgacacctctacatagctattacagatcctaagtcctagggcatcagctataaaaattggccagtcccaaagacacagtaagttctaacattctggtactatcatatttcaagtattttttctcactttttaaaaatgtttttctgaacaaaagtgaaacaatgccatttatcaaactgagatcattacaatcttcaacaagacaactaaaacagcttgatgttagatgggattctgtgacagtttgtatactgacaggtccttccagtctccctccacagtcccacaagcggaagtattctacctgattccagagttcattccaacatgcagtagaatgaggtgaatgaagaaccaagtgtgggttttgttttcacagtgcacttggtcaatctagtttctctgagtagtgggctgtattctaagaaaagctttcacgtagacgtcaaagtctgcaaaagagatgagttagccactttaaaaaacctgctctgctttacaaaagatgcacaccaggcttcctttacaagtgaactccaaggctgcttgtaaagtaccacccttcctgcagactttgtgggtcgtgtcacttggcctaaacaagtggcctaacatatgcatgctcacagctagtagcatccctcatgcgtcctttgtcatactctggaaagaaaaaaactctgctatcttcagagaaaccatctattcatacttaaatatggaagcctttacaaggaactcaaaatacatttcatttcatttgtacaatgagaaaaaagatgaaaaggcaaggttgttattgcagttgacattgtcagccctgccttttggctttatgtaatttaaaatagaaagggggaaggaggacaagacagaagctcaactttagaaaccatggacatcacctccctctttgagaggagctgcttgtgaaccaggctccagtcttcctgtggcctctcacagtaaccctgcccctttcttacctcacaggggcaagagggactctaaagagggcgtaagcaatagaggcacctgcagccctccttcctcagcaggaaatcaatgtggagccccagagggacattttatctcagagagagcatgctggccacaggacccagtgcagccctgcttcccgcaccgtgggtctttcctgatagctgcaggcttgagattgcagcctcaggataggacacgttcagatgccttccagactacacacactatgcttagattcgagagtctttcctgaccttaaaatttgtcccttgcttactttcacactgcagaagatttatatatatattcatcattatttttgcagcagtacaagtggaaacttcaaaaaaatcattccctttcatgtcctggtctttttaagtcttgatatgtaaccattttcataaatgtccaaacagagattgtcattccccttaaaaacagaaacaaaacacaaaactagtgcttgtgaaaacacacagcgcaaagacaattatcctattgcattaaaaaaaaaatcagtctgcctagagacatttcattggctgcattgtcttaattccctaacgaaactgcatcaaaatgtcagttgtaatttagcctctgatcagctgttaaatattatttaaatatttacaggtcctgtggggtatctcccattacccatgtcgccctcaaattacataagcgatcataaaataagaagaaaaaaaaaggtctttagtagatcacagcagagttaccactgataagagtgttggctttgttcagttgtttctaaattaccagccgtcaagcacagtagcccctaaaaccaattttgagcaaggataaattcaactccctcatctgagaaccttgactttccagttgccttgaagtattgggaatagtaactgtacattttcaatttaattatttggtattttatttgactgtcttggccatgtcattttatggaagcatttttaaatagcactttttgttagtggtgtggaatttctgcggttattatttttttttttttttgcaacagatgaagcaaaaaaaaaaaagcactcattggagaaatagtgagtgtaaaaagagatttattttgtacagacagcaaagtatcctgtgtaatgttgctgacataaagcactttgggggaaaaaagtggaaatctgttttccataaatcacacagactcttgtacatagttatatacactcacgtagagaaatgaactgcatatatcatactggatatggggccgattttactctagaggcacatctggtgcttattgtcataaatcttttaaagaattaggtacacttttttctattaatatgtatagttttgtgatttgtcacagttatgtttcatataatcataagttattttgtcttgttcatgaagtcctttttttatgtcaaaagtaaaatgaagggattgtgcacttggtacagaataaaactggaaatagagaagacgccctcctgcctaaaatcctccttcagcctgtcggtttaaaacacaatggcaaccatcattgtttgtttgtttgtttttttgttttgttttaccatcagcctcttacatactgggaatggtaattataattaaaggcagatgatgcgggagggaatgttcaagtccagctttaaaatgctgcattgctttgggccagagctgtagcctggatttaattatagatatgaggaggaaatggcagtaaaaatgaatgtctccctgagtcctttacatgttgggagtgtccataaataaaacatgaagttttatttcatcagatttaattaaagcttttatacatgttt

SEQ ID NO: 137174 - DNA, 3961 bp, Homo sapiens
  Payload ID: 6856
  Gene Symbol: GLIS3
  Gene Name: GLIS family zinc finger 3
  Uniprot ID: Q8NEA6
  ENST ID: ENST00000381971
  CDS Start-End: 595-3387
cgggaccccctgtacgccgtccgcgccgtccagggtcacaccggcgacggaacccgccggcagcaattagccagcatcccggggtcggcccccagaagcattccccggcccaggacgaggatgaacaggacaggcgaggcacaaagtcgcaactgaactttttagaaacattatttgtgtgtgtatgtgtgtagcaggggagaatgagctgatgccgagggtccagccaccccgcctctgcctcctcctccccctgccgccgctgccctcgcagacgcgcgcgcacacacggcacttgggccgggtttccgcgctccgtccccccgtttggatgggggttttcatttccgaaggaggcacagcccgcggagcgctctgaagggctggagccccaagttactcctcgccagcgccggccgcccgctgtcactcgcgctggccggccgggggaagggacccgcacgccgggctttgttgtggaaatcccggttacctggcttataacccacaccatggataacttattggactttgcctgaaaggagtcattagtgacattggatatttgaccgtcttggccacaggtttttcagaatgaatggaagatcatgcagcatgagtctccaccggacatcgggaaccccacaggggcctaggatggtcagtggtcatcacattcctgccatccgagcccactccgggactcctggcccctcgccctgtggcagcacatcgagtcccactatggcaagccttgctaacaacctccatctcaagatgccctcaggaggagggatggctcctcagaacaacgtggctgagagccgcatccatctgcctgccttaagccccaggagacaaatgctcaccaatgggaagccgcgattccaggtcacccaggctggaggcatgtcagggtcacatactttaaagccaaagcagcaggagtttggaagcccttttcctccaaatcctgggaaaggggctcttggctttgggcctcagtgcaagtccattggaaaaggcagctgcaacaatctagtggtcaccagcagtcccatgatggttcagcgactgggactcatttcacctccagcaagccaggtctctacagcatgcaaccagatcagtcctagcttacagagggcaatgaatgcagccaacctgaatatacctccttcagataccaggtcccttatttcgcgtgagtctttggcgtccacgaccttgagtctgacggaaagtcagtcggcctcaagcatgaagcaggagtggtcccagggctacagggccctcccttcgctctccaaccacggctctcagaatggccttgatctaggggatctccttagccttcctcccgggacatccatgtccagcaatagtgtctctaactcattaccatcctacctttttggcacggaaagtagccactctccttaccctagtcctcggcactcatccaccaggtcccactcggcccgctccaagaagagagcgctgtccttgtccccgctgtccgatggcatcgggatagatttcaataccatcatccgcacgtcgcccacgtccttggtggcctacatcaacgggtcgagggcttcgccggccaacctgtccccgcagccggaggtctacgggcatttcctgggcgtgcgcggcagctgcattccccagccgcgcccggtgcccggcagccagaagggcgtgctggtggcccctggaggcctggcgctgccggcctacggcgaggacggggccctggagcacgagcgcatgcaacagctggagcacggcggcctgcagccaggcctggtcaaccacatggtggtgcagcatggcctgccgggccccgacagccagtcggccggcctgttcaagaccgaacgcctggaggagttcccgggcagcaccgtagacctaccccccgcgcctccgctccctcctctgccgccgcccccaggccccccacccccttaccatgcccatgcgcaccttcaccacccggagctcgggccccacgcccagcagctggccttgccccaggccaccctggacgacgacggggagatggacggcatcgggggcaagcattgctgccgctggatcgactgcagcgccctgtacgaccagcaggaggagctcgtgcggcacatcgagaaggtccacatcgaccagcgcaaaggggaggacttcacttgcttctgggccggttgccctcgaagatacaagcccttcaacgcccgctataaactgctgatccacatgagagtccactctggggagaagcccaacaagtgtacgtttgaaggttgcgagaaggccttttcaaggcttgaaaatctcaagatccacttgcggagccacacaggcgagaagccgtatttgtgccagcatccgggttgtcagaaggccttcagtaactccagtgaccgcgccaaacaccagcggacgcatctggacaccaaaccttatgcttgtcaaattccaggatgtaccaaacgctacacagacccaagttccctaagaaagcatgtgaaggcacattcttccaaagagcaacaagcaaggaaaaagttgcggtccagcacagagctccatccagacctgctcacagattgcctcaccgtgcagtccctgcagccggccacttcccctagagatgctgctgctgaagggaccgtgggacgctcccctggacccgggcctgacctctattcagctcccattttctccagcaattattcaagccgaagtggaacagctgctggggccgtaccacccccacatcctgtcagtcacccttctccaggacataatgtacaggggagccctcacaacccctcctcccagttacctccactcacagctgtggacgcaggagctgagaggtttgcaccttctgctccatctcctcaccacatcagcccccggagagttccagctccttcttcaatactgcaaagaacacagcctccctatacccagcagccatcaggttcacacctgaagtcctatcagccagaaacaaactcttcttttcaaccaaatggtatccatgtccatggattttatgggcagctgcagaagttctgtcccccacactaccccgattcccagagaattgtgccgcctgtcagctcctgcagtgtggtgccttcgtttgaggactgcctagtccctacatccatgggccaggccagttttgatgttttccacagagccttctcgactcactcgggcattacagtgtatgatttaccttcaagttcctcgagcctctttggggagtctctccgcagcggggctgaagatgctaccttcttgcagatcagcaccgtggaccgctgtcctagccagctctcctctgtctacaccgaaggctaaaagctctcttggccactcctgcacacccaggaccttgatgttgcttgccaccttttgttttcgtactctcacagactgcttgaggaaggatgtcagcccaatcagcgggccctgcagagttactgatgttctttcagaaggcaggactgaatggcagagctagctttgcaggaatcattacagttgctcctttttctctctggttttcctggactatgtgaccaggaggactgtcttttcaaagggaatttagagcctcactctcctggatacctgttacttcctggctgtcaacccttaaaggaccccagtgaaatgatgtgcatatgaaaatgtagtttggggatgactctacctgaaaactccaaacagggaaaaagacctcaattacgagaggcatagtgacctgcctcacctaatcctcacccttgctgctcctgatgcaaagccaggcacaacaagggaaatccatgtccaaagcatagtgtggtctcaactcttagaaactccctgggtttcccttttctcttagccacatgctaaccagttgcttctcagtgtttctcttcaatag

SEQ ID NO: 137175 - DNA, 1327 bp, Homo sapiens
  Payload ID: 6856
  Gene Symbol: GLIS3
  Gene Name: GLIS family zinc finger 3
  ENST ID: ENST00000477901
  CDS Start-End: 595-1327
cgggaccccctgtacgccgtccgcgccgtccagggtcacaccggcgacggaacccgccggcagcaattagccagcatcccggggtcggcccccagaagcattccccggcccaggacgaggatgaacaggacaggcgaggcacaaagtcgcaactgaactttttagaaacattatttgtgtgtgtatgtgtgtagcaggggagaatgagctgatgccgagggtccagccaccccgcctctgcctcctcctccccctgccgccgctgccctcgcagacgcgcgcgcacacacggcacttgggccgggtttccgcgctccgtccccccgtttggatgggggttttcatttccgaaggaggcacagcccgcggagcgctctgaagggctggagccccaagttactcctcgccagcgccggccgcccgctgtcactcgcgctggccggccgggggaagggacccgcacgccgggctttgttgtggaaatcccggttacctggcttataacccacaccatggataacttattggactttgcctgaaaggagtcattagtgacattggatatttgaccgtcttggccacaggtttttcagaatgaatggaagatcatgcagcatgagtctccaccggacatcgggaaccccacaggggcctaggatggtcagtggtcatcacattcctgccatccgagcccactccgggactcctggcccctcgccctgtggcagcacatcgagtcccactatggcaagccttgctaacaacctccatctcaagatgccctcaggaggagggatggctcctcagaacaacgtggctgagagccgcatccatctgcctgccttaagccccaggagacaaatgctcaccaatgggaagccgcgattccaggtcacccaggctggaggcatgtcagggtcacatactttaaagccaaagcagcaggagtttggaagcccttttcctccaaatcctgggaaaggggctcttggctttgggcctcagtgcaagtccattggaaaaggcagctgcaacaatctagtggtcaccagcagtcccatgatggttcagcgactgggactcatttcacctccagcaagccaggtctctacagcatgcaaccagatcagtcctagcttacagagggcaatgaatgcagccaacctgaatatacctccttcagataccaggtcccttatttcgcgtgagtctttggcgtccacgaccttgagtctgacggaaagtcagtcggcctcaagcatgaagcaggagtggtcccagggctacagggccctcccttcgctctccaaccacggctctcagaatg

SEQ ID NO: 137176 - DNA, 944 bp, Homo sapiens
  Payload ID: 6856
  Gene Symbol: GLIS3
  Gene Name: GLIS family zinc finger 3
  ENST ID: ENST00000481827
  CDS Start-End: 212-944
agttccaagttactcactggagctgacaagtcacctcggggaccgggaagtcactcaagtgtctggaaatcttggccctggctgatttgtcatcctatggatgattcaattaggcttataacccacaccatggataacttattggactttgcctgaaaggagtcattagtgacattggatatttgaccgtcttggccacaggtttttcagaatgaatggaagatcatgcagcatgagtctccaccggacatcgggaaccccacaggggcctaggatggtcagtggtcatcacattcctgccatccgagcccactccgggactcctggcccctcgccctgtggcagcacatcgagtcccactatggcaagccttgctaacaacctccatctcaagatgccctcaggaggagggatggctcctcagaacaacgtggctgagagccgcatccatctgcctgccttaagccccaggagacaaatgctcaccaatgggaagccgcgattccaggtcacccaggctggaggcatgtcagggtcacatactttaaagccaaagcagcaggagtttggaagcccttttcctccaaatcctgggaaaggggctcttggctttgggcctcagtgcaagtccattggaaaaggcagctgcaacaatctagtggtcaccagcagtcccatgatggttcagcgactgggactcatttcacctccagcaagccaggtctctacagcatgcaaccagatcagtcctagcttacagagggcaatgaatgcagccaacctgaatatacctccttcagataccaggtcccttatttcgcgtgagtctttggcgtccacgaccttgagtctgacggaaagtcagtcggcctcaagcatgaagcaggagtggtcccagggctacagggccctcccttcgctctccaaccacggctctcagaatg

SEQ ID NO: 137177 - DNA, 458 bp, Homo sapiens
  Payload ID: 6856
  Gene Symbol: GLIS3
  Gene Name: GLIS family zinc finger 3
  ENST ID: ENST00000478844
  CDS Start-End: 191-458
agttccaagttactcactggagctgacaagtcacctcggggaccgggaagtcactcaagtgtctggaaatcttggccctggctgatttgtcatcctatggatgattcaattaggggctcttggctttgggcctcagtgcaagtccattggaaaaggcagctgcaacaatctagtggtcaccagcagtcccatgatggttcagcgactgggactcatttcacctccagcaagccaggtctctacagcatgcaaccagatcagtcctagcttacagagggcaatgaatgcagccaacctgaatatacctccttcagataccaggtcccttatttcgcgtgagtctttggcgtccacgaccttgagtctgacggaaagtcagtcggcctcaagcatgaagcaggagtggtcccagggctacagggccctcccttcgctctccaaccacggctctcagaatg

SEQ ID NO: 137178 - DNA, 700 bp, Homo sapiens
  Payload ID: 6856
  Gene Symbol: GLIS3
  Gene Name: GLIS family zinc finger 3
  ENST ID: ENST00000462164
  CDS Start-End: 433-700
actgacctcatccatagtgtggtgtttggtctatgagcagttgattcaccagttttcagagcccaagtctaaaatcacagatcctgtgggggatctgggagcatctgccttacctttatgaaggttatggtcagttaagccttgctttcaatgggctcacttcgctatgggaagaaaattctgcagttgttaaaaacaaaaggacactgccttttccaagggagctgacagctattggtttttccggagaggattactggtgaagacagttatgaagaacaagtaactcttgtaaataaacagcatgttcttgcttaaatatttcccagaacagttctaaagaaatataatacaggggctcttggctttgggcctcagtgcaagtccattggaaaaggcagctgcaacaatctagtggtcaccagcagtcccatgatggttcagcgactgggactcatttcacctccagcaagccaggtctctacagcatgcaaccagatcagtcctagcttacagagggcaatgaatgcagccaacctgaatatacctccttcagataccaggtcccttatttcgcgtgagtctttggcgtccacgaccttgagtctgacggaaagtcagtcggcctcaagcatgaagcaggagtggtcccagggctacagggccctcccttcgctctccaaccacggctctcagaatg

SEQ ID NO: 137179 - DNA, 693 bp, Homo sapiens
  Payload ID: 6856
  Gene Symbol: GLIS3
  Gene Name: GLIS family zinc finger 3
  ENST ID: ENST00000478315
  CDS Start-End: 426-693
catttgtcagatgctttcctctctgcactccagcctttgctgaatgtcctggcagttcctgaatgttcctgctgcctgcattttataaaaccaaagagcaagtagccctggaaatgtatgccaagtactctgcacagctgtctgaggcccccagccaagggcaagatataaacaatctatacccacacaggtacacaagcagacactgcatatggaagccccgcagtgcaaggacttcttacttctaacactttaaaatgtcagtggccaaacagcctgagaacatgaataatttaagcatgagatgcttttgctgatgattttgatcatttttcaggaagaataatggggctcttggctttgggcctcagtgcaagtccattggaaaaggcagctgcaacaatctagtggtcaccagcagtcccatgatggttcagcgactgggactcatttcacctccagcaagccaggtctctacagcatgcaaccagatcagtcctagcttacagagggcaatgaatgcagccaacctgaatatacctccttcagataccaggtcccttatttcgcgtgagtctttggcgtccacgaccttgagtctgacggaaagtcagtcggcctcaagcatgaagcaggagtggtcccagggctacagggccctcccttcgctctccaaccacggctctcagaatg

SEQ ID NO: 137180 - DNA, 797 bp, Homo sapiens
  Payload ID: 6856
  Gene Symbol: GLIS3
  Gene Name: GLIS family zinc finger 3
  ENST ID: ENST00000491889
  CDS Start-End: 273-701
cccgtttggatgggggttttcatttccgaaggaggcacagcccgcggagcgctctgaagggctggagccccaagttactcctcgccagcgccggccgcccgctgtcactcgcgctggccggccgggggaagggacccgcacgccgggctttgttgtggaaatcccggttacctggcttataacccacaccatggataacttattggactttgcctgaaaggagtcattagtgacattggatatttgaccgtcttggccacaggtttttcagaatgaatggaagatcatgcagcatgagtctccaccggacatcgggaaccccacaggggcctaggatggtcagtggtcatcacattcctgccatccgagcccactccgggactcctggcccctcgccctgtggcagcacatcgagtcccactatggcaagccttgctaacaacctccatctcaagatgccctcaggaggagggatggctcctcagaacaacgtggctgagagccgcatccatctgcctgccttaagccccaggagacaaatgctcaccaatgggaagccgcgattccaggtcacccaggctggaggcatgtcagggtcacatactttaaagccaaagcagcaggagtttggaagcccttttcctccaaatcctgggaaaggtcccttatttcgcgtgagtctttggcgtccacgaccttgagtctgacggaaagtcagtcggcctcaagcatgaagcaggagtggtcccagggctacagggccctcccttcgctctccaaccacggctctcagaatg

SEQ ID NO: 137181 - DNA, 871 bp, Homo sapiens
  Payload ID: 6857
  Gene Symbol: GBGT1
  Gene Name: globoside alpha-1,3-N-acetylgalactosaminyltransferase 1
  ENST ID: ENST00000372036
  CDS Start-End: 263-481
cggccccgctgcctgccctgctccaggctccacctgcgccgccgatcgcccgggtatcgcgggggcccaggccagctgagtccgttttccgcgccggggtggcgcccctccaaccgtcctaacgccgggccggcagcaaggagtgttcctgggacctcagagaccaggctcagagcctgacatccctgcgaggggacagcctcatccgcccaggccagtgggggtctctacaagtgcccaggctcaggtgcagcccccagcaatgcatcgccggagactggccctgggtctggggttctgcctgttggcgggcacaagcctcagtgtcctgtgggtgtatcttgagaactggctgccagtctcctatgtcccctattatctcccctgcccagagatcttgctggagtaccgtggcgtgatctcagctcattgcaacctccacctcccgggttcaagcaattgtcatgcctcagccacctgaatagctgggattacaggcacacacgctaatttttgtatttttagtagaaacagcatttcatcatgttggccaggttggtctttgcccccttcggccaggcttcgccccctcatcggcctcccaaagtgctgggattaaaggcgtgaaccaccacccctggccttaatttttttttttttttattattactagtgagactctcatttccctacgtcttcccgttaattgaaatttttcttgtgtgaagtgcttcttccccaccttctctgtttggtccgtttgtgggttctctatcatcactcttggctaagtatacctacaacttttttttttctttccagtttgtctatcttgtgtgtgtgcgtggcggagggagataaggtctggctc

SEQ ID NO: 137182 - DNA, 847 bp, Homo sapiens
  Payload ID: 6857
  Gene Symbol: GBGT1
  Gene Name: globoside alpha-1,3-N-acetylgalactosaminyltransferase 1
  ENST ID: ENST00000372038
  CDS Start-End: 265-747
cgcggccccgctgcctgccctgctccaggctccacctgcgccgccgatcgcccgggtatcgcgggggcccaggccagctgagtccgttttccgcgccggggtggcgcccctccaaccgtcctaacgccgggccggcagcaaggagtgttcctgggacctcagagaccaggctcagagcctgacatccctgcgaggggacagcctcatccgcccaggccagtgggggtctctacaagtgcccaggctcaggtgcagcccccagcaatgcatcgccggagactggccctgggtctggggttctgcctgttggcgggcacaagcctcagtgtcctgtgggtgtatcttgagaactggctgccagtctcctatgtcccctattatctcccctgcccagagatcttacccatgatgatggctctttcttgcctctgccaccagcaacatgaagctgcactacaagagggagaagccactccagcccgtggtatggtcacagtaccctcagcccaagctgctggagcacaggcccacacagctgctgacactcacaccctggttggcgcccatcgtctccgagggaaccttcaacccagagcttctgcagcacatctaccagccactgaacctgaccattggggtcacggtgtttgccgtggggaagtacactcatttcatccagtccttcctggagtcagccgaggagttcttcatgcgtgggtaccgggtgcactactacatcttcactgacaaccctgcagccgttcccggggtcccgctgggtccccaccggcttctcagctccatccccatccagggtcactcccactgggaggagacatccatgcgc

SEQ ID NO: 137183 - DNA, 1980 bp, Homo sapiens
  Payload ID: 6857
  Gene Symbol: GBGT1
  Gene Name: globoside alpha-1,3-N-acetylgalactosaminyltransferase 1
  Uniprot ID: Q8N5D6
  ENST ID: ENST00000372040
  CDS Start-End: 313-1356
ctcttttctgtcctctttcctgtctgtcttcctcttttctgtctggcccgcggccccgctgcctgccctgctccaggctccacctgcgccgccgatcgcccgggtatcgcgggggcccaggccagctgagtccgttttccgcgccggggtggcgcccctccaaccgtcctaacgccgggccggcagcaaggagtgttcctgggacctcagagaccaggctcagagcctgacatccctgcgaggggacagcctcatccgcccaggccagtgggggtctctacaagtgcccaggctcaggtgcagcccccagcaatgcatcgccggagactggccctgggtctggggttctgcctgttggcgggcacaagcctcagtgtcctgtgggtgtatcttgagaactggctgccagtctcctatgtcccctattatctcccctgcccagagatcttcaacatgaagctgcactacaagagggagaagccactccagcccgtggtatggtcacagtaccctcagcccaagctgctggagcacaggcccacacagctgctgacactcacaccctggttggcgcccatcgtctccgagggaaccttcaacccagagcttctgcagcacatctaccagccactgaacctgaccattggggtcacggtgtttgccgtggggaagtacactcatttcatccagtccttcctggagtcagccgaggagttcttcatgcgtgggtaccgggtgcactactacatcttcactgacaaccctgcagccgttcccggggtcccgctgggtccccaccggcttctcagctccatccccatccagggtcactcccactgggaggagacatccatgcgccggatggagaccatcagccagcacattgctaagagggctcaccgggaggtggactacctcttctgccttgatgtggacatggtgtttcggaacccgtggggccctgagaccttgggagacctggtggctgccattcacccaagctactacgccgttccccgccagcagttcccctatgagcgcaggcgtgtttccactgcctttgtggcagacagcgaaggggacttctattatggtggggcagtcttcggggggcaggtggccagggtatatgagtttactaggggctgccacatggccatcctggcggacaaggccaatggcatcatggctgcctggcgggaggaaagccacctgaaccgtcacttcatctcaaacaagccgtccaaggtgctgtcccccgagtacctctgggacgacaggaagccccagccacccagcctgaagctgatccgcttttctacactggacaaggatatcagctgcctgaggagctgaccacggagctgggggttgccatggatggggacccaaagacctgcagccaccagtgcttcactagcgtgcagaccagccctgtcccgcctccctgtcagtcaggcgaattcaaccggaaaagggacgtggaaaggccactgtgaactgcagagggctgtgcacacagtagcacacaggatctcacagtaacgcggcatgggaacagtgagacagggggaggggaggcgcagttacaaaggcagggcccggcaggcttgccacgttctgcagccgtgcctttgcggggcaggctctgaagcctcagcccgactcagagtgcctgaaccctgccgcgccagtcccccgtttattgcatattgcccttaacgtagcatttctaataccctggtgtgaaggcgccctagaccccttttctctggtcacaggggtcctgggtcctttgatgtctcccaaccacatgtagccaattcctcactcaggcccccagagtgagcctttgaaatggaacaggtctaggctccctcggtttcctgcaccccaaagtgagccgcactctcaggggactagccacctccttcttaagagggtttggggcagtttataataaagggggcgtgtgctcaa

SEQ ID NO: 137184 - DNA, 1935 bp, Homo sapiens
  Payload ID: 6857
  Gene Symbol: GBGT1
  Gene Name: globoside alpha-1,3-N-acetylgalactosaminyltransferase 1
  Uniprot ID: Q8N5D6
  ENST ID: ENST00000372043
  CDS Start-End: 287-1171
tcttcctcttttctgtctggcccgcggccccgctgcctgccctgctccaggctccacctgcgccgccgatcgcccgggtatcgcgggggcccaggccagctgagtccgttttccgcgccggggtggcgcccctccaaccgtcctaacgccgggccggcagcaaggagtgttcctgggacctcagagaccaggctcagagcctgacatccctgcgaggggacagcctcatccgcccaggccagtgggggtctctacaagtgcccaggctcaggtgcagcccccagcaatgcatcgccggagactggccctgggtctggggttctgcctgttggcgggcacaagcctcagtgtcctgtgggtgtatcttgagaactggctgccagtctcctatgtcccctattatctcccctgcccagagatcttcaacatgaagctgcactacaagagggagaagccactccagcccgtggtatggtcacagtaccctcagcccaagctgctggagcacaggcccacacagctgctgacactcacaccctggttggcgcccatcgtctccgagggaaccttcaacccagagcttctgcagcacatctaccagccactgaacctgaccattggggtcacggtgtttgccgtggggaatccttcctggagtcagccgaggagttcttcatgcgtgggtaccgggtgcactactacatcttcactgacaaccctgcagccgttcccggggtcccgctgggtccccaccggcttctcagctccatccccatccagggtcactcccactgggaggagacatccatgcgccggatggagaccatcagccagcacattgctaagagggctcaccgggaggtggactacctcttctgccttgatgtggacatggtgtttcggaacccgtggggccctgagaccttgggagacctggtggctgccattcacccaagctactacgccgttccccgccagcagttcccctatgagcgcaggcgtgtttccactgcctttgtggcagacagcgaaggggacttctattatggtggggcagtcttcggggggcaggtggccagggtatatgagtttactaggggctgccacatggccatcctggcggacaaggccaatggcatcatggctgcctggcgggaggaaagccacctgaaccgtcacttcatctcaaacaagccgtccaaggtgctgtcccccgagtacctctgggacgacaggaagccccagccacccagcctgaagctgatccgcttttctacactggacaaggatatcagctgcctgaggagctgaccacggagctgggggttgccatggatggggacccaaagacctgcagccaccagtgcttcactagcgtgcagaccagccctgtcccgcctccctgtcagtcaggcgaattcaaccggaaaagggacgtggaaaggccactgtgaactgcagagggctgtgcacacagtagcacacaggatctcacagtaacgcggcatgggaacagtgagacagggggaggggaggcgcagttacaaaggcagggcccggcaggcttgccacgttctgcagccgtgcctttgcggggcaggctctgaagcctcagcccgactcagagtgcctgaaccctgccgcgccagtcccccgtttattgcatattgcccttaacgtagcatttctaataccctggtgtgaaggcgccctagaccccttttctctggtcacaggggtcctgggtcctttgatgtctcccaaccacatgtagccaattcctcactcaggcccccagagtgagcctttgaaatggaacaggtctaggctccctcggtttcctgcaccccaaagtgagccgcactctcaggggactagccacctccttcttaagagggtttggggcagtttataataaagggggcgtgtgctcaa

SEQ ID NO: 137185 - DNA, 1934 bp, Homo sapiens
  Payload ID: 6857
  Gene Symbol: GBGT1
  Gene Name: globoside alpha-1,3-N-acetylgalactosaminyltransferase 1
  Uniprot ID: Q8N5D6
  ENST ID: ENST00000540636
  CDS Start-End: 313-1305
ctcttttctgtcctctttcctgtctgtcttcctcttttctgtctggcccgcggccccgctgcctgccctgctccaggctccacctgcgccgccgatcgcccgggtatcgcgggggcccaggccagctgagtccgttttccgcgccggggtggcgcccctccaaccgtcctaacgccgggccggcagcaaggagtgttcctgggacctcagagaccaggctcagagcctgacatccctgcgaggggacagcctcatccgcccaggccagtgggggtctctacaagtgcccaggctcaggtgcagcccccagcaatgcatcgccggagactggccctgggtctggggttctgcctgttggcgggcacaagcctcagtgtcctgtgggtgtatcttgagaactggctgccagtctcctatgtcccctattatctcccctgcccagagatcttgtcacagtaccctcagcccaagctgctggagcacaggcccacacagctgctgacactcacaccctggttggcgcccatcgtctccgagggaaccttcaacccagagcttctgcagcacatctaccagccactgaacctgaccattggggtcacggtgtttgccgtggggaagtacactcatttcatccagtccttcctggagtcagccgaggagttcttcatgcgtgggtaccgggtgcactactacatcttcactgacaaccctgcagccgttcccggggtcccgctgggtccccaccggcttctcagctccatccccatccagggtcactcccactgggaggagacatccatgcgccggatggagaccatcagccagcacattgctaagagggctcaccgggaggtggactacctcttctgccttgatgtggacatggtgtttcggaacccgtggggccctgagaccttgggagacctggtggctgccattcacccaagctactacgccgttccccgccagcagttcccctatgagcgcaggcgtgtttccactgcctttgtggcagacagcgaaggggacttctattatggtggggcagtcttcggggggcaggtggccagggtatatgagtttactaggggctgccacatggccatcctggcggacaaggccaatggcatcatggctgcctggcgggaggaaagccacctgaaccgtcacttcatctcaaacaagccgtccaaggtgctgtcccccgagtacctctgggacgacaggaagccccagccacccagcctgaagctgatccgcttttctacactggacaaggatatcagctgcctgaggagctgaccacggagctgggggttgccatggatggggacccaaagacctgcagccaccagtgcttcactagcgtgcagaccagccctgtcccgcctccctgtcagtcaggcgaattcaaccggaaaagggacgtggaaaggccactgtgaactgcagagggctgtgcacacagtagcacacaggatctcacagtaacgcggcatgggaacagtgagacagggggaggggaggcgcagttacaaaggcagggcccggcaggcttgccacgttctgcagccgtgcctttgcggggcaggctctgaagcctcagcccgactcagagtgcctgaaccctgccgcgccagtcccccgtttattgcatattgcccttaacgtagcatttctaataccctggtgtgaaggcgccctagaccccttttctctggtcacaggggtcctgggtcctttgatgtctcccaaccacatgtagccaattcctcactcaggcccccagagtgagcctttgaaatggaacaggtctaggctccctcggtttcctgcaccccaaagtgagccgcactctcaggggactagccacctccttcttaagagggtttggggcagtttataataaagggggcgtgtgctcaacccta

SEQ ID NO: 137186 - DNA, 1995 bp, Homo sapiens
  Payload ID: 6858
  Gene Symbol: GLMN
  Gene Name: glomulin, FKBP associated protein
  Uniprot ID: Q92990
  ENST ID: ENST00000370360
  CDS Start-End: 83-1867
ctaagacgccggaggaggtggcggcggctgggagaggcgagggttctggccgattttagcatcgaaactaggagaaataagaatggctgtagaggaacttcagtctataataaagagatgtcaaatcctagaagagcaagactttaaagaagaggattttggcctatttcagttagctgggcaaagatgcatagaagaagggcacacagaccagctattagaaattattcaaaatgaaaagaataaggtcatcatcaagaatatgggctggaatctcgttggtcctgttgttcgatgccttttgtgtaaagataaagaggatagtaaaagaaaagtttattttttgatctttgatttattggtaaagttatgcaatccaaaggaattattgttgggtttgcttgaactgattgaagagccctctggaaaacagatatcccaaagtattcttcttttgcttcagccattacaaacagtgattcagaaacttcataacaaggcatattcaattggattagcattgtctaccctttggaatcagctatctcttcttcctgttccatactcaaaagaacaaatacaaatggatgactatggcctttgtcagtgttgcaaggccttaatagagttcactaagccttttgtggaagaagtcattgataacaaagaaaactcactggaaaatgaaaagttaaaggatgaattactgaaattttgtttcaaaagcttgaaatgccctttgctgacagcacaattctttgaacagtctgaagaaggtggaaatgatcctttcaggtattttgcatcagaaataataggttttttatcagcaattggacaccctttccccaaaatgatttttaatcatggaaggaaaaagagaacttggaattaccttgaatttgaagaagaagaaaataaacagttagcagactcaatggcttctctggcatatctagtatttgtacagggcatccatattgatcagcttccaatggtcttaagcccattgtaccttttgcagtttaatatggggcacattgaagtctttttgcaaagaacagaagagtctgttatctccaaaggattggagctgctggagaatagtttattgagaatagaagacaatagtctactttaccagtacttagaaatcaagagttttcttactgtacctcagggcttagtgaaagtaatgacactttgccccattgagacactgaggaaaaagagtttagctatgcttcagctgtatattaacaagttggattcacaaggcaaatatacattatttaggtgcttattgaatacaagtaatcactcaggtgtggaggcttttattattcaaaatatcaaaaatcaaattgacatgtcattaaagagaacacgtaacaacaaatggtttacaggaccacagttgatttcccttcttgatttggtactttttctcccagagggtgcagaaacagatttactgcaaaactcagataggattatggcttcattaaatttattgaggtatttggttatcaaagataatgaaaatgacaatcaaactggattatggacagaacttggaaatattgagaataatttcttaaagccacttcatataggacttaatatgtcaaaagcacattatgaagcagaaattaaaaatagccaagaggcccagaaatctaaagatctttgttctataactgtaagtggagaagagatccctaatatgcctcctgaaatgcagcttaaggtcctgcattcagctcttttcacatttgatttgattgaaagtgttctagctcgagtggaagaactcattgaaataaaaacaaagtctacctctgaagaaaatattgggataaagtgaaagttccatttcctaaataaaaactaataaaatatagtactttccattatgattcatttaatacctttataaaaaatttttctgtaaaaatttactgcttgaaaaataaatgtagcttttctcattta

SEQ ID NO: 137187 - DNA, 1833 bp, Homo sapiens
  Payload ID: 6858
  Gene Symbol: GLMN
  Gene Name: glomulin, FKBP associated protein
  Uniprot ID: Q92990
  ENST ID: ENST00000495106
  CDS Start-End: 94-1347
agaagagcgggctaagacgccggaggaggtggcggcggctgggagaggcgagggttctggccgattttagcatcgaaactaggagaaataagaatggctgtagaggaacttcagtctataataaagagatgtcaaatcctagaagagcaagactttaaagaagaggattttggcctatttcagttagctgggcaaagatgcatagaagaagggcacacagaccagctattagaaattattcaaaatgaaaagaataaggtcatcatcaagaatatgggctggaatctcgttggtcctgttgttcgatgccttttgtgtaaagataaagaggatagtaaaagaaaagtttattttttgatctttgatttattggtaaagttatgcaatccaaaggaattattgttgggtttgcttgaactgattgaagagccctctggaaaacagatatcccaaagtattcttcttttgcttcagccattacaaacagtgattcagaaacttcataacaaggcatattcaattggattagcattgtctaccctttggaatcagctatctcttcttcctgttccatactcaaaagaacaaatacaaatggatgactatggcctttgtcagtgttgcaaggccttaatagagttcactaagccttttgtggaagaagtcattgataacaaagaaaactcactggaaaatgaaaagttaaaggatgaattactgaaattttgtttcaaaagcttgaaatgccctttgctgacagcacaattctttgaacagtctgaagaaggtggaaatgatcctttcaggtattttgcatcagaaataataggttttttatcagcaattggacaccctttccccaaaatgatttttaatcatggaaggaaaaagagaacttggaattaccttgaatttgaagaagaagaaaataaacagttagcagactcaatggcttctctggcatatctagtatttgtacagggcatccatattgatcagcttccaatggtcttaagcccattgtaccttttgcagtttaatatggggcacattgaagtctttttgcaaagaacagaagagtctgttatctccaaaggattggagctgctggagaatagtttattgagaatagaagacaatagtctactttaccagtacttagaaatcaagagttttcttactgtacctcagggcttagtgaaagtaatgacactttgccccattgagacactgaggaaaaagagtttagctatgcttcagctgtatattaacaagttggattcacaaggcaaatatacattatttagagaacacgtaacaacaaatggtttacaggaccacagttgatttcccttcttgatttggtactttttctcccagagggtgcagaaacagatttactgcaaaactcagataggattatggcttcattaaatttattgaggtatttggttatcaaagataatgaaaatgacaatcaaactggattatggacagaacttggaaatattgagaataatttcttaaagccacttcatataggacttaatatgtcaaaagcacattatgaagcagaaattaaaaatagccaagaggcccagaaatctaaagatctttgttctataactgtaagtggagaagagatccctaatatgcctcctgaaatgcagcttaaggtcctgcattcagctcttttcacatttgatttgattgaaagtgttctagctcgagtggaagaactcattgaaataaaaacaaagtctacctctgaagaaaatattgggataaagtgaaagttccatttcctaaataaaaactaataaaatatagtac

SEQ ID NO: 137188 - DNA, 734 bp, Homo sapiens
  Payload ID: 6858
  Gene Symbol: GLMN
  Gene Name: glomulin, FKBP associated protein
  ENST ID: ENST00000463560
  CDS Start-End: 1-734
ttgtttcaaaagcttgaaatgccctttgctgacagcacaattctttgaacagtctgaagaaggtggaaatgatcctttcaggtattttgcatcagaaataataggttttttatcagcaattggacaccctttccccaaaatgatttttaatcatggaaggaaaaagagaacttggaattaccttgaatttgaagaagaagaaaataaacagttagcagactcaatggcttctctggcatatctagtatttgtacagggcatccatattgatcagcttccaatggtcttaagcccattgtaccttttgcagtttaatatggggcacattgaagtctttttgcaaagaacagaagagtctgttatctccaaaggattggagctgctggagaatagtttattgagaatagaagacaatagtctactttaccagtacttagaaatcaagagttttcttactgtacctcagggcttagtgaaagtaatgacactttgccccattgagacactggaggtacaagtgtggatgtattacatgcataaaatggatagtgatgaagtctggagaacacgtaacaacaaatggtttacaggaccacagttgatttcccttcttgatttggtactttttctcccagagggtgcagaaacagatttactgcaaaactcagataggattatggcttcattaaatttattgaggtatttggttatcaaagataatgaaaatgacaatc

SEQ ID NO: 137189 - DNA, 891 bp, Homo sapiens
  Payload ID: 6858
  Gene Symbol: GLMN
  Gene Name: glomulin, FKBP associated protein
  ENST ID: ENST00000495852
  CDS Start-End: 1-891
ggttttttatcagcaattggacaccctttccccaaaatgatttttaatcatggaaggaaaaagagaacttggaattaccttgaatttgaagaagaagaaaataaacagttagcagactcaatggcttctctggcatatctagtatttgtacagggcatccatattgatcagcttccaatggtcttaagcccattgtaccttttgcagtttaatatggggcacattgaagtctttttgcaaagaacagaagagtctgttatctccaaaggattggagctgctggagaatagtttattgagaatagaagacaatagtctactttaccagtacttagaaatcaagagttttcttactgtacctcagaggaaaaagagtttagctatgcttcagctgtatattaacaagttggattcacaaggcaaatatacattatttaggtgcttattgaatacaagtaatcactcaggtgtggaggcttttattattcaaaatatcaaaaatcaaattgacatgtcattaaagagaacacgtaacaacaaatggtttacaggaccacagttgatttcccttcttgatttggtactttttctcccagagggtgcagaaacagatttactgcaaaactcagataggattatggcttcattaaatttattgaggtatttggttatcaaagataatgaaaatgacaatcaaactggattatggacagaacttggaaatattgagaataatttcttaaagccacttcatataggacttaatatgtcaaaagcacattatgaagcagaaattaaaaatagccaagaggcccagaaatctaaagatctttgttctataactgtaagtggagaagagatccctaatatgcctcctgaaatgcagcttaag

SEQ ID NO: 137190 - DNA, 6530 bp, Homo sapiens
  Payload ID: 6859
  Gene Symbol: GLTSCR1L
  Gene Name: GLTSCR1-like
  Uniprot ID: Q6AI39
  ENST ID: ENST00000314073
  CDS Start-End: 177-3416
cgccgccgccgccgccgccgcccctgttgcgatggcgcagaaaccccgttgacaaggcactgctttttcatgacgcaaaacgtcatattatttcacaaaaagcccagcgatttcacctgaagaagcttgggaactcctgccaaaaattgtagcacttctcacattgcaatgttgtcatggatgatgatgatgactcgtgtctccttgatcttattggagacccacaagcattgaactattttctacatggacctagtaataaatctagcaatgatgacttgactaatgcaggatattctgcagccaattcaaattcaattttcgccaactctagtaatgctgatcctaagtcatccctcaaaggtgtaagcaaccagcttggagaagggcccagtgatggactgccactttcaagtagcctccagtttcttgaagatgaactcgagtcttctcctcttcctgatctcactgaggaccaacctttcgacattcttcagaaatccttgcaagaggccaatatcactgaacagacattggcagaagaggcatatttggatgccagtataggttcaagccaacagtttgcacaagctcagcttcatccttcttcatcagcatcctttactcaggcttctaatgtttctaattactcaggtcagacgctgcagcctataggggtgacgcatgtgcctgttggagcatcgtttgcaagcaatacagtgggtgtacaacatggctttatgcaacatgtggggatcagtgttcccagccagcatttgtctaatagcagtcagattagtggttctggtcaaatacagttaattgggtcatttggtaatcatccttccatgatgactattaataacctagatggatctcaaatcatattaaagggcagcgggcagcaagccccatcaaatgtgagtggagggctcctggttcatagacagactcctaatggcaactccttgtttgggaactctagttccagtccagtagcacagcctgttaccgttccatttaacagcacaaattttcaaacatctttacctgtgcataacatcatcatacaaaggggtcttgcaccaaattcaaataaagtcccaattaatatacagccaaagcctatccagatgggtcagcaaaatacatacaatgtgaacaatttgggaattcagcagcaccacgtacaacaagggatctcttttgcttctgcaagctcaccccagggctcagtagttggtccacacatgtctgtgaacattgtaaaccaacagaacacaagaaagccagtcacctcacaggcagtgagcagcactgggggcagtattgttattcattcccccatgggccaacctcacgcaccccaaagtcagttccttatacctacaagcctttctgtcagttccaactcggtacaccacgtccagactataaatgggcaacttcttcaaactcaaccctctcagctcatttctggccaagtggcctcagagcatgtcatgttgaacagaaactcttccaacatgctcaggaccaaccaaccatatactggaccgatgcttaacaaccagaatactgctgtccacttagtgtctgggcagacatttgctgcctctggaagtccagtgatagccaatcatgcctctcctcagcttgtgggtggacagatgcccttgcagcaggcatccccaactgtattacacctgtcacctgggcagagcagcgtttcccaaggaagacctggcttcgccaccatgccatcggtgacaagcatgtcaggacctagtcggttccctgctgtcagctcagccagcactgcccatcctagtcttgggtctgcagttcagtctggttcatcaggatcaaactttacaggagatcagctgacccagccaaacaggactccagtaccagtcagtgtgtctcatcgtcttccagtttcttcttccaagtctaccagcaccttcagtaacacacctggaacaggaacccagcaacaattcttctgccaggctcagaaaaaatgtctgaatcagacttcccccatttctgctcccaagaccacagacggcctgaggcaagcacagatccctgggctcttgagcaccacactgccagggcaggattctggaagcaaagttatatccgcatccttaggaaccgcacaaccacagcaggaaaaagtagttggatcatctcctggccatccagctgtgcaggtggagagtcattcgggaggacaaaaaaggcctgctgcgaaacagctaacgaaaggagctttcattctccagcagttgcagagggaccaagcccacactgtgacaccagacaaaagtcacttccgatcactaagtgatgcggtacagagactgctctcctaccacgtgtgccagggctccatgcccactgaagaagacttgagaaaagtggacaatgaatttgagacagttgccactcagctcctaaaaaggacccaagctatgcttaacaaatacagatgcctgctcctagaagatgccatgcgaatcaatccctctgctgagatggtgatgatcgataggatgttcaaccaggaggaaagagcttccctgtcccgagacaagcgtttggcacttgtagaccctgagggttttcaggctgatttctgttgttccttcaaacttgataaagctgctcatgagacacagtttggccggagtgaccagcatggcagtaaagcaagcagctctctgcaaccgccagccaaggcccaaggcagagaccgagccaaaaccggtgtgacggaacccatgaatcatgaccagtttcatctagtgcctaatcacatcgtggtctctgcagaaggaaacatttctaaaaaaacagaatgccttggcagagcactgaaatttgacaaagtgggcttagtgcagtaccagagcacgtctgaagagaaggccagccggagagagcctctgaaggccagtcagtgctctcccggccctgaggggcaccggaaaacctcatccagatcggatcatggtactgagagcaaactgtcaagcatcctagcagattcgcacttggagatgacgtgtaacaattccttccaggacaaaagtctgaggaattctccaaagaatgaagttttacacacagacatcatgaaagggtcaggcgaaccccagccagatctccagctgacaaagagcttggaaaccacatttaagaacatcttggaactcaaaaaggcgggacggcagccccagagtgaccccacggttagcggctctgttgagttagatttccccaacttttctcctatggcttcacaggaaaactgcctggaaaagttcatcccggaccacagtgaaggtgttgtagaaactgactccattttagaagcagctgtaaatagtatcctagagtgttaatagcagcagtcctccccctaccccgccccgagaccccaccccgagaccccaccccggaccagttacattcgttcctggcaaaagcaaatggaaatggtctcctgtctccagcctgcttgatctttcatcacaggttattctttctaatctcaatcctgttctttgtttaagagcaatacttgtcgtgattacagggagatcctttagtaaaattaatccttggcagaaagcagtctgataggccccactcatttcaagtgttatgaaagtgcttataggcattttgtttatttgttttgttttttaaaaacactgtaactcaatgagaccacagtatacttggcccttggtaaaattttgacaatcataagtcatttgaaaagaacagacttactaaaatcaaacgagacggatagaagctactttttaaagaatatcccactgcatctgcaaatttagttttgggtttttttattattattattttgagtttttttgtgtgtgttttgttgttattgttgaggggaagaccacatggttcttccccctcagccatctttgagcagtaaattgctggctgtgctgccagggacccgcagccctggtggaaaagccagtagcacatacgcagggcattgcagggcttccctattgatggttcaagtgcttttctgatgcttccggagcaaaacctcatgcttttaggcatatctatgttgaatttcacctagggaatgttctgttcttagttacagcagcaaaatttgaaataatttcaccaggctaaataaaggaaaatggaaaccagttaagaggcacagtgtacagaggaggccgggatagagccatgagggttataatattaatatgtatatatgtaaaagcatatatatgttaactattgagaaaaaacaagttttgcattttataattggatatagtcaacatataatgtatgtttttgtttgttgctggattttgtttcatttaacctctctttgcaccctctcccacaacaaataccaagcatcaaaagcactttcatttgaaaattattatgttgtaatttttcagtttaaactttaaggagactctggccttgtttatgcttcttgtctgagaacagtagtgacccctggcagcaattcattaccaaaacacagacaaaccaaaggtaaccagctagcccaccactgaaaggaaagatctgagacatgggattcccatttgagagccaaaggatatgccctgtcatggtttctgtttggcctgtgttcatattagtgagcatggcttactgctttatttatttttatttcttgtcagggagtattctccgttttcctttctcgtatacctgccccaggttatcccatttctgttgttacctttattcttaatgtcattgtaaccatcacttatctcctctcattgggaaagctacatgatagtatttttatgcactcttctcccacacatacacacacgtgcatgtatctgagctgctcggatccagaggtcatttttgttacagtgtgtgcacactcactctccttcttagtgtgcatactctctcatttattctgtttatctccctggctctggaggtgcagccactggtcttcactttaatgtgttgccagaatctgcttctggctgtcgccaacatggggatgacccccattgtcatcatgttgggcatttcttttccagattggcctgtgatggaaaggaaggcttctaattagaaaacacagcaacagaagacctataccccggtgcccctgtgtcccactacacacagaaaaccctgtgagatggccagtcttcataatagcaacgtaccttcaccccagccacatgccccagccaatacaaattggaaaatctggcccattttagggttaccattttttccttatttgtgccaatgtccaagttgcagatttcccctttttcctgtattgtaacatattagataagttggtgtcgccagttggtactttctgtttgggtagtcctagggtaacaccctgccctaaactccatgatttcataggcttttcttcccttggggctcatgctcccctaattcctagcaagatgatccttcctaatcaaattcttctcattgcagaactttatccctggaagccttcatgtgggctgctagtgagttacattaattactgcaaatcagtggaattctcaagagacaagataagcttcatgtacatttgtcacctctctttcttccctatcctgccctgctgtcccaatcctagcttttctatataccatcctaaagggtttttaagccctaacacttgtctagcaaatggagagcctaatttaccaaaatgaaacttgtaaatttttgtgtcattgtatgtaagtttactttttatggaggaaggattctagataatgacaaatgaagattatgacatgtatttcactcctgtgattaggttctacgcacatgggtcataactcgcatgtcgagccccctctagtgaagggtaggagagctcagcctcggatggccaacattcagttgttcaggttcattcgtcaaagttaagttttagaactatttgtactcagtaacaaaaatcattttctttttttttttttttttctgttgtggaaaagcgtgaatttgttattaagcatttgattttctgtgtccttaagtacttcctgaagatgaagcaaaattttaatctggcaattatgaaaaagaaatattttagctctgaaggatttagtagattctgttagattagggaggccttacagactgactttacttaaagaggacgcgtcactcgctgtcagtgtggtgtgggctttatttgcttaaataccttcatttgtatagtacgtctcacttgaaattgctttgtatacattttgtaaaaatatttataaaatgttttgtaaaaaaaaaaaaactataacaaattgcagtttattttgttatgttggataaatactgttaaaagaaaccagtcagtaactatattgttaatccatggttaggaaatgtttagttggagattacaaattgaaacaaccattgcaatacagccaaagatttgggaaaatgtg

SEQ ID NO: 137191 - DNA, 6515 bp, Homo sapiens
  Payload ID: 6859
  Gene Symbol: GLTSCR1L
  Gene Name: GLTSCR1-like
  Uniprot ID: Q6AI39
  ENST ID: ENST00000394168
  CDS Start-End: 164-3403
ggcatcttttcaggatttcattcctacgtccaactgccgttcacaactgccctttccaactgctccagaactcttggccctggcattccgtgatgtaaattattccacacatggctcaaaagggtgtgaagctgtgtgccaggtgtcggatcactagtttgtcatggatgatgatgatgactcgtgtctccttgatcttattggagacccacaagcattgaactattttctacatggacctagtaataaatctagcaatgatgacttgactaatgcaggatattctgcagccaattcaaattcaattttcgccaactctagtaatgctgatcctaagtcatccctcaaaggtgtaagcaaccagcttggagaagggcccagtgatggactgccactttcaagtagcctccagtttcttgaagatgaactcgagtcttctcctcttcctgatctcactgaggaccaacctttcgacattcttcagaaatccttgcaagaggccaatatcactgaacagacattggcagaagaggcatatttggatgccagtataggttcaagccaacagtttgcacaagctcagcttcatccttcttcatcagcatcctttactcaggcttctaatgtttctaattactcaggtcagacgctgcagcctataggggtgacgcatgtgcctgttggagcatcgtttgcaagcaatacagtgggtgtacaacatggctttatgcaacatgtggggatcagtgttcccagccagcatttgtctaatagcagtcagattagtggttctggtcaaatacagttaattgggtcatttggtaatcatccttccatgatgactattaataacctagatggatctcaaatcatattaaagggcagcgggcagcaagccccatcaaatgtgagtggagggctcctggttcatagacagactcctaatggcaactccttgtttgggaactctagttccagtccagtagcacagcctgttaccgttccatttaacagcacaaattttcaaacatctttacctgtgcataacatcatcatacaaaggggtcttgcaccaaattcaaataaagtcccaattaatatacagccaaagcctatccagatgggtcagcaaaatacatacaatgtgaacaatttgggaattcagcagcaccacgtacaacaagggatctcttttgcttctgcaagctcaccccagggctcagtagttggtccacacatgtctgtgaacattgtaaaccaacagaacacaagaaagccagtcacctcacaggcagtgagcagcactgggggcagtattgttattcattcccccatgggccaacctcacgcaccccaaagtcagttccttatacctacaagcctttctgtcagttccaactcggtacaccacgtccagactataaatgggcaacttcttcaaactcaaccctctcagctcatttctggccaagtggcctcagagcatgtcatgttgaacagaaactcttccaacatgctcaggaccaaccaaccatatactggaccgatgcttaacaaccagaatactgctgtccacttagtgtctgggcagacatttgctgcctctggaagtccagtgatagccaatcatgcctctcctcagcttgtgggtggacagatgcccttgcagcaggcatccccaactgtattacacctgtcacctgggcagagcagcgtttcccaaggaagacctggcttcgccaccatgccatcggtgacaagcatgtcaggacctagtcggttccctgctgtcagctcagccagcactgcccatcctagtcttgggtctgcagttcagtctggttcatcaggatcaaactttacaggagatcagctgacccagccaaacaggactccagtaccagtcagtgtgtctcatcgtcttccagtttcttcttccaagtctaccagcaccttcagtaacacacctggaacaggaacccagcaacaattcttctgccaggctcagaaaaaatgtctgaatcagacttcccccatttctgctcccaagaccacagacggcctgaggcaagcacagatccctgggctcttgagcaccacactgccagggcaggattctggaagcaaagttatatccgcatccttaggaaccgcacaaccacagcaggaaaaagtagttggatcatctcctggccatccagctgtgcaggtggagagtcattcgggaggacaaaaaaggcctgctgcgaaacagctaacgaaaggagctttcattctccagcagttgcagagggaccaagcccacactgtgacaccagacaaaagtcacttccgatcactaagtgatgcggtacagagactgctctcctaccacgtgtgccagggctccatgcccactgaagaagacttgagaaaagtggacaatgaatttgagacagttgccactcagctcctaaaaaggacccaagctatgcttaacaaatacagatgcctgctcctagaagatgccatgcgaatcaatccctctgctgagatggtgatgatcgataggatgttcaaccaggaggaaagagcttccctgtcccgagacaagcgtttggcacttgtagaccctgagggttttcaggctgatttctgttgttccttcaaacttgataaagctgctcatgagacacagtttggccggagtgaccagcatggcagtaaagcaagcagctctctgcaaccgccagccaaggcccaaggcagagaccgagccaaaaccggtgtgacggaacccatgaatcatgaccagtttcatctagtgcctaatcacatcgtggtctctgcagaaggaaacatttctaaaaaaacagaatgccttggcagagcactgaaatttgacaaagtgggcttagtgcagtaccagagcacgtctgaagagaaggccagccggagagagcctctgaaggccagtcagtgctctcccggccctgaggggcaccggaaaacctcatccagatcggatcatggtactgagagcaaactgtcaagcatcctagcagattcgcacttggagatgacgtgtaacaattccttccaggacaaaagtctgaggaattctccaaagaatgaagttttacacacagacatcatgaaagggtcaggcgaaccccagccagatctccagctgacaaagagcttggaaaccacatttaagaacatcttggaactcaaaaaggcgggacggcagccccagagtgaccccacggttagcggctctgttgagttagatttccccaacttttctcctatggcttcacaggaaaactgcctggaaaagttcatcccggaccacagtgaaggtgttgtagaaactgactccattttagaagcagctgtaaatagtatcctagagtgttaatagcagcagtcctccccctaccccgccccgagaccccaccccgagaccccaccccggaccagttacattcgttcctggcaaaagcaaatggaaatggtctcctgtctccagcctgcttgatctttcatcacaggttattctttctaatctcaatcctgttctttgtttaagagcaatacttgtcgtgattacagggagatcctttagtaaaattaatccttggcagaaagcagtctgataggccccactcatttcaagtgttatgaaagtgcttataggcattttgtttatttgttttgttttttaaaaacactgtaactcaatgagaccacagtatacttggcccttggtaaaattttgacaatcataagtcatttgaaaagaacagacttactaaaatcaaacgagacggatagaagctactttttaaagaatatcccactgcatctgcaaatttagttttgggtttttttattattattattttgagtttttttgtgtgtgttttgttgttattgttgaggggaagaccacatggttcttccccctcagccatctttgagcagtaaattgctggctgtgctgccagggacccgcagccctggtggaaaagccagtagcacatacgcagggcattgcagggcttccctattgatggttcaagtgcttttctgatgcttccggagcaaaacctcatgcttttaggcatatctatgttgaatttcacctagggaatgttctgttcttagttacagcagcaaaatttgaaataatttcaccaggctaaataaaggaaaatggaaaccagttaagaggcacagtgtacagaggaggccgggatagagccatgagggttataatattaatatgtatatatgtaaaagcatatatatgttaactattgagaaaaaacaagttttgcattttataattggatatagtcaacatataatgtatgtttttgtttgttgctggattttgtttcatttaacctctctttgcaccctctcccacaacaaataccaagcatcaaaagcactttcatttgaaaattattatgttgtaatttttcagtttaaactttaaggagactctggccttgtttatgcttcttgtctgagaacagtagtgacccctggcagcaattcattaccaaaacacagacaaaccaaaggtaaccagctagcccaccactgaaaggaaagatctgagacatgggattcccatttgagagccaaaggatatgccctgtcatggtttctgtttggcctgtgttcatattagtgagcatggcttactgctttatttatttttatttcttgtcagggagtattctccgttttcctttctcgtatacctgccccaggttatcccatttctgttgttacctttattcttaatgtcattgtaaccatcacttatctcctctcattgggaaagctacatgatagtatttttatgcactcttctcccacacatacacacacgtgcatgtatctgagctgctcggatccagaggtcatttttgttacagtgtgtgcacactcactctccttcttagtgtgcatactctctcatttattctgtttatctccctggctctggaggtgcagccactggtcttcactttaatgtgttgccagaatctgcttctggctgtcgccaacatggggatgacccccattgtcatcatgttgggcatttcttttccagattggcctgtgatggaaaggaaggcttctaattagaaaacacagcaacagaagacctataccccggtgcccctgtgtcccactacacacagaaaaccctgtgagatggccagtcttcataatagcaacgtaccttcaccccagccacatgccccagccaatacaaattggaaaatctggcccattttagggttaccattttttccttatttgtgccaatgtccaagttgcagatttcccctttttcctgtattgtaacatattagataagttggtgtcgccagttggtactttctgtttgggtagtcctagggtaacaccctgccctaaactccatgatttcataggcttttcttcccttggggctcatgctcccctaattcctagcaagatgatccttcctaatcaaattcttctcattgcagaactttatccctggaagccttcatgtgggctgctagtgagttacattaattactgcaaatcagtggaattctcaagagacaagataagcttcatgtacatttgtcacctctctttcttccctatcctgccctgctgtcccaatcctagcttttctatataccatcctaaagggtttttaagccctaacacttgtctagcaaatggagagcctaatttaccaaaatgaaacttgtaaatttttgtgtcattgtatgtaagtttactttttatggaggaaggattctagataatgacaaatgaagattatgacatgtatttcactcctgtgattaggttctacgcacatgggtcataactcgcatgtcgagccccctctagtgaagggtaggagagctcagcctcggatggccaacattcagttgttcaggttcattcgtcaaagttaagttttagaactatttgtactcagtaacaaaaatcattttctttttttttttttttttctgttgtggaaaagcgtgaatttgttattaagcatttgattttctgtgtccttaagtacttcctgaagatgaagcaaaattttaatctggcaattatgaaaaagaaatattttagctctgaaggatttagtagattctgttagattagggaggccttacagactgactttacttaaagaggacgcgtcactcgctgtcagtgtggtgtgggctttatttgcttaaataccttcatttgtatagtacgtctcacttgaaattgctttgtatacattttgtaaaaatatttataaaatgttttgtaaaaaaaaaaaaactataacaaattgcagtttattttgttatgttggataaatactgttaaaagaaaccagtcagtaactatattgttaatccatggttaggaaatgtttagttggagattacaaattgaaacaaccattgcaatacagccaaagatttgggaaaatg

SEQ ID NO: 137192 - DNA, 6510 bp, Homo sapiens
  Payload ID: 6859
  Gene Symbol: GLTSCR1L
  Gene Name: GLTSCR1-like
  Uniprot ID: Q6AI39
  ENST ID: ENST00000614467
  CDS Start-End: 327-3566
ccctgccctccccgagctcggtcccggccactccctccgcagctgggcgtcgccggccgcgctggggcgagaaccgaagtttggaggtagacgagcaggcgagcggtttgcccgggcgcagagcatgaaggccgggcgggcgcggggagcggcgcccgccgccgccgccgcccctgttgcgatggcgcagaaaccccgttgacaaggcactgctttttcatgacgcaaaacgtcatattatttcacaaaaagcccagcgatttcacctgaagaagcttgggaactcctgccaaaaattgtagcacttctcacattgcaatgttgtcatggatgatgatgatgactcgtgtctccttgatcttattggagacccacaagcattgaactattttctacatggacctagtaataaatctagcaatgatgacttgactaatgcaggatattctgcagccaattcaaattcaattttcgccaactctagtaatgctgatcctaagtcatccctcaaaggtgtaagcaaccagcttggagaagggcccagtgatggactgccactttcaagtagcctccagtttcttgaagatgaactcgagtcttctcctcttcctgatctcactgaggaccaacctttcgacattcttcagaaatccttgcaagaggccaatatcactgaacagacattggcagaagaggcatatttggatgccagtataggttcaagccaacagtttgcacaagctcagcttcatccttcttcatcagcatcctttactcaggcttctaatgtttctaattactcaggtcagacgctgcagcctataggggtgacgcatgtgcctgttggagcatcgtttgcaagcaatacagtgggtgtacaacatggctttatgcaacatgtggggatcagtgttcccagccagcatttgtctaatagcagtcagattagtggttctggtcaaatacagttaattgggtcatttggtaatcatccttccatgatgactattaataacctagatggatctcaaatcatattaaagggcagcgggcagcaagccccatcaaatgtgagtggagggctcctggttcatagacagactcctaatggcaactccttgtttgggaactctagttccagtccagtagcacagcctgttaccgttccatttaacagcacaaattttcaaacatctttacctgtgcataacatcatcatacaaaggggtcttgcaccaaattcaaataaagtcccaattaatatacagccaaagcctatccagatgggtcagcaaaatacatacaatgtgaacaatttgggaattcagcagcaccacgtacaacaagggatctcttttgcttctgcaagctcaccccagggctcagtagttggtccacacatgtctgtgaacattgtaaaccaacagaacacaagaaagccagtcacctcacaggcagtgagcagcactgggggcagtattgttattcattcccccatgggccaacctcacgcaccccaaagtcagttccttatacctacaagcctttctgtcagttccaactcggtacaccacgtccagactataaatgggcaacttcttcaaactcaaccctctcagctcatttctggccaagtggcctcagagcatgtcatgttgaacagaaactcttccaacatgctcaggaccaaccaaccatatactggaccgatgcttaacaaccagaatactgctgtccacttagtgtctgggcagacatttgctgcctctggaagtccagtgatagccaatcatgcctctcctcagcttgtgggtggacagatgcccttgcagcaggcatccccaactgtattacacctgtcacctgggcagagcagcgtttcccaaggaagacctggcttcgccaccatgccatcggtgacaagcatgtcaggacctagtcggttccctgctgtcagctcagccagcactgcccatcctagtcttgggtctgcagttcagtctggttcatcaggatcaaactttacaggagatcagctgacccagccaaacaggactccagtaccagtcagtgtgtctcatcgtcttccagtttcttcttccaagtctaccagcaccttcagtaacacacctggaacaggaacccagcaacaattcttctgccaggctcagaaaaaatgtctgaatcagacttcccccatttctgctcccaagaccacagacggcctgaggcaagcacagatccctgggctcttgagcaccacactgccagggcaggattctggaagcaaagttatatccgcatccttaggaaccgcacaaccacagcaggaaaaagtagttggatcatctcctggccatccagctgtgcaggtggagagtcattcgggaggacaaaaaaggcctgctgcgaaacagctaacgaaaggagctttcattctccagcagttgcagagggaccaagcccacactgtgacaccagacaaaagtcacttccgatcactaagtgatgcggtacagagactgctctcctaccacgtgtgccagggctccatgcccactgaagaagacttgagaaaagtggacaatgaatttgagacagttgccactcagctcctaaaaaggacccaagctatgcttaacaaatacagatgcctgctcctagaagatgccatgcgaatcaatccctctgctgagatggtgatgatcgataggatgttcaaccaggaggaaagagcttccctgtcccgagacaagcgtttggcacttgtagaccctgagggttttcaggctgatttctgttgttccttcaaacttgataaagctgctcatgagacacagtttggccggagtgaccagcatggcagtaaagcaagcagctctctgcaaccgccagccaaggcccaaggcagagaccgagccaaaaccggtgtgacggaacccatgaatcatgaccagtttcatctagtgcctaatcacatcgtggtctctgcagaaggaaacatttctaaaaaaacagaatgccttggcagagcactgaaatttgacaaagtgggcttagtgcagtaccagagcacgtctgaagagaaggccagccggagagagcctctgaaggccagtcagtgctctcccggccctgaggggcaccggaaaacctcatccagatcggatcatggtactgagagcaaactgtcaagcatcctagcagattcgcacttggagatgacgtgtaacaattccttccaggacaaaagtctgaggaattctccaaagaatgaagttttacacacagacatcatgaaagggtcaggcgaaccccagccagatctccagctgacaaagagcttggaaaccacatttaagaacatcttggaactcaaaaaggcgggacggcagccccagagtgaccccacggttagcggctctgttgagttagatttccccaacttttctcctatggcttcacaggaaaactgcctggaaaagttcatcccggaccacagtgaaggtgttgtagaaactgactccattttagaagcagctgtaaatagtatcctagagtgttaatagcagcagtcctccccctaccccgccccgagaccccaccccgagaccccaccccggaccagttacattcgttcctggcaaaagcaaatggaaatggtctcctgtctccagcctgcttgatctttcatcacaggttattctttctaatctcaatcctgttctttgtttaagagcaatacttgtcgtgattacagggagatcctttagtaaaattaatccttggcagaaagcagtctgataggccccactcatttcaagtgttatgaaagtgcttataggcattttgtttatttgttttgttttttaaaaacactgtaactcaatgagaccacagtatacttggcccttggtaaaattttgacaatcataagtcatttgaaaagaacagacttactaaaatcaaacgagacggatagaagctactttttaaagaatatcccactgcatctgcaaatttagttttgggtttttttattattattattttgagtttttttgtgtgtgttttgttgttattgttgaggggaagaccacatggttcttccccctcagccatctttgagcagtaaattgctggctgtgctgccagggacccgcagccctggtggaaaagccagtagcacatacgcagggcattgcagggcttccctattgatggttcaagtgcttttctgatgcttccggagcaaaacctcatgcttttaggcatatctatgttgaatttcacctagggaatgttctgttcttagttacagcagcaaaatttgaaataatttcaccaggctaaataaaggaaaatggaaaccagttaagaggcacagtgtacagaggaggccgggatagagccatgagggttataatattaatatgtatatatgtaaaagcatatatatgttaactattgagaaaaaacaagttttgcattttataattggatatagtcaacatataatgtatgtttttgtttgttgctggattttgtttcatttaacctctctttgcaccctctcccacaacaaataccaagcatcaaaagcactttcatttgaaaattattatgttgtaatttttcagtttaaactttaaggagactctggccttgtttatgcttcttgtctgagaacagtagtgacccctggcagcaattcattaccaaaacacagacaaaccaaaggtaaccagctagcccaccactgaaaggaaagatctgagacatgggattcccatttgagagccaaaggatatgccctgtcatggtttctgtttggcctgtgttcatattagtgagcatggcttactgctttatttatttttatttcttgtcagggagtattctccgttttcctttctcgtatacctgccccaggttatcccatttctgttgttacctttattcttaatgtcattgtaaccatcacttatctcctctcattgggaaagctacatgatagtatttttatgcactcttctcccacacatacacacacgtgcatgtatctgagctgctcggatccagaggtcatttttgttacagtgtgtgcacactcactctccttcttagtgtgcatactctctcatttattctgtttatctccctggctctggaggtgcagccactggtcttcactttaatgtgttgccagaatctgcttctggctgtcgccaacatggggatgacccccattgtcatcatgttgggcatttcttttccagattggcctgtgatggaaaggaaggcttctaattagaaaacacagcaacagaagacctataccccggtgcccctgtgtcccactacacacagaaaaccctgtgagatggccagtcttcataatagcaacgtaccttcaccccagccacatgccccagccaatacaaattggaaaatctggcccattttagggttaccattttttccttatttgtgccaatgtccaagttgcagatttcccctttttcctgtattgtaacatattagataagttggtgtcgccagttggtactttctgtttgggtagtcctagggtaacaccctgccctaaactccatgatttcataggcttttcttcccttggggctcatgctcccctaattcctagcaagatgatccttcctaatcaaattcttctcattgcagaactttatccctggaagccttcatgtgggctgctagtgagttacattaattactgcaaatcagtggaattctcaagagacaagataagcttcatgtacatttgtcacctctctttcttccctatcctgccctgctgtcccaatcctagcttttctatataccatcctaaagggtttttaagccctaacacttgtctagcaaatggagagcctaatttaccaaaatgaaacttgtaaatttttgtgtcattgtatgtaagtttactttttatggaggaaggattctagataatgacaaatgaagattatgacatgtatttcactcctgtgattaggttctacgcacatgggtcataactcgcatgtcgagccccctctagtgaagggtaggagagctcagcctcggatggccaacattcagttgttcaggttcattcgtcaaagttaagttttagaactatttgtactcagtaacaaaaatcattttctttttttttttttttttctgttgtggaaaagcgtgaatttgttattaagcatttgattttctgtgtccttaagtacttcctgaagatgaagcaaaattttaatctggcaattatgaaaaagaaatattttagctctgaaggatttagtagattctgttagattagggaggccttacagactgactttacttaaagaggacgcgtcactcgctgtcagtgtggtgtgggctttatttgcttaaataccttcatttgtatagtacgtctcacttgaaattgctttgtatacattttgtaaaaatatttataaaatgttttgt

SEQ ID NO: 137193 - DNA, 799 bp, Homo sapiens
  Payload ID: 6860
  Gene Symbol: GCG
  Gene Name: glucagon
  Uniprot ID: P01275
  ENST ID: ENST00000375497
  CDS Start-End: 257-799
gcatagaatgcagatgagcaaagtgagtgggagagggaagtcatttgtaacaaaaactcattatttacagatgagaaatttatattgtcagcgtaatatctgtgaggctaaacagagctggagagtatataaaagcagtgcgccttggtgcagaagtacagagcttaggacacagagcacatcaaaagttcccaaagagggcttgctctctcttcacctgctctgttctacagcacactaccagaagacagcagaaatgaaaagcatttactttgtggctggattatttgtaatgctggtacaaggcagctggcaacgttcccttcaagacacagaggagaaatccagatcattctcagcttcccaggcagacccactcagtgatcctgatcagatgaacgaggacaagcgccattcacagggcacattcaccagtgactacagcaagtatctggactccaggcgtgcccaagattttgtgcagtggttgatgaataccaagaggaacaggaataacattgccaaacgtcacgatgaatttgagagacatgctgaagggacctttaccagtgatgtaagttcttatttggaaggccaagctgccaaggaattcattgcttggctggtgaaaggccgaggaaggcgagatttcccagaagaggtcgccattgttgaagaacttggccgcagacatgctgatggttctttctctgatgagatgaacaccattcttgataatcttgccgccagggactttataaactggttgattcagaccaaaatcactgacaggaaataa

SEQ ID NO: 137194 - DNA, 1289 bp, Homo sapiens
  Payload ID: 6860
  Gene Symbol: GCG
  Gene Name: glucagon
  Uniprot ID: P01275
  ENST ID: ENST00000418842
  CDS Start-End: 256-798
catagaatgcagatgagcaaagtgagtgggagagggaagtcatttgtaacaaaaactcattatttacagatgagaaatttatattgtcagcgtaatatctgtgaggctaaacagagctggagagtatataaaagcagtgcgccttggtgcagaagtacagagcttaggacacagagcacatcaaaagttcccaaagagggcttgctctctcttcacctgctctgttctacagcacactaccagaagacagcagaaatgaaaagcatttactttgtggctggattatttgtaatgctggtacaaggcagctggcaacgttcccttcaagacacagaggagaaatccagatcattctcagcttcccaggcagacccactcagtgatcctgatcagatgaacgaggacaagcgccattcacagggcacattcaccagtgactacagcaagtatctggactccaggcgtgcccaagattttgtgcagtggttgatgaataccaagaggaacaggaataacattgccaaacgtcacgatgaatttgagagacatgctgaagggacctttaccagtgatgtaagttcttatttggaaggccaagctgccaaggaattcattgcttggctggtgaaaggccgaggaaggcgagatttcccagaagaggtcgccattgttgaagaacttggccgcagacatgctgatggttctttctctgatgagatgaacaccattcttgataatcttgccgccagggactttataaactggttgattcagaccaaaatcactgacaggaaataactatatcactattcaagatcatcttcacaacatcacctgctagccacgtgggatgtttgaaatgttaagtcctgtaaatttaagaggtgtattctgaggccacattgctttgcatgccaataaataaattttcttttagtgttgtgtagccaaaaattacaaatggaataaagttttatcaaaatattgctaaaatatcagctttaaaatatgaaagtgctagattctgttattttcttcttattttggatgaagtaccccaacctgtttacatttagcgataaaattatttttctatgatataatttgtaaatgtaaattattccgatctgacatatctgcattataataataggagaatagaagaactggtagccacagtggtgaaattggaaagagaactttcttcctgaaacctttgtcttaaaaatactcagctttcaatgtatcaaagatacaattaaataaaattttcaagcttctttaccatt

SEQ ID NO: 137195 - DNA, 2051 bp, Homo sapiens
  Payload ID: 6861
  Gene Symbol: GCGR
  Gene Name: glucagon receptor
  Uniprot ID: P47871
  ENST ID: ENST00000400723
  CDS Start-End: 294-1727
agtttgcaccgaccccgatctggcagcgccgcgaagacgagcggtcaccggcgcccgacccgagcgcgcccagaggacggcggggagccaagccgacccccgagcagcgccgcgcggaccctgaggctcagaggggcagcttcaggggaggacaccccactggccaggacgccccaggctctgctgctctgccactcagctgccctcggaggagcgtacacacccaccaggactgcattgccccagctgtgcagcccctgccagatgtgggaggcagctagctgcccagaggcatgcccccctgccagccacagcgacccctgctgctgttgctgctgctgctggcctgccagccacaggtcccctccgctcaggtgatggacttcctgtttgagaagtggaagctctacggtgaccagtgtcaccacaacctgagcctgctgccccctcccacggagctggtgtgcaacagaaccttcgacaagtattcctgctggccggacacccccgccaataccacggccaacatctcctgcccctggtacctgccttggcaccacaaagtgcaacaccgcttcgtgttcaagagatgcgggcccgacggtcagtgggtgcgtggaccccgggggcagccttggcgtgatgcctcccagtgccagatggatggcgaggagattgaggtccagaaggaggtggccaagatgtacagcagcttccaggtgatgtacacagtgggctacagcctgtccctgggggccctgctcctcgccttggccatcctggggggcctcagcaagctgcactgcacccgcaatgccatccacgcgaatctgtttgcgtccttcgtgctgaaagccagctccgtgctggtcattgatgggctgctcaggacccgctacagccagaaaattggcgacgacctcagtgtcagcacctggctcagtgatggagcggtggctggctgccgtgtggccgcggtgttcatgcaatatggcatcgtggccaactactgctggctgctggtggagggcctgtacctgcacaacctgctgggcctggccaccctccccgagaggagcttcttcagcctctacctgggcatcggctggggtgcccccatgctgttcgtcgtcccctgggcagtggtcaagtgtctgttcgagaacgtccagtgctggaccagcaatgacaacatgggcttctggtggatcctgcggttccccgtcttcctggccatcctgatcaacttcttcatcttcgtccgcatcgttcagctgctcgtggccaagctgcgggcacggcagatgcaccacacagactacaagttccggctggccaagtccacgctgaccctcatccctctgctgggcgtccacgaagtggtcttcgccttcgtgacggacgagcacgcccagggcaccctgcgctccgccaagctcttcttcgacctcttcctcagctccttccagggcctgctggtggctgtcctctactgcttcctcaacaaggaggtgcagtcggagctgcggcggcgttggcaccgctggcgcctgggcaaagtgctatgggaggagcggaacaccagcaaccacagggcctcatcttcgcccggccacggccctcccagcaaggagctgcagtttgggaggggtggtggcagccaggattcatctgcggagacccccttggctggtggcctccctagattggctgagagccccttctgaaccctgctgggaccccagctagggctggactctggcacccagagggcgtcgctggacaacccagaactggacgcccagctgaggctgggggcgggggagccaacagcagcccccacctaccccccacccccagtgtggctgtctgcgagattgggcctcctctccctgcacctgccttgtccctggtgcagaggtgagcagaggagtccagggcgggagtgggggctgtgccgtgaactgcgtgccagtgtccccacgtatgtcggcacgtcccatgtgcatggaaatgtcctccaacaataaagagctcaagtggtcaccgtg

SEQ ID NO: 137196 - DNA, 564 bp, Homo sapiens
  Payload ID: 6861
  Gene Symbol: GCGR
  Gene Name: glucagon receptor
  ENST ID: ENST00000573428
  CDS Start-End: 325-564
actaccttctctggtttcacaaaaacatcccggctcccatcccggagctcctcaaagcgtctgagaggccccttgcggacgccctgggagccccgctgccttcctggaccagtggccgctccacccatcctgggggcccagctccaggaccctgaggctcagaggggcagcttcaggggaggacaccccactggccaggacgccccaggctctgctgctctgccactcagctgccctcggaggagcgtacacacccaccaggactgcattgccccagctgtgcagcccctgccagatgtgggaggcagctagctgcccagaggcatgcccccctgccagccacagcgacccctgctgctgttgctgctgctgctggcctgccagccacaggtcccctccgctcaggtgatggacttcctgtttgagaagtggaagctctacggtgaccagtgtcaccacaacctgagcctgctgccccctcccacggagctggtgtgcaacagaaccttcgacaagtattcctgctggccggacacccccgccaataccacggccaacatctcc

SEQ ID NO: 137197 - DNA, 1872 bp, Homo sapiens
  Payload ID: 6861
  Gene Symbol: GCGR
  Gene Name: glucagon receptor
  ENST ID: ENST00000570996
  CDS Start-End: 279-1850
cgatctggcagcgccgcgaagacgagcggtcaccggcgcccgacccgagcgcgcccagaggacggcggggagccaagccgacccccgagcagcgccgcgcggaccctgaggctcagaggggcagcttcaggggaggacaccccactggccaggacgccccaggctctgctgctctgccactcagctgccctcggaggagcgtacacacccaccaggactgcattgccccagctgtgcagcccctgccagatgtgggaggcagctagctgcccagaggcatgcccccctgccagccacagcgacccctgctgctgttgctgctgctgctggcctgccagccacaggtcccctccgctcaggtgatggacttcctgtttgagaagtggaagctctacggtgaccagtgtcaccacaacctgagcctgctgccccctcccacggagctggtgtgcaacagaaccttcgacaagtattcctgctggccggacacccccgccaataccacggccaacatctcctgcccctggtacctgccttggcaccacaaagtgcaacaccgcttcgtgttcaagagatgcgggcccgacggtcagtgggtgcgtggaccccgggggcagccttggcgtgatgcctcccagtgccagatggatggcgaggagattgaggtccagaaggaggtggccaagatgtacagcagcttccaggtgatgtacacagtgggctacagcctgtccctgggggccctgctcctcgccttggccatcctggggggcctcagcaagctgcactgcacccgcaatgccatccacgcgaatctgtttgcgtccttcgtgctgaaagccagctccgtgctggtcattgatgggctgctcaggacccgctacagccagaaaattggcgacgacctcagtgtcagcacctggctcagtgatggagtgagcccccctcggcggccccaggcaggtgggtgggtgggcagccaggcaggtggccacgtagccgcgctcacactgcacctgtaccaggcggtggctggctgccgtgtggccgcggtgttcatgcaatatggcatcgtggccaactactgctggctgctggtggagggcctgtacctgcacaacctgctgggcctggccaccctccccgagaggagcttcttcagcctctacctgggcatcggctggggtgcccccatgctgttcgtcgtcccctgggcagtggtcaagtgtctgttcgagaacgtccagtgctggaccagcaatgacaacatgggcttctggtggatcctgcggttccccgtcttcctggccatcctgatcaacttcttcatcttcgtccgcatcgttcagctgctcgtggccaagctgcgggcacggcagatgcaccacacagactacaagttccggctggccaagtccacgctgaccctcatccctctgctgggcgtccacgaagtggtcttcgccttcgtgacggacgagcacgcccagggcaccctgcgctccgccaagctcttcttcgacctcttcctcagctccttccaggtgcccgcccgcccgccggctcccccgcccggggcgcagtgtgccacccctgaccaccctgtctctccagggcctgctggtggctgtcctctactgcttcctcaacaaggaggtgcagtcggagctgcggcggcgttggcaccgctggcgcctgggcaaagtgctatgggaggagcggaacaccagcaaccacagggcctcatcttcgcccggccacggccctcccagcaaggagctgcagtttgggaggggtggtggcagccaggattcatctgcggagacccccttggctggtggcctccctagattggctgagagccccttctga

SEQ ID NO: 137198 - DNA, 3105 bp, Homo sapiens
  Payload ID: 6862
  Gene Symbol: GLP1R
  Gene Name: glucagon-like peptide 1 receptor
  Uniprot ID: P43220
  ENST ID: ENST00000373256
  CDS Start-End: 44-1435
gttccgcaggtggcagcgatggcccagtcctgaactccccgccatggccggcgcccccggcccgctgcgccttgcgctgctgctgctcgggatggtgggcagggccggcccccgcccccagggtgccactgtgtccctctgggagacggtgcagaaatggcgagaataccgacgccagtgccagcgctccctgactgaggatccacctcctgccacagacttgttctgcaaccggaccttcgatgaatacgcctgctggccagatggggagccaggctcgttcgtgaatgtcagctgcccctggtacctgccctgggccagcagtgtgccgcagggccacgtgtaccggttctgcacagctgaaggcctctggctgcagaaggacaactccagcctgccctggagggacttgtcggagtgcgaggagtccaagcgaggggaaagaagctccccggaggagcagctcctgttcctctacatcatctacacggtgggctacgcactctccttctctgctctggttatcgcctctgcgatcctcctcggcttcagacacctgcactgcaccaggaactacatccacctgaacctgtttgcatccttcatcctgcgagcattgtccgtcttcatcaaggacgcagccctgaagtggatgtatagcacagccgcccagcagcaccagtgggatgggctcctctcctaccaggactctctgagctgccgcctggtgtttctgctcatgcagtactgtgtggcggccaattactactggctcttggtggagggcgtgtacctgtacacactgctggccttctcggtcttatctgagcaatggatcttcaggctctacgtgagcataggctggggtgttcccctgctgtttgttgtcccctggggcattgtcaagtacctctatgaggacgagggctgctggaccaggaactccaacatgaactactggctcattatccggctgcccattctctttgccattggggtgaacttcctcatctttgttcgggtcatctgcatcgtggtatccaaactgaaggccaatctcatgtgcaagacagacatcaaatgcagacttgccaagtccacgctgacactcatccccctgctggggactcatgaggtcatctttgcctttgtgatggacgagcacgcccgggggaccctgcgcttcatcaagctgtttacagagctctccttcacctccttccaggggctgatggtggccatattatactgctttgtcaacaatgaggtccagctggaatttcggaagagctgggagcgctggcggcttgagcacttgcacatccagagggacagcagcatgaagcccctcaagtgtcccaccagcagcctgagcagtggagccacggcgggcagcagcatgtacacagccacttgccaggcctcctgcagctgagactccagcgcctgccctccctggggtccttgctgcaggccgggtggccaatccaggtgggagagacactcccagggacaagggaaggaagggacacacacacacacacacacacacacacacacacacacatacatcctgctttccctccccaaacccatcagacaggtaaatgggcagtgcctcctgggaccatggacacattttctcctaggagaagcagcctcctaatttgatcacagtggcgagaggagaggaaaaacgatcgctgtgaaaatgaggaggattgcttcttgtgaaaccacaggcccttggggttcccccagacagagccgcaaatcaaccccagactcaaactcaaggtcaacggcttattagtgaaactggggcttgcaagaggaggtggttctgaaagtggctcttctaacctcagccaaacacagagcgggagtgacgggagcctcctctgcttgcatcacttggggtcaccaccctcccctgtcttctctcaaagggaagctgtttgtgtgtctgggttgcttatttccctcatcttgccccctcatctcactgcccagtttctttttgaggggctttgtttgggccactgccagcagctgtttctggaaatggctgtaggtggtgttgagaaagaatgagcattgagacggtgctcgcttctcctccaggtatttgagttgttttggtgcctgcctctgccatgcccagagaatcagggcaggcttgccaccggggaacccagccctggggtatgagctgccaagtctattttaaagacgctcaagaatcctctggggttcatctagggacacgttaggaatgtccagactgtgggtgtagattacctgccacttccaggagcccagagggccaagagagacattgcctccacctctccttggaaatactttatctgtgaccacacgctgtctcttgagaatttggatacactctctagctttaggggaccatgaagagactctcttagggaaaccaatagtccccatcagcaccatggaggcaggctccccctgcctttgaaattcccccacttgggagcttgtatatacttcactcacttttctttattgctgtgaatagtctgtgtgcacaatgggcaattctgacttctcccatctagtggaaatgagcgaaatcatggttgtagtgatgttgtttgggagagtgcagtagtaattgatttgacccactcacacttggagctaattaaggtttgccctgcctgcagcctcccccacaaataatgaacagcagaaagactggacggggaaacctatcaatcctgcccccagccatggtgaggaagccccaagccatggtgacacacagcagcactgcagatagccagacacatggctatcctagagaggctggcaaggagttcgtggctgcaaaagaagtttctggagcaagagagagctcgctcttgggagtcaggacctccggggagagcagagggttccgacggattcctttatgagtcagtctctctctcccttttaaatggtgggaaccctccccaaaacctttccccagacacattctcctgtgcccctcagagaggcatgtgatgtgcaaggaaaataataggatataaaacacatcaagtagaaaatttcttatacttc

SEQ ID NO: 137199 - DNA, 4572 bp, Homo sapiens
  Payload ID: 6863
  Gene Symbol: GLP2R
  Gene Name: glucagon-like peptide 2 receptor
  Uniprot ID: O95838
  ENST ID: ENST00000262441
  CDS Start-End: 514-2175
gaggagattttgcctttgtggttagcctcagcccagcctggacaagcttaatgccttagaaagaaataccctgcctcaaaaagacacctgcctctaaactggctcgagccccatcgccttctgccagccattcctctgtagctcgaaccccagcctgtctcagccagcttcgtgcattgagcagaaccttcagggtggagcccgctgaccgccttgttctttctcctcagcctgtcaaggaagtcccagaaagcacagctgacttagggaaggtctgggaaaaatctccctgcttttgggggggcaggggcgggggatgagccagggccgagaaggaactctgaagactccgtagattgctctagaccgcctcagacactctcggcgcagcgtggagaggatttgtgcaaacatttcctctgtggaccaagaggaatgcaagaggaggctgcctgcggtgcatcttggacggctagagagatgtacccctacttgtgaaggtgcacgaggaagatgaagctgggatcgagcagggcagggcctgggagaggaagcgcgggactcctgcctggcgtccacgagctgcccatgggcatccctgccccctgggggaccagtcctctctccttccacaggaagtgctctctctgggcccctgggaggcccttcctcactctggtcctgctggtttccatcaagcaagttacaggatccctccttgaggaaacgactcggaagtgggctcagtacaaacaggcatgtctgagagacttactcaaggaaccttctggcatattttgtaacgggacatttgatcagtacgtgtgttggcctcattcttctcctggaaatgtctctgtaccctgcccttcatacttaccttggtggagtgaagagagctcaggaagggcctacagacactgcttggctcaggggacttggcagacgatagagaacgccacggatatttggcaggatgactccgaatgctccgagaaccacagcttcaagcaaaacgtggatcgttatgccttgctgtcaaccttgcagctgatgtacaccgtgggatactccttctctcttatctccctcttcctggctctcaccctcctcttgtttcttcgaaaactccactgcacgcgcaactacatccacatgaacttgtttgcttctttcatcctgagaaccctggctgtactggtgaaggacgtcgtcttctacaactcttactccaagaggcctgacaatgagaatgggtggatgtcctacctgtcagagatgtccacctcctgccgctcagtccaggttctcttgcattactttgtgggtgccaattacttatggctgctggttgaaggcctctacctccacacgctgctggagcccacagtgcttcctgagaggcggctgtggcccagatacctgctgttgggttgggccttccctgtgctatttgttgtaccctggggtttcgcccgtgcacacctggagaacacagggtgctggacaacaaatgggaataagaaaatctggtggatcatccgaggacccatgatgctctgtgtaacagtcaatttcttcatcttcctgaaaattctcaagcttctcatttctaagctcaaagctcatcaaatgtgcttcagagattataaatacagattggcaaaatcaacactggtcctcattcctttattgggcgttcatgagatcctcttctctttcatcactgatgatcaagttgaaggatttgcaaaacttatacgacttttcattcagttgacactgagctcctttcatgggttcctggtggccttgcagtatggttttgccaatggagaggtgaaggctgagctgcggaaatactgggtccgcttcttgctagcccgccactcaggctgcagagcctgtgtcctggggaaggacttccggttcctaggaaaatgtcccaagaagctctcggaaggagatggcgctgagaagcttcggaagctgcagccctcacttaacagtgggcggctcctacatctagccatgcgaggtcttggggagctgggcgcccagccccaacaggaccatgcacgctggccccggggcagcagcctgtccgagtgcagtgagggggatgtcaccatggccaacaccatggaggagattctggaagagagtgagatctagggtggagttccaccaccctggctctgctcccagggactcttgagggggcccaggaagaggaagcaaagcaggacacacgttgctgggcacggaatcattctcgttccattcaccatgccactttgatatgaaagctatcacaaggttcttcaagctctgtatgaaagaggctgtgtgtcatgctcacagcctctgcctgctcttctcatcctaataacccccaccagtgtgttttccacaatgcccaccagaccctagggcctggctctaaattcaagccaatgaagtcccaccatgaagagaggtctcctgttatagagaagccagccaatatctcttcctttatcccttggggtgcatgctttccatctgaggttgggtttagggtgcgtgaaaacctcctaggaagcttttaaaatgcagaatcctagacttgtggctaagattctaagacagtgagtctgggaccatggccaggaattggagctgtttaataagcatcccaggtaattctgctgcaagcccacccttggagaacactgggcagggtgagagggagctagaagcgcccccatgtggccatggcaggatgctgcaagagacagtctgctctcccaggtcagctggggtgtgcctgccctccttggagagtatgtaactccacccaccagagtgccactcctctctgctcttcctctcctatcaagtcttgcctctctctctctttgcctcagttctctgtccctgcacagcaggagttctgcttgatcctccctttgaggattggccccagtgcctggggaccctctgaatgtcgtctttggtctgttcctctcctttctggctctatctacctttctgagtttggcttctaccagcctgatttacactaccattctcttggggcaaggaatgtccccaccatttttggtttgccattgatgcattgattgtcacacctgttgtcccaggaagttgacctataactctccatggccagagtccctgctgatcagaattcaatttgcccagtgggaataaatactgaaagcaggagggcccaggtaaagcaataggagtttggctggatctggacatgcccagggtggctctgagagatccaagactttgcatccaccagcctgtgggatctttcctgcctactgtgacccatggaggctgaggagggcccaggcagttggggtcaggctcaatgactgaaagtatagggcaagaggctgtaggaagatcaagggatggacatcctttggaaacagtgtgttaatgcacaggagtgtcactttcatggtatgtaaaatgcatgtgtacgtgggtggggtatgttgctatgggactaaataccaccttgtcttcgggggagtcagtttgatactcctcaagcagggctgccatatttagcaaacaaaaacaaggtactcaattaaatttgaatttcagacaaatagtcttcttgtataagtatatcccatgggcatatttaatctgagattggaattcaatcatgcatcttgtcttttactggcatctctgttttcaaggatactttgccacagggctgggactagggtgaaataatcaaggcactcatctctaaaaagctcaaagtaaatgatcaaaataaatcatattttaatgcaatattctaaaaaaacaaattaacaaactacagcccatgagccatttatagaaatgaaatttgattggagccaggggcaggataagggtgaggcaggagaggccagctcttgcaagtgcaggctctggtcctgactttcaaatgttgtctatgagggacttttaatgtgaatttttatttttagacaattgcattaaaatgttatttatattgactatggggacttttggggcccccttaaattttgcacttgaaatgggatccccacttgtgtcaccccatagtccagccctggttttaggatggggatggaggcaaaggcatcaggcaagtaatgaagcaaaggtttattttttggtgtccagattatccatagctcagtcatgaaaatctatgtctttctatttttctcctttctgcaaatgtccctgcctcggctcatcagccaattagctcctagaaagctggggtcatctcgtattcccagcaagtacccagcacagtgccggttcagagcaggtgctccacacacattcctggaatgagacagcacagaaatggctctcgggagcctcggatgctgctgggagtaagtgatccaggaccttaccgctaagaggagaaactttttttcaaagcatttataaatactccctccacccctcactccacaaatggggtgatcaacacttactgcttgctcttgttctgctaatgattaaaacaagtttatttaattt

SEQ ID NO: 137200 - DNA, 523 bp, Homo sapiens
  Payload ID: 6863
  Gene Symbol: GLP2R
  Gene Name: glucagon-like peptide 2 receptor
  ENST ID: ENST00000304773
  CDS Start-End: 169-523
ttactttcagagagctcaggaagggcctacagacactgcttggctcaggggacttggcagacgatagagaacgccacggatatttggcaggatgactccgaatgctccgagaaccacagcttcaagcaaaacgtggatcgttatgccttgctgtcaaccttgcagctgatgtacaccgtgggatactccttctctcttatctccctcttcctggctctcaccctcctcttgtttcttcgaaaactccactgcacgcgcaactacatccacatgaacttgtttgcttctttcatcctgagaaccctggctgtactggtgaaggacgtcgtcttctacaactcttactccaagaggcctgacaatgagaatgggtggatgtcctacctgtcagagatgtccacctcctgccgctcagtccaggttctcttgcattactttgtgggtgccaattacttatggctgctggttgaaggcctctacctccacacgctgctggagcccacagtgcttcctgagaggcggc

SEQ ID NO: 137201 - DNA, 2606 bp, Homo sapiens
  Payload ID: 6863
  Gene Symbol: GLP2R
  Gene Name: glucagon-like peptide 2 receptor
  ENST ID: ENST00000458005
  CDS Start-End: 161-442
agattgctctagaccgcctcagacactctcggcgcagcgtggagaggatttgtgcaaacatttcctctgtggaccaagaggaatgcaagaggaggctgcctgcggtgcatcttggacggctagagagatgtacccctacttgtgaaggtgcacgaggaagatgaagctgggatcgagcagggcagggcctgggagaggaagcgcgggactcctgcctggcgtccacgagctgcccatgggcatccctgccccctgggggaccagtcctctctccttccacaggaagtgctctctctgggcccctgggaggcccttcctcactctggtcctgctggtttccatcaagcaagttacaggatccctccttgaggaaacgactcggaagtgggctcagtacaaacaggcatgtctgagagacttactcaaggaaccttctggctgactcttcgggtgcagccacgtgcaccatgcccacctccaaaagaaaaaaagaagaaagtaccttggcccgttgcctctgagcctactgaggacaatccccggctccggctgctttcagatcattttattcagaggccttgagattgacaggacactgtgaactctccctgtctttcttcacccaaaggcagtcccaggcttcaagcccttcccagctccctttgaagacctcatgggcccaggcatattttgtaacgggacatttgatcagtacgtgtgttggcctcattcttctcctggaaatgtctctgtaccctgcccttcatacttaccttggtggagtgaagagagctcaggaagggcctacagacactgcttggctcaggggacttggcagacgatagagaacgccacggatatttggcaggatgactccgaatgctccgagaaccacagcttcaagcaaaacgtggatcgttatgccttgctgtcaaccttgcagctgatgtacaccgtgggatactccttctctcttatctccctcttcctggctctcaccctcctcttgtttcttcgaaaactccactgcacgcgcaactacatccacatgaacttgtttgcttctttcatcctgagaaccctggctgtactggtgaaggacgtcgtcttctacaactcttactccaagaggcctgacaatgagaatgggtggatgtcctacctgtcagagatgtccacctcctgccgctcagtccaggttctcttgcattactttgtgggtgccaattacttatggctgctggttgaaggcctctacctccacacgctgctggagcccacagtgcttcctgagaggcggctgtggcccagatacctgctgttgggttgggccttccctgtgctatttgttgtaccctggggtttcgcccgtgcacacctggagaacacagggtgctggacaacaaatgggaataagaaaatctggtggatcatccgaggacccatgatgctctgtgtaacagcacttggactagaggaaacgggcttgaagagaaatgggagcattccctttggtcacaaggaagacatttaaccatgaacttgtaaaacactgacatataccccagagaaaggcattagatcttcatgtctatcagtttacaagaagataatctgtcctgaacaataaggagctaaacctgctgccctcccaatctgcacagctctaggattctaggactctgtgcattggttctagggctccccagagagtggaatttatgtgtcccaccagacatggaagggaaaagaaaggccatgcagaaagaagtgaaagaggcaggctaggagtcaggagcctgggctctatgactgacttgtgatgtgtccttcagccaggtgagttggcctctctgggcctctgtttcttcatctatgaaatcagtcttgaactagaccagtggttttcaaccagaggagattctgacccctggggacatttggctgtgtctggagacatttttaattgtcataaattggggatggggataggaggagaatgttgctactggcatctagtgggtggaggtcagggatgctgctcaacaccctacaacacacagaaccacccccagaataaataattatcctgccccaaatattaagagtgccaacattgaaaaaccctggactagacagtagctgcacattaaaacaacctggggaggattaaaaaaatacccagcccagacttacccagactgatggaatcaaatctcctgccatgtagagcttccttagcactggaatctcattcagccactctcttgtatcttcctttagcattcattgagcaccttcactgggcttggcttggtgctaggttatttcagagtttctatcctcagggaattcagaatttaatagttatcattctgagactcatcagactatgactgaaccaatatctgccttcatttttggtcatatgaccacatgttgcaattttccactgatctgaatagacataaccccaactctaaaagagaattccttaaaccacaacgtggaaggaacctggattcctgaatgactgtatggagcagaactccctccactgcactagactgtgacataaccaataaaataaaataagataaaataaa

SEQ ID NO: 137202 - DNA, 1882 bp, Homo sapiens
  Payload ID: 6863
  Gene Symbol: GLP2R
  Gene Name: glucagon-like peptide 2 receptor
  ENST ID: ENST00000574745
  CDS Start-End: 432-1553
tgctgccacaccagatccagaggcacagagccggggcacgttcctgtcaagggtgctggccctgccattctccccaggaggttacaggatccctccttgaggaaacgactcggaagtgggctcagtacaaacaggcatgtctgagagacttactcaaggaaccttctggcatattttgtaacgggacatttgatcagtacgtgtgttggcctcattcttctcctggaaatgtctctgtaccctgcccttcatacttaccttggtggagtgaagagagctcaggaagggcctacagacactgcttggctcaggggacttggcagacgatagagaacgccacggatatttggcaggatgactccgaatgctccgagaaccacagcttcaagcaaaacgtggatcgttatgccttgctgtcaaccttgcagctgatgtacaccgtgggatactccttctctcttatctccctcttcctggctctcaccctcctcttgtttcttcgaaaactccactgcacgcgcaactacatccacatgaacttgtttgcttctttcatcctgagaaccctggctgtactggtgaaggacgtcgtcttctacaactcttactccaagaggcctgacaatgagaatgggtggatgtcctacctgtcagagatgtccacctcctgccgctcagtccaggttctcttgcattactttgtgggtgccaattacttatggctgctggttgaaggcctctacctccacacgctgctggagcccacagtgcttcctgagaggcggctgtggcccagatacctgctgttgggttgggccttccctgtgctatttgttgtaccctggggtttcgcccgtgcacacctggagaacacagggtgctggacaacaaatgggaataagaaaatctggtggatcatccgaggacccatgatgctctgtgtaacagtcaatttcttcatcttcctgaaaattctcaagcttctcatttctaagctcaaagctcatcaaatgtgcttcagagattataaatacagattggcaaaatcaacactggtcctcattcctttattgggcgttcatgagatcctcttctctttcatcactgatgatcaagttgaaggatttgcaaaacttatacgacttttcattcagttgacactgagctcctttcatgggttcctggtggccttgcagtatggttttgccaatggagaggtgaaggctgagctgcggaaatactgggtccgcttcttgctagcccgccactcaggctgcagagcctgtgtcctggggaaggacttccggttcctaggaaaatgtcccaagaagctctcggaaggagatggcgctgagaagcttcggaagctgcagccctcacttaacagtgggcggctcctacatctagccatgcgaggtcttggggagctgggcgcccagccccaacaggaccatgcacgctggccccggggcagcagcctgtccgagtgcagtgagggggatgtcaccatggccaacaccatggaggagattctggaagagagtgagatctagggtggagttccaccaccctggctctgctcccagggactcttgagggggcccaggaagaggaagcaaagcaggacacacgttgctgggcacggaatcattctcgttccattcaccatgccactttgatatgaaagctatcacaaggttcttcaagctctgtatgaaagaggctgtgtgtcatgctcacagcctctgcctgctcttctcatcctaataacccccaccagtgtgttttccacaatgcccaccagaccctagggcctggctctaaattcaagccaatgaagtcccaccatgaagagaggtctcctgttatagagaagccagcc

SEQ ID NO: 137203 - DNA, 3461 bp, Homo sapiens
  Payload ID: 6864
  Gene Symbol: GBE1
  Gene Name: glucan (1,4-alpha-), branching enzyme 1
  Uniprot ID: Q04446
  ENST ID: ENST00000429644
  CDS Start-End: 645-2753
aaacttaggagagtcctggttgtaagaggtattaacattttcagcagtagtactctagctacacttgactgttcccctctctgtgaatttacatgatatgtttgaaatactgcccctcaaaagtctcagaactttgagaaatacggtcctttccaaaaaaaccccttatgtccaatttgaaggggtcgctgtcagtgggtgcttaagtgggtaaagaaaagccaagaatatgtcagggtgaggaaggccaaggctgagcgaggtcagcttgggacccacctcctagaatgacctccgccagcaggaaaaaaccgttaaggggaggaaagggcaggtccctgcggcctccaggtgccagccgcgtgagtgggcggagaggcctcggtgcctcctacccgctccggacgtgcgtcccggcatcaccccgggatccgctcctccccgctggcggggggagaaagggcaggaggccttccgtcccggctataaagggccccggaccgccgcggctcgcctcggcttgcctcgacacgcctaggcgccctccggctccgccctagccgccgcgtcccagctagagctccagcgcccgctcaggccccactcgacctctcgggcctcggctacttggactgcggcggaatatggcggctccgatgactcccgcggctcggcccgaggactacgaggcggcgctcaatgccgccctggctgacgtgcccgaactggccagactcctggagatcgacccgtacttgaagccctacgccgtggacttccagcgcaggtataagcagtttagccaaattttgaagaacattggagaaaatgaaggtggtattgataagttttccagaggctatgaatcatttggcgtccacagatgtgctgatggtggtttatactgcaaagaatgggccccgggagcagaaggagtttttcttactggagattttaatggttggaatccattttcgtacccatacaaaaaactggattatggaaaatgggagctgtatatcccaccaaagcagaataaatctgtactcgtgcctcatggatccaaattaaaggtagttattactagtaaaagcggagagatcttgtatcgtatttcaccgtgggcaaagtatgtggttcgtgaaggtgataatgtgaattatgattggatacactgggatccagaacactcatatgagtttaagcattccagaccaaagaagccacggagtctaagaatttatgaatctcatgtgggaatttcttcccatgaaggaaaagtagcttcttataaacattttacatgcaatgtactaccaagaatcaaaggccttggatacaactgcattcagttgatggcaatcatggagcatgcttactatgccagctttggttaccaaatcacaagcttctttgcagcttccagccgttatggaacacctgaagagctacaagaactggtagacacagctcattccatgggtatcatagtcctcttagatgtggtacacagccatgcttcaaaaaattcagcagatggattgaatatgtttgatgggacagattcctgttattttcattctggacctagagggactcatgatctttgggatagcagattgtttgcctactccagctgggaaattttaagattccttctgtcaaacataagatggtggttggaagaatatcgctttgatggatttcgttttgatggtgttacgtccatgctttatcatcaccatggagtgggtcaaggtttctcaggtgattacagtgaatatttcggactacaagtagatgaagatgccttgacttacctcatgttggcaaatcatttggttcacacgctgtgtcccgattctataacaatagctgaggatgtatcaggaatgccagctctgtgctctccaatttcccagggagggggtggttttgactatcgactagccatggcaattccagataagtggattcagctacttaaagagtttaaagatgaagactggaacatgggcgatatagtatacacgctcacaaacaggcgctaccttgaaaagtgcattgcttatgcagagagccatgatcaggcattggttggggataagtcgctggcattttggttgatggatgccgaaatgtatacaaacatgagtgtcctgactccttttactccagttattgatcgtggaatacagcttcataaaatgattcgactcattacgcatgggcttggtggagaaggctatctcaatttcatgggtaatgaatttgggcatcctgaatggttagacttcccaagaaaaggaaataatgagagttaccattatgccaggcggcagtttcatttaactgacgacgaccttcttcgctacaagttcctaaataattttgacagggatatgaatagattggaagaaagatatggttggcttgcagctccacaggcctacgtgagtgaaaaacatgaaggcaataagatcattgcttttgaaagagcaggtcttcttttcattttcaacttccatccaagcaagagctacactgactaccgagttggaacagcattgccagggaaattcaaaattgtgctagattcagatgcagcggaatatggagggcatcagagactggaccacagcactgactttttttctgaggcttttgaacataatgggcgtccctattctcttttggtgtacattccaagcagagtggccctcatccttcagaatgtggatctgccgaattgaagaggcctgatttcagctccaccagatgcagatttgtgttttgttttcttgttatcactgtcacacagcttataacatgtatgcttttcagaatacagttgtctagccaagccatcaagtgtctgaaattcaatattggtttatgcaaatacagcaaacttttatttaagtagatgggagaatatgtttaaaatattaggaatcctagaccatattttcaagtcatcttagcagctaggattctcaaatggaagtgttatatataatatgttaaaaacattttgctttcctggctaattatttgatccttttaaattcaaatttgaatcatttgtcatgtatgattatttctgttaaatgtacacagtatttaagatggatatttggtggctctatttgttctgatatcttttggtctaaattatgaggtaccaagattgtttctttgtttctttttttcaaattgtgtttagaaatactgtaataaatatgcagtagtgatataaagaattatatccaaggtaatataaaagccattacgtatgaactcatccgtgtctcattttgtgttttattttgtgatctcttgtccactaagtatcttgttaaatgccagtatctcagtctttctgaagccctgaaatggtaattgtagcatttcagaaaatgtctttcatttcaatcaataaaaagcttttgtaaaattgc

SEQ ID NO: 137204 - DNA, 2513 bp, Homo sapiens
  Payload ID: 6864
  Gene Symbol: GBE1
  Gene Name: glucan (1,4-alpha-), branching enzyme 1
  ENST ID: ENST00000489715
  CDS Start-End: 54-2039
aatttcacttggattcggcccagattaacagctgtttctaacttcgttgtcccatgaatcttgctaaagtgaggtataagcagtttagccaaattttgaagaacattggagaaaatgaaggtggtattgataagttttccagaggctatgaatcatttggcgtccacagatgtgctgatggtggtttatactgcaaagaatgggccccgggagcagaaggagtttttcttactggagattttaatggttggaatccattttcgtacccatacaaaaaactggattatggaaaatgggagctgtatatcccaccaaagcagaataaatctgtactcgtgcctcatggatccaaattaaaggtagttattactagtaaaagcggagagatcttgtatcgtatttcaccgtgggcaaagtatgtggttcgtgaaggtgataatgtgaattatgattggatacactgggatccagaacactcatatgagtttaagcattccagaccaaagaagccacggagtctaagaatttatgaatctcatgtgggaatttcttcccatgaaggaaaagtagcttcttataaacattttacatgcaatgtactaccaagaatcaaaggccttggatacaactgcattcagttgatggcaatcatggagcatgcttactatgccagctttggttaccaaatcacaagcttctttgcagcttccagccgttatggaacacctgaagagctacaagaactggtagacacagctcattccatgggtatcatagtcctcttagatgtggtacacagccatgcttcaaaaaattcagcagatggattgaatatgtttgatgggacagattcctgttattttcattctggacctagagggactcatgatctttgggatagcagattgtttgcctactccagctgggaaattttaagattccttctgtcaaacataagatggtggttggaagaatatcgctttgatggatttcgttttgatggtgttacgtccatgctttatcatcaccatggagtgggtcaaggtttctcaggtgattacagtgaatatttcggactacaagtagatgaagatgccttgacttacctcatgttggcaaatcatttggttcacacgctgtgtcccgattctataacaatagctgaggatgtatcaggaatgccagctctgtgctctccaatttcccagggagggggtggttttgactatcgactagccatggcaattccagataagtggattcagctacttaaagagtttaaagatgaagactggaacatgggcgatatagtatacacgctcacaaacaggcgctaccttgaaaagtgcattgcttatgcagagagccatgatcaggcattggttggggataagtcgctggcattttggttgatggatgccgaaatgtatacaaacatgagtgtcctgactccttttactccagttattgatcgtggaatacagcttcataaaatgattcgactcattacgcatgggcttggtggagaaggctatctcaatttcatgggtaatgaatttgggcatcctgaatggttagacttcccaagaaaaggaaataatgagagttaccattatgccaggcggcagtttcatttaactgacgacgaccttcttcgctacaagttcctaaataattttgacagggatatgaatagattggaagaaagatatggttggcttgcagctccacaggcctacgtgagtgaaaaacatgaaggcaataagatcattgcttttgaaagagcaggtcttcttttcattttcaacttccatccaagcaagagctacactgactaccgagttggaacagcattgccagggaaattcaaaattgtgctagattcagatgcagcggaatatggagggcatcagagactggaccacagcactgactttttttctgaggcttttgaacataatgggcgtccctattctcttttggtgtacattccaagcagagtggccctcatccttcagaatgtggatctgccgaattgaagaggcctgatttcagctccaccagatgcagatttgtgttttgttttcttgttatcactgtcacacagcttataacatgtatgcttttcagaatacagttgtctagccaagccatcaagtgtctgaaattcaatattggtttatgcaaatacagcaaacttttatttaagtagatgggagaatatgtttaaaatattaggaatcctagaccatattttcaagtcatcttagcagctaggattctcaaatggaagtgttatatataatatgttaaaaacattttgctttcctggctaattatttgatccttttaaattcaaatttgaatcatttgtcatgtatgattatttctgttaaatgtacacagtatttaagatggatatttggtggctctatttgttctgatatcttttggtctaaattatgaggtaccaagattgtttctttgtttctttttttcaaattgtgtttaga

SEQ ID NO: 137205 - DNA, 4743 bp, Homo sapiens
  Payload ID: 6865
  Gene Symbol: GLCCI1
  Gene Name: glucocorticoid induced 1
  Uniprot ID: Q86VQ1
  ENST ID: ENST00000223145
  CDS Start-End: 558-2201
ttagttgccattcggagtgaggagtgggtagaagcggcggcggcggcggcggcgtttgcggtggcgcggactccgaggagcgccagcacctcgaggccctttctctctaccctggtccccagaagcaggggtcccggccctccttgcagctgccgggttctcccgtgcgtgcagccctgcgagggctgaggagaaggctgcgagcggccctcggggctgcgtgatccgggccgttgccctgtcagcacgatgcctggagcggtggcggcggcggctccgggctccttgcggccccggccgtgaccgccacaccgagcccagccgggcggttgcggccgttggacgtttgttttcgcagccttcccctcccccctcgccgaggcggcgggggtgtgcgttggggagggggagccccgagactcctcccccacagcgatacccccgcccctcccccttacacactcgcacgcactatcgcgccggctcccacacgctcgcgcgcctcccgccccgcgcctccgtgtcggccggcggcgtccagggcccgcagagccaccatgtccactgcctcctcctcctcctcctccagttcctctcagacccctcatcccccgtcgcagaggatgaggcgcagcgccgcggggtccccgcccgccgtcgccgccgccgggagcgggaacggtgcgggcggcggcggcggcgtgggctgcgccccggctgcgggagccggccggctgctgcagcccatccgcgccacggtgccctaccagctcttgcggggcagccagcacagtcccacgcgtccgcccgtcgccgctgccgccgcctcgctgggcagcctcccggggcccggcgcggcccgcggccccagcccgtccagcccgacgccgccggcggccgcagccccggccgagcaggcgccgcgggccaagggccgcccgagacggtccccagagagccaccggaggagcagctcacctgagagacggagccccggctcgcccgtgtgcagagcggacaaggcaaaatctcagcaagttcggacctctagtacaataaggcgaacctcctctttggatacaataacaggaccttacctcacaggacagtggccacgggatcctcatgttcactacccttcatgcatgaaagacaaagctactcagacacctagctgttgggcagaagagggtgcagaaaagaggtcacatcagcgttctgcgtcatgggggagtgctgatcaactaaaagagcagatcgccaaactgaggcagcaactacaacgcagtaaacagagtagtcgtcacagtaaggagaaagatcgccagtcacctcttcatggcaaccatataacaatcagtcacactcaggctactggatcaaggtcagttcctatgccactgtcaaatatatcagtgccaaaatcatctgtttcgcgtgtgccctgcaatgtagaaggaataagtcctgaattagaaaaggtattcattaaagaaaataatgggaaggaagaagtatccaagccgttggacataccagatggtcgaagagctccacttcctgctcattaccggagcagtagtactcgcagcattgacactcagactccttctgtccaggagcgcagcagtagctgcagcagtcattcaccctgtgtctcccctttttgtcccccggaatcccaggatggtagcccttgctcaacagaagatttgctctatgatcgtgataaagacagtgggagtagctcaccgttacccaagtatgcttcatctcccaaaccaaacaacagctacatgttcaaacgggagcccccagagggatgtgagcgagtgaaggtctttgaggaaatggcgtctcgtcagcctatctcggcccctctcttttcatgtcctgacaaaaacaaggttaatttcatcccaaccggatcagctttctgtcctgtaaaacttctaggccccctcttacctgcttctgaccttatgctcaagaactcccctaactctggccagagctcagctttggcaactctgaccgttgagcagctctcatcccgggtttcctttacgtctctttctgatgacaccagcacagcgggctccatggaggcctctgtccagcagccatcccagcagcagcagctcctgcaggaactgcagggtgaggaccacatctctgctcagaactatgtgatcatctaaaaaagggggagctggcctccaccctatgttccatggattcggaacaagatttcagacatctgcatgagtgacaaactttctgaacaccaccaccaccaataatacttatcagcatcataaagtatctcttaaacactgatcttggcagggacggaactcctattcagcagtttttgtggaaagcagtaatgcttgcaaaacgtgtgtgtcattcagcattttaagtggagactatgcatttcatagtatatttgacagattagtactgtgtcctgtgttttgttccagattcttcagtataaataagctctatatcaaaaagttgcctgtctaaatagaaaatgtcttgctgtgttttgtcctatggaaaatactgtaattcaggattatgtttacaattgatccaggtgtttgtttctaacttctgtaatacatacaatgcaaaaaaaaaaaaaaaaaaatggccacaacagttgcacagtgcccaccctatggcctagcttcaggtacttcagttgaagtctaaactcaggtaacttggaatgtatatcatattgggatattaaatatttcacagctaaaaagctaaagagggaacatcactcttttgcctttccttattttatgcatttccctttcctcattacattccacattcttagaataagaagtgcattcaatcctaggagaatgataatcctggacatgggtgaacatgaggagaaccagcaaaatctgtggtgtttgacatcactttgtcatgtggttacaagtaaaacaactgttgcattcactgtttcaacatgtgtacatgtggcttttttaaaagttcaggtgttgctcagtaaaggactgtgacaatgttgcaaataaagtgttcagtactggactgtacataaacattccacattgtgtgtgatgaaatttaaagacaagaatgtctagagttaatttcaaaataagtgaagtgtttgacggaatggttgagatttttttgtttatgttagccatcagggtcataactgttaccattttatctaaagacatatttatatttagtttctcccttggaaattctttattttgcaggtgaaaaagtgacatactttttgttattgtcttcctcaagcagtttaggtgcatgatcttcatttacatagaatacttgggtctcagaattgatgcaacataagcaggtttttttggtgacttacaagagcaatagtttgaagctatctcatttaagcctctcataatgcataatcatgagtagttttgaaatttgcaacctgtgaggtagagcataaactcaagaaaatagccttgaacttgcagacttttgacacaagttctccacaaagtgtgaagagagccccaggcattcctgattggtcaatgggagagcctaactttcattgttttcttcagtacaaagagtatccaaaagctaagtttttgtattccactactttcagttcaataaaacctagagttgtttcatctgcgcctaaagtgtatggcacaattttcttaagaattaggggaaccaggtgcctacagttaaaggaacgtttcagttcctttcattcattcctgggtttttcttttattttctaagaaggttgaagaaggatgagtgatagagaagaaagcaacaccattgatttttttttttaagaaatgatatatatatgtatatgtttgtgtgtgtgtgtgtgtgtgtgtgtgtgtgtattctgtgcattattttgtcatgatctcaattctcttctttccaccaaagtttgtcgtaatattttctcctgaaggtgcattctggctcctttaaattagtcagtgttatattgtaggagactgtcatggaaaaaaggactcagtttactttcgtcattttcacaggggaaccttttaaaacaatcttttcagcagcagatacctttaaccctaataatctcaggccttgatgaaaatactatattttgtagattatggttaaagggggaaaattactagttccgtaagataaatatgagctccatttgacttctgatgtctggtttagcattacataatatgttgatcttacactctgcttttgtccaaataaaatgcaatagtatcaatatcaatttcagaaaaatggactgaatatgcttttttggtgatgaaatctcatgtacgatatttatagtgatgtgcttttattttctcatgagatactaaatattaattgtgttgtacatttgttcttagcatatattaaagttttgaaccaaatgtgttaaagcttacgctttgccatgtaaatttcccagaagttgttgagctcaaatgtatcctacatccagctgtagaaatttgtcagaaattgtttaaattttgtatataattgtactgtttaattctagccattgcgctgaacagtatttgagttaccatataatatggctttacacaaggaaatgtgtggcttttgttttgtattttttcagtatagaagttcctgtgtcttatttaaataaagttattagtaaaactgaaa

SEQ ID NO: 137206 - DNA, 873 bp, Homo sapiens
  Payload ID: 6865
  Gene Symbol: GLCCI1
  Gene Name: glucocorticoid induced 1
  ENST ID: ENST00000438949
  CDS Start-End: 1-574
gtcacctcttcatggcaaccatataacaatcagtcacactcaggctactggatcaaggtcagttcctatgccactgtcaaatatatcagtgccaaaatcatctgtttcgcgtgtgccctgcaatgtagaaggaataagtcctgaattagaaaaggtattcattaaagaaaataatgggaaggaagaagtatccaagccgttggacataccagatggtcgaagagctccacttcctgctcattaccggagcagtagtactcgcagcattgacactcagactccttctgtccaggagcgcagcagtagctgcagcagtcattcaccctgtgtctcccctttttgtcccccggaatcccaggatggtagcccttgctcaacagaagatttgctctatgatcgtgataaagacagtgggagtagctcaccgttacccaagtatgcttcatctcccaaaccaaacaacagctacatgttcaaacgggagcccccagagggatgtgagcgagtgaaggtctttgaggaaatggcacaaacacctggtgtggtttctctctcctgcttcccttcccagtgaccactctgcagcaagccccgggagctttgtatgaagaagctattccttttcaaatccctaaccctttctcctgattgctcctccaaatctgtggccagtgcagcaagtcctgtgaagacagtaaggaggtagcaggaggaggctaaaaatggtgacatcaaggaatagaaactggtggcttaagagaaggcttggtagagtgaactttggctcggtgggagaatcctaacatggcatagtttcaagctttatctcccttcccagaaagaaaacggtcccaacatcctcacactgtaagg

SEQ ID NO: 137207 - DNA, 581 bp, Homo sapiens
  Payload ID: 6865
  Gene Symbol: GLCCI1
  Gene Name: glucocorticoid induced 1
  ENST ID: ENST00000430798
  CDS Start-End: 1-581
gcggccgcagccccggccgagcaggcgccgcgggccaagggccgcccgagacggtccccagagagccaccggaggagcagctcacctgagagacggagccccggctcgcccgtgtgcagagcggacaaggcaaaatctcagcaagttcggacctctagtacaataaggcgaacctcctctttggatacaataacaggaccttacctcacaggacagtggccacgggatcctcatgttcactacccttcatgcatgaaagacaaagctactcagacacctagctgttgggcagaagagggtgcagaaaagaggtcacatcagcgttctgcgtcatgggggagtgctgatcaactaaaagagcagatcgccaaactgaggcagcaactacaacgcagtaaacagagtagtcgtcacagtaaggagaaagatcgccagtcacctcttcatggcaaccatataacaatcagtcacactcaggctactggatcaagccgttggacataccagatggtcgaagagctccacttcctgctcattaccggagcagtagtactcgcagcattgacactcagactccttct

SEQ ID NO: 137208 - DNA, 575 bp, Homo sapiens
  Payload ID: 6865
  Gene Symbol: GLCCI1
  Gene Name: glucocorticoid induced 1
  ENST ID: ENST00000414914
  CDS Start-End: 1-575
gcggccgcagccccggccgagcaggcgccgcgggccaagggccgcccgagacggtccccagagagccaccggaggagcagctcacctgagagacggagccccggctcgcccgtgtgcagagcggacaaggcaaaatctcagcaagttcggacctctagtacaataaggcgaacctcctctttggatacaataacaggaccttacctcacaggacagtggccacgggatcctcatgttcactacccttcatgcatgaaagacaaagctactcagatcgccaaactgaggcagcaactacaacgcagtaaacagagtagtcgtcacagtaaggagaaagatcgccagtcacctcttcatggcaaccatataacaatcagtcacactcaggctactggatcaaggtcagttcctatgccactgtcaaatatatcagtgccaaaatcatctgtttcgcgtgtgccctgcaatgtagaaggaataagtcctgaattagaaaaggtattcattaaagaaaataatgggaaggaagaagtatccaagccgttggacataccagatggtcgaagagctccact

SEQ ID NO: 137209 - DNA, 1912 bp, Homo sapiens
  Payload ID: 6866
  Gene Symbol: GMEB1
  Gene Name: glucocorticoid modulatory element binding protein 1
  Uniprot ID: Q9Y692
  ENST ID: ENST00000294409
  CDS Start-End: 91-1812
gcgcatgctccgtcgcctgcccgccctggccgctcgccgcccgcccgcccgacggagacgcagtcccagctatctgacttcatgtgaaagatggctaatgcagaagtgagtgtcccagtgggggatgtggttgtggtacctactgaaggaaatgaaggggagaatcctgaagacactaaaacccaagtgattttgcagttacagcctgtgcaacaaggtttgtttatcgatggacacttttacaacaggatttatgaagctgggtcggagaacaacacggcagttgtagcagtagaaactcacacgatacacaaaattgaagaagggattgatacaggcactatagaagcaaatgaggatatggaaattgcttaccccataacttgtggggagagcaaagccatcctcctctggaagaagtttgtatgtccaggaataaacgtgaagtgtgtcaagttcaatgatcagttgatcagccccaagcactttgttcatctggctggcaagtccactctgaaggactggaagagagctattcgtctgggtgggatcatgctcaggaaaatgatggactccggacagattgatttttaccaacatgacaaagtttgctccaatacctgcagaagcaccaaatttgatcttctgatcagcagtgcaagagctccagtgccaggacagcagacaagtgtggtgcagacacccacttcggctgatggtagcatcacgcagattgccatctcagaagagagcatggaagaggcagggctggaatggaactcagctctcaccgctgctgtcaccatggccacggaggagggtgtaaagaaagactcagaggaaatttcagaggacactttgatgttctggaaaggaatagctgatgtagggctgatggaagaggttgtctgcaatatacagaaggaaatagaggagctactcaggggagttcagcagcggctcatccaggctcccttccaagtcacagatgctgctgttctcaacaatgtagcacacacatttggcctaatggacacagtcaagaaggttttagacaacagaaggaaccaagtagagcagggagaagaacagtttctctatactctgacagacttggaacgccagttggaggagcagaagaagcaaggccaggatcacaggctgaaatctcagacagttcaaaatgtggtactgatgcctgtgagcactcctaagcctccaaaaaggccccggctccagcggccagcctccaccactgtcttgagcccttctcctcctgtccagcagcctcagttcacagtcatctcacccatcaccatcaccccagtgggtcagtcattttccatgggcaatattccagtggccaccctcagccagggctccagtcctgtgactgtccacacactgccttctggccctcagctcttccgctatgccacagtggtctcctctgccaagagcagctcaccagacacagtgaccatccacccttcatctagcttggcgctgctgagctctactgccatgcaggatgggagtacactgggcaacatgaccaccatggttagccctgtggaattggtggccatggagtccggcctaacctcggcaattcaggctgttgaaagcacctcagaggatgggcagaccatcattgagattgatccagccccggacccagaagctgaagatactgagggcaaagcagtcatcttggagacagagctgaggactgaggagaaagttgtggctgagatggaagaacaccagcatcaagttcacaatgtggagattgtggtcttagaggattaactggggatctcagggccaggagttatgttttgatttggaattttaattatttgtttatttttatcattgtcccactcatttccacataggaccctttttt

SEQ ID NO: 137210 - DNA, 1894 bp, Homo sapiens
  Payload ID: 6866
  Gene Symbol: GMEB1
  Gene Name: glucocorticoid modulatory element binding protein 1
  Uniprot ID: Q9Y692
  ENST ID: ENST00000361872
  CDS Start-End: 90-1781
ctgcgcatgctccgtcgcctgcccgccctggccgctcgccgcccgcccgcccgacggagacgtcccagctatctgacttcatgtgaaagatggctaatgcagaagtgagtgtcccagtgggggatgtggttgtggtacctactgaaggaaatgaaggggagaatcctgaagacactaaaacccaagtgattttgcagttacagcctgtgcaacaagggatttatgaagctgggtcggagaacaacacggcagttgtagcagtagaaactcacacgatacacaaaattgaagaagggattgatacaggcactatagaagcaaatgaggatatggaaattgcttaccccataacttgtggggagagcaaagccatcctcctctggaagaagtttgtatgtccaggaataaacgtgaagtgtgtcaagttcaatgatcagttgatcagccccaagcactttgttcatctggctggcaagtccactctgaaggactggaagagagctattcgtctgggtgggatcatgctcaggaaaatgatggactccggacagattgatttttaccaacatgacaaagtttgctccaatacctgcagaagcaccaaatttgatcttctgatcagcagtgcaagagctccagtgccaggacagcagacaagtgtggtgcagacacccacttcggctgatggtagcatcacgcagattgccatctcagaagagagcatggaagaggcagggctggaatggaactcagctctcaccgctgctgtcaccatggccacggaggagggtgtaaagaaagactcagaggaaatttcagaggacactttgatgttctggaaaggaatagctgatgtagggctgatggaagaggttgtctgcaatatacagaaggaaatagaggagctactcaggggagttcagcagcggctcatccaggctcccttccaagtcacagatgctgctgttctcaacaatgtagcacacacatttggcctaatggacacagtcaagaaggttttagacaacagaaggaaccaagtagagcagggagaagaacagtttctctatactctgacagacttggaacgccagttggaggagcagaagaagcaaggccaggatcacaggctgaaatctcagacagttcaaaatgtggtactgatgcctgtgagcactcctaagcctccaaaaaggccccggctccagcggccagcctccaccactgtcttgagcccttctcctcctgtccagcagcctcagttcacagtcatctcacccatcaccatcaccccagtgggtcagtcattttccatgggcaatattccagtggccaccctcagccagggctccagtcctgtgactgtccacacactgccttctggccctcagctcttccgctatgccacagtggtctcctctgccaagagcagctcaccagacacagtgaccatccacccttcatctagcttggcgctgctgagctctactgccatgcaggatgggagtacactgggcaacatgaccaccatggttagccctgtggaattggtggccatggagtccggcctaacctcggcaattcaggctgttgaaagcacctcagaggatgggcagaccatcattgagattgatccagccccggacccagaagctgaagatactgagggcaaagcagtcatcttggagacagagctgaggactgaggagaaagttgtggctgagatggaagaacaccagcatcaagttcacaatgtggagattgtggtcttagaggattaactggggatctcagggccaggagttatgttttgatttggaattttaattatttgtttatttttatcattgtcccactcatttccacataggacccttttttaaaaaaaaaaaaa

SEQ ID NO: 137211 - DNA, 6410 bp, Homo sapiens
  Payload ID: 6866
  Gene Symbol: GMEB1
  Gene Name: glucocorticoid modulatory element binding protein 1
  Uniprot ID: Q9Y692
  ENST ID: ENST00000373816
  CDS Start-End: 139-1830
aagcccggcctggcggcggcggtggcggtagctgccgtggcggcctctgcgcatgctccgtcgcctgcccgccctggccgctcgccgcccgcccgcccgacggagacgcagtcccagctatctgacttcatgtgaaagatggctaatgcagaagtgagtgtcccagtgggggatgtggttgtggtacctactgaaggaaatgaaggggagaatcctgaagacactaaaacccaagtgattttgcagttacagcctgtgcaacaagggatttatgaagctgggtcggagaacaacacggcagttgtagcagtagaaactcacacgatacacaaaattgaagaagggattgatacaggcactatagaagcaaatgaggatatggaaattgcttaccccataacttgtggggagagcaaagccatcctcctctggaagaagtttgtatgtccaggaataaacgtgaagtgtgtcaagttcaatgatcagttgatcagccccaagcactttgttcatctggctggcaagtccactctgaaggactggaagagagctattcgtctgggtgggatcatgctcaggaaaatgatggactccggacagattgatttttaccaacatgacaaagtttgctccaatacctgcagaagcaccaaatttgatcttctgatcagcagtgcaagagctccagtgccaggacagcagacaagtgtggtgcagacacccacttcggctgatggtagcatcacgcagattgccatctcagaagagagcatggaagaggcagggctggaatggaactcagctctcaccgctgctgtcaccatggccacggaggagggtgtaaagaaagactcagaggaaatttcagaggacactttgatgttctggaaaggaatagctgatgtagggctgatggaagaggttgtctgcaatatacagaaggaaatagaggagctactcaggggagttcagcagcggctcatccaggctcccttccaagtcacagatgctgctgttctcaacaatgtagcacacacatttggcctaatggacacagtcaagaaggttttagacaacagaaggaaccaagtagagcagggagaagaacagtttctctatactctgacagacttggaacgccagttggaggagcagaagaagcaaggccaggatcacaggctgaaatctcagacagttcaaaatgtggtactgatgcctgtgagcactcctaagcctccaaaaaggccccggctccagcggccagcctccaccactgtcttgagcccttctcctcctgtccagcagcctcagttcacagtcatctcacccatcaccatcaccccagtgggtcagtcattttccatgggcaatattccagtggccaccctcagccagggctccagtcctgtgactgtccacacactgccttctggccctcagctcttccgctatgccacagtggtctcctctgccaagagcagctcaccagacacagtgaccatccacccttcatctagcttggcgctgctgagctctactgccatgcaggatgggagtacactgggcaacatgaccaccatggttagccctgtggaattggtggccatggagtccggcctaacctcggcaattcaggctgttgaaagcacctcagaggatgggcagaccatcattgagattgatccagccccggacccagaagctgaagatactgagggcaaagcagtcatcttggagacagagctgaggactgaggagaaagttgtggctgagatggaagaacaccagcatcaagttcacaatgtggagattgtggtcttagaggattaactggggatctcagggccaggagttatgttttgatttggaattttaattatttgtttatttttatcattgtcccactcatttccacataggacccttttttaaaaaaaaaaaaacaaaatcttattgttgtaactgaaaatgttgggttcttcccactccctcattgaaaaatggacaaaacaagctgcccttccagaagttgagagtaggtcattcaatgtcctaatcatcttacaccaagaaagtaatttcttttaggggaagtgtcaagataacaagtaaccctgtccagaaagccatttccaggctcgtctgtgtgtgtaggcatgtggttttattcttgtaaagatgcattgaccaaactctggaacacagatctgacactggaaggcaacccactcgcatgtggatgctgaagggcactttattttgtatcctgaaaagggcctacagaggccagtacaaaactctcaaacaaaaggaagttgactctgctttgaggggaaggtggcatgccagcactagcttaaaaagggaagtgctagccgggcgtggtggctcacgcctgcaatcccagcactttgggaggccgaggcgggtggatcacgaggtcaggagtttgagaccagcctggccaacatggtgaaaccccgtatctactaaaaatacgaaaaaaaaattagccgggtgtggtggcgggagcctgtaatcccagctattcaggaggccaaggcaggagaatcgcttgaacctgggaaggcagaggttgcagtgagccaagatcgcaccactgcactccagcctgggcaacaagagcgagactccatctcaaaaaaaaaaaaaaaaaaaagtgctttggcaagtatggggcagggaaatcatcttacttccagaggtgcaactgacgcctctggagatctccaaaagttagtaccgtgagtgccattttgagaagaaggtggtaataagtggaaggtacatctccacagagcaagtggcagcagtggcctgtggttttgcagaaatggaaagccaaggccgggtgcggtggctcatgcctgtaatcccagcactttgggaggccgaggtgggtgaatcacctgaggtcaggagtttgaggccagcctggccaacatggtgaaaccccgtctctactgaaaatacaaaaaaaaaaaattagctgggcatggtggcacgcgcctgtaatcccagctacttgggaggctgaggcaggagaattgcttgaacctgggaggcggaggttgcagtgagctgagatcatgccattgcactctagcctgggcgaggagtgaaactccgtctcaaaaaaaaagaaagaaatggaaagccaaggatgctgcagctgtgctttggggttcaaggtaatagcttaccttgttccacactttgtcaaagcactcaccctcctaagctaggaccagtccattcatttgaaactgtgcaatgtgatgtaaatggctctggttcttagactgtggctgtcacagggatggggctccaaggccatcattttcattgcatggctccaagagcagggagttcctcaatgaaaccagctgccttttttggtggggccatttttttggctttggaacccaaagcagccactcatttggtgcttcctcttgttctgccctccatccctcaactcttaatggcatctgtctcctagaacccacgctcttcagctttttggctgatttggagaacagtgacaggtgcctgcctgccttcgtccccttttagattcatttataccacagatgtttctgtgagatactgagatcataaaaagctttaggcttggcagagaggactcaacacccccaggctttcctgaggcaccaactagatgtctcttgagtgagctggactccctgggaaagaagcattgtctgcaacattatattataggaaatgtaccaggaatgtcaataataatgctttgggggggggggttattttgttttgttttgtttttaatgttgtttgtatatttagagctgggccattttccgtgctgcgatttcttctctttgaccctcttcagtgtttggggcaagagtggaccctggtttttatttctttgattgcattgtttactgcactaggaaaaatatagagatacagggaaactacagacaaatttaaggaaaaataggtcaaaaaagaaagcacacaccttaagagtgggaggaatatttttattaaaaacaaaacttggacctgtagtttttttttttcttttttatttttaagaaggcacctttcagaagccatgtttcttccaacagatgttggaaaccccatcgagcaagtaaaagttgcattctccatccctcagatggctgtatgtagtcaaagaaaccctgtaacatggtaaggttgctgttttttttttttttttctttttgagatggagtcttgctctgtagcccaggctggagtgcaatggtgtgatctcagctcactgcaacctccgcctccttggttcaagtgattctcctgcctcagcctcctgagtagctgggattacaggctcccaccaccacgcccgggtaatttttgtatttttagtagagacggggttttgccatgttggccaggctggtcttgaactcctgacctcaagcgatccgcccgccttggcctcccaaagtgttgggattacaggcatgagccaccgcacccagcctgaaggtgactcttaagaatgagatttatgaactccatacagttgtagatttcagtttttaaatagtctggggttttatttttcttttcaaaatatctaatagacttagcaatcaatttagaacaaatatttggcccttaatatatctttagtgagggaagtagcttttatttcctgcttgtttaggttttctgttggtacataaaaacaaaattgctgtctcagactgaatctacttgaatctaggaaggcacatctcatccctattgtggtttttagggacacttttctctttcccagagatgagaggaccaattcaggacagaagagccctcgtgaataccaacgtgctagctcaggttcccttctttcctccatcagagctattggtagggttttaaggtcgtgtgtgcatcatgcttccaatgtcaagagatttcctcaaacagcctgtttactagatgaattttccagctggtgaaatacatgagctttgttgttttcctggtcttccaatagcctgtcattattgttagatattatggcacctgttgttgaatgtaggttcccttacagccctggtctagatgatcctagatggggtgagacatatgcaagccattggtatgtgcataagcagttgcaatgaaccttaggctgacttggtagtaggcatttgtctttctgttcatgcattgaataaacatttttaagaaccatctatgtgccaggctttgtgctaggcactgacagtagagagatgaagacatagtccttgcacttaaggaattcatactccagatgtctggagttaagaaatacatatttcagccaggcatggtggctcacacctagaatcccagcactttcagaagctgaggcagaattgcttgaggccaagagtttaagactagcctggtcaacatagccagaccccatctctataaaaaaatgtaaaaattagtcaagtcttgtggctcgcacttgtagacacaattactcaggatgctgaggcaagaggattttgcttgggcctaggagttcaaggctgtagtgagctatgactttgccactgtactctagcccaggtaacagggcaacatccccagctcagaaaaccaaaactacacatttcattataattgtttttttttgtaattttatgtattttatgcattgaaaaacattatttaagaattggttcataggtttcagcagactgccaaaggcacaaacaagcagctctcctttactgaggtactgaaacagatcctactgcgtaagtgctgtgtgtgatagggctattggctaggagctgagagaacaaagcatgaagtgcctaacccagcttagcggtgtagaggtggggtcagcaaataagggagatcttcctggagaaggcatatacctaagctgatttaggagagaccacttttggctaggtttattgtactacttgattttcaagtaattgggcttatttattctagagaaaaagtcttcagtctcttgcttctgcctgcaaagcaaggcagagtcagcaacatgggcagtctccccactggagaacgctgagtcatgcatgggcttctccaagtttccatcagatgggatccagtgttgaatccagtgcaggactggagtctagctggcaaagggtaaatgcccccaaagccttcctgccatatggtttccacgaaggcctgagagtcagctgtacaactgtcttgtcttggccatgtccctgtttggtccctgccttgttctcttccctttctcaatttccaagctccacccactcctaaaaacaccagtcattctgaagtaaaaaatggacaataaacatgaatattcaagattcaaa

SEQ ID NO: 137212 - DNA, 4559 bp, Homo sapiens
  Payload ID: 6867
  Gene Symbol: GMEB2
  Gene Name: glucocorticoid modulatory element binding protein 2
  Uniprot ID: Q9UKD1
  ENST ID: ENST00000266068
  CDS Start-End: 480-2072
gcgaggacttcttggagtgctttctgcacctgaaactcagttcagggattggggctggctttgagttcaggccaggagagacggaagaactggcaagccgggagcctgcgtccagggaagttgcttggaattccaggcccctcctgtcctcctgctctgagccccacgtggagggagtggctctgtgctttctacccaagggtttcggcttatccagtgggaaaaacgggtggagtgcgcttacaccgccctcggaaccagagcctggagtagcccttctgttgccgctcgtttttgtcaggaggtagcagtctgggactcaagggtgggtctttggagctgattagagatgcctttgtgagtgctatgttgtgtggatgtggagatgactccatccctgtgccctgccttgcttcctccaggacttgggaccctggaggactgacgctgctggcctgggcgtccccttccgctgagccatggcgactcccgacgtgagtgtgcacatggaggaggtggtggttgtgacaactccggacactgcagtggacggcagtggtgtggagggggtgaagaccgtgttggtgacgaccaacttggcccctcacgggggcgacctgacggaagataacatggagacagaaaatgcagcggcagcagctgccgcggccttcacagcctcctcccagctcaaggaagccgtgttagtgaagatggctgaagagggggagaacctggaagctgagattgtgtaccccatcacctgtggagacagcagagccaacctcatctggaggaagtttgtgtgtcccggcatcaatgtgaaatgtgttcagtacgacgagcatgtaatcagcccaaaggaatttgtgcacctggccgggaagtccaccctgaaggactggaagagagccatccgcatgaacggcatcatgctcaggaagatcatggactccggggaactggacttctaccagcatgacaaggtctgctccaacacctgccgcagcacaaagattgacctctcaggagcccgtgtgtccctgagcagccccacgtcggccgagtacattcccctcacgcccgccgcagccgacgtgaatgggtctcctgcgaccatcaccatagagacctgtgaagaccctggcgactggaccgcggccattggagatgacacatttaccttctggcgggggctgaaggacgccggcctgctggacgaggtcatccaggagttccaccaggagctggtggagaccatgagaggcctgcagcagcgggtccaggaccctcccctgcagcttcgagatgctgtacttctcaacaacatcgtgcagaacttcggcatgctggacctggtgaagaaggtgctggccagccacaagtgccagatggaccgctcgcgggagcagtacgcccgggacctggcagccctggagcagcagtgtgatgagcatcgtcgccgagccaaggagctgaagcacaagtcccagcacctcagcaacgtgctcatgacgctgacgccggtctccctgccaccgcctgtgaagcggccccggcttgcacgtgccacatcaggaccggccgccatggcctcgcaggtgctcacccagtctgcccagctggcgcttggcccgggcgtgcccgtcccccagctgaccagcgtgccccttggtaaagtggtgtccaccctgccgtccaccgtcctgggcaagggttcccttcaggcgccccccgccagctccccggcctccccgctgctcgggggatacacagtcttggcctcttccggctccacctaccccagcacagtggagatccacccggacgcgtccagcctcacggtcctgagcacggccgccgtgcaggacggtagcacggtgttcaaggtggtcagcccgctacagctgctcacgttgcctggcctgggccccaccctgcagaacgtggcccaggcctcgcctggctccagcacaattgtgacagtgcccgcaggggctgcccccgggcctgaggagcacacggccaccattgaggtggctgccatggcagaggaccacgagcggaagtagccgacaggagggcgaggcccctgggacggacagggctggctgtctctcagccgcggcagcagggagcgggcagaggccgcagggctggctcgggcaggtgggtcacgtggtctgcagaaccaaagagaggaatcgccaaaacaaatcacgagaagagagaaggggacagaacagcgagagcaacctggaaaatcggtcttcaggtcccacgtttcctcccccttttttcttgggaaatatatttttccatctgttgcttattaatactgtttacacattgggccttgatcaggagccaggtgggcgggggctagggggagcctgggtgcagcagagacagaggaagcagagccaggtgccgagcgcgaccctgcaggtgctggacgcggtgcagcaggtcacgaggcccccatgtctgcacccagccaggtccctggggacgttactaactcatgacttgggagctaagcccaagtgtgaaacctctggatcctatggatttggtttcttcccacagttttctgtaggtttagtgtggctggcgccccgttctcctccagttgggaacatgcacccggagcttggggtgcagatcctgatgggtgcctgcctcccccgcccccagccggtgctcaggtggcccaggggccgcacagacgaggcgtggtccaggcattgttgcacatgtactgagggtgtttttaagtgaattgcttagtaggcttctaggaagagtcagatttatagcattttcaaccaaaataatggtgagtgcctaggcttcccgagttagctctttgggtggcccctgagcccctgtgagtgcacttgaccgggtgcggaggtcctgggcagcctgtccctgagccggcccctcccaggggtctgagatccatgaggtgtgtccctagggcttcagtcctggggcagaggcataaacagaaccagtcactatggaggtcgaggattcccatgtgggcccttcagcttgggctgcttggccacggaacagcccttggctccctggcccccggcccccatgcagcccctgggctggcccttggtggtctctgtccaagggagagcccctgggtgttcaggaggctgccccgggtgggctgctcagggcagctgccgaaggtggagcccagagcctgtctggaagggctgtctgtggctgtcctgagacctggccttggactcacaaggaagaccaggctgaggcccctccaggccagggtcctggggcaggcatctcagggagcagccagcccaggcctcctgccgtctccaacagggcatgtcccgggaggaccctgagtgccagattcccctggacgctcctgctgattctgtcggcagttgaaggcccgtctgaggccccgcaatgcgagggtcctgtgtcccacttcactgctccgaagggaactggctggctgtccgtccagtgagcggcccagaccccacctctgcgccattgtcaccagggccctgtcctggctgccctcacccatgtcaagctactgaggctgtgtcttgtttgttttctctgttacatttttgtttgctgttgtcacagtcagctggtttcggcgtgatgttgatcttttgatgtacatactccgttttaaactcatttccactctagttgagttctgcagcatgcagcggtatgaccctacgggggtcaggagagccctgcggcccccacccaccagctcagaacctgtcactaatacagctgcctgtgaccctgggacccgcaaccttccagctgcttccctttgtcaaagtcacgagtgcgtctgccttgacagccctcgtcaacagaacttccagtgggttgtgggttcatttcctttctttttaagaacagggttgggaccttttctgcccctgccccttagctactgaggcatagggagaggaagttaatttcagagccatacaaaaataagccacaaccagcttcagaattaattcccaatcccccattccaccagggctgggagcccattcccagtgcttcccaaggccctcggggacatctaccgccaacccagctgcttctggcaggggctccaagccccagcgtggggaagggccctggagaagccctcatcctcatgggaaccacactgcagtgggtggggaaggttgttgtcagcaccgcccccggctcctccaggtcctgctggctcctcgggggcagggttccctggacctcccagttctgcgccttggggccagccagtactcagagaggaggaccttctcaaccacgtacagaacacgggttttcatggctgcctttggtttggttttctgagaagataggattggattggattttgcagagggtgagaacttctctgtgcctgctcagaggcgccctagggaagggccatgtttgagttttgctttgtatgttgttttgcaagtatctgcctggtactttgatttaaaataaaaacaattttcatagtt

SEQ ID NO: 137213 - DNA, 4011 bp, Homo sapiens
  Payload ID: 6867
  Gene Symbol: GMEB2
  Gene Name: glucocorticoid modulatory element binding protein 2
  ENST ID: ENST00000370069
  CDS Start-End: 85-1524
tgccctgcaggttgtgccctccgggatcctgattctattctctcctcccttcacttcaccaggggcgacctgacggaagataacatggagacagaaaatgcagcggcagcagctgccgcggccttcacagcctcctcccagctcaaggaagccgtgttagtgaagatggctgaagagggggagaacctggaagctgagattgtgtaccccatcacctgtggagacagcagagccaacctcatctggaggaagtttgtgtgtcccggcatcaatgtgaaatgtgttcagtacgacgagcatgtaatcagcccaaaggaatttgtgcacctggccgggaagtccaccctgaaggactggaagagagccatccgcatgaacggcatcatgctcaggaagatcatggactccggggaactggacttctaccagcatgacaaggtctgctccaacacctgccgcagcacaaagattgacctctcaggagcccgtgtgtccctgagcagccccacgtcggccgagtacattcccctcacgcccgccgcagccgacgtgaatgggtctcctgcgaccatcaccatagagacctgtgaagaccctggcgactggaccgcggccattggagatgacacatttaccttctggcgggggctgaaggacgccggcctgctggacgaggtcatccaggagttccaccaggagctggtggagaccatgagaggcctgcagcagcgggtccaggaccctcccctgcagcttcgagatgctgtacttctcaacaacatcgtgcagaacttcggcatgctggacctggtgaagaaggtgctggccagccacaagtgccagatggaccgctcgcgggagcagtacgcccgggacctggcagccctggagcagcagtgtgatgagcatcgtcgccgagccaaggagctgaagcacaagtcccagcacctcagcaacgtgctcatgacgctgacgccggtctccctgccaccgcctgtgaagcggccccggcttgcacgtgccacatcaggaccggccgccatggcctcgcaggtgctcacccagtctgcccagctggcgcttggcccgggcgtgcccgtcccccagctgaccagcgtgccccttggtaaagtggtgtccaccctgccgtccaccgtcctgggcaagggttcccttcaggcgccccccgccagctccccggcctccccgctgctcgggggatacacagtcttggcctcttccggctccacctaccccagcacagtggagatccacccggacgcgtccagcctcacggtcctgagcacggccgccgtgcaggacggtagcacggtgttcaaggtggtcagcccgctacagctgctcacgttgcctggcctgggccccaccctgcagaacgtggcccaggcctcgcctggctccagcacaattgtgacagtgcccgcaggggctgcccccgggcctgaggagcacacggccaccattgaggtggctgccatggcagaggaccacgagcggaagtagccgacaggagggcgaggcccctgggacggacagggctggctgtctctcagccgcggcagcagggagcgggcagaggccgcagggctggctcgggcaggtgggtcacgtggtctgcagaaccaaagagaggaatcgccaaaacaaatcacgagaagagagaaggggacagaacagcgagagcaacctggaaaatcggtcttcaggtcccacgtttcctcccccttttttcttgggaaatatatttttccatctgttgcttattaatactgtttacacattgggccttgatcaggagccaggtgggcgggggctagggggagcctgggtgcagcagagacagaggaagcagagccaggtgccgagcgcgaccctgcaggtgctggacgcggtgcagcaggtcacgaggcccccatgtctgcacccagccaggtccctggggacgttactaactcatgacttgggagctaagcccaagtgtgaaacctctggatcctatggatttggtttcttcccacagttttctgtaggtttagtgtggctggcgccccgttctcctccagttgggaacatgcacccggagcttggggtgcagatcctgatgggtgcctgcctcccccgcccccagccggtgctcaggtggcccaggggccgcacagacgaggcgtggtccaggcattgttgcacatgtactgagggtgtttttaagtgaattgcttagtaggcttctaggaagagtcagatttatagcattttcaaccaaaataatggtgagtgcctaggcttcccgagttagctctttgggtggcccctgagcccctgtgagtgcacttgaccgggtgcggaggtcctgggcagcctgtccctgagccggcccctcccaggggtctgagatccatgaggtgtgtccctagggcttcagtcctggggcagaggcataaacagaaccagtcactatggaggtcgaggattcccatgtgggcccttcagcttgggctgcttggccacggaacagcccttggctccctggcccccggcccccatgcagcccctgggctggcccttggtggtctctgtccaagggagagcccctgggtgttcaggaggctgccccgggtgggctgctcagggcagctgccgaaggtggagcccagagcctgtctggaagggctgtctgtggctgtcctgagacctggccttggactcacaaggaagaccaggctgaggcccctccaggccagggtcctggggcaggcatctcagggagcagccagcccaggcctcctgccgtctccaacagggcatgtcccgggaggaccctgagtgccagattcccctggacgctcctgctgattctgtcggcagttgaaggcccgtctgaggccccgcaatgcgagggtcctgtgtcccacttcactgctccgaagggaactggctggctgtccgtccagtgagcggcccagaccccacctctgcgccattgtcaccagggccctgtcctggctgccctcacccatgtcaagctactgaggctgtgtcttgtttgttttctctgttacatttttgtttgctgttgtcacagtcagctggtttcggcgtgatgttgatcttttgatgtacatactccgttttaaactcatttccactctagttgagttctgcagcatgcagcggtatgaccctacgggggtcaggagagccctgcggcccccacccaccagctcagaacctgtcactaatacagctgcctgtgaccctgggacccgcaaccttccagctgcttccctttgtcaaagtcacgagtgcgtctgccttgacagccctcgtcaacagaacttccagtgggttgtgggttcatttcctttctttttaagaacagggttgggaccttttctgcccctgccccttagctactgaggcatagggagaggaagttaatttcagagccatacaaaaataagccacaaccagcttcagaattaattcccaatcccccattccaccagggctgggagcccattcccagtgcttcccaaggccctcggggacatctaccgccaacccagctgcttctggcaggggctccaagccccagcgtggggaagggccctggagaagccctcatcctcatgggaaccacactgcagtgggtggggaaggttgttgtcagcaccgcccccggctcctccaggtcctgctggctcctcgggggcagggttccctggacctcccagttctgcgccttggggccagccagtactcagagaggaggaccttctcaaccacgtacagaacacgggttttcatggctgcctttggtttggttttctgagaagataggattggattggattttgcagagggtgagaacttctctgtgcctgctcagaggcgccctagggaagggccatgtttgagttttgctttgtatgttgttttgcaagtatctgcctggtactttgatttaaaataaaaacaattttcatagtt

SEQ ID NO: 137214 - DNA, 4223 bp, Homo sapiens
  Payload ID: 6867
  Gene Symbol: GMEB2
  Gene Name: glucocorticoid modulatory element binding protein 2
  Uniprot ID: Q9UKD1
  ENST ID: ENST00000370077
  CDS Start-End: 144-1736
gcggccgccgccgccgcccgccgccgccgcagctcccgacgccgccgcccccgccgggtgcctaagcaggcccggcgcggccccaggacttgggaccctggaggactgacgctgctggcctgggcgtccccttccgctgagccatggcgactcccgacgtgagtgtgcacatggaggaggtggtggttgtgacaactccggacactgcagtggacggcagtggtgtggagggggtgaagaccgtgttggtgacgaccaacttggcccctcacgggggcgacctgacggaagataacatggagacagaaaatgcagcggcagcagctgccgcggccttcacagcctcctcccagctcaaggaagccgtgttagtgaagatggctgaagagggggagaacctggaagctgagattgtgtaccccatcacctgtggagacagcagagccaacctcatctggaggaagtttgtgtgtcccggcatcaatgtgaaatgtgttcagtacgacgagcatgtaatcagcccaaaggaatttgtgcacctggccgggaagtccaccctgaaggactggaagagagccatccgcatgaacggcatcatgctcaggaagatcatggactccggggaactggacttctaccagcatgacaaggtctgctccaacacctgccgcagcacaaagattgacctctcaggagcccgtgtgtccctgagcagccccacgtcggccgagtacattcccctcacgcccgccgcagccgacgtgaatgggtctcctgcgaccatcaccatagagacctgtgaagaccctggcgactggaccgcggccattggagatgacacatttaccttctggcgggggctgaaggacgccggcctgctggacgaggtcatccaggagttccaccaggagctggtggagaccatgagaggcctgcagcagcgggtccaggaccctcccctgcagcttcgagatgctgtacttctcaacaacatcgtgcagaacttcggcatgctggacctggtgaagaaggtgctggccagccacaagtgccagatggaccgctcgcgggagcagtacgcccgggacctggcagccctggagcagcagtgtgatgagcatcgtcgccgagccaaggagctgaagcacaagtcccagcacctcagcaacgtgctcatgacgctgacgccggtctccctgccaccgcctgtgaagcggccccggcttgcacgtgccacatcaggaccggccgccatggcctcgcaggtgctcacccagtctgcccagctggcgcttggcccgggcgtgcccgtcccccagctgaccagcgtgccccttggtaaagtggtgtccaccctgccgtccaccgtcctgggcaagggttcccttcaggcgccccccgccagctccccggcctccccgctgctcgggggatacacagtcttggcctcttccggctccacctaccccagcacagtggagatccacccggacgcgtccagcctcacggtcctgagcacggccgccgtgcaggacggtagcacggtgttcaaggtggtcagcccgctacagctgctcacgttgcctggcctgggccccaccctgcagaacgtggcccaggcctcgcctggctccagcacaattgtgacagtgcccgcaggggctgcccccgggcctgaggagcacacggccaccattgaggtggctgccatggcagaggaccacgagcggaagtagccgacaggagggcgaggcccctgggacggacagggctggctgtctctcagccgcggcagcagggagcgggcagaggccgcagggctggctcgggcaggtgggtcacgtggtctgcagaaccaaagagaggaatcgccaaaacaaatcacgagaagagagaaggggacagaacagcgagagcaacctggaaaatcggtcttcaggtcccacgtttcctcccccttttttcttgggaaatatatttttccatctgttgcttattaatactgtttacacattgggccttgatcaggagccaggtgggcgggggctagggggagcctgggtgcagcagagacagaggaagcagagccaggtgccgagcgcgaccctgcaggtgctggacgcggtgcagcaggtcacgaggcccccatgtctgcacccagccaggtccctggggacgttactaactcatgacttgggagctaagcccaagtgtgaaacctctggatcctatggatttggtttcttcccacagttttctgtaggtttagtgtggctggcgccccgttctcctccagttgggaacatgcacccggagcttggggtgcagatcctgatgggtgcctgcctcccccgcccccagccggtgctcaggtggcccaggggccgcacagacgaggcgtggtccaggcattgttgcacatgtactgagggtgtttttaagtgaattgcttagtaggcttctaggaagagtcagatttatagcattttcaaccaaaataatggtgagtgcctaggcttcccgagttagctctttgggtggcccctgagcccctgtgagtgcacttgaccgggtgcggaggtcctgggcagcctgtccctgagccggcccctcccaggggtctgagatccatgaggtgtgtccctagggcttcagtcctggggcagaggcataaacagaaccagtcactatggaggtcgaggattcccatgtgggcccttcagcttgggctgcttggccacggaacagcccttggctccctggcccccggcccccatgcagcccctgggctggcccttggtggtctctgtccaagggagagcccctgggtgttcaggaggctgccccgggtgggctgctcagggcagctgccgaaggtggagcccagagcctgtctggaagggctgtctgtggctgtcctgagacctggccttggactcacaaggaagaccaggctgaggcccctccaggccagggtcctggggcaggcatctcagggagcagccagcccaggcctcctgccgtctccaacagggcatgtcccgggaggaccctgagtgccagattcccctggacgctcctgctgattctgtcggcagttgaaggcccgtctgaggccccgcaatgcgagggtcctgtgtcccacttcactgctccgaagggaactggctggctgtccgtccagtgagcggcccagaccccacctctgcgccattgtcaccagggccctgtcctggctgccctcacccatgtcaagctactgaggctgtgtcttgtttgttttctctgttacatttttgtttgctgttgtcacagtcagctggtttcggcgtgatgttgatcttttgatgtacatactccgttttaaactcatttccactctagttgagttctgcagcatgcagcggtatgaccctacgggggtcaggagagccctgcggcccccacccaccagctcagaacctgtcactaatacagctgcctgtgaccctgggacccgcaaccttccagctgcttccctttgtcaaagtcacgagtgcgtctgccttgacagccctcgtcaacagaacttccagtgggttgtgggttcatttcctttctttttaagaacagggttgggaccttttctgcccctgccccttagctactgaggcatagggagaggaagttaatttcagagccatacaaaaataagccacaaccagcttcagaattaattcccaatcccccattccaccagggctgggagcccattcccagtgcttcccaaggccctcggggacatctaccgccaacccagctgcttctggcaggggctccaagccccagcgtggggaagggccctggagaagccctcatcctcatgggaaccacactgcagtgggtggggaaggttgttgtcagcaccgcccccggctcctccaggtcctgctggctcctcgggggcagggttccctggacctcccagttctgcgccttggggccagccagtactcagagaggaggaccttctcaaccacgtacagaacacgggttttcatggctgcctttggtttggttttctgagaagataggattggattggattttgcagagggtgagaacttctctgtgcctgctcagaggcgccctagggaagggccatgtttgagttttgctttgtatgttgttttgcaagtatctgcctggtactttgatttaaaataaaaacaattttcatagtt

SEQ ID NO: 137215 - DNA, 2421 bp, Homo sapiens
  Payload ID: 6868
  Gene Symbol: GCK
  Gene Name: glucokinase (hexokinase 4)
  Uniprot ID: P35557
  ENST ID: ENST00000345378
  CDS Start-End: 163-1563
agtgcagaagccctgggctgccagcctcaggcagctctccatccaagcagccgttgctgccacaggcgggccttacgctccaaggctacagcatgtgctaggcctcagcaggcaggagcatctctgcctcccaaagcatctacctcttagcccctcggagagatggcgatggatgtcacaaggagccaggcccagacagccttgactctggtagagcagatcctggcagagttccagctgcaggaggaggacctgaagaaggtgatgagacggatgcagaaggagatggaccgcggcctgaggctggagacccatgaagaggccagtgtgaagatgctgcccacctacgtgcgctccaccccagaaggctcagaagtcggggacttcctctccctggacctgggtggcactaacttcagggtgatgctggtgaaggtgggagaaggtgaggaggggcagtggagcgtgaagaccaaacaccagatgtactccatccccgaggacgccatgaccggcactgctgagatgctcttcgactacatctctgagtgcatctccgacttcctggacaagcatcagatgaaacacaagaagctgcccctgggcttcaccttctcctttcctgtgaggcacgaagacatcgataagggcatccttctcaactggaccaagggcttcaaggcctcaggagcagaagggaacaatgtcgtggggcttctgcgagacgctatcaaacggagaggggactttgaaatggatgtggtggcaatggtgaatgacacggtggccacgatgatctcctgctactacgaagaccatcagtgcgaggtcggcatgatcgtgggcacgggctgcaatgcctgctacatggaggagatgcagaatgtggagctggtggagggggacgagggccgcatgtgcgtcaataccgagtggggcgccttcggggactccggcgagctggacgagttcctgctggagtatgaccgcctggtggacgagagctctgcaaaccccggtcagcagctgtatgagaagctcataggtggcaagtacatgggcgagctggtgcggcttgtgctgctcaggctcgtggacgaaaacctgctcttccacggggaggcctccgagcagctgcgcacacgcggagccttcgagacgcgcttcgtgtcgcaggtggagagcgacacgggcgaccgcaagcagatctacaacatcctgagcacgctggggctgcgaccctcgaccaccgactgcgacatcgtgcgccgcgcctgcgagagcgtgtctacgcgcgctgcgcacatgtgctcggcggggctggcgggcgtcatcaaccgcatgcgcgagagccgcagcgaggacgtaatgcgcatcactgtgggcgtggatggctccgtgtacaagctgcaccccagcttcaaggagcggttccatgccagcgtgcgcaggctgacgcccagctgcgagatcaccttcatcgagtcggaggagggcagtggccggggcgcggccctggtctcggcggtggcctgtaagaaggcctgtatgctgggccagtgagagcagtggccgcaagcgcagggaggatgccacagccccacagcacccaggctccatggggaagtgctccccacacgtgctcgcagcctggcggggcaggaggcctggccttgtcaggacccaggccgcctgccataccgctggggaacagagcgggcctcttccctcagtttttcggtgggacagccccagggccctaacgggggtgcggcaggagcaggaacagagactctggaagccccccacctttctcgctggaatcaatttcccagaagggagttgctcactcaggactttgatgcatttccacactgtcagagctgttggcctcgcctgggcccaggctctgggaaggggtgccctctggatcctgctgtggcctcacttccctgggaactcatcctgtgtggggaggcagctccaacagcttgaccagacctagacctgggccaaaagggcagccaggggctgctcatcacccagtcctggccattttcttgcctgaggctcaagaggcccagggagcaatgggagggggctccatggaggaggtgtcccaagctttgaatacccccagagaccttttctctcccataccatcactgagtggcttgtgattctgggatggaccctcgcagcaggtgcaagagacagagcccccaagcctctgccccaaggggcccacaaaggggagaagggccagccctacatcttcagctcccatagcgctggctcaggaagaaaccccaagcagcattcagcacaccccaagggacaaccccatcatatgacatgccaccctctccatgcccaacctaagattgtgtgggttttttaattaaaaatgttaaaagtttt

SEQ ID NO: 137216 - DNA, 1311 bp, Homo sapiens
  Payload ID: 6868
  Gene Symbol: GCK
  Gene Name: glucokinase (hexokinase 4)
  ENST ID: ENST00000336642
  CDS Start-End: 1-450
ggcggggtccggacggggatgccaagagcagggatgggagcgagcctgcgtccgggcactggtccccatcccgacacgggcgaccgcaagcagatctacaacatcctgagcacgctggggctgcgaccctcgaccaccgactgcgacatcgtgcgccgcgcctgcgagagcgtgtctacgcgcgctgcgcacatgtgctcggcggggctggcgggcgtcatcaaccgcatgcgcgagagccgcagcgaggacgtaatgcgcatcactgtgggcgtggatggctccgtgtacaagctgcaccccagcttcaaggagcggttccatgccagcgtgcgcaggctgacgcccagctgcgagatcaccttcatcgagtcggaggagggcagtggccggggcgcggccctggtctcggcggtggcctgtaagaaggcctgtatgctgggccagtgagagcagtggccgcaagcgcagggaggatgccacagccccacagcacccaggctccatggggaagtgctccccacacgtgctcgcagcctggcggggcaggaggcctggccttgtcaggacccaggccgcctgccataccgctggggaacagagcgggcctcttccctcagtttttcggtgggacagccccagggccctaacgggggtgcggcaggagcaggaacagagactctggaagccccccacctttctcgctggaatcaatttcccagaagggagttgctcactcaggactttgatgcatttccacactgtcagagctgttggcctcgcctgggcccaggctctgggaaggggtgccctctggatcctgctgtggcctcacttccctgggaactcatcctgtgtggggaggcagctccaacagcttgaccagacctagacctgggccaaaagggcagccaggggctgctcatcacccagtcctggccattttcttgcctgaggctcaagaggcccagggagcaatgggagggggctccatggaggaggtgtcccaagctttgaatacccccagagaccttttctctcccataccatcactgagtggcttgtgattctgggatggaccctcgcagcaggtgcaagagacagagcccccaagcctctgccccaaggggcccacaaaggggagaagggccagccctacatcttcagctcccatagcgctggctcaggaagaaaccccaagcagcattcagcacaccccaagggacaaccccatcatatgacatgccaccctctccatgcccaacctaagattgtgtgggttttttaattaaaaatgttaaaagttttaaa

SEQ ID NO: 137217 - DNA, 2539 bp, Homo sapiens
  Payload ID: 6868
  Gene Symbol: GCK
  Gene Name: glucokinase (hexokinase 4)
  Uniprot ID: P35557
  ENST ID: ENST00000395796
  CDS Start-End: 286-1680
aagccctgggctgccagcctcaggcagctctccatccaagcagccgttgctgccacaggcgggccttacgctccaaggctacagcatgtgctaggcctcagcaggcaggagcatctctgcctcccaaagcatctacctcttagcccctcggagagatggcgatggatgtcacaaggagccaggcccagacagccttgactctgccagactctcctctgaactcgggcctcacatggccaactgctacttggaacaaatcgccccttggctggcagatgtgttaacatgcccagaccaagatcccaactcccacaacccaactcccaggtagagcagatcctggcagagttccagctgcaggaggaggacctgaagaaggtgatgagacggatgcagaaggagatggaccgcggcctgaggctggagacccatgaagaggccagtgtgaagatgctgcccacctacgtgcgctccaccccagaaggctcagaagtcggggacttcctctccctggacctgggtggcactaacttcagggtgatgctggtgaaggtgggagaaggtgaggaggggcagtggagcgtgaagaccaaacaccagatgtactccatccccgaggacgccatgaccggcactgctgagatgctcttcgactacatctctgagtgcatctccgacttcctggacaagcatcagatgaaacacaagaagctgcccctgggcttcaccttctcctttcctgtgaggcacgaagacatcgataagggcatccttctcaactggaccaagggcttcaaggcctcaggagcagaagggaacaatgtcgtggggcttctgcgagacgctatcaaacggagaggggactttgaaatggatgtggtggcaatggtgaatgacacggtggccacgatgatctcctgctactacgaagaccatcagtgcgaggtcggcatgatcgtgggcacgggctgcaatgcctgctacatggaggagatgcagaatgtggagctggtggagggggacgagggccgcatgtgcgtcaataccgagtggggcgccttcggggactccggcgagctggacgagttcctgctggagtatgaccgcctggtggacgagagctctgcaaaccccggtcagcagctgtatgagaagctcataggtggcaagtacatgggcgagctggtgcggcttgtgctgctcaggctcgtggacgaaaacctgctcttccacggggaggcctccgagcagctgcgcacacgcggagccttcgagacgcgcttcgtgtcgcaggtggagagcgacacgggcgaccgcaagcagatctacaacatcctgagcacgctggggctgcgaccctcgaccaccgactgcgacatcgtgcgccgcgcctgcgagagcgtgtctacgcgcgctgcgcacatgtgctcggcggggctggcgggcgtcatcaaccgcatgcgcgagagccgcagcgaggacgtaatgcgcatcactgtgggcgtggatggctccgtgtacaagctgcaccccagcttcaaggagcggttccatgccagcgtgcgcaggctgacgcccagctgcgagatcaccttcatcgagtcggaggagggcagtggccggggcgcggccctggtctcggcggtggcctgtaagaaggcctgtatgctgggccagtgagagcagtggccgcaagcgcagggaggatgccacagccccacagcacccaggctccatggggaagtgctccccacacgtgctcgcagcctggcggggcaggaggcctggccttgtcaggacccaggccgcctgccataccgctggggaacagagcgggcctcttccctcagtttttcggtgggacagccccagggccctaacgggggtgcggcaggagcaggaacagagactctggaagccccccacctttctcgctggaatcaatttcccagaagggagttgctcactcaggactttgatgcatttccacactgtcagagctgttggcctcgcctgggcccaggctctgggaaggggtgccctctggatcctgctgtggcctcacttccctgggaactcatcctgtgtggggaggcagctccaacagcttgaccagacctagacctgggccaaaagggcagccaggggctgctcatcacccagtcctggccattttcttgcctgaggctcaagaggcccagggagcaatgggagggggctccatggaggaggtgtcccaagctttgaatacccccagagaccttttctctcccataccatcactgagtggcttgtgattctgggatggaccctcgcagcaggtgcaagagacagagcccccaagcctctgccccaaggggcccacaaaggggagaagggccagccctacatcttcagctcccatagcgctggctcaggaagaaaccccaagcagcattcagcacaccccaagggacaaccccatcatatgacatgccaccctctccatgcccaacctaagattgtgtgggttttttaattaaaaatgttaaaagtttta

SEQ ID NO: 137218 - DNA, 2729 bp, Homo sapiens
  Payload ID: 6868
  Gene Symbol: GCK
  Gene Name: glucokinase (hexokinase 4)
  Uniprot ID: P35557
  ENST ID: ENST00000403799
  CDS Start-End: 471-1868
gagcaggaaatgccgagcggcgcctgagccccagggaagcaggctaggatgtgagagacacagtcacctgcagcctaattactcaaaagctgtccccaggtcacagaagggagaggacatttcccactgaatctgtctgaaggacactaagccccacagctcaacacaaccaggagagaaagcgctgaggacgccacccaagcgcccagcaatggccctgcctggagaacatccaggctcagtgaggaagggtccagaagggaatgcttgccgactcgttggagaacaatgaaaaggaggaaactgtgactgaacctcaaaccccaaaccagcccgaggagaaccacattctcccagggacccagggcgggccgtgacccctgcggcggagaagccttggatatttccacttcagaagcctactggggaaggctgaggggtcccagctccccacgctggctgctgtgcagatgctggacgacagagccaggatggaggccgccaagaaggagaaggtagagcagatcctggcagagttccagctgcaggaggaggacctgaagaaggtgatgagacggatgcagaaggagatggaccgcggcctgaggctggagacccatgaagaggccagtgtgaagatgctgcccacctacgtgcgctccaccccagaaggctcagaagtcggggacttcctctccctggacctgggtggcactaacttcagggtgatgctggtgaaggtgggagaaggtgaggaggggcagtggagcgtgaagaccaaacaccagatgtactccatccccgaggacgccatgaccggcactgctgagatgctcttcgactacatctctgagtgcatctccgacttcctggacaagcatcagatgaaacacaagaagctgcccctgggcttcaccttctcctttcctgtgaggcacgaagacatcgataagggcatccttctcaactggaccaagggcttcaaggcctcaggagcagaagggaacaatgtcgtggggcttctgcgagacgctatcaaacggagaggggactttgaaatggatgtggtggcaatggtgaatgacacggtggccacgatgatctcctgctactacgaagaccatcagtgcgaggtcggcatgatcgtgggcacgggctgcaatgcctgctacatggaggagatgcagaatgtggagctggtggagggggacgagggccgcatgtgcgtcaataccgagtggggcgccttcggggactccggcgagctggacgagttcctgctggagtatgaccgcctggtggacgagagctctgcaaaccccggtcagcagctgtatgagaagctcataggtggcaagtacatgggcgagctggtgcggcttgtgctgctcaggctcgtggacgaaaacctgctcttccacggggaggcctccgagcagctgcgcacacgcggagccttcgagacgcgcttcgtgtcgcaggtggagagcgacacgggcgaccgcaagcagatctacaacatcctgagcacgctggggctgcgaccctcgaccaccgactgcgacatcgtgcgccgcgcctgcgagagcgtgtctacgcgcgctgcgcacatgtgctcggcggggctggcgggcgtcatcaaccgcatgcgcgagagccgcagcgaggacgtaatgcgcatcactgtgggcgtggatggctccgtgtacaagctgcaccccagcttcaaggagcggttccatgccagcgtgcgcaggctgacgcccagctgcgagatcaccttcatcgagtcggaggagggcagtggccggggcgcggccctggtctcggcggtggcctgtaagaaggcctgtatgctgggccagtgagagcagtggccgcaagcgcagggaggatgccacagccccacagcacccaggctccatggggaagtgctccccacacgtgctcgcagcctggcggggcaggaggcctggccttgtcaggacccaggccgcctgccataccgctggggaacagagcgggcctcttccctcagtttttcggtgggacagccccagggccctaacgggggtgcggcaggagcaggaacagagactctggaagccccccacctttctcgctggaatcaatttcccagaagggagttgctcactcaggactttgatgcatttccacactgtcagagctgttggcctcgcctgggcccaggctctgggaaggggtgccctctggatcctgctgtggcctcacttccctgggaactcatcctgtgtggggaggcagctccaacagcttgaccagacctagacctgggccaaaagggcagccaggggctgctcatcacccagtcctggccattttcttgcctgaggctcaagaggcccagggagcaatgggagggggctccatggaggaggtgtcccaagctttgaatacccccagagaccttttctctcccataccatcactgagtggcttgtgattctgggatggaccctcgcagcaggtgcaagagacagagcccccaagcctctgccccaaggggcccacaaaggggagaagggccagccctacatcttcagctcccatagcgctggctcaggaagaaaccccaagcagcattcagcacaccccaagggacaaccccatcatatgacatgccaccctctccatgcccaacctaagattgtgtgggttttttaattaaaaatgttaaaagttttaaa

SEQ ID NO: 137219 - DNA, 1385 bp, Homo sapiens
  Payload ID: 6868
  Gene Symbol: GCK
  Gene Name: glucokinase (hexokinase 4)
  ENST ID: ENST00000437084
  CDS Start-End: 35-1381
ggggtcccagctccccacgctggctgctgtgcagatgctggacgacagagccaggatggaggccgccaagaaggagaaggtagagcagatcctggcagagttccagctgcaggaggaggacctgaagaaggtgatgagacggatgcagaaggagatggaccgcggcctgaggctggagacccatgaagaggccagtgtgaagatgctgcccacctacgtgcgctccaccccagaaggctcagaagtcggggacttcctctccctggacctgggtggcactaacttcagggtgatgctggtgaaggtgggagaaggtgaggaggggcagtggagcgtgaagaccaaacaccagatgtactccatccccgaggacgccatgaccggcactgctgagatgatgaaacacaagaagctgcccctgggcttcaccttctcctttcctgtgaggcacgaagacatcgataagggcatccttctcaactggaccaagggcttcaaggcctcaggagcagaagggaacaatgtcgtggggcttctgcgagacgctatcaaacggagaggggactttgaaatggatgtggtggcaatggtgaatgacacggtggccacgatgatctcctgctactacgaagaccatcagtgcgaggtcggcatgatcgtgggcacgggctgcaatgcctgctacatggaggagatgcagaatgtggagctggtggagggggacgagggccgcatgtgcgtcaataccgagtggggcgccttcggggactccggcgagctggacgagttcctgctggagtatgaccgcctggtggacgagagctctgcaaaccccggtcagcagctgtatgagaagctcataggtggcaagtacatgggcgagctggtgcggcttgtgctgctcaggctcgtggacgaaaacctgctcttccacggggaggcctccgagcagctgcgcacacgcggagccttcgagacgcgcttcgtgtcgcaggtggagagcgacacgggcgaccgcaagcagatctacaacatcctgagcacgctggggctgcgaccctcgaccaccgactgcgacatcgtgcgccgcgcctgcgagagcgtgtctacgcgcgctgcgcacatgtgctcggcggggctggcgggcgtcatcaaccgcatgcgcgagagccgcagcgaggacgtaatgcgcatcactgtgggcgtggatggctccgtgtacaagctgcaccccagcttcaaggagcggttccatgccagcgtgcgcaggctgacgcccagctgcgagatcaccttcatcgagtcggaggagggcagtggccggggcgcggccctggtctcggcggtggcctgtaagaaggcctgtatgctgggccagtgagagc

SEQ ID NO: 137220 - DNA, 2260 bp, Homo sapiens
  Payload ID: 6868
  Gene Symbol: GCK
  Gene Name: glucokinase (hexokinase 4)
  Uniprot ID: P35557
  ENST ID: ENST00000616242
  CDS Start-End: 1-1395
atgcccagaccaagatcccaactcccacaacccaactcccaggtagagcagatcctggcagagttccagctgcaggaggaggacctgaagaaggtgatgagacggatgcagaaggagatggaccgcggcctgaggctggagacccatgaagaggccagtgtgaagatgctgcccacctacgtgcgctccaccccagaaggctcagaagtcggggacttcctctccctggacctgggtggcactaacttcagggtgatgctggtgaaggtgggagaaggtgaggaggggcagtggagcgtgaagaccaaacaccagatgtactccatccccgaggacgccatgaccggcactgctgagatgctcttcgactacatctctgagtgcatctccgacttcctggacaagcatcagatgaaacacaagaagctgcccctgggcttcaccttctcctttcctgtgaggcacgaagacatcgataagggcatccttctcaactggaccaagggcttcaaggcctcaggagcagaagggaacaatgtcgtggggcttctgcgagacgctatcaaacggagaggggactttgaaatggatgtggtggcaatggtgaatgacacggtggccacgatgatctcctgctactacgaagaccatcagtgcgaggtcggcatgatcgtgggcacgggctgcaatgcctgctacatggaggagatgcagaatgtggagctggtggagggggacgagggccgcatgtgcgtcaataccgagtggggcgccttcggggactccggcgagctggacgagttcctgctggagtatgaccgcctggtggacgagagctctgcaaaccccggtcagcagctgtatgagaagctcataggtggcaagtacatgggcgagctggtgcggcttgtgctgctcaggctcgtggacgaaaacctgctcttccacggggaggcctccgagcagctgcgcacacgcggagccttcgagacgcgcttcgtgtcgcaggtggagagcgacacgggcgaccgcaagcagatctacaacatcctgagcacgctggggctgcgaccctcgaccaccgactgcgacatcgtgcgccgcgcctgcgagagcgtgtctacgcgcgctgcgcacatgtgctcggcggggctggcgggcgtcatcaaccgcatgcgcgagagccgcagcgaggacgtaatgcgcatcactgtgggcgtggatggctccgtgtacaagctgcaccccagcttcaaggagcggttccatgccagcgtgcgcaggctgacgcccagctgcgagatcaccttcatcgagtcggaggagggcagtggccggggcgcggccctggtctcggcggtggcctgtaagaaggcctgtatgctgggccagtgagagcagtggccgcaagcgcagggaggatgccacagccccacagcacccaggctccatggggaagtgctccccacacgtgctcgcagcctggcggggcaggaggcctggccttgtcaggacccaggccgcctgccataccgctggggaacagagcgggcctcttccctcagtttttcggtgggacagccccagggccctaacgggggtgcggcaggagcaggaacagagactctggaagccccccacctttctcgctggaatcaatttcccagaagggagttgctcactcaggactttgatgcatttccacactgtcagagctgttggcctcgcctgggcccaggctctgggaaggggtgccctctggatcctgctgtggcctcacttccctgggaactcatcctgtgtggggaggcagctccaacagcttgaccagacctagacctgggccaaaagggcagccaggggctgctcatcacccagtcctggccattttcttgcctgaggctcaagaggcccagggagcaatgggagggggctccatggaggaggtgtcccaagctttgaatacccccagagaccttttctctcccataccatcactgagtggcttgtgattctgggatggaccctcgcagcaggtgcaagagacagagcccccaagcctctgccccaaggggcccacaaaggggagaagggccagccctacatcttcagctcccatagcgctggctcaggaagaaaccccaagcagcattcagcacaccccaagggacaaccccatcatatgacatgccaccctctccatgcccaacctaagattgtgtgggttttttaattaaaaatgttaaaagttttaaacatg

SEQ ID NO: 137221 - DNA, 2186 bp, Homo sapiens
  Payload ID: 6869
  Gene Symbol: GCKR
  Gene Name: glucokinase (hexokinase 4) regulator
  ENST ID: ENST00000264717
  CDS Start-End: 64-1941
gtgaccagaggggtttgtgtggctgaagaggcaggaggaacagtgtatccacagcgtgggaccatgccaggcacaaaacggtttcaacatgtcattgagaccccggagcctggcaagtgggagttgtctgggtacgaggcagctgtgccaatcacggagaagtcaaacccactgacccaggatctagacaaagcagatgctgagaacattgttcgactgctagggcaatgtgatgctgagatcttccaggaggaggggcaagccctgtccacataccagagactctacagcgaatccattctgaccaccatggtacaggtggctgggaaagttcaggaagtgctgaaggagccagatggggggctggttgtgctgagtggagggggcacctctggccggatggcattcctcatgtcggtgtcctttaatcagctgatgaaaggtctgggacagaaacctctttacacctacctcattgcaggtggtgacaggtctgtggtggcctctagggaggggacagaagatagtgccttgcacgggattgaggaactgaagaaggtggctgccgggaagaagagagtgattgtcattggcatttctgtgggactctctgctccctttgtggcaggccagatggactgctgcatgaacaacacagctgtcttcttgccagtcctggttggcttcaatccagtgagcatggccagaaatgaccccattgaagactggagttcaacattccgacaagtagcagagcggatgcagaaaatgcaggagaaacagaaagcttttgtgctcaatcctgccatcgggcccgagggtctcagcggctcctcccggatgaaaggtggaagtgccaccaagattctgctggaaaccctgttattagcagcccataagactgtggaccagggcattgcagcatctcaaagatgcctcctggaaatcttgcggacatttgagcgagctcatcaggtgacctacagccaaagccccaagattgccaccctgatgaagagtgtcagcaccagtctggagaagaaaggccacgtgtacctggttggctggcagaccctgggcatcattgccatcatggatggagtagagtgcatccacacctttggtgctgatttccgagatgtccgtggctttctcattggtgatcacagtgacatgtttaaccagaaggctgagctcaccaaccagggtccccagttcaccttctcccaggaggacttcctgacttccatccttccctctctcacggaaatcgatactgtggtcttcattttcaccctggatgacaacctcacggaggtgcagactatagtggagcaggtgaaagagaagaccaaccacatccaggccctggcacacagcaccgtgggtcagaccttgctgatccctctgaagaagctctttccctccatcatcagcatcacatggccactgcttttctttgaatatgaagggaacttcatccagaagttccagcgtgagctaagcaccaaatgggtgctgaatacagtgagtacaggtgctcatgtgcttcttggtaagatcctacaaaaccacatgttggaccttcggattagcaactccaagctcttctggcgggcgctggccatgctgcagcggttctctggacagtccaaggctcgatgcatcgagagcctcctccgagcgatccactttccccagccactgtcagatgatattcgggctgctcccatctcctgccatgtccaggttgcacatgagaaggaacaggtgatacccatcgccttgctgagcctcctattccggtgctcgatcactgaggctcaggcacacctggctgcagctccttctgtctgtgaggctgtcaggagtgctcttgctgggccaggtcagaagcgcactgcggaccccctcgagatcctagagcctgacgttcagtgaacccatgtttctgggtgggtgaaaggggcccaaccctgcccacttcagcccagcccgcccaaggggacttgtgccagcagaacatgtgggaggaagaagccccgtttccagggcatccgcagcccagggtagggagaaatattctctccactttgggggagagttcttgctctcgacctagtggtttctactctcaccgacttattctgatttcagaaataaaatgaaatgtcttattttggaaa

SEQ ID NO: 137222 - DNA, 568 bp, Homo sapiens
  Payload ID: 6869
  Gene Symbol: GCKR
  Gene Name: glucokinase (hexokinase 4) regulator
  Uniprot ID: Q14397
  ENST ID: ENST00000417872
  CDS Start-End: 58-510
agaggggtttgtgtggctgaagaggcaggaggaacagtgtatccacagcgtgggaccatgccaggcacaaaacggtttcaacatgtcattgagaccccggagcctggcaagtgggagttgtctgggtacgaggcagctgtgccaatcacggagaagtcaaacccactgacccaggatctagacaaagcagatgctgagaacattgttcgactgctagggcaatgtgatgctgagatcttccaggaggaggggcaagccctgtccacataccagagactctacagcgaatccattctgaccaccatggtacaggtggctgggaaagttcaggaagtgctgaaggagccagatggggggctggttgtgctgagtggagggggcacctctggccggatggcattcctcatgtcggtgtcctttaatcagctgatgaaaggtctgggacagaaacctctttacacctacctcattgcaggtggtgacaggtggctgccgggaagaagagagtgattgtcattggcatttctgtgggactctctgctccctttgtggcaggccagatggactg

SEQ ID NO: 137223 - DNA, 701 bp, Homo sapiens
  Payload ID: 6869
  Gene Symbol: GCKR
  Gene Name: glucokinase (hexokinase 4) regulator
  ENST ID: ENST00000453813
  CDS Start-End: 1-684
ccaatcacggagaagtcaaacccactgacccaggatctagacaaagcagatgctgagaacattgttcgactgctagggcaatgtgatgctgagatcttccaggaggaggggcaagccctgtccacataccagagactctacagcgaatccattctgaccaccatggtacaggtggctgggaaagttcaggaagtgctgaaggagccagatggggggctggttgtgctgagtggagggggcacctctggccggatggcattcctcatgtcggtgtcctttaatcagctgatgaaaggtctgggacagaaacctctttacacctacctcattgcaggtggtgacaggtctgtggtggcctctagggaggggacagaagatagtgccttgcacgggattgaggaactgaagaaggtggctgccgggaagaagagagtgattgtcattggcatttctgtgggactctctgctccctttgtggcaggccagatggactgctgcatgaacaacacagctgtcttcttgccagtcctggttggcttcaatccagtgagcatggccaggcacccctttcctcccccgaggatcctcagatctctcactgtcttcccttccctgagagcccctcattaccaaatcacctccctcttattctctatgtcagtggtcactcttatttcagaataaatcaacatattaaacca

SEQ ID NO: 137224 - DNA, 789 bp, Homo sapiens
  Payload ID: 6869
  Gene Symbol: GCKR
  Gene Name: glucokinase (hexokinase 4) regulator
  ENST ID: ENST00000411584
  CDS Start-End: 1-569
agcgagctcatcaggtgacctacagccaaagccccaagattgccaccctgatgaagagtgtcagcaccagtctggagaagaaaggccacgtgtacctggttggctggcagaccctgggcatcattgccatcatggatggagtagagtgcatccacacctttggtgctgatttccgagatgtccgtggctttctcattggtgatcacagtgacatgtttaaccagaaggctgagctcaccaaccagggtccccagttcaccttctcccaggaggacttcctgacttccatccttccctctctcacggaaatcgatactgtggtcttcattttcaccctggatgacaacctcacggaggtgcagactatagtggagcaggtgaaagagaagaccaaccacatccaggccctggcacacagcaccgtgggtcagaccttgctgatccctctgaagaagctctttccctccatcatcagcatcacatggccactgcttttctttgaatatgaagggaacttcatccagagatcgggtttctccacattgcccaggctgtttgccaactcctagactcaagtgatccacccgccttagcctcccaaagtgctgagattgcaggcgtgagccactacgcctagccaaaacactgtatttttaaagaaaaatgttcattttaacagccatacattttttatagatacattttttatagtaaagacgttacaaattacagaaatgcaaaaaagaaaaaatcactccaaatctaccatcttcaaaaaaaaaaaaaaaa

SEQ ID NO: 137225 - DNA, 5122 bp, Homo sapiens
  Payload ID: 6870
  Gene Symbol: GNS
  Gene Name: glucosamine (N-acetyl)-6-sulfatase
  Uniprot ID: P15586
  ENST ID: ENST00000258145
  CDS Start-End: 172-1830
cccctgtccctggctcacgtgatcgcgcctagggagaaaacgtctgactccagccaccggccttcaaggcacggctttttattccttcggctggtcggcctctcgcccttcagctacctgtgcgtccctccgtcccgtcccgtcccggggtcaccccggagcctgtccgctatgcggctcctgcctctagccccaggtcggctccggcggggcagcccccgccacctgccctcctgcagcccagcgctgctactgctggtgctgggcggctgcctgggggtcttcggggtggctgcgggaacccggaggcccaacgtggtgctgctcctcacggacgaccaggacgaagtgctcggcggcatgacaccgctaaagaaaaccaaagctctcatcggagagatggggatgactttttccagtgcttatgtgccaagtgctctctgctgccccagcagagccagtatcctgacaggaaagtacccacataatcatcacgttgtgaacaacactctggaggggaactgcagtagtaagtcctggcagaagatccaagaaccaaatactttcccagcaattctcagatcaatgtgtggttatcagaccttttttgcagggaaatatttaaatgagtacggagccccagatgcaggtggactagaacacgttcctctgggttggagttactggtatgccttggaaaagaattctaagtattataattacaccctgtctatcaatgggaaggcacggaagcatggtgaaaactatagtgtggactacctgacagatgttttggctaatgtctccttggactttctggactacaagtccaactttgagcccttcttcatgatgatcgccactccagcgcctcattcgccttggacagctgcacctcagtaccagaaggctttccagaatgtctttgcaccaagaaacaagaacttcaacatccatggaacgaacaagcactggttaattaggcaagccaagactccaatgactaattcttcaatacagtttttagataatgcatttaggaaaaggtggcaaactctcctctcagttgatgaccttgtggagaaactggtcaagaggctggagttcactggggagctcaacaacacttacatcttctatacctcagacaatggctatcacacaggacagttttccttgccaatagacaagagacagctgtatgagtttgatatcaaagttccactgttggttcgaggacctgggatcaaaccaaatcagacaagcaagatgctggttgccaacattgacttgggtcctactattttggacattgctggctacgacctaaataagacacagatggatgggatgtccttattgcccattttgagaggtgccagtaacttgacctggcgatcagatgtcctggtggaataccaaggagaaggccgtaacgtcactgacccaacatgcccttccctgagtcctggcgtatctcaatgcttcccagactgtgtatgtgaagatgcttataacaatacctatgcctgtgtgaggacaatgtcagcattgtggaatttgcagtattgcgagtttgatgaccaggaggtgtttgtagaagtctataatctgactgcagacccagaccagatcactaacattgctaaaaccatagacccagagcttttaggaaagatgaactatcggttaatgatgttacagtcctgttctgggccaacctgtcgcactccaggggtttttgaccccggatacaggtttgacccccgtctcatgttcagcaatcgcggcagtgtcaggactcgaagattttccaaacatcttctgtagcgacctcacacagcctctgcagatggatccctgcacgcctctttctgatgaagtgattgtagtaggtgtctgtagctagtcttcaagaccacacctggaagagtttctgggctggctttaagtcctgtttgaaaaagcaacccagtcagctgacttcctcgtgcaatgtgttaaactgtgaactctgcccatgtgtcaggagtggctgtctctggtctcttcctttagctgacaaggacactcctgaggtctttgttctcactgtattctttttatcctggggccacagttcttgattattcctcttgtggttaaagactgaatttgtaaacccattcagataaatggcagtactttaggacacacacaaacacacagacacaccttttgatatgtaagcttgacctaaagtcaaaggacctgtgtagcatttcagattgagcacttcactatcaaaaatactaacatcacatggcttgaagagtaaccatcagagctgaatcatccaagtaagaacaagtaccattgttgattgataagtagagatacattttttatgatgttcatcacagtgtggtaaggttgcaaattcaaaacatgtcacccaagctctgttcatgtttttgtgaattctaggctggtgctgcactgaaatagagcagtaagcttgtgataaaggccaattccaggtagctcttgaaggtgatagccatctactttccagtggctgccaaccacagggagtgccagttaacactggaaggattaaggcaaggtcccttctcttgagactcccctctgagatctgaaaaatgaagtggcttaggaacatcagcagtgaagaactgccaagagttggtgaaggttgtctcttccgagggccttctgaagacagggctcttgaacagacaagtggaagggctgtaccagggataaaggaaagaagtgcctgtccagcagggagcttgaatttaagttccatgtatgaagtcattggctctatctgcatttttctgtcattctcttcatttgttttaaggtggaaaattttcttacagttgatgcaaagtatcaactactttaccctaccttctccccttttagatgggttcttcctgagttttggagtcttgtatgattatcagtattcccctgtcaaaatcaaatctattcaggtttcttcactgttgagaacacctaaatgtttttatttttgagaagtggggacagagtctcactatgtcacccaggctggagtgcaatggcatgatctcagctcactgcaaccttcgcctcctgggttcaagcgattctcctgcctccgcctcctgagtagctgggattataggcacgcaccaccacgcccagctaattttttgtatttttagtagagacagagtttcaccatgttggccaggctggtcttgaactcctgaccttgtgatccacccacctcggcctcccagagtgctgggattacaggcatgagccaccacgcttggctaagaacacctaaatttttatgtttcttggctcaaaaaccagttccatttctaatgttgtcctcacaagaaggctaattggtggtgagacagcaggggaggaggaagagctgtggtttgtaacttgttcaactcaggcaataagcgattttagctttatttaaagtcttctgtccagctttaagcactttgtaagacatggctgaaagtagcttttctatcagaattgcagatagtcatgttgggctaacagtcaattggatatattcctttacctcacatgaccccagcaactgtggtggtatctagaggtgaaacaggcaagtgaaatggacacctctgctgtgaatgttttagagaaggaaattcaaaaaatgttgtaactgaaagcactgttgaatatgggtatcggctttctttttcactttgactcttaacattatcagtcaacttccacattaatgaaagttgaccatagttatttccaaataaaaagaaaccaactcttaccaggtcttggactgtgatgtcatattattcagttttatgcttgttcctgagcagaactcataagagtgacatagtcagctgctgacggcacctcagccacgccactcttactcagttcagtgggtgtgcttgcgtggtaggatgtggtgcagccctctctacgctcttctatttttggtatatttcctatctaaccttcaaatagcttccaattctttttttcttggactggcttcattctgaatttgtgctaaaataatctttcataaagagacctcagtttatagcgtaacagactacacaatgcactgatgttttcataatgtttaagggacccactgcaagaagcttgctgcctccttttaattgtattcatttagattttgattttccatgttaagaaggtgaggtccatgttggtgcccttcagagtagagaaccatgtaaacattaggaatgaacagaggccttaggaatgaatagagagtttgccttatacaatttcctgttacaaagctctccctctcatgcaaagtagggaacaccttttgagcatctttgaatttgacaaatggtgctgttgcaaacactttttttttgagatgaagtctcgcggttgtcacccgggctggagtgcagtggcgtgatctcggctcactgcaacttccacctcctgggttccagcagttctcctgcctcagcctcccaagtagctgagattacaggcgcctgccaccccacctggctgatttttgtaattttagtagagacggggtttcaccatgttggccaggctgattaactcctgacctcaggtgatccacctttctcggcctcccaaagtgctgggattacgggtgtgagccaccgtgcccggcctgcaaacacattttaattgacaacactagggctgttgtacaaaatagtaatgatagccatggaagttttaccttattctgtgagaagtgttcttaaacttattaagtgtctaaactaaggtttagtgcttttttaaaggaaagttgtcccaggattcatcctaaagaaagcaaaagttaattcaactgatccaccaatggaattagatgggtagagttgggttcttgagttttaccaccacttagttcccactgaattttgtaacttcctgtgtttgcatcctctgttcctattctgcccttgctctgtgtcatctcagtcatttgacttagaaagtgcccttcaaaaggaccctgttcactgctgcacttttcaatgaattaaaatttatttctgttcta

SEQ ID NO: 137226 - DNA, 4877 bp, Homo sapiens
  Payload ID: 6870
  Gene Symbol: GNS
  Gene Name: glucosamine (N-acetyl)-6-sulfatase
  ENST ID: ENST00000418919
  CDS Start-End: 91-1581
gctgaccatttgggaataaaagattgagtaagatgtaacaaaacaggaattctgggctgtgtgtctcaatttattggaagaaattgtttaatggataattacttacttttacagacaccgctaaagaaaaccaaagctctcatcggagagatggggatgactttttccagtgcttatgtgccaagtgctctctgctgccccagcagagccagtatcctgacaggaaagtacccacataatcatcacgttgtgaacaacactctggaggggaactgcagtagtaagtcctggcagaagatccaagaaccaaatactttcccagcaattctcagatcaatgtgtggttatcagaccttttttgcagggaaatatttaaatgagtacggagccccagatgcaggtggactagaacacgttcctctgggttggagttactggtatgccttggaaaagaattctaagtattataattacaccctgtctatcaatgggaaggcacggaagcatggtgaaaactatagtgtggactacctgacagatgttttggctaatgtctccttggactttctggactacaagtccaactttgagcccttcttcatgatgatcgccactccagcgcctcattcgccttggacagctgcacctcagtaccagaaggctttccagaatgtctttgcaccaagaaacaagaacttcaacatccatggaacgaacaagcactggttaattaggcaagccaagactccaatgactaattcttcaatacagtttttagataatgcatttaggaaaaggtggcaaactctcctctcagttgatgaccttgtggagaaactggtcaagaggctggagttcactggggagctcaacaacacttacatcttctatacctcagacaatggctatcacacaggacagttttccttgccaatagacaagagacagctgtatgagtttgatatcaaagttccactgttggttcgaggacctgggatcaaaccaaatcagacaagcaagatgctggttgccaacattgacttgggtcctactattttggacattgctggctacgacctaaataagacacagatggatgggatgtccttattgcccattttgagaggtgccagtaacttgacctggcgatcagatgtcctggtggaataccaaggagaaggccgtaacgtcactgacccaacatgcccttccctgagtcctggcgtatctcaatgcttcccagactgtgtatgtgaagatgcttataacaatacctatgcctgtgtgaggacaatgtcagcattgtggaatttgcagtattgcgagtttgatgaccaggaggtgtttgtagaagtctataatctgactgcagacccagaccagatcactaacattgctaaaaccatagacccagagcttttaggaaagatgaactatcggttaatgatgttacagtcctgttctgggccaacctgtcgcactccaggggtttttgaccccggatacaggtttgacccccgtctcatgttcagcaatcgcggcagtgtcaggactcgaagattttccaaacatcttctgtagcgacctcacacagcctctgcagatggatccctgcacgcctctttctgatgaagtgattgtagtaggtgtctgtagctagtcttcaagaccacacctggaagagtttctgggctggctttaagtcctgtttgaaaaagcaacccagtcagctgacttcctcgtgcaatgtgttaaactgtgaactctgcccatgtgtcaggagtggctgtctctggtctcttcctttagctgacaaggacactcctgaggtctttgttctcactgtattctttttatcctggggccacagttcttgattattcctcttgtggttaaagactgaatttgtaaacccattcagataaatggcagtactttaggacacacacaaacacacagacacaccttttgatatgtaagcttgacctaaagtcaaaggacctgtgtagcatttcagattgagcacttcactatcaaaaatactaacatcacatggcttgaagagtaaccatcagagctgaatcatccaagtaagaacaagtaccattgttgattgataagtagagatacattttttatgatgttcatcacagtgtggtaaggttgcaaattcaaaacatgtcacccaagctctgttcatgtttttgtgaattctaggctggtgctgcactgaaatagagcagtaagcttgtgataaaggccaattccaggtagctcttgaaggtgatagccatctactttccagtggctgccaaccacagggagtgccagttaacactggaaggattaaggcaaggtcccttctcttgagactcccctctgagatctgaaaaatgaagtggcttaggaacatcagcagtgaagaactgccaagagttggtgaaggttgtctcttccgagggccttctgaagacagggctcttgaacagacaagtggaagggctgtaccagggataaaggaaagaagtgcctgtccagcagggagcttgaatttaagttccatgtatgaagtcattggctctatctgcatttttctgtcattctcttcatttgttttaaggtggaaaattttcttacagttgatgcaaagtatcaactactttaccctaccttctccccttttagatgggttcttcctgagttttggagtcttgtatgattatcagtattcccctgtcaaaatcaaatctattcaggtttcttcactgttgagaacacctaaatgtttttatttttgagaagtggggacagagtctcactatgtcacccaggctggagtgcaatggcatgatctcagctcactgcaaccttcgcctcctgggttcaagcgattctcctgcctccgcctcctgagtagctgggattataggcacgcaccaccacgcccagctaattttttgtatttttagtagagacagagtttcaccatgttggccaggctggtcttgaactcctgaccttgtgatccacccacctcggcctcccagagtgctgggattacaggcatgagccaccacgcttggctaagaacacctaaatttttatgtttcttggctcaaaaaccagttccatttctaatgttgtcctcacaagaaggctaattggtggtgagacagcaggggaggaggaagagctgtggtttgtaacttgttcaactcaggcaataagcgattttagctttatttaaagtcttctgtccagctttaagcactttgtaagacatggctgaaagtagcttttctatcagaattgcagatagtcatgttgggctaacagtcaattggatatattcctttacctcacatgaccccagcaactgtggtggtatctagaggtgaaacaggcaagtgaaatggacacctctgctgtgaatgttttagagaaggaaattcaaaaaatgttgtaactgaaagcactgttgaatatgggtatcggctttctttttcactttgactcttaacattatcagtcaacttccacattaatgaaagttgaccatagttatttccaaataaaaagaaaccaactcttaccaggtcttggactgtgatgtcatattattcagttttatgcttgttcctgagcagaactcataagagtgacatagtcagctgctgacggcacctcagccacgccactcttactcagttcagtgggtgtgcttgcgtggtaggatgtggtgcagccctctctacgctcttctatttttggtatatttcctatctaaccttcaaatagcttccaattctttttttcttggactggcttcattctgaatttgtgctaaaataatctttcataaagagacctcagtttatagcgtaacagactacacaatgcactgatgttttcataatgtttaagggacccactgcaagaagcttgctgcctccttttaattgtattcatttagattttgattttccatgttaagaaggtgaggtccatgttggtgcccttcagagtagagaaccatgtaaacattaggaatgaacagaggccttaggaatgaatagagagtttgccttatacaatttcctgttacaaagctctccctctcatgcaaagtagggaacaccttttgagcatctttgaatttgacaaatggtgctgttgcaaacactttttttttgagatgaagtctcgcggttgtcacccgggctggagtgcagtggcgtgatctcggctcactgcaacttccacctcctgggttccagcagttctcctgcctcagcctcccaagtagctgagattacaggcgcctgccaccccacctggctgatttttgtaattttagtagagacggggtttcaccatgttggccaggctgattaactcctgacctcaggtgatccacctttctcggcctcccaaagtgctgggattacgggtgtgagccaccgtgcccggcctgcaaacacattttaattgacaacactagggctgttgtacaaaatagtaatgatagccatggaagttttaccttattctgtgagaagtgttcttaaacttattaagtgtctaaactaaggtttagtgcttttttaaaggaaagttgtcccaggattcatcctaaagaaagcaaaagttaattcaactgatccaccaatggaattagatgggtagagttgggttcttgagttttaccaccacttagttcccactgaattttgtaacttcctgtgtttgcatcctctgttcctattctgcccttgctctgtgtcatctcagtcatttgacttagaaagtgcccttcaaaaggaccctgttcactgctgcacttttcaatgaattaaaatttatttctgttctagtgg

SEQ ID NO: 137227 - DNA, 907 bp, Homo sapiens
  Payload ID: 6870
  Gene Symbol: GNS
  Gene Name: glucosamine (N-acetyl)-6-sulfatase
  ENST ID: ENST00000540196
  CDS Start-End: 1-907
ttataattacaccctgtctatcaatgggaaggcacggaagcatggtgaaaactatagtgtggactacctgacagatgttttggctaatgtctccttggactttctggactacaagtccaactttgagcccttcttcatgatgatcgccactccagcgcctcattcgccttggacagctgcacctcagtaccagaaggctttccagaatgtctttgcaccaagaaacaagaacttcaacatccatggaacgaacaagcactggttaattaggcaagccaagactccaatgactaattcttcaatacagtttttagataatgcatttaggaaaaggtggcaaactctcctctcagttgatgaccttgtggagaaactggtcaagaggctggagttcactggggagctcaacaacacttacatcttctatacctcagacaatggctatcacacaggacagttttccttgccaatagacaagagacagctgtatgagtttgatatcaaagttccactgttggttcgaggacctgggatcaaaccaaatcagacaagcaagagaggtgccagtaacttgacctggcgatcagatgtcctggtggaataccaaggagaaggccgtaacgtcactgacccaacatgcccttccctgagtcctggcgtatctcaatgcttcccagactgtgtatgtgaagatgcttataacaatacctatgcctgtgtgaggacaatgtcagcattgtggaatttgcagtattgcgagtttgatgaccaggaggtgtttgtagaagtctataatctgactgcagacccagaccagatcactaacattgctaaaaccatagacccagagcttttaggaaagatgaactatcggttaatgatgttacagtcctgttctgggccaacc

SEQ ID NO: 137228 - DNA, 2164 bp, Homo sapiens
  Payload ID: 6870
  Gene Symbol: GNS
  Gene Name: glucosamine (N-acetyl)-6-sulfatase
  ENST ID: ENST00000543646
  CDS Start-End: 131-1885
gtctgactccagccaccggccttcaaggcacggctttttattccttcggctggtcggcctctcgcccttcagctacctgtgcgtccctccgtcccgtcccgtcccggggtcaccccggagcctgtccgctatgcggctcctgcctctagccccaggtcggctccggcggggcagcccccgccacctgccctcctgcagcccagcgctgctactgctggtgctgggcggctgcctgggggtcttcggggtggctgcgggaacccggaggcccaacgtggtgctgctcctcacggacgaccaggacgaagtgctcggcggcatggctttttcagaatattctaccactaattgtcaaacaggactccaaggggaagagctaggacaagagcatttgagaacttacttggagccgagcagaacaccgctaaagaaaaccaaagctctcatcggagagatggggatgactttttccagtgcttatgtgccaagtgctctctgctgccccagcagagccagtatcctgacaggaaagtacccacataatcatcacgttgtgaacaacactctggaggggaactgcagtagtaagtcctggcagaagatccaagaaccaaatactttcccagcaattctcagatcaatgtgtggttatcagaccttttttgcagggaaatatttaaatgagtacggagccccagatgcaggtggactagaacacgttcctctgggttggagttactggtatgccttggaaaagaattctaagtattataattacaccctgtctatcaatgggaaggcacggaagcatggtgaaaactatagtgtggactacctgacagatgttttggctaatgtctccttggactttctggactacaagtccaactttgagcccttcttcatgatgatcgccactccagcgcctcattcgccttggacagctgcacctcagtaccagaaggctttccagaatgtctttgcaccaagaaacaagaacttcaacatccatggaacgaacaagcactggttaattaggcaagccaagactccaatgactaattcttcaatacagtttttagataatgcatttaggaaaaggtggcaaactctcctctcagttgatgaccttgtggagaaactggtcaagaggctggagttcactggggagctcaacaacacttacatcttctatacctcagacaatggctatcacacaggacagttttccttgccaatagacaagagacagctgtatgagtttgatatcaaagttccactgttggttcgaggacctgggatcaaaccaaatcagacaagcaagatgctggttgccaacattgacttgggtcctactattttggacattgctggctacgacctaaataagacacagatggatgggatgtccttattgcccattttgagaggtgccagtaacttgacctggcgatcagatgtcctggtggaataccaaggagaaggccgtaacgtcactgacccaacatgcccttccctgagtcctggcgtatctcaatgcttcccagactgtgtatgtgaagatgcttataacaatacctatgcctgtgtgaggacaatgtcagcattgtggaatttgcagtattgcgagtttgatgaccaggaggtgtttgtagaagtctataatctgactgcagacccagaccagatcactaacattgctaaaaccatagacccagagcttttaggaaagatgaactatcggttaatgatgttacagtcctgttctgggccaacctgtcgcactccaggggtttttgaccccggatacaggtttgacccccgtctcatgttcagcaatcgcggcagtgtcaggactcgaagattttccaaacatcttctgtagcgacctcacacagcctctgcagatggatccctgcacgcctctttctgatgaagtgattgtagtaggtgtctgtagctagtcttcaagaccacacctggaagagtttctgggctggctttaagtcctgtttgaaaaagcaacccagtcagctgacttcctcgtgcaatgtgttaaactgtgaactctgcccatgtgtcaggagtggctgtctctggtctcttcctttagctgacaaggacactcctgaggtctttgttctcactgtattctttttatcct

SEQ ID NO: 137229 - DNA, 2020 bp, Homo sapiens
  Payload ID: 6870
  Gene Symbol: GNS
  Gene Name: glucosamine (N-acetyl)-6-sulfatase
  Uniprot ID: P15586
  ENST ID: ENST00000542058
  CDS Start-End: 156-1754
acgtgatcgcgcctagggagaaaacgtctgactccagccaccggccttcaaggcacggctttttattccttcggctggtcggcctctcgcccttcagctacctgtgcgtccctccgtcccgtcccgtcccggggtcaccccggagcctgtccgctatgcggctcctgcctctagccccaggtcggctccggcggggcagcccccgccacctgccctcctgcagcccagcgctgctactgctggtgctgggcggctgcctgggggtcttcggggtggctgcgggaacccggaggcccaacgtggtgctgctcctcacggacgaccaggacgaagtgctcggcggcatgtatgtgccaagtgctctctgctgccccagcagagccagtatcctgacaggaaagtacccacataatcatcacgttgtgaacaacactctggaggggaactgcagtagtaagtcctggcagaagatccaagaaccaaatactttcccagcaattctcagatcaatgtgtggttatcagaccttttttgcagggaaatatttaaatgagtacggagccccagatgcaggtggactagaacacgttcctctgggttggagttactggtatgccttggaaaagaattctaagtattataattacaccctgtctatcaatgggaaggcacggaagcatggtgaaaactatagtgtggactacctgacagatgttttggctaatgtctccttggactttctggactacaagtccaactttgagcccttcttcatgatgatcgccactccagcgcctcattcgccttggacagctgcacctcagtaccagaaggctttccagaatgtctttgcaccaagaaacaagaacttcaacatccatggaacgaacaagcactggttaattaggcaagccaagactccaatgactaattcttcaatacagtttttagataatgcatttaggaaaaggtggcaaactctcctctcagttgatgaccttgtggagaaactggtcaagaggctggagttcactggggagctcaacaacacttacatcttctatacctcagacaatggctatcacacaggacagttttccttgccaatagacaagagacagctgtatgagtttgatatcaaagttccactgttggttcgaggacctgggatcaaaccaaatcagacaagcaagatgctggttgccaacattgacttgggtcctactattttggacattgctggctacgacctaaataagacacagatggatgggatgtccttattgcccattttgagaggtgccagtaacttgacctggcgatcagatgtcctggtggaataccaaggagaaggccgtaacgtcactgacccaacatgcccttccctgagtcctggcgtatctcaatgcttcccagactgtgtatgtgaagatgcttataacaatacctatgcctgtgtgaggacaatgtcagcattgtggaatttgcagtattgcgagtttgatgaccaggaggtgtttgtagaagtctataatctgactgcagacccagaccagatcactaacattgctaaaaccatagacccagagcttttaggaaagatgaactatcggttaatgatgttacagtcctgttctgggccaacctgtcgcactccaggggtttttgaccccggatacaggtttgacccccgtctcatgttcagcaatcgcggcagtgtcaggactcgaagattttccaaacatcttctgtagcgacctcacacagcctctgcagatggatccctgcacgcctctttctgatgaagtgattgtagtaggtgtctgtagctagtcttcaagaccacacctggaagagtttctgggctggctttaagtcctgtttgaaaaagcaacccagtcagctgacttcctcgtgcaatgtgttaaactgtgaactctgcccatgtgtcaggagtggctgtctctggtctcttcctttagctgacaaggacactcctgaggtctttgttctcactgta

SEQ ID NO: 137230 - DNA, 906 bp, Homo sapiens
  Payload ID: 6870
  Gene Symbol: GNS
  Gene Name: glucosamine (N-acetyl)-6-sulfatase
  ENST ID: ENST00000545273
  CDS Start-End: 164-906
gcaagcattttgacttcctgcacttttatacaggatggagctggccggaaccaaacttgtctctagaatcatacaagactctctttggctgttgcttagagctgaccatttgggaataaaagattgaacaccgctaaagaaaaccaaagctctcatcggagagatggggatgactttttccagtgcttatgtgccaagtgctctctgctgccccagcagagccagtatcctgacaggaaagtacccacataatcatcacgttgtgaacaacactctggaggggaactgcagtagtaagtcctggcagaagatccaagaaccaaatactttcccagcaattctcagatcaatgtgtggttatcagaccttttttgcagggaaatatttaaatgagtacggagccccagatgcaggtggactagaacacgttcctctgggttggagttactggtatgccttggaaaagaattctaagtattataattacaccctgtctatcaatgggaaggcacggaagcatggtgaaaactatagtgtggactacctgacagatgttttggctaatgtctccttggactttctggactacaagtccaactttgagcccttcttcatgatgatcgccactccagcgcctcattcgccttggacagctgcacctcagtaccagaaggctttccagaatgtctttgcaccaagaaacaagaacttcaacatccatggaacgaacaagcactggttaattaggcaagccaagactccaatgactaattcttcaatacagtttttagataatgcatttaggaaaaggtggcaaactctcctctcagttgatgaccttgtggagaaactggtcaagaggctggagttcactggggagctcaacaacacttacatcttctatac

SEQ ID NO: 137231 - DNA, 2565 bp, Homo sapiens
  Payload ID: 6871
  Gene Symbol: GNE
  Gene Name: glucosamine (UDP-N-acetyl)-2-epimerase/N-acetylmannosamine kinase
  Uniprot ID: Q9Y223
  ENST ID: ENST00000377902
  CDS Start-End: 222-2390
gtgggcgtggctgggcgagcgaggagtggggacaaggtcgagcgacgagtcgtctacccgcgcgcccgagcgcggaaaccgaggggcaggctcgcgctctgcctgcttcgtggcgcttggttcgtccctcgcccgaggagcgcggtggcggcgtgggagggagcctctgacggcgtctggaactctattttaagaacctctcaaaacgaaacaagcaaatcatggagaagaatggaaataaccgaaagctgcgggtttgtgttgctacttgtaaccgtgcagattattctaaacttgccccgatcatgtttggcattaaaaccgaacctgagttctttgaacttgatgttgtggtacttggctctcacctgatagatgactatggaaatacatatcgaatgattgaacaagatgactttgacattaacaccaggctacacacaattgtgaggggagaagatgaggcagccatggtggagtcagtaggcctggccctagtgaagctgccagatgtccttaatcgcctgaagcctgatatcatgattgttcatggagacaggtttgatgccctggctctggccacatctgctgccttgatgaacatccgaatccttcacattgaaggtggggaagtcagtgggaccattgatgactctatcagacatgccataacaaaactggctcattatcatgtgtgctgcacccgcagtgcagagcagcacctgatatccatgtgtgaggaccatgatcgcatccttttggcaggctgcccttcctatgacaaacttctctcagccaagaacaaagactacatgagcatcattcgcatgtggctaggtgatgatgtaaaatctaaagattacattgttgcactacagcaccctgtgaccactgacattaagcattccataaaaatgtttgaattaacattggatgcacttatctcatttaacaagcggaccctagtcctgtttccaaatattgacgcagggagcaaagagatggttcgagtgatgcggaagaagggcattgagcatcatcccaactttcgtgcagttaaacacgtcccatttgaccagtttatacagttggttgcccatgctggctgtatgattgggaacagcagctgtggggttcgagaagttggagcttttggaacacctgtgatcaacctgggaacacgtcagattggaagagaaacaggggagaatgttcttcatgtccgggatgctgacacccaagacaaaatattgcaagcactgcaccttcagtttggtaaacagtacccttgttcaaagatatatggggatggaaatgctgttccaaggattttgaagtttctcaaatctatcgatcttcaagagccactgcaaaagaaattctgctttcctcctgtgaaggagaatatctctcaagatattgaccatattcttgaaactctaagtgccttggccgttgatcttggcgggacgaacctccgagttgcaatagtcagcatgaagggtgaaatagttaagaagtatactcagttcaatcctaaaacctatgaagagaggattaatttaatcctacagatgtgtgtggaagctgcagcagaagctgtaaaactgaactgcagaattttgggagtaggcatttccacaggtggccgtgtaaatcctcgggaaggaattgtgctgcattcaaccaaactgatccaagagtggaactctgtggaccttaggacccccctttctgacactttgcatctccctgtgtgggtagacaatgatggcaactgtgctgccctggcggaaaggaaatttggccaaggaaagggactggaaaactttgttacacttatcacaggcacaggaatcggtggtggaattatccatcagcatgaattgatccacggaagctccttctgtgctgcagaactgggccaccttgttgtgtctctggatgggcctgattgttcctgtggaagccatgggtgcattgaagcatacgcctctggaatggccttgcagagggaggcaaaaaagctccatgatgaggacctgctcttggtggaagggatgtcagtgccaaaagatgaggctgtgggtgcgctccatctcatccaagctgcgaaacttggcaatgcgaaggcccagagcatcctaagaacagctggaacagctttgggtcttggggttgtgaacatcctccataccatgaatccctcccttgtgatcctctccggagtcctggccagtcactatatccacattgtcaaagacgtcattcgccagcaggccttgtcctccgtgcaggacgtggatgtggtggtttcggatttggttgaccccgccctgctgggtgctgccagcatggttctggactacacaacacgcaggatctactagacctccaggaacagacatggaccttctctccagagctcctgagtggaatcaagttcttgtctttaggatgaccgtttcttaacaatcaaatctggtattgaactgcaggtgactttggcagagaaatgttttcacttttggtctcctcttccagagtcacctttccccactccta

SEQ ID NO: 137232 - DNA, 5298 bp, Homo sapiens
  Payload ID: 6871
  Gene Symbol: GNE
  Gene Name: glucosamine (UDP-N-acetyl)-2-epimerase/N-acetylmannosamine kinase
  Uniprot ID: Q9Y223
  ENST ID: ENST00000396594
  CDS Start-End: 113-2374
agtctggaattcagatgcctattggtgactgctccgtggcagctaaaccaagaaaacagctgctctgctcattatttcaaaccacactagggtacagagctcgtgcttcgggatggaaacctatggttatctgcagagggagtcatgctttcaaggacctcatgaactctattttaagaacctctcaaaacgaaacaagcaaatcatggagaagaatggaaataaccgaaagctgcgggtttgtgttgctacttgtaaccgtgcagattattctaaacttgccccgatcatgtttggcattaaaaccgaacctgagttctttgaacttgatgttgtggtacttggctctcacctgatagatgactatggaaatacatatcgaatgattgaacaagatgactttgacattaacaccaggctacacacaattgtgaggggagaagatgaggcagccatggtggagtcagtaggcctggccctagtgaagctgccagatgtccttaatcgcctgaagcctgatatcatgattgttcatggagacaggtttgatgccctggctctggccacatctgctgccttgatgaacatccgaatccttcacattgaaggtggggaagtcagtgggaccattgatgactctatcagacatgccataacaaaactggctcattatcatgtgtgctgcacccgcagtgcagagcagcacctgatatccatgtgtgaggaccatgatcgcatccttttggcaggctgcccttcctatgacaaacttctctcagccaagaacaaagactacatgagcatcattcgcatgtggctaggtgatgatgtaaaatctaaagattacattgttgcactacagcaccctgtgaccactgacattaagcattccataaaaatgtttgaattaacattggatgcacttatctcatttaacaagcggaccctagtcctgtttccaaatattgacgcagggagcaaagagatggttcgagtgatgcggaagaagggcattgagcatcatcccaactttcgtgcagttaaacacgtcccatttgaccagtttatacagttggttgcccatgctggctgtatgattgggaacagcagctgtggggttcgagaagttggagcttttggaacacctgtgatcaacctgggaacacgtcagattggaagagaaacaggggagaatgttcttcatgtccgggatgctgacacccaagacaaaatattgcaagcactgcaccttcagtttggtaaacagtacccttgttcaaagatatatggggatggaaatgctgttccaaggattttgaagtttctcaaatctatcgatcttcaagagccactgcaaaagaaattctgctttcctcctgtgaaggagaatatctctcaagatattgaccatattcttgaaactctaagtgccttggccgttgatcttggcgggacgaacctccgagttgcaatagtcagcatgaagggtgaaatagttaagaagtatactcagttcaatcctaaaacctatgaagagaggattaatttaatcctacagatgtgtgtggaagctgcagcagaagctgtaaaactgaactgcagaattttgggagtaggcatttccacaggtggccgtgtaaatcctcgggaaggaattgtgctgcattcaaccaaactgatccaagagtggaactctgtggaccttaggacccccctttctgacactttgcatctccctgtgtgggtagacaatgatggcaactgtgctgccctggcggaaaggaaatttggccaaggaaagggactggaaaactttgttacacttatcacaggcacaggaatcggtggtggaattatccatcagcatgaattgatccacggaagctccttctgtgctgcagaactgggccaccttgttgtgtctctggatgggcctgattgttcctgtggaagccatgggtgcattgaagcatacgcctctggaatggccttgcagagggaggcaaaaaagctccatgatgaggacctgctcttggtggaagggatgtcagtgccaaaagatgaggctgtgggtgcgctccatctcatccaagctgcgaaacttggcaatgcgaaggcccagagcatcctaagaacagctggaacagctttgggtcttggggttgtgaacatcctccataccatgaatccctcccttgtgatcctctccggagtcctggccagtcactatatccacattgtcaaagacgtcattcgccagcaggccttgtcctccgtgcaggacgtggatgtggtggtttcggatttggttgaccccgccctgctgggtgctgccagcatggttctggactacacaacacgcaggatctactagacctccaggaacagacatggaccttctctccagagctcctgagtggaatcaagttcttgtctttaggatgaccgtttcttaacaatcaaatctggtattgaactgcaggtgactttggcagagaaatgttttcacttttggtctcctcttccagagtcacctttccccactcctatttttgtagatgctattctttctgatgtcttcttactaggggtcattttagctcaaaccctgtaagttacagtcacaattttctgtgccaaagcagctacaataatagagaggaagccttcttagaactctgcttactaatgtattaataccactgagaccttcaggccttgcctgggatatcacttcatcctgaagtttgcattaataatccttccaggccgggcacagtggctcacgcctgtaatcccagcactttgggaggccgaggcgggcggatcacgaggtcaggagatcgagaccgccctggctaacatggtgaaacatggtgaaaccccgtctctactaaaaatacaaaaaattagctgggtgtggtggcgggtcccagctactcgggaggctgaggcaggagaatggcatgaaccagggaggcggagctggcagtgaactgagaccgcaccactgcactccagcctgggtgacagagcaagactccatctcaaaaataataataataaataataataataataataataataataataatccttccagctgggcgcagtggctcacgcctgtaatcccaacattttgggaggccgagatgggcggatcacctgaggtcaggagttcaagaccagcctggccaacatggtgaaaccccatctctactaaaatacaaaaattagccgggcgtggtggcatgtgcctgtagtcccagctactcgggaggctgaggcaggagaattgcttgaacccgggaggcggaggttgcagtgagccgagatcatgccactgcactccaccctgggtgacagagcgagactccgtctacacacacacacacacacacacacacatccttcctcctctaaccccaaactaagatcacagaaggtgatccagtcagagaacagagggaaatcttaccaggaagggcttaagtacacttttttttaaaacagctttattgtttttaaagcctacaatttgataagccttgacatatgtatacctgtgaaagcatcaccacaatcaagacactggacatatctatcactcccccatctcagatatcccccctaatcctggataccatttgttgaaagatgttattactctagctgaacttacaagagactttagaccagggatctaaattacagtggccttagtgaccttgtccttatcttcttaggacagctgagaagccactgggacttagagcctttaaaaggagattaactgtcccaaaaggatctttgctactgaccagcagacacttcttccttcagtagcctttcatactgtgttgagtaacaccctagggtgtccattaaagttttgagttttacctagagcccagagccatgaatcaggattctgtctacatgattcgtgttttcattggtgtcaaaatacaaaagccaaagttctggctatgaattgttaacttggaagaaatactaactgccaccacttattaagtgcctactgtgtgccaggctctgaactaggtgcttcatatacattatcctaaattatctcaacatatgaggtaggtgttttaatttttattttatagaacttggtgtgtttgactgttaagctatggggctagagagagggtttgatcccaggtccctctgtgcttttgctgctgagccacacaacctctcatttcaaaaacactttcaaaatgctaacatattctaattcactctaggccaccaaaaactttaatactaatatctgatttgtaaatgacttaatgtatccttgaccctatcagctgaatttaatgaaatattcctctctgctgtgaaattttaccagtatagtatttggtctagtgacaggtgttctatttttttgagacgggtctcactctgtcacccaggctggagtgcagtggctcaatgcaacctctgccccccaagttcaagtgattctcctgcctcagcctcttgagtagctgggattacaggcacatgcaccacgcccggctgatttttttttgtatttttagtagacagggtttcaccatgttggccaggctggtcttgaactcctgacctcaggtgatccgcccgcctctgcctcccaaagtgctgggattacaggtgtaagccatcacacctggccctagtgacaggtttttatgggtacttttagatgatctaagaaatcatgtgcatatatctttcagatttctattttgggaaaatgaaggtttctacaacatattgtttcagtgttcaaataaactgaaggactcaacattacatttgaactatatccttcctagtgggttagtgtgaaaaagagtttggctgattcctaaaactctgccagccctgcagtaatctccagggcctggttattgttcagacattccatggtgattcctgggaaggaagcttggctgctcagtttctgagtctggggtgagataatgttctgggaagggacatctgttctttggtgtaatctctcatggtgaaatctgctctgtacatcagacaattgcattgctaccaagtttcataccaaatatttgaaaggatggtattgaatctaaaaccaaatattagtttttattaaactcatgggaaggctaatatattccaacgtaaattattacatatggttaagtaattgcatgttaatttattttaatgtaaatatttttgttactgttctgagccaaattctaaagaaaaaataaatacatttccttgttgaaa

SEQ ID NO: 137233 - DNA, 2174 bp, Homo sapiens
  Payload ID: 6871
  Gene Symbol: GNE
  Gene Name: glucosamine (UDP-N-acetyl)-2-epimerase/N-acetylmannosamine kinase
  Uniprot ID: Q9Y223
  ENST ID: ENST00000447283
  CDS Start-End: 52-1998
cggcgtctggaactctattttaagaacctctcaaaacgaaacaagcaaatcatggagaagaatggaaataaccgaaagctgcgggtttgtgttgctacttgtaaccgtgcagattattctaaacttgccccgatcatgtttggcattaaaaccgaacctgagttctttgaacttgatgttgtggtacttggctctcacctgatagatgactatggaaatacatatcgaatgattgaacaagatgactttgacattaacaccaggctacacacaattgtgaggggagaagatgaggcagccatggtggagtcagtaggcctggccctagtgaagctgccagatgtccttaatcgcctgaagcctgatatcatgattgttcatggagacaggtttgatgccctggctctggccacatctgctgccttgatgaacatccgaatccttcacattgaaggtggggaagtcagtgggaccattgatgactctatcagacatgccataacaaaactggctcattatcatgtgtgctgcacccgcagtgcagagcagcacctgatatccatgtgtgaggaccatgatcgcatccttttggcaggctgcccttcctatgacaaacttctctcagccaagaacaaagactacatgagcatcattcgcatgtggctaggtgatgatgtaaaatctaaagattacattgttgcactacagcaccctgtgaccactgacattaagcattccataaaaatgtttgaattaacattggatgcacttatctcatttaacaagcggaccctagtcctgtttccaaatattgacgcagggagcaaagagatggttcgagtgatgcggaagaagggcattgagcatcatcccaactttcgtgcagttaaacacgtcccatttgaccagtttatacagttggttgcccatgctggctgtatgattgggaacagcagctgtggggttcgagaagttggagcttttggaacacctgtgatcaacctgggaacacgtcagattggaagagaaacaggggagaatgttcttcatgtccgggatgctgacacccaagacaaaatattgcaagcactgcaccttcagtttggtaaacagtacccttgttcaaagatatatggggatggaaatgctgttccaaggattttgaagtttctcaaatctatcgatcttcaagagccactgcaaaagaaattctgctttcctcctgtgaaggagaatatctctcaagatattgaccatattcttgaaactctaagtgccttggccgttgatcttggcgggacgaacctccgagttgcaatagtcagcatgaagggtgaaatagttaagaagtatactcagttcaatcctaaaacctatgaagagaggattaatttaatcctacagatgtgtgtggaagctgcagcagaagctgtaaaactgaactgcagaattttgggagtaggaatcggtggtggaattatccatcagcatgaattgatccacggaagctccttctgtgctgcagaactgggccaccttgttgtgtctctggatgggcctgattgttcctgtggaagccatgggtgcattgaagcatacgcctctggaatggccttgcagagggaggcaaaaaagctccatgatgaggacctgctcttggtggaagggatgtcagtgccaaaagatgaggctgtgggtgcgctccatctcatccaagctgcgaaacttggcaatgcgaaggcccagagcatcctaagaacagctggaacagctttgggtcttggggttgtgaacatcctccataccatgaatccctcccttgtgatcctctccggagtcctggccagtcactatatccacattgtcaaagacgtcattcgccagcaggccttgtcctccgtgcaggacgtggatgtggtggtttcggatttggttgaccccgccctgctgggtgctgccagcatggttctggactacacaacacgcaggatctactagacctccaggaacagacatggaccttctctccagagctcctgagtggaatcaagttcttgtctttaggatgaccgtttcttaacaatcaaatctggtattgaactgcaggtgactttggcagagaaatgttttcacttttggtctcctcttccagagtcacctttccccactcctat

SEQ ID NO: 137234 - DNA, 2576 bp, Homo sapiens
  Payload ID: 6871
  Gene Symbol: GNE
  Gene Name: glucosamine (UDP-N-acetyl)-2-epimerase/N-acetylmannosamine kinase
  Uniprot ID: Q9Y223
  ENST ID: ENST00000543356
  CDS Start-End: 1-2154
atgcctattggtgactgctccgtggcagctaaaccaagaaaacagctgctctgctcattatttcaaaccacactagggtacagagctcgtgcttcgggatggaaacctatggttatctgcagagggagtcatgctttcaaggacctcataaatacatatcgaatgattgaacaagatgactttgacattaacaccaggctacacacaattgtgaggggagaagatgaggcagccatggtggagtcagtaggcctggccctagtgaagctgccagatgtccttaatcgcctgaagcctgatatcatgattgttcatggagacaggtttgatgccctggctctggccacatctgctgccttgatgaacatccgaatccttcacattgaaggtggggaagtcagtgggaccattgatgactctatcagacatgccataacaaaactggctcattatcatgtgtgctgcacccgcagtgcagagcagcacctgatatccatgtgtgaggaccatgatcgcatccttttggcaggctgcccttcctatgacaaacttctctcagccaagaacaaagactacatgagcatcattcgcatgtggctaggtgatgatgtaaaatctaaagattacattgttgcactacagcaccctgtgaccactgacattaagcattccataaaaatgtttgaattaacattggatgcacttatctcatttaacaagcggaccctagtcctgtttccaaatattgacgcagggagcaaagagatggttcgagtgatgcggaagaagggcattgagcatcatcccaactttcgtgcagttaaacacgtcccatttgaccagtttatacagttggttgcccatgctggctgtatgattgggaacagcagctgtggggttcgagaagttggagcttttggaacacctgtgatcaacctgggaacacgtcagattggaagagaaacaggggagaatgttcttcatgtccgggatgctgacacccaagacaaaatattgcaagcactgcaccttcagtttggtaaacagtacccttgttcaaagatatatggggatggaaatgctgttccaaggattttgaagtttctcaaatctatcgatcttcaagagccactgcaaaagaaattctgctttcctcctgtgaaggagaatatctctcaagatattgaccatattcttgaaactctaagtgccttggccgttgatcttggcgggacgaacctccgagttgcaatagtcagcatgaagggtgaaatagttaagaagtatactcagttcaatcctaaaacctatgaagagaggattaatttaatcctacagatgtgtgtggaagctgcagcagaagctgtaaaactgaactgcagaattttgggagtaggcatttccacaggtggccgtgtaaatcctcgggaaggaattgtgctgcattcaaccaaactgatccaagagtggaactctgtggaccttaggacccccctttctgacactttgcatctccctgtgtgggtagacaatgatggcaactgtgctgccctggcggaaaggaaatttggccaaggaaagggactggaaaactttgttacacttatcacaggcacaggaatcggtggtggaattatccatcagcatgaattgatccacggaagctccttctgtgctgcagaactgggccaccttgttgtgtctctggatgggcctgattgttcctgtggaagccatgggtgcattgaagcatacgcctctggaatggccttgcagagggaggcaaaaaagctccatgatgaggacctgctcttggtggaagggatgtcagtgccaaaagatgaggctgtgggtgcgctccatctcatccaagctgcgaaacttggcaatgcgaaggcccagagcatcctaagaacagctggaacagctttgggtcttggggttgtgaacatcctccataccatgaatccctcccttgtgatcctctccggagtcctggccagtcactatatccacattgtcaaagacgtcattcgccagcaggccttgtcctccgtgcaggacgtggatgtggtggtttcggatttggttgaccccgccctgctgggtgctgccagcatggttctggactacacaacacgcaggatctactagacctccaggaacagacatggaccttctctccagagctcctgagtggaatcaagttcttgtctttaggatgaccgtttcttaacaatcaaatctggtattgaactgcaggtgactttggcagagaaatgttttcacttttggtctcctcttccagagtcacctttccccactcctatttttgtagatgctattctttctgatgtcttcttactaggggtcattttagctcaaaccctgtaagttacagtcacaattttctgtgccaaagcagctacaataatagagaggaagccttcttagaactctgcttactaatgtattaataccactgagaccttcaggccttgcctgggatatcacttcatcctgaagtttgcattaataatccttccaggccgggcacagtggctcacgcctgtaat

SEQ ID NO: 137235 - DNA, 3657 bp, Homo sapiens
  Payload ID: 6871
  Gene Symbol: GNE
  Gene Name: glucosamine (UDP-N-acetyl)-2-epimerase/N-acetylmannosamine kinase
  Uniprot ID: Q9Y223
  ENST ID: ENST00000539815
  CDS Start-End: 42-2210
aactctattttaagaacctctcaaaacgaaacaagcaaatcatggagaagaatggaaataaccgaaagctgcgggtttgtgttgctacttgtaaccgtgcagattattctaaacttgccccgatcatgtttggcattaaaaccgaacctgagttctttgaacttgatgttgtggtacttggctctcacctgatagatgactatggaaatacatatcgaatgattgaacaagatgactttgacattaacaccaggctacacacaattgtgaggggagaagatgaggcagccatggtggagtcagtaggcctggccctagtgaagctgccagatgtccttaatcgcctgaagcctgatatcatgattgttcatggagacaggtttgatgccctggctctggccacatctgctgccttgatgaacatccgaatccttcacattgaaggtggggaagtcagtgggaccattgatgactctatcagacatgccataacaaaactggctcattatcatgtgtgctgcacccgcagtgcagagcagcacctgatatccatgtgtgaggaccatgatcgcatccttttggcaggctgcccttcctatgacaaacttctctcagccaagaacaaagactacatgagcatcattcgcatgtggctaggtgatgatgtaaaatctaaagattacattgttgcactacagcaccctgtgaccactgacattaagcattccataaaaatgtttgaattaacattggatgcacttatctcatttaacaagcggaccctagtcctgtttccaaatattgacgcagggagcaaagagatggttcgagtgatgcggaagaagggcattgagcatcatcccaactttcgtgcagttaaacacgtcccatttgaccagtttatacagttggttgcccatgctggctgtatgattgggaacagcagctgtggggttcgagaagttggagcttttggaacacctgtgatcaacctgggaacacgtcagattggaagagaaacaggggagaatgttcttcatgtccgggatgctgacacccaagacaaaatattgcaagcactgcaccttcagtttggtaaacagtacccttgttcaaagatatatggggatggaaatgctgttccaaggattttgaagtttctcaaatctatcgatcttcaagagccactgcaaaagaaattctgctttcctcctgtgaaggagaatatctctcaagatattgaccatattcttgaaactctaagtgccttggccgttgatcttggcgggacgaacctccgagttgcaatagtcagcatgaagggtgaaatagttaagaagtatactcagttcaatcctaaaacctatgaagagaggattaatttaatcctacagatgtgtgtggaagctgcagcagaagctgtaaaactgaactgcagaattttgggagtaggcatttccacaggtggccgtgtaaatcctcgggaaggaattgtgctgcattcaaccaaactgatccaagagtggaactctgtggaccttaggacccccctttctgacactttgcatctccctgtgtgggtagacaatgatggcaactgtgctgccctggcggaaaggaaatttggccaaggaaagggactggaaaactttgttacacttatcacaggcacaggaatcggtggtggaattatccatcagcatgaattgatccacggaagctccttctgtgctgcagaactgggccaccttgttgtgtctctggatgggcctgattgttcctgtggaagccatgggtgcattgaagcatacgcctctggaatggccttgcagagggaggcaaaaaagctccatgatgaggacctgctcttggtggaagggatgtcagtgccaaaagatgaggctgtgggtgcgctccatctcatccaagctgcgaaacttggcaatgcgaaggcccagagcatcctaagaacagctggaacagctttgggtcttggggttgtgaacatcctccataccatgaatccctcccttgtgatcctctccggagtcctggccagtcactatatccacattgtcaaagacgtcattcgccagcaggccttgtcctccgtgcaggacgtggatgtggtggtttcggatttggttgaccccgccctgctgggtgctgccagcatggttctggactacacaacacgcaggatctactagacctccaggaacagacatggaccttctctccagagctcctgagtggaatcaagttcttgtctttaggatgaccgtttcttaacaatcaaatctggtattgaactgcaggtgactttggcagagaaatgttttcacttttggtctcctcttccagagtcacctttccccactcctatttttgtagatgctattctttctgatgtcttcttactaggggtcattttagctcaaaccctgtaagttacagtcacaattttctgtgccaaagcagctacaataatagagaggaagccttcttagaactctgcttactaatgtattaataccactgagaccttcaggccttgcctgggatatcacttcatcctgaagtttgcattaataatccttccaggccgggcacagtggctcacgcctgtaatcccagcactttgggaggccgaggcgggcggatcacgaggtcaggagatcgagaccgccctggctaacatggtgaaacatggtgaaaccccgtctctactaaaaatacaaaaaattagctgggtgtggtggcgggtcccagctactcgggaggctgaggcaggagaatggcatgaaccccaggctggagtgcagtggctcaatgcaacctctgccccccaagttcaagtgattctcctgcctcagcctcttgagtagctgggattacaggcacatgcaccacgcccggctgatttttttttgtatttttagtagacagggtttcaccatgttggccaggctggtcttgaactcctgacctcaggtgatccgcccgcctctgcctcccaaagtgctgggattacaggtgtaagccatcacacctggccctagtgacaggtttttatgggtacttttagatgatctaagaaatcatgtgcatatatctttcagatttctattttgggaaaatgaaggtttctacaacatattgtttcagtgttcaaataaactgaaggactcaacattacatttgaactatatccttcctagtgggttagtgtgaaaaagagtttggctgattcctaaaactctgccagccctgcagtaatctccagggcctggttattgttcagacattccatggtgattcctgggaaggaagcttggctgctcagtttctgagtctggggtgagataatgttctgggaagggacatctgttctttggtgtaatctctcatggtgaaatctgctctgtacatcagacaattgcattgctaccaagtttcataccaaatatttgaaaggatggtattgaatctaaaaccaaatattagtttttattaaactcatgggaaggctaatatattccaacgtaaattattacatatggttaagtaattgcatgttaatttattttaatgtaaatatttttgttactgttctgagccaaattctaaagaaaaaataaatacatttccttgttg

SEQ ID NO: 137236 - DNA, 2190 bp, Homo sapiens
  Payload ID: 6871
  Gene Symbol: GNE
  Gene Name: glucosamine (UDP-N-acetyl)-2-epimerase/N-acetylmannosamine kinase
  Uniprot ID: Q9Y223
  ENST ID: ENST00000539208
  CDS Start-End: 139-1977
tacccgcgcgcccgagcgcggaaaccgaggggcaggctcgcgctctgcctgcttcgtggcgcttggttcgtccctcgcccgaggagcgcggtggcggcgtgggagggagcctctgacggcgtctgaaatacatatcgaatgattgaacaagatgactttgacattaacaccaggctacacacaattgtgaggggagaagatgaggcagccatggtggagtcagtaggcctggccctagtgaagctgccagatgtccttaatcgcctgaagcctgatatcatgattgttcatggagacaggtttgatgccctggctctggccacatctgctgccttgatgaacatccgaatccttcacattgaaggtggggaagtcagtgggaccattgatgactctatcagacatgccataacaaaactggctcattatcatgtgtgctgcacccgcagtgcagagcagcacctgatatccatgtgtgaggaccatgatcgcatccttttggcaggctgcccttcctatgacaaacttctctcagccaagaacaaagactacatgagcatcattcgcatgtggctagggagcaaagagatggttcgagtgatgcggaagaagggcattgagcatcatcccaactttcgtgcagttaaacacgtcccatttgaccagtttatacagttggttgcccatgctggctgtatgattgggaacagcagctgtggggttcgagaagttggagcttttggaacacctgtgatcaacctgggaacacgtcagattggaagagaaacaggggagaatgttcttcatgtccgggatgctgacacccaagacaaaatattgcaagcactgcaccttcagtttggtaaacagtacccttgttcaaagatatatggggatggaaatgctgttccaaggattttgaagtttctcaaatctatcgatcttcaagagccactgcaaaagaaattctgctttcctcctgtgaaggagaatatctctcaagatattgaccatattcttgaaactctaagtgccttggccgttgatcttggcgggacgaacctccgagttgcaatagtcagcatgaagggtgaaatagttaagaagtatactcagttcaatcctaaaacctatgaagagaggattaatttaatcctacagatgtgtgtggaagctgcagcagaagctgtaaaactgaactgcagaattttgggagtaggcatttccacaggtggccgtgtaaatcctcgggaaggaattgtgctgcattcaaccaaactgatccaagagtggaactctgtggaccttaggacccccctttctgacactttgcatctccctgtgtgggtagacaatgatggcaactgtgctgccctggcggaaaggaaatttggccaaggaaagggactggaaaactttgttacacttatcacaggcacaggaatcggtggtggaattatccatcagcatgaattgatccacggaagctccttctgtgctgcagaactgggccaccttgttgtgtctctggatgggcctgattgttcctgtggaagccatgggtgcattgaagcatacgcctctggaatggccttgcagagggaggcaaaaaagctccatgatgaggacctgctcttggtggaagggatgtcagtgccaaaagatgaggctgtgggtgcgctccatctcatccaagctgcgaaacttggcaatgcgaaggcccagagcatcctaagaacagctggaacagctttgggtcttggggttgtgaacatcctccataccatgaatccctcccttgtgatcctctccggagtcctggccagtcactatatccacattgtcaaagacgtcattcgccagcaggccttgtcctccgtgcaggacgtggatgtggtggtttcggatttggttgaccccgccctgctgggtgctgccagcatggttctggactacacaacacgcaggatctactagacctccaggaacagacatggaccttctctccagagctcctgagtggaatcaagttcttgtctttaggatgaccgtttcttaacaatcaaatctggtattgaactgcaggtgactttggcagagaaatgttttcacttttggtctcctcttccagagtcacctttccccactcctatttttgtagatgctattctttctgatgtcttcttacta

SEQ ID NO: 137237 - DNA, 2273 bp, Homo sapiens
  Payload ID: 6872
  Gene Symbol: GNPDA1
  Gene Name: glucosamine-6-phosphate deaminase 1
  Uniprot ID: P46926
  ENST ID: ENST00000311337
  CDS Start-End: 44-913
cggcgcagtcgctgcagccgccgcgggaggcgtccgtgacaagatgaagctcatcatcctggagcactattctcaggcgagcgagtgggcggctaaatacatcaggaaccgcatcatccagtttaacccagggccagagaagtacttcaccctggggctccccactgggagtaccccacttggctgctacaagaagctgattgaatactataagaatggggacctgtcctttaaatatgtgaagaccttcaacatggatgagtacgtgggccttcctcgagaccacccggagagttaccactccttcatgtggaacaacttcttcaagcacattgacatccacccagaaaacacccacattctggatgggaatgcagtcgacctacaggcagaatgtgatgcctttgaagagaagatcaaggctgcaggtgggatcgagctatttgttggaggcatcggccctgatggacacattgccttcaacgagccaggctccagtctggtgtccaggacccgtgtgaagacgctggccatggataccatcctggccaatgctaggttcttcgatggagaactcaccaaggtgcccaccatggccttgacggtgggggtgggcactgtcatggatgctagagaggtgatgatccttatcacaggtgctcacaaggcatttgctctgtacaaggccatcgaggagggagtgaaccacatgtggaccgtgtctgccttccagcagcatccccgcaccgtgtttgtgtgtgacgaggatgccaccttggagctgaaagtgaagactgtcaagtatttcaaaggtttaatgcttgttcataacaagttggtggaccccttgtacagtatcaaagagaaagaaactgagaaaagccaatcttcgaagaaaccatacagcgattagcctgtgctgggacctagtgtcaagtacccatagggaaaggcaggtctttctggaaattgtctttagaagaaagaattgtatttctttaatctagtatggttactccagataagtgggtgaacttattgttcttggccatgaggctgggagcctagtcacggagtttagctatagggagaatgtttgtaacttaatcagaaaaaaaatatctgcaaaatgtactccatcattttgatgtctgccaaacccaggttgggagttttaaactttttgttctgcttcagccatggttcacacatatgacacactcccgtcaggaatttctctccttacacgcactgattttcaagtgggagggaattaggggcttatgtatattggataccacctctttgaagagtcttgagagtccttcttgcacaggcctgccccttggttgagaaccattgttccaagtgaaggcacaaactctcaatatctaaaataagtgcaaggaagcagtctctttggtcagtaacaagtgcaatggaaagaaaacgatcccttccttcttccactttcacagcttttctctgaactaggagaacctgggggtggatttgggtgggtggggccaaagaggaggcttctattgataaatccagagcctcaaggggcccagccacgtcaaacttctctccctcagggactctccagcaccaaaaggcagaaggtggaagccgtttttcccccagagccctgtgtttttgtgaaagcctcactgtggctcctctgttttacatactcattagtaagtgggaggtccactggggcaacagacactgccacaatttcagtgttgtgttcagccaaggggacggtctgggcaggcagcttaagtgtgagtttagtcacaactcctgagtgtcccgctctcctgcttacctaggaggtgagtgccaggaaaatacaccaaatgcttctagtattgtttccccacttaaaatagtcctgcttaaattcacatggtgtggtctgatgttctgagagcatcaggaaatacaacccttttgcccatttacccttctccccggatcccaaggtggtctgttgctctggcttcctttcattgtcttaggccttcatggagtggatgctgcctcctcctggctgtttttgtgcctgtttgaagctactgctgcctccatttctgggaaagacctttgagagcctagcccaggcctaagggctatgtttggtaccagtgttttgtctttagcttttctatgtgattgtgccgtcattctgttttaagctcatggatcaatggatttgtttacaatgtgatattttctattaaatccagtattttcaaataaca

SEQ ID NO: 137238 - DNA, 925 bp, Homo sapiens
  Payload ID: 6872
  Gene Symbol: GNPDA1
  Gene Name: glucosamine-6-phosphate deaminase 1
  ENST ID: ENST00000505689
  CDS Start-End: 54-925
gccgggccgccggcgcagtcgctgcagccgccgcgggaggcgtccgtgacaagatgaagctcatcatcctggagcactattctcaggcgagcgagtgggcggctaaatacatcaggaaccgcatcatccagtttaacccagggccagagaagtacttcaccctggggctccccactggtgcgttcttggatggagagggtgccgtggataagggtggagagagtaggcaacaggggccagggagtaccccacttggctgctacaagaagctgattgaatactataagaatggggacctgtcctttaaatatgtgaagaccttcaacatggatgagtacgtgggccttcctcgagaccacccggagagttaccactccttcatgtggaacaacttcttcaagcacattgacatccacccagaaaacacccacattctggatgggaatgcagtcgacctacaggcagaatgtgatgcctttgaagagaagatcaaggctgcaggtgggatcgagctatttgttggaggcatcggccctgatggacacattgccttcaacgagccaggctccagtctggtgtccaggacccgtgtgaagacgctggccatggataccatcctggccaatgctaggttcttcgatggagaactcaccaaggtgcccaccatggccttgacggtgggggtgggcactgtcatggatgctagagaggtgatgatccttatcacaggtgctcacaaggcatttgctctgtacaaggccatcgaggagggagtgaaccacatgtggaccgtgtctgccttccagcagcatccccgcaccgtgtttgtgtgtgacgaggatgccaccttggagctgaaagtgaagactgtcaagtatttcaaaggtttaatgcttgttcataacaagttggtggaccccttgta

SEQ ID NO: 137239 - DNA, 543 bp, Homo sapiens
  Payload ID: 6872
  Gene Symbol: GNPDA1
  Gene Name: glucosamine-6-phosphate deaminase 1
  ENST ID: ENST00000503229
  CDS Start-End: 130-543
gcagtcgctgcagccgccgcgggaggcgtccgttctgtgaagtaggtactattgtcccaatttttacataggaggaaacggctcagagagaacttaggtcctttgaccgaggtcctgcaggtggacaagatgaagctcatcatcctggagcactattctcaggcgagcgagtgggcggctaaatacatcaggaaccgcatcatccagtttaacccagggccagagaagtacttcaccctggggctccccactgggagtaccccacttggctgctacaagaagctgattgaatactataagaatggggacctgtcctttaaatatgtgaagaccttcaacatggatgagtacgtgggccttcctcgagaccacccggagagttaccactccttcatgtggaacaacttcttcaagcacattgacatccacccagaaaacacccacattctggatgggaatgcagtcgacctacaggcagaatgtgatgcctttgaagagaagatcaaggctgcaggtgggatcgagctatttgttggaggcatc

SEQ ID NO: 137240 - DNA, 2622 bp, Homo sapiens
  Payload ID: 6872
  Gene Symbol: GNPDA1
  Gene Name: glucosamine-6-phosphate deaminase 1
  Uniprot ID: P46926
  ENST ID: ENST00000503794
  CDS Start-End: 402-1271
cggggaccttcctcgcgggccggagcgcggagcgctgccccagccctacggcactcggggtcgggaccccggggagccgccctcacacattttccaggagggatcggaggggcgatggggtggtaatgggggtgggggacacgctgtaccccaccgacgaccgcgcgggccaccttcgcctctttccttcacactcccactaaccgcagtgctgggggaacaaaatgtcctccttctggagcgattaccttttcccttttgtgctttgggggaaactgaagacccagaggggttcgcaaagcaagtctgtgaagtaggtactattgtcccaatttttacataggaggaaacggctcagagagaacttaggtcctttgaccgaggtcctgcaggtggacaagatgaagctcatcatcctggagcactattctcaggcgagcgagtgggcggctaaatacatcaggaaccgcatcatccagtttaacccagggccagagaagtacttcaccctggggctccccactgggagtaccccacttggctgctacaagaagctgattgaatactataagaatggggacctgtcctttaaatatgtgaagaccttcaacatggatgagtacgtgggccttcctcgagaccacccggagagttaccactccttcatgtggaacaacttcttcaagcacattgacatccacccagaaaacacccacattctggatgggaatgcagtcgacctacaggcagaatgtgatgcctttgaagagaagatcaaggctgcaggtgggatcgagctatttgttggaggcatcggccctgatggacacattgccttcaacgagccaggctccagtctggtgtccaggacccgtgtgaagacgctggccatggataccatcctggccaatgctaggttcttcgatggagaactcaccaaggtgcccaccatggccttgacggtgggggtgggcactgtcatggatgctagagaggtgatgatccttatcacaggtgctcacaaggcatttgctctgtacaaggccatcgaggagggagtgaaccacatgtggaccgtgtctgccttccagcagcatccccgcaccgtgtttgtgtgtgacgaggatgccaccttggagctgaaagtgaagactgtcaagtatttcaaaggtttaatgcttgttcataacaagttggtggaccccttgtacagtatcaaagagaaagaaactgagaaaagccaatcttcgaagaaaccatacagcgattagcctgtgctgggacctagtgtcaagtacccatagggaaaggcaggtctttctggaaattgtctttagaagaaagaattgtatttctttaatctagtatggttactccagataagtgggtgaacttattgttcttggccatgaggctgggagcctagtcacggagtttagctatagggagaatgtttgtaacttaatcagaaaaaaaatatctgcaaaatgtactccatcattttgatgtctgccaaacccaggttgggagttttaaactttttgttctgcttcagccatggttcacacatatgacacactcccgtcaggaatttctctccttacacgcactgattttcaagtgggagggaattaggggcttatgtatattggataccacctctttgaagagtcttgagagtccttcttgcacaggcctgccccttggttgagaaccattgttccaagtgaaggcacaaactctcaatatctaaaataagtgcaaggaagcagtctctttggtcagtaacaagtgcaatggaaagaaaacgatcccttccttcttccactttcacagcttttctctgaactaggagaacctgggggtggatttgggtgggtggggccaaagaggaggcttctattgataaatccagagcctcaaggggcccagccacgtcaaacttctctccctcagggactctccagcaccaaaaggcagaaggtggaagccgtttttcccccagagccctgtgtttttgtgaaagcctcactgtggctcctctgttttacatactcattagtaagtgggaggtccactggggcaacagacactgccacaatttcagtgttgtgttcagccaaggggacggtctgggcaggcagcttaagtgtgagtttagtcacaactcctgagtgtcccgctctcctgcttacctaggaggtgagtgccaggaaaatacaccaaatgcttctagtattgtttccccacttaaaatagtcctgcttaaattcacatggtgtggtctgatgttctgagagcatcaggaaatacaacccttttgcccatttacccttctccccggatcccaaggtggtctgttgctctggcttcctttcattgtcttaggccttcatggagtggatgctgcctcctcctggctgtttttgtgcctgtttgaagctactgctgcctccatttctgggaaagacctttgagagcctagcccaggcctaagggctatgtttggtaccagtgttttgtctttagcttttctatgtgattgtgccgtcattctgttttaagctcatggatcaatggatttgtttacaatgtgatattttctattaaatccagtatttt

SEQ ID NO: 137241 - DNA, 980 bp, Homo sapiens
  Payload ID: 6872
  Gene Symbol: GNPDA1
  Gene Name: glucosamine-6-phosphate deaminase 1
  ENST ID: ENST00000513454
  CDS Start-End: 40-864
gcagtcgctgcagccgccgcgggaggcgtccgtgacaagatgaagctcatcatcctggagcactattctcaggcgagcgagtgggcggctaaatacatcaggaaccgcatcatccagtttaacccagggccagagaagtacttcaccctggggctccccactgggagtaccccacttggctgctacaagaagctgattgaatactataagaatggggacctgtcctttaaatatgtgaagaccttcaacatggatgagtacgtgggccttcctcgagaccacccggagagttaccactccttcatgtggaacaacttcttcaagcacattgacatccacccagaaaacacccacattctggatgggaatgcagtcgacctacaggcagaatgtgatgcctttgaagagaagatcaaggctgcaggtgggatcgagctatttgttggaggcatcggccctgatggacacattgccttcaacgagccaggctccagtctggtgtccaggacccgtgtgaagacgctggccatggataccatcctggccaatgctaggttcttcgatggagaactcaccaaggtgcccaccatggccttgacggtgggggtgggcactgtcatggatgctagagaggtgatgatccttatcacaggtgctcacaaggcatttgctctgtacaaggccatcgaggagggagtgaaccacatgtggaccgtgtctgccttccagcagcatccccgcaccgtgtttgtgtgtgacgaggatgccaccttggagctgaaagtgaagactgtcaagtatttcaaagctcctccacaggtcaacaggaagggatacatctactcaacaaacttcgggatttagccaagatggcaggctaattctcacaccagggcacagtctaatgggtccagctgacttcctgacttgatcaacttgcccagtgtttaatgatgtttttcaagaagccgagcaggaaa

SEQ ID NO: 137242 - DNA, 2980 bp, Homo sapiens
  Payload ID: 6872
  Gene Symbol: GNPDA1
  Gene Name: glucosamine-6-phosphate deaminase 1
  Uniprot ID: P46926
  ENST ID: ENST00000508177
  CDS Start-End: 760-1629
ctctttccttcacactcccactaaccgcagtgctgggggaacaaaatgtcctccttctggagcgattaccttttcccttttgtgctttgggggaaactgaagacccagaggggttcgcaaagcaaggtgggccagtaggaagacccctccgctagtccagagagagcacacagctccccaggcagagctcattgccccacctgctctagtggcccagcatgatcccatgacctctctacttctggaggaagagtcttggggtagacggcggggagggggtagggtatcccgttccggtaggggcagggatgagggaggcggggctgagccgagcatctatctggatggtaacagccaacgtagaaaatactaagttgtttacatgcattctctcatttcatattacccgtcgtgaagtctgtgaagtaggtactattgtcccaatttttacataggaggaaacggctcagagagaacttaggtcctttgaccgaggtcctgcaggtggtaagtgaaggagctgagattagaacccagatctgcccccagtggcgcctcctcgtggtctgtgggtggtggagacgactggcctagcctcttagctcctctgtgaatagaaaggcctttttcctggctcagacagcttgggaaggggattgttgctgggtaagagaagcttctcccaccacctccatctctttctctgccccttaccattgattcctttctgtcatcccctctcccccactgcaggacaagatgaagctcatcatcctggagcactattctcaggcgagcgagtgggcggctaaatacatcaggaaccgcatcatccagtttaacccagggccagagaagtacttcaccctggggctccccactgggagtaccccacttggctgctacaagaagctgattgaatactataagaatggggacctgtcctttaaatatgtgaagaccttcaacatggatgagtacgtgggccttcctcgagaccacccggagagttaccactccttcatgtggaacaacttcttcaagcacattgacatccacccagaaaacacccacattctggatgggaatgcagtcgacctacaggcagaatgtgatgcctttgaagagaagatcaaggctgcaggtgggatcgagctatttgttggaggcatcggccctgatggacacattgccttcaacgagccaggctccagtctggtgtccaggacccgtgtgaagacgctggccatggataccatcctggccaatgctaggttcttcgatggagaactcaccaaggtgcccaccatggccttgacggtgggggtgggcactgtcatggatgctagagaggtgatgatccttatcacaggtgctcacaaggcatttgctctgtacaaggccatcgaggagggagtgaaccacatgtggaccgtgtctgccttccagcagcatccccgcaccgtgtttgtgtgtgacgaggatgccaccttggagctgaaagtgaagactgtcaagtatttcaaaggtttaatgcttgttcataacaagttggtggaccccttgtacagtatcaaagagaaagaaactgagaaaagccaatcttcgaagaaaccatacagcgattagcctgtgctgggacctagtgtcaagtacccatagggaaaggcaggtctttctggaaattgtctttagaagaaagaattgtatttctttaatctagtatggttactccagataagtgggtgaacttattgttcttggccatgaggctgggagcctagtcacggagtttagctatagggagaatgtttgtaacttaatcagaaaaaaaatatctgcaaaatgtactccatcattttgatgtctgccaaacccaggttgggagttttaaactttttgttctgcttcagccatggttcacacatatgacacactcccgtcaggaatttctctccttacacgcactgattttcaagtgggagggaattaggggcttatgtatattggataccacctctttgaagagtcttgagagtccttcttgcacaggcctgccccttggttgagaaccattgttccaagtgaaggcacaaactctcaatatctaaaataagtgcaaggaagcagtctctttggtcagtaacaagtgcaatggaaagaaaacgatcccttccttcttccactttcacagcttttctctgaactaggagaacctgggggtggatttgggtgggtggggccaaagaggaggcttctattgataaatccagagcctcaaggggcccagccacgtcaaacttctctccctcagggactctccagcaccaaaaggcagaaggtggaagccgtttttcccccagagccctgtgtttttgtgaaagcctcactgtggctcctctgttttacatactcattagtaagtgggaggtccactggggcaacagacactgccacaatttcagtgttgtgttcagccaaggggacggtctgggcaggcagcttaagtgtgagtttagtcacaactcctgagtgtcccgctctcctgcttacctaggaggtgagtgccaggaaaatacaccaaatgcttctagtattgtttccccacttaaaatagtcctgcttaaattcacatggtgtggtctgatgttctgagagcatcaggaaatacaacccttttgcccatttacccttctccccggatcccaaggtggtctgttgctctggcttcctttcattgtcttaggccttcatggagtggatgctgcctcctcctggctgtttttgtgcctgtttgaagctactgctgcctccatttctgggaaagacctttgagagcctagcccaggcctaagggctatgtttggtaccagtgttttgtctttagcttttctatgtgattgtgccgtcattctgttttaagctcatggatcaatggatttgtttacaatgtgatattttctattaaatccagtatttt

SEQ ID NO: 137243 - DNA, 2319 bp, Homo sapiens
  Payload ID: 6872
  Gene Symbol: GNPDA1
  Gene Name: glucosamine-6-phosphate deaminase 1
  Uniprot ID: P46926
  ENST ID: ENST00000500692
  CDS Start-End: 95-964
ggcgcagtcgctgcagccgccgcgggaggcgtccgtgaggaaacggctcagagagaacttaggtcctttgaccgaggtcctgcaggtggacaagatgaagctcatcatcctggagcactattctcaggcgagcgagtgggcggctaaatacatcaggaaccgcatcatccagtttaacccagggccagagaagtacttcaccctggggctccccactgggagtaccccacttggctgctacaagaagctgattgaatactataagaatggggacctgtcctttaaatatgtgaagaccttcaacatggatgagtacgtgggccttcctcgagaccacccggagagttaccactccttcatgtggaacaacttcttcaagcacattgacatccacccagaaaacacccacattctggatgggaatgcagtcgacctacaggcagaatgtgatgcctttgaagagaagatcaaggctgcaggtgggatcgagctatttgttggaggcatcggccctgatggacacattgccttcaacgagccaggctccagtctggtgtccaggacccgtgtgaagacgctggccatggataccatcctggccaatgctaggttcttcgatggagaactcaccaaggtgcccaccatggccttgacggtgggggtgggcactgtcatggatgctagagaggtgatgatccttatcacaggtgctcacaaggcatttgctctgtacaaggccatcgaggagggagtgaaccacatgtggaccgtgtctgccttccagcagcatccccgcaccgtgtttgtgtgtgacgaggatgccaccttggagctgaaagtgaagactgtcaagtatttcaaaggtttaatgcttgttcataacaagttggtggaccccttgtacagtatcaaagagaaagaaactgagaaaagccaatcttcgaagaaaccatacagcgattagcctgtgctgggacctagtgtcaagtacccatagggaaaggcaggtctttctggaaattgtctttagaagaaagaattgtatttctttaatctagtatggttactccagataagtgggtgaacttattgttcttggccatgaggctgggagcctagtcacggagtttagctatagggagaatgtttgtaacttaatcagaaaaaaaatatctgcaaaatgtactccatcattttgatgtctgccaaacccaggttgggagttttaaactttttgttctgcttcagccatggttcacacatatgacacactcccgtcaggaatttctctccttacacgcactgattttcaagtgggagggaattaggggcttatgtatattggataccacctctttgaagagtcttgagagtccttcttgcacaggcctgccccttggttgagaaccattgttccaagtgaaggcacaaactctcaatatctaaaataagtgcaaggaagcagtctctttggtcagtaacaagtgcaatggaaagaaaacgatcccttccttcttccactttcacagcttttctctgaactaggagaacctgggggtggatttgggtgggtggggccaaagaggaggcttctattgataaatccagagcctcaaggggcccagccacgtcaaacttctctccctcagggactctccagcaccaaaaggcagaaggtggaagccgtttttcccccagagccctgtgtttttgtgaaagcctcactgtggctcctctgttttacatactcattagtaagtgggaggtccactggggcaacagacactgccacaatttcagtgttgtgttcagccaaggggacggtctgggcaggcagcttaagtgtgagtttagtcacaactcctgagtgtcccgctctcctgcttacctaggaggtgagtgccaggaaaatacaccaaatgcttctagtattgtttccccacttaaaatagtcctgcttaaattcacatggtgtggtctgatgttctgagagcatcaggaaatacaacccttttgcccatttacccttctccccggatcccaaggtggtctgttgctctggcttcctttcattgtcttaggccttcatggagtggatgctgcctcctcctggctgtttttgtgcctgtttgaagctactgctgcctccatttctgggaaagacctttgagagcctagcccaggcctaagggctatgtttggtaccagtgttttgtctttagcttttctatgtgattgtgccgtcattctgttttaagctcatggatcaatggatttgtttacaatgtgatattttctattaaatccagtattttcaaa

SEQ ID NO: 137244 - DNA, 570 bp, Homo sapiens
  Payload ID: 6872
  Gene Symbol: GNPDA1
  Gene Name: glucosamine-6-phosphate deaminase 1
  ENST ID: ENST00000510194
  CDS Start-End: 89-570
gtgtaagtgggtagcagggctggcggggaccttcctcgcgggccggagcgcggagcgctgccccagccctacggcactcggggacaagatgaagctcatcatcctggagcactattctcaggcgagcgagtgggcggctaaatacatcaggaaccgcatcatccagtttaacccagggccagagaagtacttcaccctggggctccccactgggagtaccccacttggctgctacaagaagctgattgaatactataagaatggggacctgtcctttaaatatgtgaagaccttcaacatggatgagtacgtgggccttcctcgagaccacccggagagttaccactccttcatgtggaacaacttcttcaagcacattgacatccacccagaaaacacccacattctggatgggaatgcagtcgacctacaggcagaatgtgatgcctttgaagagaagatcaaggctgcaggtgggatcgagctatttgttggaggcatcggccctgatggacacattgccttcaacgagccaggctccagtctggtgtccaggacccgtgtgaagac

SEQ ID NO: 137245 - DNA, 754 bp, Homo sapiens
  Payload ID: 6872
  Gene Symbol: GNPDA1
  Gene Name: glucosamine-6-phosphate deaminase 1
  ENST ID: ENST00000504139
  CDS Start-End: 44-754
cggcgcagtcgctgcagccgccgcgggaggcgtccgtgacaagatgaagctcatcatcctggagcactattctcaggcgagcgagtgggcggctaaatacatcaggaaccgcatcatccagtttaacccagggccagagaagtacttcaccctggggctccccactgggagtaccccacttggctgctacaagaagctgattgaatactataagaatggggacctgtcctttaaatatgtgaagaccttcaacatggatgagtacgtgggccttcctcgagaccacccggagagttaccactccttcatgtggaacaacttcttcaagcacattgacatccacccagaaaacacccacattctggatgggaatgcagtcgacctacaggcagaatgtgatgcctttgaagagaagatcaaggctgcaggtgggatcgagctatttgttggaggcatcggccctgatggacacattgccttcaacgagccaggctccagtctggtgtccaggacccgtgtgaagacgctggccatggataccatcctggccaatgctaggttcttcgatggagaactcaccaaggccatcgaggagggagtgaaccacatgtggaccgtgtctgccttccagcagcatccccgcaccgtgtttgtgtgtgacgaggatgccaccttggagctgaaagtgaagactgtcaagtatttcaaaggtttaatgcttgttcataacaagttggtggaccccttgtacagt

SEQ ID NO: 137246 - DNA, 473 bp, Homo sapiens
  Payload ID: 6872
  Gene Symbol: GNPDA1
  Gene Name: glucosamine-6-phosphate deaminase 1
  ENST ID: ENST00000504424
  CDS Start-End: 387-473
gtgtaagtgggtagcagggctggcggggaccttcctcgcgggccggagcgcggagcgctgccccagccctacggcactcggggtcgggaccccggggagccgccctcacacattttccaggagggatcggaggggcgatggggtggtaatgggggtgggggacacgctgtaccccaccgacgaccgcgcgggccaccttcgcctctttccttcacactcccactaaccgcagtgctgggggaacaaaatgtcctccttctggagcgattaccttttcccttttgtgctttgggggaaactgaagacccagaggggttcgcaaagcaaggaggaaacggctcagagagaacttaggtcctttgaccgaggtcctgcaggtggacaagatgaagctcatcatcctggagcactattctcaggcgagcgagtgggcggctaaatacatcaggaaccgcatcatccagtttaaccca

SEQ ID NO: 137247 - DNA, 1930 bp, Homo sapiens
  Payload ID: 6873
  Gene Symbol: GNPDA2
  Gene Name: glucosamine-6-phosphate deaminase 2
  Uniprot ID: Q8TDQ7
  ENST ID: ENST00000295448
  CDS Start-End: 158-988
cgcctttatctgcatccgggtccgtgggattcgcgctccactggtcagctggggtcgctctcgggtggttgggtgttgcttgttcccgctgttccagcatcgaagaaccattgggtctgccggtttgaacttgttctggaagctgtgcgtcaccgtaatgaggcttgtaattcttgataactatgacttggctagtgaatgggcagccaaatacatctgtaatcgcatcattcagttcaaacctggacaggacagatattttacactgggtttaccaacagggagtacacctttaggatgctataaaaaactaatagaatatcataagaatggacacctttcttttaaatatgtgaagacctttaatatggatgaatatgtaggacttccaagaaatcatcctgaaagctaccattcttatatgtggaataatttttttaagcatatcgatatagatcctaataatgcacatatccttgacgggaatgctgcagatttacaagcagaatgtgatgcttttgaaaacaaaataaaagaagctggaggaatagatctttttgttggaggaattggtccagatggtcatatcgctttcaatgagcctggatccagtttagtgtcaaggacaagattaaagactctagcaatggataccatcttggcaaatgccaaatattttgatggagatttatcaaaagtgccaactatggctctaactgttggtgtggggacagtgatggatgctagagaagtaatgatccttataacaggggcacacaaggcatttgccctgtacaaagcaatagaagaaggagtcaatcacatgtggactgtttccgctttccagcagcatccccggactatttttgtatgcgatgaagatgctactttagaattaagagttaaaactgtgaaatactttaaaggtctaatgcatgtgcacaataaacttgtggatccactattcagtatgaaagatggaaactgaaggagactggagcaaaattcagcttgaatgaacagagcactttttactaagtagtagatgaattttcagctatgcaatatgacaaaacatggggaattttgaagattgtcattttttcattcgagtctctatgttaaacattccatattttgaatatttatatcttgtacttgggtttaagagaagtagctggctctcaagattgactggctatttattataaagtactgaagtcacatagccacctataaaacagcatagaaatgtctgcctgtttaaaaagtcattttaaaggtagagtgtccacatcaggcaccatttgtgatatgactccagtggcgtatatttcattttttaatgacaagacactccaaacctttcagataacaaactatcattgcagaccttcacttttggaatgcaatctttatattttctgtgcatcacacacatgcttttctgcacgtggttgccttagtcatcttcctacagcaccatctagacatcaaaaattgtgctatatatcattggtaaaggaaatttgaagagatgacagtgcctaaaagtacagtttacatccttttggaaagtatgtgtaagtgcatgttttttgtgcaccttcttctatagcacttttttacaaatatcttatttttatttaacgacttgggttcatgtccctaatataagtatcttgacaattatgagctttatacctagcaagccacttcaggaaattcttttggagaatattttctgattattgttaaacttaatatacaattagctttattccttataaaatgtctaaaagaataatacgaagtatatataaaaggaattactgtaaactacattgccatagcaatttacataaaagtatattgttttttatctttaactcaaataaagcgtgtaataaataagttatctaaatttcca

SEQ ID NO: 137248 - DNA, 5382 bp, Homo sapiens
  Payload ID: 6873
  Gene Symbol: GNPDA2
  Gene Name: glucosamine-6-phosphate deaminase 2
  Uniprot ID: Q8TDQ7
  ENST ID: ENST00000509756
  CDS Start-End: 108-887
ggggtcgctctcgggtggttgggtgttgcttgttcccgctgttccagcatcgaagaaccattgggtctgccggtttgaacttgttctggaagctgtgcgtcaccgtaatgaggcttgtaattcttgataactatgacttggctagtgaatgggcagccaaatacatctgtaatcgcatcattcagttcaaacctggacaggacagatattttacactgggtttaccaacagggagtacacctttaggatgctataaaaaactaatagaatatcataagaatggacacctttcttttaaatatgtgaagacctttaatatggatgaatatgtaggacttccaagaaatcatcctgaaagctaccattcttatatgtggaataatttttttaagcatatcgatatagatcctaataatgcacatatccttgacgggaatgctgcagatttacaagcagaatgtgatgcttttgaaaacaaaataaaagaagctggaggaatagatctttttgttggaggaattggtccagatggtcatatcgctttcaatgagcctggatccagtttagtgtcaaggacaagattaaagactctagcaatggataccatcttggcaaatgccaaatattttgatggagatttatcaaaagtgccaactatggctctaactgttggtgtggggacagtgatggatgctagagaagtaatgatccttataacaggggcacacaaggcatttgccctgtacaaagcaatagaagaaggagtcaatcacatgtggactgtttccgctttccagcagcatccccggactatttttgtatgcgatgaagatgctactttagaattaagagttaaaactgtgaaatactttaaaggtgagcactgaatttcaaaagccgactgagataatctgttgtgagtgacaattaaaacttactgtgactgtggggttaaatctcacactgtgacctattgaaaagtggcaacacatagctagttctttcaagtaatggaaagttctcacctcagataatagtatcttcaaagtagtacctttttttttttttcatgaagagaatctcttcagtctctattttcagtaaacaatttttcttgaaatccaaggtttaataatttactttcatattgaatatacaagaccaaataacccaaaagaaaatgtatctttgtccattctggatttcttttcatgtttactagtcccacctcaatccctcttcctcactcccctctaaccttaatttagaacctaatcagtggataagagatctcccactatctaatttaatctttacaattttaagccaatttattcccatatattaaagttataatgtctaaatgttaaaatagtatggaataaactctgcaagtaagcaggagtttgattgcccagacttcatgttgattttcctttttcctgtagtctagttcagtaattcagaaaccttactctaccaggctgtgtattacaaaacacatatgcttgatataatggttttaagagattttcaagggacattttgcctatacccaatgtagaacctattctctgatttaagagtcagctccacatattacacatatgtaagcaaactgtacaaacaggtaattttcataaagcacctgtatttacatagctgatattaaaagttacatagttgatcatatagataggtcagtgattcactatgtagtatgtatgctacttttgctacatgattataccttttaatcttttttactctagtaactaggtatttattttaatgcctattggaaaatacactgaataaatcaaagctatattttttggatattattgcttaagacaaggtccaaaaaagctaccatatttgattggctctaatacacgttgatcttgctgatgttggactgtgtcttaaaactggtgtcagatcatagcttactgggtagcatttttttctcagtggtacataaaatggtgtgtcttacaatttatagcatctcatactcagaaataaagtatataatcttaaatttttaattcaatgcaaagaaaaccaactcatatttcatgtatatgtgtgaatatggcaaatatcttgaaggtgttatacaaataactgacatttggcaagcactgaaaatagtctatttttaaacaaaatgctgatcatgctttgtatatagttttgtatttgtacttatgtttcatgagcattttcctgttttactaaatatttggaagcattttaatggatagttaagtacataaatcataatttatttaaacatttccttattaacacttagattatttctagtcatttatatttttaccatttaaattactaatttaccaagccacaaatatatcaaactgaaaaactgaaaaactgaaaaatttctgatttgtgaataaaagagcatttgatggagttttaactctattttcccatgtaacccttcagatttcatcccaaataatagattccttgactacaaggaatcctcactatccacaaattttaattccagttttaaggagattcatttaacatggccattttctagtcctcattaagtcccagataaatccctgtactaatctaattttgtcacaattaggtttttatcagatttttatatcttggtgaatatttaataagatatttaataacagccagtatctctatgaccaggcactattctaaatgcattttacttattgatttacttatcacaaaaatgttatgaaatgggtattcatagtcccatttttaaattaataggcttaacagacagagacgttaagctacttacccaaagtcatacagcacatatttgggcagagctgggtaatagaaatcaaaatcaggctgatctctggagtatgcaggcttttgtctattctattatactgcctcccagaataaactctaggtatgataccatctacatcaaaaccatatttccatctgcttttttcccatatgataatcactgcttccaaaaaaggtatatcgacatatgttagataatttaaaatagaagggtggtagatgtttatatgtatttagttcttttagttcatctaattgtaagctcttctgaaaaattttgaaacagaccattcgtgagaggatagctgcactgcatcaagaggacacagtattttccactttggagctgtctgtatttctgaagaggtttcagggtatcagcctgttaggatacctccttcaatatgaagacagaatttagacattctgggctacatatgggcctcattttacagcattttagtaaagggtagagaaattgaatattcttaaataaacacatttcaaatgtagtttgtatacttttcatacctccattgagttactagtatatcaaaatactggaggatgtaaattcctataattgtcatccataactcttcaaattccattcacatcactaccctttcttctgtcatcactaaaaagtgctgaccagaatcttaaagggttttatttagtgcctagataagatctaggttaactagatccaaaacaataaaaattgtcagtaaatgcaagtttatttcaatatatacctatataacggtatataccttttgaaagatacaagttaatcacaagacaacaagtttagtacgtggggatttgttttattcattctcgcttttcatttttgctttttaaatagaacagctttgatttttagtatatgacatcatcatcatgaatttttttctcttactttgtatttaggctccacctcagtagtttgacaaaggtagaatgagttcattttgagtcaaaaccataaaagttactttgtatagacattggttagaatctgtgacatttaacctttcttctggtaacgtttcaggaagtctggtgcatttttatcagaagaattatttctgtttgacttaagtagcaattatttatttatataaaattcgtatgtagaaagttgtcagtttttacctaaagtcacagtaaatatttgacttaatatctaaaaagcaattaatagaattttcaaaataattatttctagtttggaagcagtcctatttgatgtataaaagatatatccaatgtaaagaaaaaaattttataaaggagttgaatttttaatatttactgatattttaatttgcatgtattttaaagctctgtgtattctttccgtaatcaaagttgttagcaaatgacagatgaatactatttaagtagaaaaacgatcctctacaaagtgatactctggaaaatgttgcatcttctaaatcatacagctgatattacccttatctttgttgtcccctctcctactggacatgaagtttcaggtgaccttcaagtaggctgttgagcagttgcaggactagtgaatggaatgcttcccccttccctcctttagagtcccattcttatggttagaatttctcctactacacaaacacttcccagtactctttgcttgtcccttaaaagtgggtctttctcaaagctgggattttagagtcctttttgcagcctttctgacaaggaacatctgtttactaacaagcaacctatctctccaatccagtaatcccatttcctgcaaaaccgcattaagtgcctttccccaccctcccatgttcttaatacctggaaaacttaactcatttctttaccctccaaaatataaaatctctggttcattaactgggtcagtctttttagaacttttttctccccaaagaaatatagtactgaggcattaaaacaggagtaactggaagatcagctatttcccaagcagcttccatagctaagagcagtctgcaagtatatgtaccaattacaaaatgaaagttataatctaccggatttaaaatcgtaatttctattctgaattaaatgatttaatacaggttgttttctgtcttgttttagtaaccctccctcagtgtagaatttgtaatcaacctttgtcataaatacacatgccaaactattggaaagtaatttaccagacgaatggatagggtaatgtattaagagtgagacagcagttctgagcccctggctggagtctagtagaggaactgccagaggatcaatatcaacatagacttttagatataattaaaacctattatctaagtcagtattcaaatttgtcatgcttaatctctttgaagacaagaaatgctcttctggttactcccaaagtacctgtacacattctagatctgcactgttacataattataaattggtatttgctaggtagataaaacttaagacattctgaaacatttctatttgtactttttcaataaacttgactatatcaagatgggaact

SEQ ID NO: 137249 - DNA, 2074 bp, Homo sapiens
  Payload ID: 6873
  Gene Symbol: GNPDA2
  Gene Name: glucosamine-6-phosphate deaminase 2
  Uniprot ID: Q8TDQ7
  ENST ID: ENST00000507917
  CDS Start-End: 133-861
gggattcgcgctccactggtcagctggggtcgctctcgggtggttgggtgttgcttgttcccgctgttccagcatcgaagaaccattgggtctgccggtttgaacttgttctggaagctgtgcgtcaccgtaatgaggcttgtaattcttgataactatgacttggctagtgaatgggcagccaaatacatctgtaatcgcatcattcagttcaaacctggacaggacagatattttacactgggtttaccaacaggacttccaagaaatcatcctgaaagctaccattcttatatgtggaataatttttttaagcatatcgatatagatcctaataatgcacatatccttgacgggaatgctgcagatttacaagcagaatgtgatgcttttgaaaacaaaataaaagaagctggaggaatagatctttttgttggaggaattggtccagatggtcatatcgctttcaatgagcctggatccagtttagtgtcaaggacaagattaaagactctagcaatggataccatcttggcaaatgccaaatattttgatggagatttatcaaaagtgccaactatggctctaactgttggtgtggggacagtgatggatgctagagaagtaatgatccttataacaggggcacacaaggcatttgccctgtacaaagcaatagaagaaggagtcaatcacatgtggactgtttccgctttccagcagcatccccggactatttttgtatgcgatgaagatgctactttagaattaagagttaaaactgtgaaatactttaaaggtctaatgcatgtgcacaataaacttgtggatccactattcagtatgaaagatggaaactgaaggagactggagcaaaattcagcttgaatgaacagagcactttttactaagtagtagatgaattttcagctatgcaatatgacaaaacatggggaattttgaagattgtcattttttcattcgagtctctatgttaaacattccatattttgaatatttatatcttgtacttgggtttaagagaagtagctggctctcaagattgactggctatttattataaagtactgaagtcacatagccacctataaaacagcatagaaatgtctgcctgtttaaaaagtcattttaaaggtagagtgtccacatcaggcaccatttgtgatatgactccagtggcgtatatttcattttttaatgacaagacactccaaacctttcagataacaaactatcattgcagaccttcacttttggaatgcaatctttatattttctgtgcatcacacacatgcttttctgcacgtggttgccttagtcatcttcctacagcaccatctagacatcaaaaattgtgctatatatcattggtaaaggaaatttgaagagatgacagtgcctaaaagtacagtttacatccttttggaaagtatgtgtaagtgcatgttttttgtgcaccttcttctatagcacttttttacaaatatcttatttttatttaacgacttgggttcatgtccctaatataagtatcttgacaattatgagctttatacctagcaagccacttcaggaaattcttttggagaatattttctgattattgttaaacttaatatacaattagctttattccttataaaatgtctaaaagaataatacgaagtatatataaaaggaattactgtaaactacattgccatagcaatttacataaaagtatattgttttttatctttaactcaaataaagcgtgtaataaataagttatctaaatttccagaagtgaacctgaagaatacatgcattcgactcccaacaattatagtacatgtgaacctgcattcattttgggtttgttaccatcatgcattaggagagttaggttaaaagatgtctttgcctctgtggggagcaaaaaaatgctccttttgcttattttgcatttcataagcccacctggtagaagaagccttacttatctgcttgtctatgtgattaaaatgtagtttcttaaaatattaaaatagcaaataaattaatgaaataaaat

SEQ ID NO: 137250 - DNA, 1050 bp, Homo sapiens
  Payload ID: 6873
  Gene Symbol: GNPDA2
  Gene Name: glucosamine-6-phosphate deaminase 2
  Uniprot ID: Q8TDQ7
  ENST ID: ENST00000507534
  CDS Start-End: 137-757
gtgttgcttgttcccgctgttccagcatcgaagaaccattgggtctgccgggagtacacctttaggatgctataaaaaactaatagaatatcataagaatggacacctttcttttaaatatgtgaagacctttaatatggatgaatatgtaggacttccaagaaatcatcctgaaagctaccattcttatatgtggaataatttttttaagcatatcgatatagatcctaataatgcacatatccttgacgggaatgctgcagatttacaagcagaatgtgatgcttttgaaaacaaaataaaagaagctggaggaatagatctttttgttggaggaattggtccagatggtcatatcgctttcaatgagcctggatccagtttagtgtcaaggacaagattaaagactctagcaatggataccatcttggcaaatgccaaatattttgatggagatttatcaaaagtgccaactatggctctaactgttggtgtggggacagtgatggatgctagagaagtaatgatccttataacaggggcacacaaggcatttgccctgtacaaagcaatagaagaaggagtcaatcacatgtggactgtttccgctttccagcagcatccccggactatttttgtatgcgatgaagatgctactttagaattaagagttaaaactgtgaaatactttaaaggtctaatgcatgtgcacaataaacttgtggatccactattcagtatgaaagatggaaactgaaggagactggagcaaaattcagcttgaatgaacagagcactttttactaagtagtagatgaattttcagctatgcaatatgacaaaacatggggaattttgaagattgtcattttttcattcgagtctctatgttaaacattccatattttgaatatttatatcttgtacttgggtttaagagaagtagctggctctcaagattgactggctatttattataaagtactgaagtcacatagccacctataaaacagcatagaaatgtctgcctgtttaaaaagtcattttaaa

SEQ ID NO: 137251 - DNA, 484 bp, Homo sapiens
  Payload ID: 6873
  Gene Symbol: GNPDA2
  Gene Name: glucosamine-6-phosphate deaminase 2
  ENST ID: ENST00000609092
  CDS Start-End: 1-353
atggagatttatcaaaagtgccaactatggctctaactgttggtgtggggacagtgatggatgctagagaagtaatgatccttataacaggggcacacaaggcatttgccctgtacaaagcaatagaagaaggagtcaatcacatgtggactgtttccgctttccagcagcatccccggactatttttgtatgcgatgaagatgctactttagaattaagagttaaaactgtgaaatactttaaagaaatggccctcagctaccacaagttaattcaggagaactaccttctcaattctgtgcaaggctgtgcttcgaaggcaagaaagaagtttgctacagtttgggcttgaattccctgaaaatatcaagatacaagatactgagatgaccattctattatatatcacaaaacttgtaatttaagaccattctatacatcttcatcaagagattttgcgttatgctaataataaaattaaac

SEQ ID NO: 137252 - DNA, 570 bp, Homo sapiens
  Payload ID: 6873
  Gene Symbol: GNPDA2
  Gene Name: glucosamine-6-phosphate deaminase 2
  ENST ID: ENST00000608855
  CDS Start-End: 1-192
gcaatagaagaaggagtcaatcacatgtggactgtttccgctttccagcagcatccccggactatttttgtatgcgatgaagatgctactttagaattaagagttaaaactgtgaaatactttaaagaaatggccctcagctaccacaagttaattcaggagaactaccttctcaattctgtgcaagggtgagtttcagttgcacttctgttatatacaattcaaagagataaatcccaccaatatatttaataaatagctggtgatccctcatataatgaatagtacaactgacatttaaacattaattgtacttttagaaagtgaaatagcaacactgttgtctcattgtaattaccttatttataactggaattaccgatagctgtgcttcgaaggcaagaaagaagtttgctacagtttgggcttgaattccctgaaaatatcaagatacaagatactgagatgaccattctattatatatcacaaaacttgtaatttaagaccattctatacatcttcatcaagagattttgcgttatgctaataataaaattaaacaaaatgcc

SEQ ID NO: 137253 - DNA, 3860 bp, Homo sapiens
  Payload ID: 6874
  Gene Symbol: GNPNAT1
  Gene Name: glucosamine-phosphate N-acetyltransferase 1
  Uniprot ID: Q96EK6
  ENST ID: ENST00000216410
  CDS Start-End: 189-743
gaggtggaggcgttggcgctgccacgtctgggccgcggttcccaactgtggcgcgggcggtggaggaggaggtggggctggcgctgaagccggatccggatccggtgctgtgcacactggtgggggagagtccgacgcgcctggctaggagcgccgaccgcagggcctctacggaccttactagaaaaatgaaacctgatgaaactcctatgtttgacccaagtctactcaaagaagtggactggagtcagaatacagctacattttctccagccatttccccaacacatcctggagaaggcttggttttgaggcctctttgtactgctgacttaaatagaggtttttttaaggtattgggtcagctaacagagactggagttgtcagccctgaacaatttatgaaatcttttgagcatatgaagaaatctggggattattatgttacagttgtagaagatgtgactctaggacagattgttgctacggcaactctgattatagaacataaattcatccattcctgtgctaagagaggaagagtagaagatgttgttgttagtgatgaatgcagaggaaagcagcttggcaaattgttattatcaacccttactttgctaagcaagaaactgaactgttacaagattacccttgaatgtctaccacaaaatgttggtttctataaaaagtttggatatactgtatctgaagaaaactacatgtgtcggaggtttctaaagtaaaaatcttgtaagaaaattgtcaaaggggctaatgctacaaggctacactcttcctagagttgaaatattttgttgctgcagccgagtgacctccataaatactggactgaaaaaacattgtaatactacaagtataatgacatttagaagattactttgggctggtgggacatgctgtgaatttagattacaaatgaatattataaaggggatgatttttaaccaaaggaatatatttttaacttgaatcttttcttgcattgtatttttctaaaagtttggcttcctttcttggtagtcaagagtatgggtaataaggagttatatgtctgctatctgtgttgctcatttaaaaaaagtatacattgaataaggctgtttatcacatgcataaaattaaatatttttgtttcaaagaaacatctcaatacacttaggggtgtattgtttcccacatattaagtcagggtggataaattagttattataactaaacatagtatagtccaacattcgttgatcccaatacaggcaaacaacctggtcaaccttttgaagtagaagaaatgaaaattacttgacaagattaaaagtaaaacaatttaaatgttttactgaaagtttatatagtatagtctatgtagataaaaagtaccacttgtcttttctgtgaattatgactattcatttgttaaaaatacctaagagcaattatagtgggacatctaaggtcctctgtaaacagtgaattagcaaacctcagcctatgtgtttctaccctgatttttttcttttcatgggtatctgaagcctctaagttttttcaaaaatggagtatcacaaaattgagtgaaacacaatacttaatgtattgtactagattgccaaattcataaaatgttaatggaagctttttgatgtgattataatggcactattctggtcattatcctattttgattttatttaattttttaaagttgaagaattaaatattttaatggttctaatcttttgcattccatgttgcattaaacctgtttatatgagtagtcttctgttagaatcacatctgtgcttttcttgagtctgctgttgaactattagattaagtcataattcataaaattttagtttaatgtgctctttgtaaaatgaaattgtaaagaaaataccagtgtttctcatcccattgactcacaccacgtcatctggattttggatttccctccatgcagccagctatagttggctttccaaaacaacagaaatccttcaccaatagagtgcactacttacctgcttatagcctatacagacgaactgatctgtccttcgtgaaacgcaacaaagctagttctgtcttttcagaagtcctacaaccttgacaaagagtagttttatcaggtaaatcctggtaattaaaaacgcatgtttttaaaaattagcctggtaaggccgggtgcagtggctcacgcctgtaatcccagcactttgggaggctgaggtgggcagatcacaaggtcaggagtttgagaccagcctgaccaaaatggtgaaaccctgtctctactaaaaaaaagaaaaattagccagacgtggtggcatgcgcctgtaatcccagctactcaggaagctgaggcgagagaatcgcttgaacccgggaggcaaaggttgcagtgagctgagatcacaccactgcactccagcctggcgacagagagagactccatctcaaaacaaaacaaaaaaaattagcctacttaaaggcacaactaaatgctttattacctttcttaccactgaacaatttgaggtaaaatcattcacaaggttggcacttcagtaaatccctttaaatagtgttcctaagatatctcttaaatcctcccataggaaatagaattacaggtaaggtacaccatacaaaaattgtgtcattgaggacaatggtgatctgtaattttagttgagtatgtttatgatttttgaagccatatggtgagtaaatgtaaatatgaaaaaagtgctacataaaacacttcttaaactttttttttttaaaaactgctccttgtggagcaggactaccccataggcagtgtacccacaatagatagccttttgttgttgttgttgttgagacaaggtctcgctgttgcccaggctagagcgcaggggcacaatcaccacacactgccgcttcaatctcctgggctcaaatgatccttccacctcagcctcccatgtggctgggactataggtgcatgccaccacacccagctaattaaaaaaattttttgtgtggagtctatgttgcccaggctggtctcttaactcctaggctcaagtgatcctcccacctcagcctcccaaagtgcttggatgacaggtgcgagccactgcacctggcccacattttttaaagagacactgtcccactccatcacccaggctggagtccagtggtgtgatcatagctcactgcatcctccagttcctgggttcaagccatccctcctgcctcagcctccccagtagctggaactacaggtgtgtgccatcacacctggctttacatttttctgtggggtcttactatattgcccaagccggtctcaaactcctgagctcaagtgatcctctgcctcagcctccagagtatctgggattacatatgtcggctaccgtgtctggccgttcacatctttggccactatttgcttgtgaaaaggtataatgaggtggtacttatcatttttactgtgtctcatgttttgtatatttttgtttcatcaactaagatgcactgtaacatctctgaaatctggatatattatcaatggtttatcatagttttgttagcaatacactgtcttttagtggtgcctaaaataatggtatagttgtgaggtgatcttagatttgatgaagcacagtatgcaggtaggcctaatgggggaagatggtaatataaaagcaagaagtattttttttttgtaatgactgaaagctgttctgtggatgacctaccctttcctttaaacacgattctctcacttccaactccaaacttgctcaactaatccttaaaaataaacttgagctggaatttg

SEQ ID NO: 137254 - DNA, 785 bp, Homo sapiens
  Payload ID: 6874
  Gene Symbol: GNPNAT1
  Gene Name: glucosamine-phosphate N-acetyltransferase 1
  ENST ID: ENST00000557604
  CDS Start-End: 295-785
gggcgggtggcgccttggcctccgcctccgctcgcctgcgcgcggccctgcgtgagggggcagaggcgaggtggaggcgttggcgctgccacgtctgggccgcggttcccaactgtggcgcgggcggtggaggaggaggtggggctggcgctgaagccggatccggatccggtgctgtgcacactggtgggggagagtccgacgcgcctggctaggagcgccgaccgcagggcctctacggttcctgtaaccagcacagtgcctgattcatgaattaaagaccttactagaaaaatgaaacctgatgaaactcctatgtttgacccaagtctactcaaagaagtggactggagtcagaatacagctacattttctccagccatttccccaacacatcctggagaaggcttggttttgaggcctctttgtactgctgacttaaatagaggtttttttaaggtattgggtcagctaacagagactggagttgtcagccctgaacaatttatgaaatcttttgagcatatgaagaaatctggggattattatgttacagttgtagaagatgtgactctaggacagattgttgctacggcaactctgattatagaacataaattcatccattcctgtgctaagagaggaagagtagaagatgttgttgttagtgatgaatgcagaggaaagcagcttggcaaattgttattatcaacccttactttgctaagcaagaaactgaactgttacaagattacccttgaatgtctaccacaaaatgttggttt

SEQ ID NO: 137255 - DNA, 2238 bp, Homo sapiens
  Payload ID: 6874
  Gene Symbol: GNPNAT1
  Gene Name: glucosamine-phosphate N-acetyltransferase 1
  ENST ID: ENST00000554230
  CDS Start-End: 143-484
ggatccggatccggtgctgtgcacactggtgggggagagtccgacgcgcctggctaggagcgccgaccgcagggcctctacgggtttttttaaggtattgggtcagctaacagagactggagttgtcagccctgaacaatttatgaaatcttttgagcatatgaagaaatctggggattattatgttacagttgtagaagatgtgactctaggacagattgttgctacggcaactctgattatagaacataaattcatccattcctgtgctaagagaggaagagtagaagatgttgttgttagtgatgaatgcagaggaaagcagcttggcaaattgttattatcaacccttactttgctaagcaagaaactgaactgttacaagattacccttgaatgtctaccacaaaatgttggtttctataaaaagtttggatatactgtatctgaagaaaactacatgtgtcggaggtttctaaagtaaaaatcttgtaagaaaattgtcaaaggggctaatgctacaaggctacactcttcctagagttgaaatattttgttgctgcagccgagtgacctccataaatactggactgaaaaaacattgtaatactacaagtataatgacatttagaagattactttgggctggtgggacatgctgtgaatttagattacaaatgaatattataaaggggatgatttttaaccaaaggaatatatttttaacttgaatcttttcttgcattgtatttttctaaaagtttggcttcctttcttggtagtcaagagtatgggtaataaggagttatatgtctgctatctgtgttgctcatttaaaaaaagtatacattgaataaggctgtttatcacatgcataaaattaaatatttttgtttcaaagaaacatctcaatacacttaggggtgtattgtttcccacatattaagtcagggtggataaattagttattataactaaacatagtatagtccaacattcgttgatcccaatacaggcaaacaacctggtcaaccttttgaagtagaagaaatgaaaattacttgacaagattaaaagtaaaacaatttaaatgttttactgaaagtttatatagtatagtctatgtagataaaaagtaccacttgtcttttctgtgaattatgactattcatttgttaaaaatacctaagagcaattatagtgggacatctaaggtcctctgtaaacagtgaattagcaaacctcagcctatgtgtttctaccctgatttttttcttttcatgggtatctgaagcctctaagttttttcaaaaatggagtatcacaaaattgagtgaaacacaatacttaatgtattgtactagattgccaaattcataaaatgttaatggaagctttttgatgtgattataatggcactattctggtcattatcctattttgattttatttaattttttaaagttgaagaattaaatattttaatggttctaatcttttgcattccatgttgcattaaacctgtttatatgagtagtcttctgttagaatcacatctgtgcttttcttgagtctgctgttgaactattagattaagtcataattcataaaattttagtttaatgtgctctttgtaaaatgaaattgtaaagaaaataccagtgtttctcatcccattgactcacaccacgtcatctggattttggatttccctccatgcagccagctatagttggctttccaaaacaacagaaatccttcaccaatagagtgcactacttacctgcttatagcctatacagacgaactgatctgtccttcgtgaaacgcaacaaagctagttctgtcttttcagaagtcctacaaccttgacaaagagtagttttatcaggtaaatcctggtaattaaaaacgcatgtttttaaaaattagcctggtaaggccgggtgcagtggctcacgcctgtaatcccagcactttgggaggctgaggtgggcagatcacaaggtcaggagtttgagaccagcctgaccaaaatggtgaaaccctgtctctactaaaaaaaagaaaaattagccagacgtggtggcatgcgcctgtaatcccagctactcaggaagctgaggcgagagaatcgcttgaacccgggaggcaaaggttgcagtgagctgagatcacaccactgcactccagcctggcgacagagagagactccatctcaaaacaaaacaaaaaaaa

SEQ ID NO: 137256 - DNA, 5518 bp, Homo sapiens
  Payload ID: 6875
  Gene Symbol: GCNT1
  Gene Name: glucosaminyl (N-acetyl) transferase 1, core 2
  Uniprot ID: Q02742
  ENST ID: ENST00000376730
  CDS Start-End: 484-1770
gcgcggggcgggagcttggtggagcaggagcggctgggcatcctcctgagactccggggtcagacgcccactccagcgctttctgcgcagcacaggcaccctcgcctgtcacgcctccctctcctcttcccgtctcccagcgtggatgagggcgcctgcagatcccggctagggcacggaccgcctaggccgagatttctttaaagactcgtgcagcacatcattatcgctggatgcccggacatgtaatacacctgacagcatgtgaagtgctcagaatggggcaggatgtcacctggaatcagcactaagtgattcagactttccttacttttaaatgtgctgctcttcatttcaagatgccgttgcagctctgataaatgcaaactgacaaccttcaaggccacgacggagggaaaatcattggtgcttggagcatagaagactgcccttcacaaaggaaatccctgattattgtttgaaatgctgaggacgttgctgcgaaggagacttttttcttatcccaccaaatactactttatggttcttgttttatccctaatcaccttctccgttttaaggattcatcaaaagcctgaatttgtaagtgtcagacacttggagcttgctggggagaatcctagtagtgatattaattgcaccaaagttttacagggtgatgtaaatgaaatccaaaaggtaaagcttgagatcctaacagtgaaatttaaaaagcgccctcggtggacacctgacgactatataaacatgaccagtgactgttcttctttcatcaagagacgcaaatatattgtagaaccccttagtaaagaagaggcggagtttccaatagcatattctatagtggttcatcacaagattgaaatgcttgacaggctgctgagggccatctatatgcctcagaatttctattgcattcatgtggacacaaaatccgaggattcctatttagctgcagtgatgggcatcgcttcctgttttagtaatgtctttgtggccagccgattggagagtgtggtttatgcatcgtggagccgggttcaggctgacctcaactgcatgaaggatctctatgcaatgagtgcaaactggaagtacttgataaatctttgtggtatggattttcccattaaaaccaacctagaaattgtcaggaagctcaagttgttaatgggagaaaacaacctggaaacggagaggatgccatcccataaagaagaaaggtggaagaagcggtatgaggtcgttaatggaaagctgacaaacacagggactgtcaaaatgcttcctccactcgaaacacctctcttttctggcagtgcctacttcgtggtcagtagggagtatgtggggtatgtactacagaatgaaaaaatccaaaagttgatggagtgggcacaagacacatacagccctgatgagtatctctgggccaccatccaaaggattcctgaagtcccgggctcactccctgccagccataagtatgatctgtctgacatgcaagcagttgccaggtttgtcaagtggcagtactttgagggtgatgtttccaagggtgctccctacccgccctgcgatggagtccatgtgcgctcagtgtgcattttcggagctggtgacttgaactggatgctgcgcaaacaccacttgtttgccaataagtttgacgtggatgttgacctctttgccatccagtgtttggatgagcatttgagacacaaagctttggagacattaaaacactgaccattacgggcaattttatgaacaagaagaaggatacacaaaacgtacccttatctgtttccccttccttgtcagcatcgggaagatggtatgaagtcctctttggggcagggactctagtagatcttcttgtcagagaagctgcatggtttctgcagagcacagttagctagaaaggtgatagcattaaatgttcatctagagttaatagtgggaggagtaaaggtagccttgaggccagagcaggtagcaaggcattgtggaaagaggggaccagggtggctggggaagaggccgatgcataaagtcagcctgttcaaagtgctcagggacttagcaaaatgagaagatgtgacctgtgccaaaactattttgagaattttaaatgtgaccatttttctggtatgaataaacttacagcaacaaataatcaaagatacaattaatctgatattatatttgttgaaatagaaatttgattgtactataaatgatttttgtaaataatttatattctgctctaatactgtactgtgtagtgtgtctccgtatgtcatctcagggagcttaaaatgggcttgatttaacattgtttttgtgttatttttgcttgaaacaacgcacacattttcaacaaccaaaaaatgacaatttctagtttagttaatttctacaaatcatcttatgttattagcaaggttaagacatcttttttaaaaaaattatagcttctaccaagagaaacactcaatttttctagagatttgcctctatcttcctttcctcagtcttcccagactgctatcaagctgtgtaaaaatttactttcactggaccctaaattattgtctctgctatctgactgccagtaattagtgcagaaaactaagacaggatgatacaggtttgaggggctggggagtgggaggggggagaaaaggaatgtatttaaacaatttccgatgcccatgatgagtttaaaaaccagcattgacaccatccccaaaattaaggctgtcgcttattgaatccacttgtgtccaacctcccaggattgttttatcctaatgtcacctgtatattcatttgaaaggacttggccctgttcttgggtcttcccgttacctgccccctgggtggtaagtttcctcctttctcaaccttccacgaggaggaaagaagtgtgcagtcattccacatggcctgttggaaggcctggggagggaactttgggtttgggacagatttttttttttgtttttggtatcattcacagcatacgatttttactctctccatcttcaccataagacagataatttggggttgctataatgctgtcacacatctcaaagtacattcaaatcttaaaaagaaattctcgtacttttgccatgttgatactgttcagcaaacaagctaccaggaactgtgaggctttgtcatttagcattagactttaaacaagaattaaaatcatgtgctgtatttttaaaatctagccaaattaaatagtacatgagaaattcagagtattagacagttttaaggcattcaactgagaaaactttatttgtcaaagtcagaaaacattttcatcttattgagagatatgtttttaaacttttatcatcatttgtaaatgtggaagttggtggattgctgtgtttttgcatgattagcatgggagtctgttggagcaagaggaacatgcttgttttgaaaactcgagatgatgagggtggtacatgcagtgtgttctctctttattggcttctaaaccagttttgtcctttaatgcatgtcaaatatttctcccatgcttctcttagcagaaaagtttttacctataagacagggcaccttttaactctaaaactagtgatactcagtgacatagactttgtcttataaacattttttcattttttattttgaaaaattgcaaatctacagcaaaagtaaaacagtagagtgaacaccatgtaaccctcacctggtgttaacattgtaccctatttgctttaagttgtatgtatttctgaacttggcaaaattggaaattaaaatttttaaaaattacaaatatacaaagttatttatcttagcacatttattatgtgtgactgcatctgatttatatttaaattggcaggttttgagggatttttttcttcatcataaatgtaaacataggattttagagtctatttccccaagcgccacattataactgtaaacttaccatcttctatgtagctgtgatatctcatctttctaaaatggaacttgttaaaaagtgttcaaacactatccctaatgcctgcggcagaatttatatacgatccattcattggggctcaaagtatcttttagacttttaaggacaatttacagcaaatgaaatttatgatgctgtgacaagaaatttaaagaatcaaaacgatggtttgaaaaggaaacctatgatacatgcaggagaagcaaaacccaagtgattggtgagaaatatagaaattatttaaattactttatagtaattattaaacactaatttttgtactgtcattgaaggtgttttatagagaaatctgagaaatcacattcacaaattagaagtcaaacatggccaggcacagtggctcacacctgtaatcttcaggatttcaagaccagcctagccaacatgacgaaaccccatctctactgaaaatagaaaaaaaaaattagccaggcttgcacctgtaatcccagttacctgggaggctgaggcaggagaatctcttgagcccaggaggcggaggttgcagtgagctgagatgccaccaccacaccagcctgggtgacagagtgaaactcgtatctccaaacaaacaaacaaaaagtccttaaacatatgtgaacaaaaattttgtgatggaaggattctagttaatgagtattgcatcaagatttacatctttcttactaaggaaaagagttaataaaaattgttctttattttacaggcagttactgaggctcttcccagatctcagtaaacagccactcagccttgaaaatggagtgttgttgtttctaaacatatatttatgtcatttattaagtacagttcacttaaataacataagtagattttctcttgtagtgatttgggtaggaagaggccatgtttcagttcgttttctctgtagggtcgattgaattggaccttttcagttgttcagaaaaataaaaataatttctcatattaaatacagacgctcctcaacttatgatgtgggtaggtcccagtaaacccattataatttgaaaatatcacattgaaaatgcatttaatatctcttacctgaaatcataacttagccaagcctaccttaaatgttctcagaacatttagcctgcagttgggcaaaaccatttaacacaaagcctattttataatgaagtgttgaatagctcatgttatttactgaatactgttgtgaaagtgaaaaacaatgattgtatgggtactcaaagtataatttctactgaatgcatatcacttgtgcactgttgtaaagctgaaaaaccgttaagcctctacgatttttaagtaagttggggaccatcagtttaaaataaatgcaatactatttcatgataaacatggtcactgtaagttttactcttttgaatgagggtgcgacagaatgcagttagaatcagttcatatcaccattaaaatcatccattcagaaaccaa

SEQ ID NO: 137257 - DNA, 5476 bp, Homo sapiens
  Payload ID: 6875
  Gene Symbol: GCNT1
  Gene Name: glucosaminyl (N-acetyl) transferase 1, core 2
  Uniprot ID: Q02742
  ENST ID: ENST00000444201
  CDS Start-End: 444-1730
gggcctctgggggcggccccggggcgggccacgctggtgtgagggctgcaggcgcagctccggagcgcctagagcgcggcgcggggcgggagcttggtggagcaggagcggctgggcatcctcctgagactccggggtcagacgcccactccagatttctttaaagactcgtgcagcacatcattatcgctggatgcccggacatgtaatacacctgacagcatgtgaagtgctcagaatggggcaggatgtcacctggaatcagcactaagtgattcagactttccttacttttaaatgtgctgctcttcatttcaagatgccgttgcagctctgataaatgcaaactgacaaccttcaaggccacgacggagggaaaatcattggtgcttggagcatagaagactgcccttcacaaaggaaatccctgattattgtttgaaatgctgaggacgttgctgcgaaggagacttttttcttatcccaccaaatactactttatggttcttgttttatccctaatcaccttctccgttttaaggattcatcaaaagcctgaatttgtaagtgtcagacacttggagcttgctggggagaatcctagtagtgatattaattgcaccaaagttttacagggtgatgtaaatgaaatccaaaaggtaaagcttgagatcctaacagtgaaatttaaaaagcgccctcggtggacacctgacgactatataaacatgaccagtgactgttcttctttcatcaagagacgcaaatatattgtagaaccccttagtaaagaagaggcggagtttccaatagcatattctatagtggttcatcacaagattgaaatgcttgacaggctgctgagggccatctatatgcctcagaatttctattgcattcatgtggacacaaaatccgaggattcctatttagctgcagtgatgggcatcgcttcctgttttagtaatgtctttgtggccagccgattggagagtgtggtttatgcatcgtggagccgggttcaggctgacctcaactgcatgaaggatctctatgcaatgagtgcaaactggaagtacttgataaatctttgtggtatggattttcccattaaaaccaacctagaaattgtcaggaagctcaagttgttaatgggagaaaacaacctggaaacggagaggatgccatcccataaagaagaaaggtggaagaagcggtatgaggtcgttaatggaaagctgacaaacacagggactgtcaaaatgcttcctccactcgaaacacctctcttttctggcagtgcctacttcgtggtcagtagggagtatgtggggtatgtactacagaatgaaaaaatccaaaagttgatggagtgggcacaagacacatacagccctgatgagtatctctgggccaccatccaaaggattcctgaagtcccgggctcactccctgccagccataagtatgatctgtctgacatgcaagcagttgccaggtttgtcaagtggcagtactttgagggtgatgtttccaagggtgctccctacccgccctgcgatggagtccatgtgcgctcagtgtgcattttcggagctggtgacttgaactggatgctgcgcaaacaccacttgtttgccaataagtttgacgtggatgttgacctctttgccatccagtgtttggatgagcatttgagacacaaagctttggagacattaaaacactgaccattacgggcaattttatgaacaagaagaaggatacacaaaacgtacccttatctgtttccccttccttgtcagcatcgggaagatggtatgaagtcctctttggggcagggactctagtagatcttcttgtcagagaagctgcatggtttctgcagagcacagttagctagaaaggtgatagcattaaatgttcatctagagttaatagtgggaggagtaaaggtagccttgaggccagagcaggtagcaaggcattgtggaaagaggggaccagggtggctggggaagaggccgatgcataaagtcagcctgttcaaagtgctcagggacttagcaaaatgagaagatgtgacctgtgccaaaactattttgagaattttaaatgtgaccatttttctggtatgaataaacttacagcaacaaataatcaaagatacaattaatctgatattatatttgttgaaatagaaatttgattgtactataaatgatttttgtaaataatttatattctgctctaatactgtactgtgtagtgtgtctccgtatgtcatctcagggagcttaaaatgggcttgatttaacattgtttttgtgttatttttgcttgaaacaacgcacacattttcaacaaccaaaaaatgacaatttctagtttagttaatttctacaaatcatcttatgttattagcaaggttaagacatcttttttaaaaaaattatagcttctaccaagagaaacactcaatttttctagagatttgcctctatcttcctttcctcagtcttcccagactgctatcaagctgtgtaaaaatttactttcactggaccctaaattattgtctctgctatctgactgccagtaattagtgcagaaaactaagacaggatgatacaggtttgaggggctggggagtgggaggggggagaaaaggaatgtatttaaacaatttccgatgcccatgatgagtttaaaaaccagcattgacaccatccccaaaattaaggctgtcgcttattgaatccacttgtgtccaacctcccaggattgttttatcctaatgtcacctgtatattcatttgaaaggacttggccctgttcttgggtcttcccgttacctgccccctgggtggtaagtttcctcctttctcaaccttccacgaggaggaaagaagtgtgcagtcattccacatggcctgttggaaggcctggggagggaactttgggtttgggacagatttttttttttgtttttggtatcattcacagcatacgatttttactctctccatcttcaccataagacagataatttggggttgctataatgctgtcacacatctcaaagtacattcaaatcttaaaaagaaattctcgtacttttgccatgttgatactgttcagcaaacaagctaccaggaactgtgaggctttgtcatttagcattagactttaaacaagaattaaaatcatgtgctgtatttttaaaatctagccaaattaaatagtacatgagaaattcagagtattagacagttttaaggcattcaactgagaaaactttatttgtcaaagtcagaaaacattttcatcttattgagagatatgtttttaaacttttatcatcatttgtaaatgtggaagttggtggattgctgtgtttttgcatgattagcatgggagtctgttggagcaagaggaacatgcttgttttgaaaactcgagatgatgagggtggtacatgcagtgtgttctctctttattggcttctaaaccagttttgtcctttaatgcatgtcaaatatttctcccatgcttctcttagcagaaaagtttttacctataagacagggcaccttttaactctaaaactagtgatactcagtgacatagactttgtcttataaacattttttcattttttattttgaaaaattgcaaatctacagcaaaagtaaaacagtagagtgaacaccatgtaaccctcacctggtgttaacattgtaccctatttgctttaagttgtatgtatttctgaacttggcaaaattggaaattaaaatttttaaaaattacaaatatacaaagttatttatcttagcacatttattatgtgtgactgcatctgatttatatttaaattggcaggttttgagggatttttttcttcatcataaatgtaaacataggattttagagtctatttccccaagcgccacattataactgtaaacttaccatcttctatgtagctgtgatatctcatctttctaaaatggaacttgttaaaaagtgttcaaacactatccctaatgcctgcggcagaatttatatacgatccattcattggggctcaaagtatcttttagacttttaaggacaatttacagcaaatgaaatttatgatgctgtgacaagaaatttaaagaatcaaaacgatggtttgaaaaggaaacctatgatacatgcaggagaagcaaaacccaagtgattggtgagaaatatagaaattatttaaattactttatagtaattattaaacactaatttttgtactgtcattgaaggtgttttatagagaaatctgagaaatcacattcacaaattagaagtcaaacatggccaggcacagtggctcacacctgtaatcttcaggatttcaagaccagcctagccaacatgacgaaaccccatctctactgaaaatagaaaaaaaaaattagccaggcttgcacctgtaatcccagttacctgggaggctgaggcaggagaatctcttgagcccaggaggcggaggttgcagtgagctgagatgccaccaccacaccagcctgggtgacagagtgaaactcgtatctccaaacaaacaaacaaaaagtccttaaacatatgtgaacaaaaattttgtgatggaaggattctagttaatgagtattgcatcaagatttacatctttcttactaaggaaaagagttaataaaaattgttctttattttacaggcagttactgaggctcttcccagatctcagtaaacagccactcagccttgaaaatggagtgttgttgtttctaaacatatatttatgtcatttattaagtacagttcacttaaataacataagtagattttctcttgtagtgatttgggtaggaagaggccatgtttcagttcgttttctctgtagggtcgattgaattggaccttttcagttgttcagaaaaataaaaataatttctcatattaaatacagacgctcctcaacttatgatgtgggtaggtcccagtaaacccattataatttgaaaatatcacattgaaaatgcatttaatatctcttacctgaaatcataacttagccaagcctaccttaaatgttctcagaacatttagcctgcagttgggcaaaaccatttaacacaaagcctattttataatgaagtgttgaatagctcatgttatttactgaatactgttgtgaaagtgaaaaacaatgattgtatgggtactcaaagtataatttctactgaatgcatatcacttgtgcactgttgtaaagctgaaaaaccgttaagcctctacgatttttaagtaagttggggaccatcagtttaaaataaatgcaatactatttcatgataaacatggtcactgtaagttttactcttttgaatgagggtgcgacagaatgcagttagaatcagttcatatcaccattaaaatcatccattcagaaacc

SEQ ID NO: 137258 - DNA, 5972 bp, Homo sapiens
  Payload ID: 6875
  Gene Symbol: GCNT1
  Gene Name: glucosaminyl (N-acetyl) transferase 1, core 2
  Uniprot ID: Q02742
  ENST ID: ENST00000442371
  CDS Start-End: 940-2226
acagaccataggtgaactgttaaggagggagaagccgcagtgtcaccttccacagtcctgctcccattaagacctatgaagtggaaaatgcagattattctttgaggtttcctgggaccagaaaaggtcagagactcttaatgggtaatgcagacaactggaatgcaatcatcaggtattcatttctgttttaaggttttatgtctgagaaacctgaaacctgaagaagtaaagcaatcatgattttttaaaaacttaataatatggttttggatttaaaaagaaagactgactcagagctggggaaaacactcacttgtgatacggatcaatgtgaaaacagcttaactctgttccatggcaattcgcacagtgtgactcagagacacctctcttcaccagctctggctcaggggatgtgaagccagaagcagaggtcacagtgacttcatctgagaaggacttaactgaccattgctggttttgaagccggaggaaggcccacagtcaatgaatgagagaggcttcgagaagctagaaatggcaaggaaatagattttcctctaaagctcccagaaagaaacacggttctgctgacacctcgattttaggccagtgagacctgcttcagacttctgacctacagaacgatttctttaaagactcgtgcagcacatcattatcgctggatgcccggacatgtaatacacctgacagcatgtgaagtgctcagaatggggcaggatgtcacctggaatcagcactaagtgattcagactttccttacttttaaatgtgctgctcttcatttcaagatgccgttgcagctctgataaatgcaaactgacaaccttcaaggccacgacggagggaaaatcattggtgcttggagcatagaagactgcccttcacaaaggaaatccctgattattgtttgaaatgctgaggacgttgctgcgaaggagacttttttcttatcccaccaaatactactttatggttcttgttttatccctaatcaccttctccgttttaaggattcatcaaaagcctgaatttgtaagtgtcagacacttggagcttgctggggagaatcctagtagtgatattaattgcaccaaagttttacagggtgatgtaaatgaaatccaaaaggtaaagcttgagatcctaacagtgaaatttaaaaagcgccctcggtggacacctgacgactatataaacatgaccagtgactgttcttctttcatcaagagacgcaaatatattgtagaaccccttagtaaagaagaggcggagtttccaatagcatattctatagtggttcatcacaagattgaaatgcttgacaggctgctgagggccatctatatgcctcagaatttctattgcattcatgtggacacaaaatccgaggattcctatttagctgcagtgatgggcatcgcttcctgttttagtaatgtctttgtggccagccgattggagagtgtggtttatgcatcgtggagccgggttcaggctgacctcaactgcatgaaggatctctatgcaatgagtgcaaactggaagtacttgataaatctttgtggtatggattttcccattaaaaccaacctagaaattgtcaggaagctcaagttgttaatgggagaaaacaacctggaaacggagaggatgccatcccataaagaagaaaggtggaagaagcggtatgaggtcgttaatggaaagctgacaaacacagggactgtcaaaatgcttcctccactcgaaacacctctcttttctggcagtgcctacttcgtggtcagtagggagtatgtggggtatgtactacagaatgaaaaaatccaaaagttgatggagtgggcacaagacacatacagccctgatgagtatctctgggccaccatccaaaggattcctgaagtcccgggctcactccctgccagccataagtatgatctgtctgacatgcaagcagttgccaggtttgtcaagtggcagtactttgagggtgatgtttccaagggtgctccctacccgccctgcgatggagtccatgtgcgctcagtgtgcattttcggagctggtgacttgaactggatgctgcgcaaacaccacttgtttgccaataagtttgacgtggatgttgacctctttgccatccagtgtttggatgagcatttgagacacaaagctttggagacattaaaacactgaccattacgggcaattttatgaacaagaagaaggatacacaaaacgtacccttatctgtttccccttccttgtcagcatcgggaagatggtatgaagtcctctttggggcagggactctagtagatcttcttgtcagagaagctgcatggtttctgcagagcacagttagctagaaaggtgatagcattaaatgttcatctagagttaatagtgggaggagtaaaggtagccttgaggccagagcaggtagcaaggcattgtggaaagaggggaccagggtggctggggaagaggccgatgcataaagtcagcctgttcaaagtgctcagggacttagcaaaatgagaagatgtgacctgtgccaaaactattttgagaattttaaatgtgaccatttttctggtatgaataaacttacagcaacaaataatcaaagatacaattaatctgatattatatttgttgaaatagaaatttgattgtactataaatgatttttgtaaataatttatattctgctctaatactgtactgtgtagtgtgtctccgtatgtcatctcagggagcttaaaatgggcttgatttaacattgtttttgtgttatttttgcttgaaacaacgcacacattttcaacaaccaaaaaatgacaatttctagtttagttaatttctacaaatcatcttatgttattagcaaggttaagacatcttttttaaaaaaattatagcttctaccaagagaaacactcaatttttctagagatttgcctctatcttcctttcctcagtcttcccagactgctatcaagctgtgtaaaaatttactttcactggaccctaaattattgtctctgctatctgactgccagtaattagtgcagaaaactaagacaggatgatacaggtttgaggggctggggagtgggaggggggagaaaaggaatgtatttaaacaatttccgatgcccatgatgagtttaaaaaccagcattgacaccatccccaaaattaaggctgtcgcttattgaatccacttgtgtccaacctcccaggattgttttatcctaatgtcacctgtatattcatttgaaaggacttggccctgttcttgggtcttcccgttacctgccccctgggtggtaagtttcctcctttctcaaccttccacgaggaggaaagaagtgtgcagtcattccacatggcctgttggaaggcctggggagggaactttgggtttgggacagatttttttttttgtttttggtatcattcacagcatacgatttttactctctccatcttcaccataagacagataatttggggttgctataatgctgtcacacatctcaaagtacattcaaatcttaaaaagaaattctcgtacttttgccatgttgatactgttcagcaaacaagctaccaggaactgtgaggctttgtcatttagcattagactttaaacaagaattaaaatcatgtgctgtatttttaaaatctagccaaattaaatagtacatgagaaattcagagtattagacagttttaaggcattcaactgagaaaactttatttgtcaaagtcagaaaacattttcatcttattgagagatatgtttttaaacttttatcatcatttgtaaatgtggaagttggtggattgctgtgtttttgcatgattagcatgggagtctgttggagcaagaggaacatgcttgttttgaaaactcgagatgatgagggtggtacatgcagtgtgttctctctttattggcttctaaaccagttttgtcctttaatgcatgtcaaatatttctcccatgcttctcttagcagaaaagtttttacctataagacagggcaccttttaactctaaaactagtgatactcagtgacatagactttgtcttataaacattttttcattttttattttgaaaaattgcaaatctacagcaaaagtaaaacagtagagtgaacaccatgtaaccctcacctggtgttaacattgtaccctatttgctttaagttgtatgtatttctgaacttggcaaaattggaaattaaaatttttaaaaattacaaatatacaaagttatttatcttagcacatttattatgtgtgactgcatctgatttatatttaaattggcaggttttgagggatttttttcttcatcataaatgtaaacataggattttagagtctatttccccaagcgccacattataactgtaaacttaccatcttctatgtagctgtgatatctcatctttctaaaatggaacttgttaaaaagtgttcaaacactatccctaatgcctgcggcagaatttatatacgatccattcattggggctcaaagtatcttttagacttttaaggacaatttacagcaaatgaaatttatgatgctgtgacaagaaatttaaagaatcaaaacgatggtttgaaaaggaaacctatgatacatgcaggagaagcaaaacccaagtgattggtgagaaatatagaaattatttaaattactttatagtaattattaaacactaatttttgtactgtcattgaaggtgttttatagagaaatctgagaaatcacattcacaaattagaagtcaaacatggccaggcacagtggctcacacctgtaatcttcaggatttcaagaccagcctagccaacatgacgaaaccccatctctactgaaaatagaaaaaaaaaattagccaggcttgcacctgtaatcccagttacctgggaggctgaggcaggagaatctcttgagcccaggaggcggaggttgcagtgagctgagatgccaccaccacaccagcctgggtgacagagtgaaactcgtatctccaaacaaacaaacaaaaagtccttaaacatatgtgaacaaaaattttgtgatggaaggattctagttaatgagtattgcatcaagatttacatctttcttactaaggaaaagagttaataaaaattgttctttattttacaggcagttactgaggctcttcccagatctcagtaaacagccactcagccttgaaaatggagtgttgttgtttctaaacatatatttatgtcatttattaagtacagttcacttaaataacataagtagattttctcttgtagtgatttgggtaggaagaggccatgtttcagttcgttttctctgtagggtcgattgaattggaccttttcagttgttcagaaaaataaaaataatttctcatattaaatacagacgctcctcaacttatgatgtgggtaggtcccagtaaacccattataatttgaaaatatcacattgaaaatgcatttaatatctcttacctgaaatcataacttagccaagcctaccttaaatgttctcagaacatttagcctgcagttgggcaaaaccatttaacacaaagcctattttataatgaagtgttgaatagctcatgttatttactgaatactgttgtgaaagtgaaaaacaatgattgtatgggtactcaaagtataatttctactgaatgcatatcacttgtgcactgttgtaaagctgaaaaaccgttaagcctctacgatttttaagtaagttggggaccatcagtttaaaataaatgcaatactatttcatgataaacatggtcactgtaagttttactcttttgaatgagggtgcgacagaatgcagttagaatcagttcatatcaccattaaaatcatccattcagaaacc

SEQ ID NO: 137259 - DNA, 4214 bp, Homo sapiens
  Payload ID: 6876
  Gene Symbol: GCNT2
  Gene Name: glucosaminyl (N-acetyl) transferase 2, I-branching enzyme (I blood group)
  Uniprot ID: Q8NFS9
  ENST ID: ENST00000265012
  CDS Start-End: 245-1453
aaccctggggaactgcagaccaaagtgagagagggacgcaccgcatctccaggcacatccaaaaaggatggacgagacaccgaagcagaggatacaggaggattaaaggattcaggaaagcaagcagccctccggagaagctgtcgaaattcaagactggcaagagaagcaaattcaacctctcacaccgatcatttctcattccctgaaaagaagagattgtttccccagggaagtgaaaataatgaacttttggaggtactgcttttttgctttcactctgctcagcgtggtcatttttgtgagattttacagtagccaattgagcccgccaaaaagttatgagaagctgaacagttccagtgaaaggtattttaggaaaactgcctgtaatcacgccttagagaaaatgccagtctttttgtgggaaaatatattaccatcacctttgcgaagtgtcccttgcaaggattacctgacccagaatcactacatcacaagtcccctgtcggaagaagaggctgcattccctttggcctatgtcatggtcatccataaggactttgacacctttgaaaggctctttagggctatctatatgccccaaaatgtctactgtgttcacgtggatgagaaagccccagctgagtataaggaatctgtgaggcagttactgagttgcttccaaaatgctttcattgcttcaaagacagagtctgtggtttatgcaggcatttccagactccaggctgacctgaactgtctgaaagaccttgtcgcctctgaggttccctggaagtacgtcatcaacacctgtggacaagacttccccctgaaaaccaaccgggagatagttcagcatctgaaaggatttaaagggaaaaatatcaccccaggggtgctgcctcctgaccatgcaattaagcgaactaaatatgtccaccaagagcatacagataaaggtggcttttttgtgaaaaatactaatattttgaaaacttcacctccacatcagctgaccatctactttggcactgcctatgtggcgcttaccagagactttgtcgactttgttctacgtgaccaaagggccattgatctactacaatggtcaaaagatacctatagtcctgatgagcatttctgggtgacacttaatagggtttcaggtgttcctggctctatgccaaatgcatcctggactggaaacctcagagctataaagtggagtgacatggaagacagacacggaggctgccacggccactatgtacatggtatttgtatctatggaaacggagacttaaagtggctggttaattcaccaagcctgtttgctaacaagtttgagcttaatacctacccccttactgtggaatgcctagaactgaggcatcgcgaaagaaccctcaatcagagtgaaactgcgatacaacccagctggtatttttgagctattcatgagctactcatgactgaagggaaactgcagctgggaagaggagcctgtttttgtgagagacttttgccttcgtaatgttaaccgtttcaggaccacgtttatagcttcaggacctggctacgtaattatacttaaaatatccactggacactgtgaaatacactaacaggatggctgggtagagcaatctgggcactttggccaattttagtcttgctgtttcttgatgctcacctctatattagtttattgttaggatcaatgataaatttaaatgacctcagatctttgcaccagatactcatcatatacaaatgttttagtaaaaaagagaattgtagataatactgtctaggaaaataagaattaggtttctttgaagaaggaatcttttataacaccttaacagtcaccactgtgctcaaccagacagatagtgaaacagctttctgggtaattcaccaatttcctttaaaacataagctacctgaatggagaatacatcttgtttctgagtttcaacactagcatttttggcttactcatggacaaagttctgtatatagtataaagtcattaacaagaaacaggatatgctttaagacagaattcactgtctgttgcttcagtaaaaggacctcggggaataaaacatttctctcttatatgccagaatgtaggctggtccctatgtcatgtcttccattaagaacactaaaaagtccttgcaagaatggagatatgcattcaagagaggtgctatcacatagatctagtctgaagtctggaacactttcctcttctatgacccctctctccccagtattatcttacttgcaaaatggagaccaaattctatcctgtgaggcttttaattgcaccatagtatgctctgagtagctttacactgcctggtactgatagtagtggctcgatttttaagagccttcaattgtagatgaacatctctgttatttatccctcattcatccatccgttcattcattcagccttcaatcaacatctcttgagtgtctattatgtacaggacatgtactgagacaaaaaggaaacataagagctttttcactctaaaaatcttggcaataatgtcaacaccagaaagcctcctctggagaatcttacagagtgattgtagtttaatacaggaacacacagggctgtgtagcatgataccaggcccaggagatcagtaattacaaattaagggttaaatcagagattattcaacagagagggagaaaggaggagacagagggaggacctgttgtgttccagccattctggtattcctttatgtatctaatttcattcaaacctcacaacagtcttgtgaggcccttatataattactcccattttgcagatgaagtaactgaggcttagaaaggttaatagcaccggggaacaatttctctgggtgagaattgggactctgttgctggtcttctcagttcatttcctgaggtggatttactgagagaaggtgaaataaagccatatttagtataccagagaaggtagattttaagaatggtctcagtgttaatactgagaaaaagtcctgtcagttcagaaaaaatgtgaagtctactttagtattcctgtaatactaaaccgttgagtttctaaatatttatttattctaacaaaaagcaattactacaaatggatgacacatttaatgaacacaattttattttttttctgtaactgtgcttgttgaatgtcaatcatatttaaagggaatgactttgaagtaaaaccttttttcttgctactgaaaaaaatggagttgttttgggtggtaaagtgttaaggaatagggacagctggtcacacaaggaactcttgaaggccacatgtgaaaacctgtcacttgcacagaggccagtcccactaaggtgaccagagtgggctccaagcacaaactgccattggctatagatgggactgtgtccccccaaaattcatgtgttggagccttaaccctcaatgtgatggtatttgagatggggcctttggtaagggaagtttagatgaggtcacgagggtaggaccctcatgatgggatgagtccccttacaagacctctggcttgggccgggcgtggtggctcacacctgtaatcccaacactttgggaggccaaggcaggtagatcacttgatgccaggagttccagaccaggctggccgacatggtgaaaccccatctctactaaaaaatataaaaattagccgggctttgtggcatgtgcctgtaatcccagctatttggcaggctgaggcatgagaatcgcttgaacccaggaggtggaggttacagtgagctgagagtgccccactgcactccagcctgggtgacagagcgagactttgtcccaaaacaaaataggtgaggggatagcgaatgcactcagggtcagcagtggagtttaaaaattgtctcttttcaacttatttaaatgacagcacctgagaagaggaaccgttttacactggatgtttctcatgtagaacaagaaatctttctggaattgatgtttacatgtctgttgttggtcatctctcctgtgtcttaaatactttaatgttggaagagcatagtgtttgggctagtgggtttctgacagcccatgggaatgccctgaaactactgtatctgatgtttgttttcgatgaggttccatgttttgttttcttgggaataaattaatatattgttttcca

SEQ ID NO: 137260 - DNA, 4381 bp, Homo sapiens
  Payload ID: 6876
  Gene Symbol: GCNT2
  Gene Name: glucosaminyl (N-acetyl) transferase 2, I-branching enzyme (I blood group)
  Uniprot ID: Q06430
  ENST ID: ENST00000316170
  CDS Start-End: 418-1620
actgcgctcattccctgaatggcagtaaccagggggcgggggtggcatgggaaatgaaagaaagagatatgggaaactaaatctgccgggggaaagagagttaccggagttttagcaaaacagctagcagatgcaaacggggaggcagagggaggagggaaggctgggcttcagcaacctgccacggggatttaaacaaaggaggtttgagagaggcgggatctggctgtaatatcggcacagggacagagacagcagctggactctcgggatgaaacggaatcgattcccagcgtctccaacagggcaggagtgagtggagtatgttgcaaaataagaactcagagaaacgagtgagtttggaaaaaagacttacagattttgacggtctcttgacatttcacccttctttgaggcatgcctttatcaatgcgttacctcttcataatttctgtctctagtgtaattatttttatcgtcttctctgtgttcaattttgggggagatccaagcttccaaaggctaaatatctcagaccctttgaggctgactcaagtttgcacatcttttatcaatggaaaaacacgtttcctgtggaaaaacaaactaatgatccatgagaagtcttcttgcaaggaatacttgacccagagccactacatcacagcccctttatctaaggaagaagctgactttcccttggcatatataatggtcatccatcatcactttgacacctttgcaaggctcttcagggctatttacatgccccaaaatatctactgtgttcatgtggatgaaaaagcaacaactgaatttaaagatgcggtagagcaactattaagctgcttcccaaacgcttttctggcttccaagatggaacccgttgtctatggagggatctccaggctccaggctgacctgaactgcatcagagatctttctgccttcgaggtctcatggaagtacgttatcaacacctgtgggcaagacttccccctgaaaaccaacaaggaaatagttcagtatctgaaaggatttaaaggtaaaaatatcaccccaggggtgctgcccccagctcatgcaattggacggactaaatatgtccaccaagagcacctgggcaaagagctttcctatgtgataagaacaacagcgttgaaaccgcctcccccccataatctcacaatttactttggctctgcctatgtggctctatcaagagagtttgccaactttgttctgcatgacccacgggctgttgatttgctccagtggtccaaggacactttcagtcctgatgagcatttctgggtgacactcaataggattccaggtgttcctggctctatgccaaatgcatcctggactggaaacctcagagctataaagtggagtgacatggaagacagacacggaggctgccacggccactatgtacatggtatttgtatctatggaaacggagacttaaagtggctggttaattcaccaagcctgtttgctaacaagtttgagcttaatacctacccccttactgtggaatgcctagaactgaggcatcgcgaaagaaccctcaatcagagtgaaactgcgatacaacccagctggtatttttgagctattcatgagctactcatgactgaagggaaactgcagctgggaagaggagcctgtttttgtgagagacttttgccttcgtaatgttaaccgtttcaggaccacgtttatagcttcaggacctggctacgtaattatacttaaaatatccactggacactgtgaaatacactaacaggatggctgggtagagcaatctgggcactttggccaattttagtcttgctgtttcttgatgctcacctctatattagtttattgttaggatcaatgataaatttaaatgacctcagatctttgcaccagatactcatcatatacaaatgttttagtaaaaaagagaattgtagataatactgtctaggaaaataagaattaggtttctttgaagaaggaatcttttataacaccttaacagtcaccactgtgctcaaccagacagatagtgaaacagctttctgggtaattcaccaatttcctttaaaacataagctacctgaatggagaatacatcttgtttctgagtttcaacactagcatttttggcttactcatggacaaagttctgtatatagtataaagtcattaacaagaaacaggatatgctttaagacagaattcactgtctgttgcttcagtaaaaggacctcggggaataaaacatttctctcttatatgccagaatgtaggctggtccctatgtcatgtcttccattaagaacactaaaaagtccttgcaagaatggagatatgcattcaagagaggtgctatcacatagatctagtctgaagtctggaacactttcctcttctatgacccctctctccccagtattatcttacttgcaaaatggagaccaaattctatcctgtgaggcttttaattgcaccatagtatgctctgagtagctttacactgcctggtactgatagtagtggctcgatttttaagagccttcaattgtagatgaacatctctgttatttatccctcattcatccatccgttcattcattcagccttcaatcaacatctcttgagtgtctattatgtacaggacatgtactgagacaaaaaggaaacataagagctttttcactctaaaaatcttggcaataatgtcaacaccagaaagcctcctctggagaatcttacagagtgattgtagtttaatacaggaacacacagggctgtgtagcatgataccaggcccaggagatcagtaattacaaattaagggttaaatcagagattattcaacagagagggagaaaggaggagacagagggaggacctgttgtgttccagccattctggtattcctttatgtatctaatttcattcaaacctcacaacagtcttgtgaggcccttatataattactcccattttgcagatgaagtaactgaggcttagaaaggttaatagcaccggggaacaatttctctgggtgagaattgggactctgttgctggtcttctcagttcatttcctgaggtggatttactgagagaaggtgaaataaagccatatttagtataccagagaaggtagattttaagaatggtctcagtgttaatactgagaaaaagtcctgtcagttcagaaaaaatgtgaagtctactttagtattcctgtaatactaaaccgttgagtttctaaatatttatttattctaacaaaaagcaattactacaaatggatgacacatttaatgaacacaattttattttttttctgtaactgtgcttgttgaatgtcaatcatatttaaagggaatgactttgaagtaaaaccttttttcttgctactgaaaaaaatggagttgttttgggtggtaaagtgttaaggaatagggacagctggtcacacaaggaactcttgaaggccacatgtgaaaacctgtcacttgcacagaggccagtcccactaaggtgaccagagtgggctccaagcacaaactgccattggctatagatgggactgtgtccccccaaaattcatgtgttggagccttaaccctcaatgtgatggtatttgagatggggcctttggtaagggaagtttagatgaggtcacgagggtaggaccctcatgatgggatgagtccccttacaagacctctggcttgggccgggcgtggtggctcacacctgtaatcccaacactttgggaggccaaggcaggtagatcacttgatgccaggagttccagaccaggctggccgacatggtgaaaccccatctctactaaaaaatataaaaattagccgggctttgtggcatgtgcctgtaatcccagctatttggcaggctgaggcatgagaatcgcttgaacccaggaggtggaggttacagtgagctgagagtgccccactgcactccagcctgggtgacagagcgagactttgtcccaaaacaaaataggtgaggggatagcgaatgcactcagggtcagcagtggagtttaaaaattgtctcttttcaacttatttaaatgacagcacctgagaagaggaaccgttttacactggatgtttctcatgtagaacaagaaatctttctggaattgatgtttacatgtctgttgttggtcatctctcctgtgtcttaaatactttaatgttggaagagcatagtgtttgggctagtgggtttctgacagcccatgggaatgccctgaaactactgtatctgatgtttgttttcgatgaggttccatgttttgttttcttgggaataaattaatatattgttttcca

SEQ ID NO: 137261 - DNA, 4525 bp, Homo sapiens
  Payload ID: 6876
  Gene Symbol: GCNT2
  Gene Name: glucosaminyl (N-acetyl) transferase 2, I-branching enzyme (I blood group)
  Uniprot ID: Q8N0V5
  ENST ID: ENST00000379597
  CDS Start-End: 557-1765
atatctctccaggcagtattcacatgctttaaactgaagctcgtagcttggcagtgcagtttaagcaaataaactcaggctgttgaacacaatgattaacaggaagcaggggaggggacatagttactagactctggccgggacaagaggctgaggttaaggtcttagagccgatgacttgcagaatggtcacctcacccacttgtaatttcatggtgggaacaggtggaccccctggaatcagaacctctctgaggacatctgtttttgtgtagacacaggttgcaggttagcaggagaacaggcaagccaaatgcaaaggagccacttcagaaatgtgtcacagaaaagtgaaaatgcaacctagtggtaagtgaagaggggaagaagaaagaaaaaggaccagaaccgtgaactgaagggacagggaacagccagacgagagcttcagccatcacgaggatgatttcggaacctggagaaaatgtaagttaaatatatctacactctgatcctatctcaagagagagatattttactcatttcctggttgtgaatgatgggctcttggaagcactgtctttttagcgcgtctcttatctctgccctgatttttgtatttgtttacaatactgagttatgggagaataaacgttttctgagggcagctctgtccaatgcttcactgttagcagaagcctgtcatcagatttttgaggggaaagttttttacccaacagaaaatgcattgaaaactacccttgatgaagctacctgctatgagtacatggttcgaagccactatgtaacagaaacactctctgaagaagaggctgggttccctttagcttacacagtgaccatccacaaagacttcggcacttttgagaggctcttcagggcgatttatatgccccaaaatgtctactgtgtgcacctggatcagaaggcgacggatgcctttaaaggtgcagtgaaacagttactcagctgcttcccaaatgcttttctggcttccaagaaggagtcggttgtctatggggggatctccaggctccaggctgacctgaactgcctggaagaccttgtggcctctgaagttccctggaagtatgtcatcaacacctgcgggcaagactttcccctgaaaaccaacagggaaatagttcagtatctgaagggatttaaagggaaaaatatcacccccggagtgctgcctcctgaccacgctgttggacggactaaatacgtccaccaagaactgttaaaccacaaaaattcctacgtgattaaaacaacaaaattaaaaactcctcctcctcatgacatggtgatttactttggcacggcctacgtggctctcacaagggactttgctaacttcgtcctccaagaccagctcgcacttgacttactctcctggtccaaggacacctacagccccgacgaacatttctgggtgacactcaacaggattcccggtgttcctggctctatgccaaatgcatcctggactggaaacctcagagctataaagtggagtgacatggaagacagacacggaggctgccacggccactatgtacatggtatttgtatctatggaaacggagacttaaagtggctggttaattcaccaagcctgtttgctaacaagtttgagcttaatacctacccccttactgtggaatgcctagaactgaggcatcgcgaaagaaccctcaatcagagtgaaactgcgatacaacccagctggtatttttgagctattcatgagctactcatgactgaagggaaactgcagctgggaagaggagcctgtttttgtgagagacttttgccttcgtaatgttaaccgtttcaggaccacgtttatagcttcaggacctggctacgtaattatacttaaaatatccactggacactgtgaaatacactaacaggatggctgggtagagcaatctgggcactttggccaattttagtcttgctgtttcttgatgctcacctctatattagtttattgttaggatcaatgataaatttaaatgacctcagatctttgcaccagatactcatcatatacaaatgttttagtaaaaaagagaattgtagataatactgtctaggaaaataagaattaggtttctttgaagaaggaatcttttataacaccttaacagtcaccactgtgctcaaccagacagatagtgaaacagctttctgggtaattcaccaatttcctttaaaacataagctacctgaatggagaatacatcttgtttctgagtttcaacactagcatttttggcttactcatggacaaagttctgtatatagtataaagtcattaacaagaaacaggatatgctttaagacagaattcactgtctgttgcttcagtaaaaggacctcggggaataaaacatttctctcttatatgccagaatgtaggctggtccctatgtcatgtcttccattaagaacactaaaaagtccttgcaagaatggagatatgcattcaagagaggtgctatcacatagatctagtctgaagtctggaacactttcctcttctatgacccctctctccccagtattatcttacttgcaaaatggagaccaaattctatcctgtgaggcttttaattgcaccatagtatgctctgagtagctttacactgcctggtactgatagtagtggctcgatttttaagagccttcaattgtagatgaacatctctgttatttatccctcattcatccatccgttcattcattcagccttcaatcaacatctcttgagtgtctattatgtacaggacatgtactgagacaaaaaggaaacataagagctttttcactctaaaaatcttggcaataatgtcaacaccagaaagcctcctctggagaatcttacagagtgattgtagtttaatacaggaacacacagggctgtgtagcatgataccaggcccaggagatcagtaattacaaattaagggttaaatcagagattattcaacagagagggagaaaggaggagacagagggaggacctgttgtgttccagccattctggtattcctttatgtatctaatttcattcaaacctcacaacagtcttgtgaggcccttatataattactcccattttgcagatgaagtaactgaggcttagaaaggttaatagcaccggggaacaatttctctgggtgagaattgggactctgttgctggtcttctcagttcatttcctgaggtggatttactgagagaaggtgaaataaagccatatttagtataccagagaaggtagattttaagaatggtctcagtgttaatactgagaaaaagtcctgtcagttcagaaaaaatgtgaagtctactttagtattcctgtaatactaaaccgttgagtttctaaatatttatttattctaacaaaaagcaattactacaaatggatgacacatttaatgaacacaattttattttttttctgtaactgtgcttgttgaatgtcaatcatatttaaagggaatgactttgaagtaaaaccttttttcttgctactgaaaaaaatggagttgttttgggtggtaaagtgttaaggaatagggacagctggtcacacaaggaactcttgaaggccacatgtgaaaacctgtcacttgcacagaggccagtcccactaaggtgaccagagtgggctccaagcacaaactgccattggctatagatgggactgtgtccccccaaaattcatgtgttggagccttaaccctcaatgtgatggtatttgagatggggcctttggtaagggaagtttagatgaggtcacgagggtaggaccctcatgatgggatgagtccccttacaagacctctggcttgggccgggcgtggtggctcacacctgtaatcccaacactttgggaggccaaggcaggtagatcacttgatgccaggagttccagaccaggctggccgacatggtgaaaccccatctctactaaaaaatataaaaattagccgggctttgtggcatgtgcctgtaatcccagctatttggcaggctgaggcatgagaatcgcttgaacccaggaggtggaggttacagtgagctgagagtgccccactgcactccagcctgggtgacagagcgagactttgtcccaaaacaaaataggtgaggggatagcgaatgcactcagggtcagcagtggagtttaaaaattgtctcttttcaacttatttaaatgacagcacctgagaagaggaaccgttttacactggatgtttctcatgtagaacaagaaatctttctggaattgatgtttacatgtctgttgttggtcatctctcctgtgtcttaaatactttaatgttggaagagcatagtgtttgggctagtgggtttctgacagcccatgggaatgccctgaaactactgtatctgatgtttgttttcgatgaggttccatgttttgttttcttgggaataaattaatatattgttttcc

SEQ ID NO: 137262 - DNA, 1255 bp, Homo sapiens
  Payload ID: 6876
  Gene Symbol: GCNT2
  Gene Name: glucosaminyl (N-acetyl) transferase 2, I-branching enzyme (I blood group)
  ENST ID: ENST00000410107
  CDS Start-End: 290-640
gataactggtttacgtctgttctttgtgttgctatagacttgttgtttgggtttgtgttatctttttgatctgcaggactaatagtaaaagtctgtagcttcagttatagactaagattactactctgccagaagtagtgaataaagaatcaactgggtgggatgaatcacgtttcacttgtgctgcccaggctggagtgcagtggcactatcttggcacactgtggcttatgtcacgggttcaagcgattctgctgtctcagcctcccaagtatggattacaggacaaatggaaggaaagatttttggaagcagcttcttgtgtccgacccgctgtgatcagctgctactcccaggtgttcctggctctatgccaaatgcatcctggactggaaacctcagagctataaagtggagtgacatggaagacagacacggaggctgccacggccactatgtacatggtatttgtatctatggaaacggagacttaaagtggctggttaattcaccaagcctgtttgctaacaagtttgagcttaatacctacccccttactgtggaatgcctagaactgaggcatcgcgaaagaaccctcaatcagagtgaaactgcgatacaacccagctggtatttttgagctattcatgagctactcatgactgaagggaaactgcagctgggaagaggagcctgtttttgtgagagacttttgccttcgtaatgttaaccgtttcaggaccacgtttatagcttcaggacctggctacgtaattatacttaaaatatccactggacactgtgaaatacactaacaggatggctgggtagagcaatctgggcactttggccaattttagtcttgctgtttcttgatgctcacctctatattagtttattgttaggatcaatgataaatttaaatgacctcagatctttgcaccagatactcatcatatacaaatgttttagtaaaaaagagaattgtagataatactgtctaggaaaataagaattaggtttctttgaagaaggaatcttttataacaccttaacagtcaccactgtgctcaaccagacagatagtgaaacagctttctgggtaattcaccaatttcctttaaaacataagctacctgaatggagaatacatcttgtttctgagtttcaacactagcatttttggcttactcatggacaaagttctgtatatagtataaagtcattaacaagaaacaggatatgctttaagaca

SEQ ID NO: 137263 - DNA, 2214 bp, Homo sapiens
  Payload ID: 6876
  Gene Symbol: GCNT2
  Gene Name: glucosaminyl (N-acetyl) transferase 2, I-branching enzyme (I blood group)
  Uniprot ID: Q8N0V5
  ENST ID: ENST00000495262
  CDS Start-End: 536-1744
aaacaggcttactgtgttcactgctggacgcctctgggcaatcttaccctcctgggaactgagagagacaatgctaggagccagaaacatgaggaatacatgagctcggcgccaatggaacatgctttcacaccgggtgcagctaaccaccacatcatacaaaactcgtcgctgacgttttagatgtataatctgattggcatggactcacagaggagggagtaagggaagagtaagaagatttcaaaggagagacacaggttgcaggttagcaggagaacaggcaagccaaatgcaaaggagccacttcagaaatgtgtcacagaaaagtgaaaatgcaacctagtggtaagtgaagaggggaagaagaaagaaaaaggaccagaaccgtgaactgaagggacagggaacagccagacgagagcttcagccatcacgaggatgatttcggaacctggagaaaatgtaagttaaatatatctacactctgatcctatctcaagagagagatattttactcatttcctggttgtgaatgatgggctcttggaagcactgtctttttagcgcgtctcttatctctgccctgatttttgtatttgtttacaatactgagttatgggagaataaacgttttctgagggcagctctgtccaatgcttcactgttagcagaagcctgtcatcagatttttgaggggaaagttttttacccaacagaaaatgcattgaaaactacccttgatgaagctacctgctatgagtacatggttcgaagccactatgtaacagaaacactctctgaagaagaggctgggttccctttagcttacacagtgaccatccacaaagacttcggcacttttgagaggctcttcagggcgatttatatgccccaaaatgtctactgtgtgcacctggatcagaaggcgacggatgcctttaaaggtgcagtgaaacagttactcagctgcttcccaaatgcttttctggcttccaagaaggagtcggttgtctatggggggatctccaggctccaggctgacctgaactgcctggaagaccttgtggcctctgaagttccctggaagtatgtcatcaacacctgcgggcaagactttcccctgaaaaccaacagggaaatagttcagtatctgaagggatttaaagggaaaaatatcacccccggagtgctgcctcctgaccacgctgttggacggactaaatacgtccaccaagaactgttaaaccacaaaaattcctacgtgattaaaacaacaaaattaaaaactcctcctcctcatgacatggtgatttactttggcacggcctacgtggctctcacaagggactttgctaacttcgtcctccaagaccagctcgcacttgacttactctcctggtccaaggacacctacagccccgacgaacatttctgggtgacactcaacaggattcccggtgttcctggctctatgccaaatgcatcctggactggaaacctcagagctataaagtggagtgacatggaagacagacacggaggctgccacggccactatgtacatggtatttgtatctatggaaacggagacttaaagtggctggttaattcaccaagcctgtttgctaacaagtttgagcttaatacctacccccttactgtggaatgcctagaactgaggcatcgcgaaagaaccctcaatcagagtgaaactgcgatacaacccagctggtatttttgagctattcatgagctactcatgactgaagggaaactgcagctgggaagaggagcctgtttttgtgagagacttttgccttcgtaatgttaaccgtttcaggaccacgtttatagcttcaggacctggctacgtaattatacttaaaatatccactggacactgtgaaatacactaacaggatggctgggtagagcaatctgggcactttggccaattttagtcttgctgtttcttgatgctcacctctatattagtttattgttaggatcaatgataaatttaaatgacctcagatctttgcaccagatactcatcatatacaaatgttttagtaaaaaagagaattgtagataatactgtctaggaaaataagaattaggtttctttgaagaaggaatcttttataacaccttaacagtcaccactgtgctcaaccagacagatagtgaaacagctttctgggtaattca

SEQ ID NO: 137264 - DNA, 4933 bp, Homo sapiens
  Payload ID: 6877
  Gene Symbol: GCNT3
  Gene Name: glucosaminyl (N-acetyl) transferase 3, mucin type
  Uniprot ID: O95395
  ENST ID: ENST00000396065
  CDS Start-End: 449-1765
agtcagagcctcttctctctaagtcacgggaactgcccttgctacttgtgacctgccctttactcagcagtttttgttctgggaagccctgggattctgctaatacctatcactgtaggtgctgaagggaaacagatgaagaacatgacctcaaggagcttcctgtcaatgagaagaccaagctgacgcctggcaaagatattaaagaggagcctgaaactgttccttggacatcttatgaatgtcagaaaataccttttggagggttagaagatcaggggacatggttgttcacatttgctgccacggaacaccgccagtcttcacttggaaacagaatcacgccttgtgaagagatcatccctaagcaggagagaagctactaaaggattgtgtcctcctccaccttccctgtgctcggtctccacctgtctcccattctgtgacgatggttcaatggaagagactctgccagctgcattacttgtgggctctgggctgctatatgctgctggccactgtggctctgaaactttctttcaggttgaagtgtgactctgaccacttgggtctggagtccagggaatctcaaagccagtactgtaggaatatcttgtataatttcctgaaacttccagcaaagaggtctatcaactgttcaggggtcacccgaggggaccaagaggcagtgcttcaggctattctgaataacctggaggtcaagaagaagcgagagcctttcacagacacccactacctctccctcaccagagactgtgagcacttcaaggctgaaaggaagttcatacagttcccactgagcaaagaagaggtggagttccctattgcatactctatggtgattcatgagaagattgaaaactttgaaaggctactgcgagctgtgtatgcccctcagaacatatactgtgtccatgtggatgagaagtccccagaaactttcaaagaggcggtcaaagcaattatttcttgcttcccaaatgtcttcatagccagtaagctggttcgggtggtttatgcctcctggtccagggtgcaagctgacctcaactgcatggaagacttgctccagagctcagtgccgtggaaatacttcctgaatacatgtgggacggactttcctataaagagcaatgcagagatggtccaggctctcaagatgttgaatgggaggaatagcatggagtcagaggtacctcctaagcacaaagaaacccgctggaaatatcactttgaggtagtgagagacacattacacctaaccaacaagaagaaggatcctcccccttataatttaactatgtttacagggaatgcgtacattgtggcttcccgagatttcgtccaacatgttttgaagaaccctaaatcccaacaactgattgaatgggtaaaagacacttatagcccagatgaacacctctgggccacccttcagcgtgcacggtggatgcctggctctgttcccaaccaccccaagtacgacatctcagacatgacttctattgccaggctggtcaagtggcagggtcatgagggagacatcgataagggtgctccttatgctccctgctctggaatccaccagcgggctatctgcgtttatggggctggggacttgaattggatgcttcaaaaccatcacctgttggccaacaagtttgacccaaaggtagatgataatgctcttcagtgcttagaagaatacctacgttataaggccatctatgggactgaactttgagacacactatgagagcgttgctacctgtggggcaagagcatgtacaaacatgctcagaacttgctgggacagtgtgggtgggagaccagggctttgcaattcgtggcatcctttaggataagagggctgctattagagtgtgggtaagtagatcttttgccttgcaaattgctgcctgggtgaatgctgcttgttctctcacccctaaccctagtagttcctccactaactttctcactaagtgagaatgagaactgctgtgatagggagagtgaaggagggatatgtggtagagcacttgatttcagttgaatgcctgctggtagcttttccattctgtggagctgccgttcctaataattccaggtttggtagcgtggaggagaactttgatggaaagagaaccttcccttctgtactgttaacttaaaaataaatagctcctgattcaaagtattacctctactttttgcctagtatgccagaaataatataaatataaacagataaagtgtgtgagactttttctcataactattcatgacatttaaaatccctaggggctggcaagagagttctcattattctgaaatggtcctgacaagctgcatgaatagcaattttttttttgagacagagtcttgctctgtcacccaggctggactgcagtagtgcaatctcagttcactgcaacctccgcctcccaggttcaagcgatactcccacctcagcctcctgagtagctgggactacaggcatgcagcaccatgtctggctaatttttgtatttttagtagaggccgggtttcaccatattcgccaggctggtcttgaactcctgaccttgtgatctgcccgcctcggccttccgaaatgctgggattacaggtgggaactactgcgcctggcctacaaatagcaaattctaacgaagacaggggaacagggatggttcttccattgttaaaagccatcctcattttgtttatattgccaggtttgtgatttttctgtaaaggaaaaggcagggtgatttaaccagtttgaccacctttcctgtactcttacaggaaaatcgcagcactaattctaattttgtccactttacagccaaagcttagctaatgttccataaaggagataatagccaatcaggtaaggtaatgtgtaattcattattcaaagtggaacatgtttttgtagggggagagtctgcactattaataattgtattgagaaataaaaataaactaggactattcagttaaaccaggatgtcttattattccatgtttaggcctcttgagtcaaaactctttttttttttttttttttttttttttttggagacaggttctcactctgttgcccaggctggagtgcagtggcatgatcttggctcactgaagcctctgcctcccaggttcaagtgattctccccccaaaccttgcaagtagctgggattacagatgtgagccaccatgcccagctgatttttgtgtatttttagtaaagatggggtttcaccatgttggccaggttggtctcaaactcctggcctcaagtgatccacctgccccagcctcccaaagtgctgggattacaggtgtgagccaccatgcctggtcccctcttgagtcaaaactcttatttcagaatgcgaatggaaggatcgctattagtgattctgcagattacacatttccttgcggggagacaataaggtatgtgtaaatacatatatgtgtgtgtatgtatacacacatacagcacgctacctcccaagtgttacctagtgaaacagtttcctttccgaagctccagagatggttgttggctaagttatactcttctgtgatgggcaagggatactataaaaacataggcagtgccctttgaatatagtacagctcatcttctgcatacgatatgccctggaaaggtgatttatatgcaagttaattggtgtaatctgaaggatgctcccattaatacgtcatgatgtcattaatatgtttcttcctttctgatttttgtttttttttttttttttgagacagagtctcactctgtcacccaggttggagtgcaacgaatggcgcaatcttggctcattacaacctccgcctcctgggtccaagcgattctcctgcctcagcctcctgagtaactgggattacaggtgtgtgccaccttgcctggctaatttttttgtatttttttagtagaaacagggtttcaccatgttggtcaggctggtctgaactcctgacctcaagtgatccacttgccttggcttcccaaagtgctgggattacaggcgtgagctaccgcacccagccctttctgagtgttgtcattcaattcatcaagttttctgtcatgatcaactttctctatgcaaaccctgtaactctgacagttatcactgtgtctgacacagtgaattttttatttataaggtagttacttttggccaggtgtggtggctgacgcctgtaatcccagcactttgggaggccaaggtaggcagatcacttgaggtcaggagttcaagatcagcctggccaacatggtgaatccccatctctactaaaaatataaaaattagccagacatggtggtgggtacctgtaatcccagctacttgggaggctgaggcaggagaatcgcttgaacatgggaggcagaggttgcagtgagctgagatcgtaccactgcactccagcctgggcgatagagccagactgagtctcaaaaaaaaaaaaaaagttacctttttttggtaaggttgtacttcttagataatggtcattgtcactaccaacttgcctgcattgtaatagagtcctattcactttgctcccaaccccactacggagatgactgatgactagttgtatacacagtgggtgtgccctgagaggtctgttgccagcagtggtgatcgatcacggcctccccctgctggctgatgtgatggtccttggtcctcctctgaaggaggtagaaggggcacacggccaccgtgggaagtaggcagaaaagcctccctgggtgcagattctctgagaaaagaactttggcctcatagttaacttactccaaaagctttcatgtgaaataatttataattttttatataaataaaaagattaaaatgtgaa

SEQ ID NO: 137265 - DNA, 2360 bp, Homo sapiens
  Payload ID: 6877
  Gene Symbol: GCNT3
  Gene Name: glucosaminyl (N-acetyl) transferase 3, mucin type
  Uniprot ID: O95395
  ENST ID: ENST00000560585
  CDS Start-End: 591-1907
agtcagagcctcttctctctaagtcacgggaactgcccttgctacttgtgacctgccctttactcagcagtttttgttctgggaagccctgggattctgctaatacctatcactgtaggtgctgaagggaaacagatgaagaacatgacctcaaggagcttcctgtcaatgagaagaccaagctgacgcctggcaaagcattcttcctgcctcactgacctccctgaatgacttgggcttgagaatgtttctgcatgatttctctgagcttgctgtcttacctgagagcaggaagtcaaaaggagagtgatggagccacctgctgccctctactttgcagatattaaagaggagcctgaaactgttccttggacatcttatgaatgtcagaaaataccttttggagggttagaagatcaggggacatggttgttcacatttgctgccacggaacaccgccagtcttcacttggaaacagaatcacgccttgtgaagagatcatccctaagcaggagagaagctactaaaggattgtgtcctcctccaccttccctgtgctcggtctccacctgtctcccattctgtgacgatggttcaatggaagagactctgccagctgcattacttgtgggctctgggctgctatatgctgctggccactgtggctctgaaactttctttcaggttgaagtgtgactctgaccacttgggtctggagtccagggaatctcaaagccagtactgtaggaatatcttgtataatttcctgaaacttccagcaaagaggtctatcaactgttcaggggtcacccgaggggaccaagaggcagtgcttcaggctattctgaataacctggaggtcaagaagaagcgagagcctttcacagacacccactacctctccctcaccagagactgtgagcacttcaaggctgaaaggaagttcatacagttcccactgagcaaagaagaggtggagttccctattgcatactctatggtgattcatgagaagattgaaaactttgaaaggctactgcgagctgtgtatgcccctcagaacatatactgtgtccatgtggatgagaagtccccagaaactttcaaagaggcggtcaaagcaattatttcttgcttcccaaatgtcttcatagccagtaagctggttcgggtggtttatgcctcctggtccagggtgcaagctgacctcaactgcatggaagacttgctccagagctcagtgccgtggaaatacttcctgaatacatgtgggacggactttcctataaagagcaatgcagagatggtccaggctctcaagatgttgaatgggaggaatagcatggagtcagaggtacctcctaagcacaaagaaacccgctggaaatatcactttgaggtagtgagagacacattacacctaaccaacaagaagaaggatcctcccccttataatttaactatgtttacagggaatgcgtacattgtggcttcccgagatttcgtccaacatgttttgaagaaccctaaatcccaacaactgattgaatgggtaaaagacacttatagcccagatgaacacctctgggccacccttcagcgtgcacggtggatgcctggctctgttcccaaccaccccaagtacgacatctcagacatgacttctattgccaggctggtcaagtggcagggtcatgagggagacatcgataagggtgctccttatgctccctgctctggaatccaccagcgggctatctgcgtttatggggctggggacttgaattggatgcttcaaaaccatcacctgttggccaacaagtttgacccaaaggtagatgataatgctcttcagtgcttagaagaatacctacgttataaggccatctatgggactgaactttgagacacactatgagagcgttgctacctgtggggcaagagcatgtacaaacatgctcagaacttgctgggacagtgtgggtgggagaccagggctttgcaattcgtggcatcctttaggataagagggctgctattagagtgtgggtaagtagatcttttgccttgcaaattgctgcctgggtgaatgctgcttgttctctcacccctaaccctagtagttcctccactaactttctcactaagtgagaatgagaactgctgtgatagggagagtgaaggagggatatgtggtagagcacttgatttcagttgaatgcctgctggtagcttttccattctgtggagctgccgttcctaataattccaggtttggtagcgtggaggagaactttgatggaaagagaaccttcccttctgtactgttaacttaaaaataaatagctcctgattcaaa

SEQ ID NO: 137266 - DNA, 761 bp, Homo sapiens
  Payload ID: 6877
  Gene Symbol: GCNT3
  Gene Name: glucosaminyl (N-acetyl) transferase 3, mucin type
  ENST ID: ENST00000559189
  CDS Start-End: 500-761
tgcctctcaagggctggggctgcaaaacatctcagagtttgactctttgcttcgacactaccgtctgcaagttcttgtgctagccgctgtgggaaagacacagctgagtcagacatgatccctgccctcaaggagcttgtgacaccacagtgaagacaagtctattttggtgctgaagggaaacagatgaagaacatgacctcaaggagcttcctgtcaatgagaagaccaagctgacgcctggcaaagatattaaagaggagcctgaaactgttccttggacatcttatgaatgtcagaaaataccttttggagggttagaagatcaggggacatggttgttcacatttgctgccacggaacaccgccagtcttcacttggaaacagaatcacgccttgtgaagagatcatccctaagcaggagagaagctactaaaggattgtgtcctcctccaccttccctgtgctcggtctccacctgtctcccattctgtgacgatggttcaatggaagagactctgccagctgcattacttgtgggctctgggctgctatatgctgctggccactgtggctctgaaactttctttcaggttgaagtgtgactctgaccacttgggtctggagtccagggaatctcaaagccagtactgtaggaatatcttgtataatttcctgaaacttccagcaaagaggtctatcaactgttcaggggtcacccgaggggaccaagaggcagtgcttcaggctattctgaata

SEQ ID NO: 137267 - DNA, 667 bp, Homo sapiens
  Payload ID: 6877
  Gene Symbol: GCNT3
  Gene Name: glucosaminyl (N-acetyl) transferase 3, mucin type
  ENST ID: ENST00000559200
  CDS Start-End: 209-667
agttgttccttttctcctggggtggaggtggatccagatccagacttgagtgtggtcggctagtttgtagggtcagattacagatctccatcaacaaaccagatgtaaggggcttctaggcaggtctttactaaggatttttgtccaggattgtgtcctcctccaccttccctgtgctcggtctccacctgtctcccattctgtgacgatggttcaatggaagagactctgccagctgcattacttgtgggctctgggctgctatatgctgctggccactgtggctctgaaactttctttcaggttgaagtgtgactctgaccacttgggtctggagtccagggaatctcaaagccagtactgtaggaatatcttgtataatttcctgaaacttccagcaaagaggtctatcaactgttcaggggtcacccgaggggaccaagaggcagtgcttcaggctattctgaataacctggaggtcaagaagaagcgagagcctttcacagacacccactacctctccctcaccagagactgtgagcacttcaaggctgaaaggaagttcatacagttcccactgagcaaagaagaggtggagttccctattgcatactctatggtgattcatgagaagattgaaaactttgaaaggctactgcgagctgtg

SEQ ID NO: 137268 - DNA, 668 bp, Homo sapiens
  Payload ID: 6877
  Gene Symbol: GCNT3
  Gene Name: glucosaminyl (N-acetyl) transferase 3, mucin type
  ENST ID: ENST00000559626
  CDS Start-End: 509-668
aaaggctttcaagttcttgcgtgagcactgacaggcttttatgaatagttggtgacacaggtacaaactgggctgttctggctgaaatatctgtttgccttgtcggatattgccagcattcttcctgcctcactgacctccctgaatgacttgggcttgagaatgtttctgcatgatttctctgagcttgctgtcttacctgagagcaggaagtcaaaaggagagtgatggagccacctgctgccctctactttgcagatattaaagaggagcctgaaactgttccttggacatcttatgaatgtcagaaaataccttttggagggttagaagatcaggggacatggttgttcacatttgctgccacggaacaccgccagtcttcacttggaaacagaatcacgccttgtgaagagatcatccctaagcaggagagaagctactaaaggattgtgtcctcctccaccttccctgtgctcggtctccacctgtctcccattctgtgacgatggttcaatggaagagactctgccagctgcattacttgtgggctctgggctgctatatgctgctggccactgtggctctgaaactttctttcaggttgaagtgtgactctgaccacttgggtctggagtccagggaatctcaaagccagtactgtagga

SEQ ID NO: 137269 - DNA, 5554 bp, Homo sapiens
  Payload ID: 6878
  Gene Symbol: GCNT4
  Gene Name: glucosaminyl (N-acetyl) transferase 4, core 2
  Uniprot ID: Q9P109
  ENST ID: ENST00000322348
  CDS Start-End: 863-2224
tcaatgcactgttcaaggatgtttgagagattttctgtcttgcctgaatacaaaacactgtagggaacctctttgtgcttgactttgcacacacacgggatcttcagggtgggtacatttaaaactgacaagtattgccaaattgccccccaacgtagtttttacaccccacctactactctcagtgaaaaatcaggccctttttattttaagggctaaattgctaatccctgtgtgaaaatgggtgttaacaaaataaaaaataaggaaaatatgcaggcttacccaattttgttatctatacattttacagtctctaatacttagcatagctcctttgggtgtctgcccaccacccttctttctgaacgtggggttccctgggctttccttgtttgacttcagacctggatctaatagggatctggaggtagaatcaagacgaatgttccctttggccttaggtgagtcctttgcatctctgaggccctgttgatgacatccagttctctagacctctgcccaaaccagagcaatccctcctcaaatatgctaagcagaaatgcagacaatataagacacactatatttatattttaggagtttacattaccttcccttctgtttggaaaccaacatctctcaaaattaggtatagttaacacagaataccccaaaataccaccattcttcataattccatttccttatttctggattctttcaagggtaaaaaccttgtttcattcatctttggggcagcatttgcctagtatgtggtaggcgcccagtagattttggataaactgacctgattttctgttaatattccaactggattatttctttctcctcttacagaatgaagatattcaaatgttattttaaacataccctacagcagaaagttttcatcctgtttttaaccctatggctgctctctttgttaaagcttctaaatgtgagacgactctttccgcaaaaagacatttacttggttgagtactccctaagtacctcgccttttgtaagaaacagatacactcatgttaaggatgaagtcaggtatgaagttaactgttcgggtatctatgaacaggagcctttggaaattggaaagagtctggaaataagaagaagggacatcattgacttggaggatgatgatgttgtggcaatgaccagtgattgtgacatttatcagactctaagaggttatgctcaaaagcttgtctcaaaggaggagaaaagcttcccaatagcctattctttggttgtccacaaagatgcaattatggttgaaaggcttatccatgctatatacaaccagcacaatatttactgcatccattatgatcgtaaggcacctgataccttcaaagttgccatgaacaatttagctaagtgcttctccaatattttcattgcttccaaattagaggctgtggaatatgcccacatttccagactccaggctgatttaaattgcttgtcggaccttctgaagtcttcaatccagtggaaatatgttatcaacttgtgtgggcaagattttcccctgaagtcaaattttgaattggtgtcagagttgaaaaaactcaatggagcaaatatgttggagacggtgaaacccccaaacagtaaattggaaagattcacttaccatcatgaacttagacgggtgccttatgaatatgtgaagctaccaataaggacaaacatctccaaggaagcacccccccataacattcagatatttgttggcagtgcttattttgttttaagtcaagcatttgttaaatatattttcaacaactccatcgttcaagacttttttgcctggtctaaagacacatactctcctgatgagcacttttgggctaccttgattcgggttccaggaatacctggggagatttccagatcagcccaggatgtgtctgatctgcagagtaagactcgccttgtcaagtggaattactatgaaggctttttctatcccagttgtactggatctcaccttcgaagcgtgtgtatttatggagctgcagaattaaggtggcttatcaaagatggacattggtttgctaataaatttgattctaaggtggaccctatcttgattaaatgcttggcagaaaagcttgaagaacagcagagagactggatcactttgccctcagaaaagttatttatggatagaaatctcactaccacatcatgatagtaaaatcaggatggaaataagagggtgcctgataaatggagtcagtgtggaattgaataccatactatgcccaatactgtttaaactcagtcctcccatattttaaaaggtgtccaaaattccatacacaagggaaagtgatctagcctttgatgttattagcctgcagttggctaggtttttttaatatttgtttttgcttgtaatctcactgagccaaatcagagatcttaaacattcagtcagtcatcaaacattattgagcacctaactatatgacaggcacttttttagagactgcggcttatcctcatcatagcaacctcggtatctttaagttctccacataacagtcaggattctactgaagaagcttttgaagtttgtggtaatcgtctgatcatataaaccacccatttcagagtagtgtttaagtactgtgaccaacactccacttgtctcttaactcagctttcaagacatttcttaaccatcagagcagaggaggaaagactcactacctcagaaaaatctcaaagaatagtccaatttcctgcttgccaaagcataatctgccttttggtgcattacttggtcaattcagggttgaggagactgttggggggcatttataatgtatgaaagttaaggaagggggtgaggatgtgggttgggacaggtagtacctaaagaggagcgaagggatttatacaacatttttatcatgttacaaaacagtatcatgaatggcctcctttttagttcaactgtttctttaaaatgcatttactgattaaaaataagaactgaccaatagctccaagtgtcacacaccagaacattaagcctaagtcctcaattcataagttatcattctagataagtttctttacaatggaatactttctgtggaatcattataattctgttgtatggaactatcaagctaagagtcactaaactttcttcaaaaggttgtgtgaaatatgacagctttctaaattaatttgtatagtcatttaaaattttttcttctctggcaactgtccaactggaatccagatttaaagtgataaaagctctaagtttcttgcagtctttttctcagcttagttccagagagaaaaaagctaattttcctaaggacacagcaagaatattcattaaggatattttctaaaacccacacttgagaaaaccacccaatgagtcaaaaatatatatatataatatatattttatatatatgtaatatatatttatgttatatattatatatagaacaattccattacatatataatatataaatatatatattatatatacatatattgtatatgaatatatattatatatacatataattatatatatataaatatatattatataacatataatgaatatatattatatatataatggaattgttctggaagtaaaatggggtaggaatggggttctgagaataggcaataacattttcaccagtctcttgggaaattgtagaactcatgtaaaaatttcttggtcatgatatgtctcaatggcagcctcagtaaataaaaatgtagcctcagatattatatttaaagatgtagtaaatctagcccaaaataggacaatttggaagatttaagtattacatattttttaaatgtctgtgttctaaatgtgaaatgcactttgctcattttaaagttcataatactaactgccaactgacaccacttctcgctccctttcttctcttgaactcatttttctccctttttatttacccccttcaaattacttcattctttggaaataactattaccaagccccattcttcaaaataagtaaacattgtatagagccaagttctgcaaaagatccataccagttcactcgtgtgcgactgtggacaggtaagtcactttggtctctatgaacctcagttttccagatctttgaaatgagcacttggatgcctatccttgcttccacacaagtgtttttttttttttttttttttttttgtgagaatcgattgaaatagtatatgaagtggtttgaaaataggtacaaactattgacatttcaatgtcagagagtgatacctgtagtagtataggcaaaggtccaaccccatcgaaaggcttaaacatttaccttttctgaaaaactattgaaatataaagagagtccccagtcacaggggcaacttctgtaaccaaatccagatctgaggaaactcctgtaaccccatttggggtttctttctaagccaatagggttacaggttggtacagtgacacattgagaatggggctacaaatacttttcccaccatctaggatgaaatacacgaaatcctgttgaaatcttggtttttatgcctttgctcatcagaataaacgtaaatgctgaaaaacaaataacctcctgatccactgtcttgcctcctggtgagaaatgattctatcccctgtttattgggaaatttccaaagttgttcatcacttaaatgccgtattcaaagggaacatggaaggatgaagcggagaaagtgccttcgagacattcacacatttctctggactcagtctgttaacatatcagggagcttgtcagatcacacctttttgccttggaaatcctacagatttcctgtacgccttcatatctgattcttccctaaaacctttgggtatgatttcctccctggtcttgataatgtcctgcagtctgtgttttataattattctttgtatttattgaatctagactttaagttattcagagatcagaccagaaccttagagtttctaaactgtatgtggatattaaataatattaataatgaaagagctaccaaaatagtctatattgtgtgaacaatctcttgggatattagacgtgtttaaagaccagtgttgctgctatttttaatattttggttaatttaagtgaaatgtacatattttaatttgaagatttatcttgcccatcagaatgtgaagatatacttgcatatattttgacatatttcatggaaaataaaaatgataatccactttgtgagtgtaagtgaatgtattcatatgtatgttattataaatgatttttgtttgcactgatgatgaaatgagagttttgggggctttttatacatttatatcgactggtctctaaatctcctattttgttttcttatcatttttgaaatacagttcccattacatgagttttaaatagattggtgtttcattttgtattatgctactactagatgttgattctctggtattgtaaaataaaatgtgctccaaaaacccaaa

SEQ ID NO: 137270 - DNA, 2064 bp, Homo sapiens
  Payload ID: 6879
  Gene Symbol: GCNT7
  Gene Name: glucosaminyl (N-acetyl) transferase family member 7
  Uniprot ID: Q6ZNI0
  ENST ID: ENST00000243913
  CDS Start-End: 1073-1999
ataagctccacctcgagttccattaaggtattgaatgcacagtctttgttgggggaagcatttctttttttctttaatggagagtgaagttggccgcctcgaaggccaggaggactctgctcctgtcaggaaagatactcaagctatcatctgtaaacatgaacaacatttactgctggatggggaatcaccagcgcatggaagaactcttggtggatgcgttgtctggagcctgctcactccgccacgttactcagcaatgctttccctgtttctggataccacgctcccttctgaacgatgaagcatgaagcaccacgctccataaaagaccctccctctccccgtgggagggctcaggaagctatgagacctgagtatgtactgccttaaatcaacagcaacagaaggatctggtcccaaggaaatactcagagaagcaaaagcagcaacttttcaatctgcaggtcagaaccaacaggaataaaactctccagggacagatggcaacaaaacctgccaagcaactctactcaagtgactgaagcaggcgccgctgccggggaggaaccgatgggagagaaaggccaggctgggccctgacaccgccaggactccccctccaggaaccagggggcttctcctggaagcttaaaggaaaaaatacttaaattatggtaataagaatgcacctggagctcaagatatgagccagcttcgagccacaaagtctggacttgtcgtgagggcagtcatttgcatcttcatttttctttacttaaggaatccaactcctgcagaatcagaagaagaacctgcccaaccagaagtagtagaatgtggcttttacccagatgaactgtgttccgctttatttgaagggaaaggggcggccccctaaattgcaaaattttgcaaaacccctcataaatctgaaatacatgctcatttacacacaccaggaaactgctccaggatttctcgggggctgcatttcataaccagacccctgtctgcagaagagggcgatttctctttggcatatattataactattcataaggagctggccatgtttgtgcagcttctcagagctatttatgtacctcaaaatgtttattgtattcatgttgatgaaaaggccccaatgaagtataagactgctgtgcaaaccttggttaactgttttgaaaacgtttttatttcctccaagacagagaaggtggcttatgctggctttacaagactacaggcagatattaattgtatgaaagttctagtgcattctaaatttcaatggaactatgtcatcaatctttgtggacaggattttcccatcaaaaccaacagagaaatcatacactacatcagaagcaaatggagtgataaaaatattactcctggagtaatccaaccattgcacattaaatccaagacaagtcaaagtcatctcgaattcgttcctaaaggaagtatctatgcacctccaaataacagattcaaagacaaaccaccccataacttaaccatttattttggaagtgcttactatgtacttacaaggaagtttgtagagttcatactgactgacatccatgcaaaagacatgcttcagtggtccaaagacatccgcagcccagagcaacactactgggtgaccctgaaccgactaaaagatgctccaggtgctacaccaaacgctggctgggaaggaaatgttcgagccattaagcggaaaagtgaggaaggaaatgttcatgatggatgtaaaggccgctacgtcgaagacatctgcgtatacggaccaggagacctgccgtggctcattcagtcgccttctctgtttgccaacaaattcgaaccctcgacagacccgcttgtggttacctgcttagagcggcggcacagacttcaagtgctgaggcaggcagaagttcctatagagccacactggcattttcaacagcagagtcatttcaatatgagactgaaccgctagggagtgtttgctttcttactggtatcattctgtttccttgacttgaaacaagagaacattgaacc

SEQ ID NO: 137271 - DNA, 1355 bp, Homo sapiens
  Payload ID: 6879
  Gene Symbol: GCNT7
  Gene Name: glucosaminyl (N-acetyl) transferase family member 7
  ENST ID: ENST00000617620
  CDS Start-End: 1-1290
atgagccagcttcgagccacaaagtctggacttgtcgtgagggcagtcatttgcatcttcatttttctttacttaaggaatccaactcctgcagaatcagaagaagaacctgcccaaccagaagtagtagaatgtggcttttacccagatgaactgtgttccgctttatttgaagggaaaggggcggcccccattgcaaaattttgcaaaacccctcataaatctgaaatacatgctcatttacacacaccaggaaactgctccaggatttctcgggggctgcatttcataaccagacccctgtctgcagaagagggcgatttctctttggcatatattataactattcataaggagctggccatgtttgtgcagcttctcagagctatttatgtacctcaaaatgtttattgtattcatgttgatgaaaaggccccaatgaagtataagactgctgtgcaaaccttggttaactgttttgaaaacgtttttatttcctccaagacagagaaggtggcttatgctggctttacaagactacaggcagatattaattgtatgaaagttctagtgcattctaaatttcaatggaactatgtcatcaatctttgtggacaggattttcccatcaaaaccaacagagaaatcatacactacatcagaagcaaatggagtgataaaaatattactcctggagtaatccaaccattgcacattaaatccaagacaagtcaaagtcatctcgaattcgttcctaaaggaagtatctatgcacctccaaataacagattcaaagacaaaccaccccataacttaaccatttattttggaagtgcttactatgtacttacaaggaagtttgtagagttcatactgactgacatccatgcaaaagacatgcttcagtggtccaaagacatccgcagcccagagcaacactactgggtgaccctgaaccgactaaaagatgctccaggtgctacaccaaacgctggctgggaaggaaatgttcgagccattaagcggaaaagtgaggaaggaaatgttcatgatggatgtaaaggccgctacgtcgaagacatctgcgtatacggaccaggagacctgccgtggctcattcagtcgccttctctgtttgccaacaaattcgaaccctcgacagacccgcttgtggttacctgcttagagcggcggcacagacttcaagtgctgaggcaggcagaagttcctatagagccacactggcattttcaacagcagagtcatttcaatatgagactgaaccgctagggagtgtttgctttcttactggtatcattctgtttccttgacttgaaacaagagaacattgaacc

SEQ ID NO: 137272 - DNA, 1533 bp, Homo sapiens
  Payload ID: 6880
  Gene Symbol: G6PC3
  Gene Name: glucose 6 phosphatase, catalytic, 3
  Uniprot ID: Q9BUM1
  ENST ID: ENST00000269097
  CDS Start-End: 232-1272
agtagggaggaaaaccggaggagagcgcaggaggaaacagtaccggctggaggccggtcttgcaggagcgggggactgctgggggcggggcttggtggtgaccgctggcggggcggggcctggggctcagaggggtgggctttggagatcagagggtcgacgctgcttcgttgcctggactctggtttccgccctggagcaagccggggcctggtcggcagctgggccgccatggagtccacgctgggcgcgggcatcgtgatagccgaggcgctacagaaccagctagcctggctggagaacgtgtggctctggatcacctttctgggcgatcccaagatcctctttctgttctacttccccgcggcctactacgcctcccgccgtgtgggcatcgcggtgctctggatcagcctcatcaccgagtggctcaacctcatcttcaagtggtttctttttggagacaggcccttttggtgggtccatgagtctggttactacagccaggctccagcccaggttcaccagttcccctcttcttgtgagactggtccaggcagcccttctggacactgcatgatcacaggagcagccctctggcccataatgacggccctgtcttcgcaggtggccactcgggcccgcagccgctgggtaagggtgatgcctagcctggcttattgcaccttccttttggcggttggcttgtcgcgaatcttcatcttagcacatttccctcaccaggtgctggctggcctaataactggcgctgtcctgggctggctgatgactccccgagtgcctatggagcgggagctaagcttctatgggttgactgcactggccctcatgctaggcaccagcctcatctattggaccctctttacactgggcctggatctttcttggtccatcagcctagccttcaagtggtgtgagcggcctgagtggatacacgtggatagccggccctttgcctccctgagccgtgactcaggggctgccctgggcctgggcattgccttgcactctccctgctatgcccaggtgcgtcgggcacagctgggaaatggccagaagatagcctgccttgtgctggccatggggctgctgggccccctggactggctgggccacccccctcagatcagcctcttctacattttcaatttcctcaagtacaccctctggccatgcctagtcctggccctcgtgccctgggcagtgcacatgttcagtgcccaggaagcaccgcccatccactcttcctgacttcttgtgtgcctccctttcctttccctcccacaaagccaacactctgtgaccaccacactccaggaggcagccccatccccttccagcccctaagtaggccctcccctccctaaatctgcttccgcaccacctggtcttagccccaaagatgggccttctctctcccagataagttggtcctccctctgcctttcctctcaagcccccaaagagcaaaggcaacagcaagaccagcgggttcttgcaacactgtgaggg

SEQ ID NO: 137273 - DNA, 844 bp, Homo sapiens
  Payload ID: 6880
  Gene Symbol: G6PC3
  Gene Name: glucose 6 phosphatase, catalytic, 3
  ENST ID: ENST00000590253
  CDS Start-End: 1-209
cggccctgtcttcgcaggtggccactcgggcccgcaggcgctgtcctgggctggctgatgactccccgagtgcctatggagcgggagctaagcttctatgggttgactgcactggccctcatgctaggcaccagcctcatctattggaccctctttacactgggcctggatctttcttggtccatcagcctagccttcaagtggtgtgagcggcctgagtggatacacgtggatagccggccctttgcctccctgagccgtgactcaggggctgccctgggcctgggcattgccttgcactctccctgctatgcccaggtgcgtcgggcacagctgggaaatggccagaagatagcctgccttgtgctggccatggggctgctgggccccctggactggctgggccacccccctcagatcagcctcttctacattttcaatttcctcaagtacaccctctggccatgcctagtcctggccctcgtgccctgggcagtgcacatgttcagtgcccaggaagcaccgcccatccactcttcctgacttcttgtgtgcctccctttcctttccctcccacaaagccaacactctgtgaccaccacactccaggaggcagccccatccccttccagcccctaagtaggccctcccctccctaaatctgcttccgcaccacctggtcttagccccaaagatgggccttctctctcccagataagttggtcctccctctgcctttcctctcaagcccccaaagagcaaaggcaacagcaagaccagcgggttcttgcaacactgtgaggggcagccagggcggccccaataaagcccttgaatactttga

SEQ ID NO: 137274 - DNA, 710 bp, Homo sapiens
  Payload ID: 6880
  Gene Symbol: G6PC3
  Gene Name: glucose 6 phosphatase, catalytic, 3
  ENST ID: ENST00000593115
  CDS Start-End: 222-443
aaaaccggaggagagcgcaggaggaaacagtaccggctggaggccggtcttgcaggagcgggggactgctgggggcggggcttggtggtgaccgctggcggggcggggcctggggctcagaggggtgggctttggagatcagagggtcgacgctgcttcgttgcctggactctggtttccgccctggagcaagccggggcctggtcggcagctgggccgccatggagtccacgctgggcgcgggcatcgtgatagccgaggcgctacagaaccagctagcctggctggagaacgtgtggctctggatcacctttctgggcgatcccaagatcctctttctgttctacttccccgcggcctactacgcctcccgccgtgtgggcatcgcggtgctctggatcagcctcatcaccgagtggctcaacctcatcttcaagtggtgagacagagaagccctccggcatcctggtccccacccccgagggccctgagtcatgtaagcatgctttgtgctgggcatcacggtagctgctaaggacagagacaccttgcagattaaggtgtggtccctggaccatgcccaacggcataggcagcacttgaaaactggctaaaaacgcagactctcaggccccgggccagagctactgaatcaaaatctgcattttaacaaggttcccaggtttctttttggagacaggcccttttgg

SEQ ID NO: 137275 - DNA, 1572 bp, Homo sapiens
  Payload ID: 6880
  Gene Symbol: G6PC3
  Gene Name: glucose 6 phosphatase, catalytic, 3
  ENST ID: ENST00000585361
  CDS Start-End: 216-437
ggaggagagcgcaggaggaaacagtaccggctggaggccggtcttgcaggagcgggggactgctgggggcggggcttggtggtgaccgctggcggggcggggcctggggctcagaggggtgggctttggagatcagagggtcgacgctgcttcgttgcctggactctggtttccgccctggagcaagccggggcctggtcggcagctgggccgccatggagtccacgctgggcgcgggcatcgtgatagccgaggcgctacagaaccagctagcctggctggagaacgtgtggctctggatcacctttctgggcgatcccaagatcctctttctgttctacttccccgcggcctactacgcctcccgccgtgtgggcatcgcggtgctctggatcagcctcatcaccgagtggctcaacctcatcttcaagtggtgagacagagaagccctccggcatcctggtccccacccccgagggccctgagtcatgtgtttctttttggagacaggcccttttggtgggtccatgagtctggttactacagccaggctccagcccaggttcaccagttcccctcttcttgtgagactggtccaggcagcccttctggacactgcatgatcacaggagcagccctctggcccataatgacggccctgtcttcgcaggtggccactcgggcccgcagccgctgggtaagggtgatgcctagcctggcttattgcaccttccttttggcggttggcttgtcgcgaatcttcatcttagcacatttccctcaccaggtgctggctggcctaataactggcgctgtcctgggctggctgatgactccccgagtgcctatggagcgggagctaagcttctatgggttgactgcactggccctcatgctaggcaccagcctcatctattggaccctctttacactgggcctggatctttcttggtccatcagcctagccttcaagtggtgtgagcggcctgagtggatacacgtggatagccggccctttgcctccctgagccgtgactcaggggctgccctgggcctgggcattgccttgcactctccctgctatgcccaggtgcgtcgggcacagctgggaaatggccagaagatagcctgccttgtgctggccatggggctgctgggccccctggactggctgggccacccccctcagatcagcctcttctacattttcaatttcctcaagtacaccctctggccatgcctagtcctggccctcgtgccctgggcagtgcacatgttcagtgcccaggaagcaccgcccatccactcttcctgacttcttgtgtgcctccctttcctttccctcccacaaagccaacactctgtgaccaccacactccaggaggcagccccatccccttccagcccctaagtaggccctcccctccctaaatctgcttccgcaccacctggtcttagccccaaagatgggccttctctctcccagataagttggtcctccctctgcctttcctctcaagcccccaaagagcaaaggcaacagcaagaccagcgggttcttgcaacactgtg

SEQ ID NO: 137276 - DNA, 1718 bp, Homo sapiens
  Payload ID: 6880
  Gene Symbol: G6PC3
  Gene Name: glucose 6 phosphatase, catalytic, 3
  ENST ID: ENST00000588558
  CDS Start-End: 217-435
cggaggagagcgcaggaggaaacagtaccggctggaggccggtcttgcaggagcgggggactgctgggggcggggcttggtggtgaccgctggcggggcggggcctggggctcagaggggtgggctttggagatcagagggtcgacgctgcttcgttgcctggactctggtttccgccctggagcaagccggggcctggtcggcagctgggccgccatggagtccacgctgggcgcgggcatcgtgatagccgaggcgctacagaaccagctagcctggctggagaacgtgtggctctggatcacctttctgggcgatcccaagatcctctttctgttctacttccccgcggcctactacgcctcccgccgtgtgggcatcgcggtgctctggatcagcctcatcaccgagtggctcaacctcatcttcaagtgaagcatgctttgtgctgggcatcacggtagctgctaaggacagagacaccttgcagattaaggtgtggtccctggaccatgcccaacggcataggcagcacttgaaaactggctaaaaacgcagactctcaggccccgggccagagctactgaatcaaaatctgcattttaacaaggttcccaggtgattccctgtttctttttggagacaggcccttttggtgggtccatgagtctggttactacagccaggctccagcccaggttcaccagttcccctcttcttgtgagactggtccaggcagcccttctggacactgcatgatcacaggagcagccctctggcccataatgacggccctgtcttcgcaggtggccactcgggcccgcagccgctgggtaagggtgatgcctagcctggcttattgcaccttccttttggcggttggcttgtcgcgaatcttcatcttagcacatttccctcaccaggtgctggctggcctaataactggcgctgtcctgggctggctgatgactccccgagtgcctatggagcgggagctaagcttctatgggttgactgcactggccctcatgctaggcaccagcctcatctattggaccctctttacactgggcctggatctttcttggtccatcagcctagccttcaagtggtgtgagcggcctgagtggatacacgtggatagccggccctttgcctccctgagccgtgactcaggggctgccctgggcctgggcattgccttgcactctccctgctatgcccaggtgcgtcgggcacagctgggaaatggccagaagatagcctgccttgtgctggccatggggctgctgggccccctggactggctgggccacccccctcagatcagcctcttctacattttcaatttcctcaagtacaccctctggccatgcctagtcctggccctcgtgccctgggcagtgcacatgttcagtgcccaggaagcaccgcccatccactcttcctgacttcttgtgtgcctccctttcctttccctcccacaaagccaacactctgtgaccaccacactccaggaggcagccccatccccttccagcccctaagtaggccctcccctccctaaatctgcttccgcaccacctggtcttagccccaaagatgggccttctctctcccagataagttggtcctccctctgcctttcctctcaagcccccaaagagcaaaggcaacagcaagaccagcgggttcttgcaacactgtgaggggcagcc

SEQ ID NO: 137277 - DNA, 805 bp, Homo sapiens
  Payload ID: 6880
  Gene Symbol: G6PC3
  Gene Name:: glucose 6 phosphatase, catalytic, 3
  ENST ID: ENST00000591696
  CDS Start-End: 75-805
cgacgctgcttcgttgcctggactctggtttccgccctggagcaagccggggcctggtcggcagctgggccgccatggagtccacgctgggcgcgggcatcgtgatagccgaggcgctacagaaccagctagcctggctggagaacgtgtggctctggatcacctttctgggcgatcccaagatcctctttctgttctacttccccgcggcctactacgcctcccgccgtgtgggcatcgcggtgctctggatcagcctcatcaccgagtggctcaacctcatcttcaagtggtttctttttggagacaggcccttttggtgggtccatgagtctggttactacagccaggctccagcccaggtggccactcgggcccgcagccgctgggtaagggtgatgcctagcctggcttattgcaccttccttttggcggttggcttgtcgcgaatcttcatcttagcacatttccctcaccaggtgctggctggcctaataactggcgctgtcctgggctggctgatgactccccgagtgcctatggagcgggagctaagcttctatgggttgactgcactggccctcatgctaggcaccagcctcatctattggaccctctttacactgggcctggatctttcttggtccatcagcctagccttcaagtggtgtgagcggcctgagtggatacacgtggatagccggccctttgcctccctgagccgtgactcaggggctgccctgggcctgggcattgccttgcactctccctgctatgcccaggtgcgtcgggcacagctgggaaa

SEQ ID NO: 137278 - DNA, 3096 bp, Homo sapiens
  Payload ID: 6881
  Gene Symbol: G6PC
  Gene Name: glucose-6-phosphatase, catalytic subunit
  Uniprot ID: P35575
  ENST ID: ENST00000253801
  CDS Start-End: 80-1153
tagcagagcaatcaccaccaagcctggaataactgcaagggctctgctgacatcttcctgaggtgccaaggaaatgaggatggaggaaggaatgaatgttctccatgactttgggatccagtcaacacattacctccaggtgaattaccaagactcccaggactggttcatcttggtgtccgtgatcgcagacctcaggaatgccttctacgtcctcttccccatctggttccatcttcaggaagctgtgggcattaaactcctttgggtagctgtgattggagactggctcaacctcgtctttaagtggattctctttggacagcgtccatactggtgggttttggatactgactactacagcaacacttccgtgcccctgataaagcagttccctgtaacctgtgagactggaccagggagcccctctggccatgccatgggcacagcaggtgtatactacgtgatggtcacatctactctttccatctttcagggaaagataaagccgacctacagatttcggtgcttgaatgtcattttgtggttgggattctgggctgtgcagctgaatgtctgtctgtcacgaatctaccttgctgctcattttcctcatcaagttgttgctggagtcctgtcaggcattgctgttgcagaaactttcagccacatccacagcatctataatgccagcctcaagaaatattttctcattaccttcttcctgttcagcttcgccatcggattttatctgctgctcaagggactgggtgtagacctcctgtggactctggagaaagcccagaggtggtgcgagcagccagaatgggtccacattgacaccacaccctttgccagcctcctcaagaacctgggcacgctctttggcctggggctggctctcaactccagcatgtacagggagagctgcaaggggaaactcagcaagtggctcccattccgcctcagctctattgtagcctccctcgtcctcctgcacgtctttgactccttgaaacccccatcccaagtcgagctggtcttctacgtcttgtccttctgcaagagtgcggtagtgcccctggcatccgtcagtgtcatcccctactgcctcgcccaggtcctgggccagccgcacaagaagtcgttgtaagagatgtggagtcttcggtgtttaaagtcaacaaccatgccagggattgaggaggactactatttgaagcaatgggcactggtatttggagcaagtgacatgccatccattctgccgtcgtggaattaaatcacggatggcagattggagggtcgcctggcttattcccatgtgtgactccagcctgccctcagcacagactctttcagatggaggtgccatatcacgtacaccatatgcaagtttcccgccaggaggtcctcctctctctacttgaatactctcacaagtagggagctcactcccactggaacagcccattttatctttgaatggtcttctgccagcccattttgaggccagaggtgctgtcagctcaggtggtcctcttttacaatcctaatcatattgggtaatgtttttgaaaagctaatgaagctattgagaaagacctgttgctagaagttgggttgttctggattttcccctgaagacttacttattcttccgtcacatatacaaaagcaagacttccaggtagggccagctcacaagcccaggctggagatcctaactgagaattttctacctgtgttcattcttaccgagaaaaggagaaaggagctctgaatctgataggaaaagaaggctgcctaaggaggagtttttagtatgtggcgtatcatgcaagtgctatgccaagccatgtctaaatggctttaattatatagtaatgcactctcagtaatgggggaccagcttaagtataattaatagatggttagtggggtaattctgcttctagtattttttttactgtgcatacatgttcatcgtatttccttggatttctgaatggctgcagtgacccagatattgcactaggtcaaaacattcaggtatagctgacatctcctctatcacattacatcatcctccttataagcccagctctgctttttccagattcttccactggctccacatccaccccactggatcttcagaaggctagagggcgactctggtggtgcttttgtatgtttcaattaggctctgaaatcttgggcaaaatgacaaggggagggccaggattcctctctcaggtcactccagtgttacttttaattcctagagggtaaatatgactcctttctctatcccaagccaaccaagagcacattcttaaaggaaaagtcaacatcttctctctttttttttttttttgagacagggtctcactatgttgcccaggctgctcttgaattcctgggctcaagcagtcctcccaccctaccacagcgtcccgcgtagctgggactacaggtgcaagccactatgtccagctagccaactcctccttgcctgcttttctttttttttctttttttgagacggcgcacctatcacccaggctggagtggagtggcacgatcttggctcactgcaacctcttcctcctggttcaagcgattctcatgtctcagcctcctcagtagctaggactaccggcgtgcaccaccatgccaggctaatttttatatttttagaattttagaagagatgggatttcatcatgttggccaggctggtctcgaactcctgacctcaagtgatccacctgccttggcctcccaaggtgctaggattacaggcatgagccaccgcaccgggccctccttgcctgtttttcaatctcatctgatatgcagagtatttctgccccacccacctaccccccaaaaaaagctgaagcctatttatttgaaagtccttgtttttgctactaattatatagtataccatacattatcattcaaaacaaccatcctgctcataacatctttgaaaagaaaaatatatatgtgcagtattttattaaagcaacattttatttaagaataaagtcttgttaattactatattttagatgcaatgtgatc

SEQ ID NO: 137279 - DNA, 987 bp, Homo sapiens
  Payload ID: 6881
  Gene Symbol: G6PC
  Gene Name: glucose-6-phosphatase, catalytic subunit
  Uniprot ID: P35575
  ENST ID: ENST00000592383
  CDS Start-End: 81-611
atagcagagcaatcaccaccaagcctggaataactgcaagggctctgctgacatcttcctgaggtgccaaggaaatgaggatggaggaaggaatgaatgttctccatgactttgggatccagtcaacacattacctccaggtgaattaccaagactcccaggactggttcatcttggtgtccgtgatcgcagacctcaggaatgccttctacgtcctcttccccatctggttccatcttcaggaagctgtgggcattaaactcctttgggtagctgtgattggagactggctcaacctcgtctttaagtggattctctttggacagcgtccatactggtgggttttggatactgactactacagcaacacttccgtgcccctgataaagcagttccctgtaacctgtgagactggaccagggaaagataaagccgacctacagatttcggtgcttgaatgtcattttgtggttgggattctgggctgtgcagctgaatgtctgtctgtcacgaatctaccttgctgctcattttcctcatcaagttgttgctggagtcctgtcaggcattgctgttgcagaaactttcagccacatccacagcatctataatgccagcctcaagaaatattttctcattaccttcttcctgttcagcttcgccatcggattttatctgctgctcaagggactgggtgtagacctcctgtggactctggagaaagcccagaggtggtgcgagcagccagaatgggtccacattgacaccacaccctttgccagcctcctcaagaacctgggcacgctctttggcctggggctggctctcaactccagcatgtacagggagagctgcaaggggaaactcagcaagtggctcccattccgcctcagctctattgtagcctccctcgtcctcctgcacgtctttgactccttgaaacccccatcccaagtcgagctggtcttctacgtcttgtccttctgc

SEQ ID NO: 137280 - DNA, 1097 bp, Homo sapiens
  Payload ID: 6881
  Gene Symbol: G6PC
  Gene Name: glucose-6-phosphatase, catalytic subunit
  ENST ID: ENST00000585489
  CDS Start-End: 78-569
gcagagcaatcaccaccaagcctggaataactgcaagggctctgctgacatcttcctgaggtgccaaggaaatgaggatggaggaaggaatgaatgttctccatgactttgggatccagtcaacacattacctccaggtgaattaccaagactcccaggactggttcatcttggtgtccgtgatcgcagacctcaggaatgccttctacgtcctcttccccatctggttccatcttcaggaagctgtgggcattaaactcctttgggtagctgtgattggagactggctcaacctcgtctttaagtggattctctttggacagcgtccatactggtgggttttggatactgactactacagcaacacttccgtgcccctgataaagcagttccctgtaacctgtgagactggaccagggagcccctctggccatgccatgggcacagcaggtgtatactacgtgatggtcacatctactctttccatctttcagggaaagataaagccgacctacagatttcggcattgctgttgcagaaactttcagccacatccacagcatctataatgccagcctcaagaaatattttctcattaccttcttcctgttcagcttcgccatcggattttatctgctgctcaagggactgggtgtagacctcctgtggactctggagaaagcccagaggtggtgcgagcagccagaatgggtccacattgacaccacaccctttgccagcctcctcaagaacctgggcacgctctttggcctggggctggctctcaactccagcatgtacagggagagctgcaaggggaaactcagcaagtggctcccattccgcctcagctctattgtagcctccctcgtcctcctgcacgtctttgactccttgaaacccccatcccaagtcgagctggtcttctacgtcttgtccttctgcaagagtgcggtagtgcccctggcatccgtcagtgtcatcccctactgcctcgcccaggtcctgggccagccgcacaagaagtcgttgtaagagatgtggagtcttcggtgtttaaagtcaacaaccatgccagggattgaggaggactacta

SEQ ID NO: 137281 - DNA, 2918 bp, Homo sapiens
  Payload ID: 6882
  Gene Symbol: G6PC2
  Gene Name: glucose-6-phosphatase, catalytic, 2
  Uniprot ID: Q9NQR9
  ENST ID: ENST00000282075
  CDS Start-End: 40-348
ctccaattgctctatgtttagaattgcctctttttcaagatggatttccttcacaggaatggagtgctcataattcagcatttgcagaaggactaccgagcttactacacttttctaaattttatgtccaatgttggagaccccaggaatatctttttcatttattttccactttgttttcaatttaatcagacagttggaaccaagatgatatgggtagcagtcattggggattggttaaatcttatatttaaatggaagtccatctggccatgcaatgggcgcatcctgtgtctggtatgtcatggtaaccgctgccctgagccacactgtctgtgggatggataagttctctatcactctgcacagactgacctggtcatttctttggagtgttttttggttgattcaaatcagtgtctgcatctccagagtattcatagcaacacattttcctcatcaagttattcttggagtaattggtggcatgctggtggcagaggcctttgaacacactccaggcatccaaacggccagtctgggcacatacctgaagaccaacctctttctcttcctgtttgcagttggcttttacctgcttcttagggtgctcaacattgacctgctgtggtccgtgcccatagccaaaaagtggtgtgctaaccccgactggatccacattgacaccacgccttttgctggactcgtgagaaaccttggggtcctctttggcttgggctttgcaatcaactcagagatgttcctcctgagctgccgagggggaaataactacacactgagcttccggttgctctgtgccttgacctcattgacaatactgcagctctaccatttcctccagatcccgactcacgaagagcatttattttatgtgctgtctttttgtaaaagtgcatccattcccctaactgtggttgctttcattccctactctgttcatatgttaatgaaacaaagcggaaagaagagtcagtagagtggtgcctagagttagtgctctgtgtcacagatcacccttctccatccaccagtagagccacagagtaggcacagaccagaggcttctaatccgacttcacagaatagcggcacaggccccattccccatagagatgtttagtttggccttcgcactggtctttttttttaatccttcagttaccaatatttagatacaagaatatttgacataaaaatcggaagttctgtatttcttgaaaaatctgatagtatgacaacacagagcctgcatccccagctggagacaactgaccagagctgcatactaacagtccccagtaggaggcaaggactccattttctcacagtcttcagcatcccagcaggagccccactatgattcctttatcttcttaaggccaggctgcatctgattcctgttgacattttagtggggaccacagccatatccagtttcagttttcagatgaggaaatggaagcctatttaggtaaaagaacttgcctggagtcacgccaccttcagagcaggaattagaacccaaggcttctgacacatatccccattacactgtgtgtttgagtgtgcacacatgcacatgctttttgtttgtatgtttcctttttagaaccagggacttgctctgttgcccaggctggagtgcagtggtggatagcggctcactgcagcctcaaactcctggctcaaatgatcctccctcctcagcctcccattagctaagactacaggtgtgcaccaccatgcctggctaatttttgaatattttttagagccagcttcttactatatttgcccaggctggtcttgaactcctggcctcaaggagttcccttgaggatgttccacccatgtcagcctcccacagtgctgggattgcaggcttgagccattgtattaatagttggcctacactgtcttttgtttcttcatttacaagaggtaaaaatcagtaagaatgaatgctttcatttagattctatgatgactgccatataaatcagctaccttttcagaaatgacattgaaatactgcatcctctttgacttataccccacacatacatgcagggtctaggtgggaccaacagtggctccagatgtatatacacacgggtccagggacaacagaacaggccaggctacagtatggacttgaacctctgcttcacttctggtctctgttttacagtagtgctcaccaatatttcaataaattctactgaacttactctaatagaacattattcaacccccaaagacttatctcttcactatgacatctccatactttatttttaggagacagactttcaaaaccagagaaatcaggtgccttcctcaaggtcatgctccaacccaggccaactattaaatgcttgcatctgttagctggattagtctctatgtatactgaactgtgatgaaaatctatagctttgttttagaaaattattgttgatggactattaatattatattaacaatttctcagtaagtgtgttttttcctcattgaatctaggaatgctgggctttaagttgataactgtgtcatttcaatcaagtacaaggattttgaggcagattttgctagatatcttagtaatcccccacaatgttttatgtaactcttctcagaatatcaatacattaattattttagatgacatattaaataatctatgaatattaatgaaaacaatacagttgaagtgagtgttgtttaacatgatagtagctgaggataacaaacctcaaaaaatcaaagtattaattactcctttccaagtatatgtatagagcatgtgtcattgcttttataaaacgcacttaatagctttctttctaaaaggcaactgaactttctaaaaggtaaataaactgaacttgatatta

SEQ ID NO: 137282 - DNA, 1214 bp, Homo sapiens
  Payload ID: 6882
  Gene Symbol: G6PC2
  Gene Name: glucose-6-phosphatase, catalytic, 2
  Uniprot ID: Q9NQR9
  ENST ID: ENST00000375363
  CDS Start-End: 93-1160
tcgacatgccacaaaggcacagtataaaaacggtgggaatcagagcacttcagctccaattgctctatgtttagaattgcctctttttcaagatggatttccttcacaggaatggagtgctcataattcagcatttgcagaaggactaccgagcttactacacttttctaaattttatgtccaatgttggagaccccaggaatatctttttcatttattttccactttgttttcaatttaatcagacagttggaaccaagatgatatgggtagcagtcattggggattggttaaatcttatatttaaatggatattatttggtcatcgaccttactggtgggtccaagaaactcagatttacccaaatcactcaagtccatgccttgaacagttccctactacatgtgaaacaggtccaggaagtccatctggccatgcaatgggcgcatcctgtgtctggtatgtcatggtaaccgctgccctgagccacactgtctgtgggatggataagttctctatcactctgcacagactgacctggtcatttctttggagtgttttttggttgattcaaatcagtgtctgcatctccagagtattcatagcaacacattttcctcatcaagttattcttggagtaattggtggcatgctggtggcagaggcctttgaacacactccaggcatccaaacggccagtctgggcacatacctgaagaccaacctctttctcttcctgtttgcagttggcttttacctgcttcttagggtgctcaacattgacctgctgtggtccgtgcccatagccaaaaagtggtgtgctaaccccgactggatccacattgacaccacgccttttgctggactcgtgagaaaccttggggtcctctttggcttgggctttgcaatcaactcagagatgttcctcctgagctgccgagggggaaataactacacactgagcttccggttgctctgtgccttgacctcattgacaatactgcagctctaccatttcctccagatcccgactcacgaagagcatttattttatgtgctgtctttttgtaaaagtgcatccattcccctaactgtggttgctttcattccctactctgttcatatgttaatgaaacaaagcggaaagaagagtcagtagagtggtgcctagagttagtgctctgtgtcacagatcacccttctccatccacca

SEQ ID NO: 137283 - DNA, 494 bp, Homo sapiens
  Payload ID: 6882
  Gene Symbol: G6PC2
  Gene Name: glucose-6-phosphatase, catalytic, 2
  ENST ID: ENST00000421979
  CDS Start-End: 8-250
tttcaagatggatttccttcacaggaatggagtgctcataattcagcatttgcagaaggactaccgagcttactacacttttctaaattttatgtccaatgttggagaccccaggaatatctttttcatttattttccactttgttttcaatttaatcagacagttggaaccaagatgatatgggtagcagtcattggggattggttaaatcttatatttaaatggcatgctggtggcagaggcctttgaacacactccaggcatccaaacggccagtctgggcacatacctgaagaccaacctctttctcttcctgtttgcagttggcttttacctgcttcttagggtgctcaacattgacctgctgtggtccgtgcccatagccaaaaagtggtgtgctaaccccgactggatccacattgacaccacgccttttgctggactcgtgagaaaccttggggtcctctttggcttgggctttgcaatcaactca

SEQ ID NO: 137284 - DNA, 645 bp, Homo sapiens
  Payload ID: 6882
  Gene Symbol: G6PC2
  Gene Name: glucose-6-phosphatase, catalytic, 2
  Uniprot ID: Q9NQR9
  ENST ID: ENST00000429379
  CDS Start-End: 42-506
agctccaattgctctatgtttagaattgcctctttttcaagatggatttccttcacaggaatggagtgctcataattcagcatttgcagaaggactaccgagcttactacacttttctaaattttatgtccaatgttggagaccccaggaatatctttttcatttattttccactttgttttcaatttaatcagacagttggaaccaagatgatatgggtagcagtcattggggattggttaaatcttatatttaaatggatattatttggtcatcgaccttactggtgggtccaagaaactcagatttacccaaatcactcaagtccatgccttgaacagttccctactacatgtgaaacaggtccaggaagtccatctggccatgcaatgggcgcatcctgtgtctggtatgtcatggtaaccgctgccctgagccacactgtctgtgggatggataagttctctatcactctgcacaggcatgctggtggcagaggcctttgaacacactccaggcatccaaacggccagtctgggcacatacctgaagaccaacctctttctcttcctgtttgcagttggcttttacctgcttcttagggtgctcaacattgacctgctgtggtccgtgcccatagccaaa

SEQ ID NO: 137285 - DNA, 494 bp, Homo sapiens; identical to SEQ ID NO: 137283
  Payload ID: 6882
  Gene Symbol: G6PC2
  Gene Name: glucose-6-phosphatase, catalytic, 2
  ENST ID: ENST00000618310
  CDS Start-End: 8-250

SEQ ID NO: 137286 - DNA, 645 bp, Homo sapiens; identical to SEQ ID NO: 137284
  Payload ID: 6882
  Gene Symbol: G6PC2
  Gene Name: glucose-6-phosphatase, catalytic, 2
  Uniprot ID: Q9NQR9
  ENST ID: ENST00000612807
  CDS Start-End: 42-506

SEQ ID NO: 137287 - DNA, 1214 bp, Homo sapiens; identical to SEQ ID NO: 137282
  Payload ID: 6882
  Gene Symbol: G6PC2
  Gene Name: glucose-6-phosphatase, catalytic, 2
  Uniprot ID: Q9NQR9
  ENST ID: ENST00000622133
  CDS Start-End: 93-1160

SEQ ID NO: 137288 - DNA, 2913 bp, Homo sapiens
  Payload ID: 6882
  Gene Symbol: G6PC2
  Gene Name: glucose-6-phosphatase, catalytic, 2
  Uniprot ID: Q9NQR9
  ENST ID: ENST00000617403
  CDS Start-End: 40-348
ctccaattgctctatgtttagaattgcctctttttcaagatggatttccttcacaggaatggagtgctcataattcagcatttgcagaaggactaccgagcttactacacttttctaaattttatgtccaatgttggagaccccaggaatatctttttcatttattttccactttgttttcaatttaatcagacagttggaaccaagatgatatgggtagcagtcattggggattggttaaatcttatatttaaatggaagtccatctggccatgcaatgggcgcatcctgtgtctggtatgtcatggtaaccgctgccctgagccacactgtctgtgggatggataagttctctatcactctgcacagactgacctggtcatttctttggagtgttttttggttgattcaaatcagtgtctgcatctccagagtattcatagcaacacattttcctcatcaagttattcttggagtaattggtggcatgctggtggcagaggcctttgaacacactccaggcatccaaacggccagtctgggcacatacctgaagaccaacctctttctcttcctgtttgcagttggcttttacctgcttcttagggtgctcaacattgacctgctgtggtccgtgcccatagccaaaaagtggtgtgctaaccccgactggatccacattgacaccacgccttttgctggactcgtgagaaaccttggggtcctctttggcttgggctttgcaatcaactcagagatgttcctcctgagctgccgagggggaaataactacacactgagcttccggttgctctgtgccttgacctcattgacaatactgcagctctaccatttcctccagatcccgactcacgaagagcatttattttatgtgctgtctttttgtaaaagtgcatccattcccctaactgtggttgctttcattccctactctgttcatatgttaatgaaacaaagcggaaagaagagtcagtagagtggtgcctagagttagtgctctgtgtcacagatcacccttctccatccaccagtagagccacagagtaggcacagaccagaggcttctaatccgacttcacagaatagcggcacaggccccattccccatagagatgtttagtttggccttcgcactggtctttttttttaatccttcagttaccaatatttagatacaagaatatttgacataaaaatcggaagttctgtatttcttgaaaaatctgatagtatgacaacacagagcctgcatccccagctggagacaactgaccagagctgcatactaacagtccccagtaggaggcaaggactccattttctcacagtcttcagcatcccagcaggagccccactatgattcctttatcttcttaaggccaggctgcatctgattcctgttgacattttagtggggaccacagccatatccagtttcagttttcagatgaggaaatggaagcctatttaggtaaaagaacttgcctggagtcacgccaccttcagagcaggaattagaacccaaggcttctgacacatatccccattacactgtgtgtttgagtgtgcacacatgcacatgctttttgtttgtatgtttcctttttagaaccagggacttgctctgttgcccaggctggagtgcagtggtggatagcggctcactgcagcctcaaactcctggctcaaatgatcctccctcctcagcctcccattagctaagactacaggtgtgcaccaccatgcctggctaatttttgaatattttttagagccagcttcttactatatttgcccaggctggtcttgaactcctggcctcaaggagttcccttgaggatgttccacccatgtcagcctcccacagtgctgggattgcaggcttgagccattgtattaatagttggcctacactgtcttttgtttcttcatttacaagaggtaaaaatcagtaagaatgaatgctttcatttagattctatgatgactgccatataaatcagctaccttttcagaaatgacattgaaatactgcatcctctttgacttataccccacacatacatgcagggtctaggtgggaccaacagtggctccagatgtatatacacacgggtccagggacaacagaacaggccaggctacagtatggacttgaacctctgcttcacttctggtctctgttttacagtagtgctcaccaatatttcaataaattctactgaacttactctaatagaacattattcaacccccaaagacttatctcttcactatgacatctccatactttatttttaggagacagactttcaaaaccagagaaatcaggtgccttcctcaaggtcatgctccaacccaggccaactattaaatgcttgcatctgttagctggattagtctctatgtatactgaactgtgatgaaaatctatagctttgttttagaaaattattgttgatggactattaatattatattaacaatttctcagtaagtgtgttttttcctcattgaatctaggaatgctgggctttaagttgataactgtgtcatttcaatcaagtacaaggattttgaggcagattttgctagatatcttagtaatcccccacaatgttttatgtaactcttctcagaatatcaatacattaattattttagatgacatattaaataatctatgaatattaatgaaaacaatacagttgaagtgagtgttgtttaacatgatagtagctgaggataacaaacctcaaaaaatcaaagtattaattactcctttccaagtatatgtatagagcatgtgtcattgcttttataaaacgcacttaatagctttctttctaaaaggcaactgaactttctaaaaggtaaataaactgaacttga

SEQ ID NO: 137289 - DNA, 1799 bp, Homo sapiens
  Payload ID: 6883
  Gene Symbol: G6PD
  Gene Name: glucose-6-phosphate dehydrogenase
  Uniprot ID: P11413
  ENST ID: ENST00000369620
  CDS Start-End: 114-1799
cgagaactcgggaagccggcgagaagtgtgaggccgcggtagggccgcatcccgctccggagagaagtctgagtccgccaggctctgcaggcccgcggaagctcgacagcgtcatggcagagcaggtggccctgagccggacccaggtgtgcgggatcctgcgggaagagcttttccagggcgatgccttccatcagtcggatacacacatattcatcatcatgggtgcatcgggtgacctggccaagaagaagatctaccccaccatctggtggctgttccgggatggccttctgcccgaaaacaccttcatcgtgggctatgcccgttcccgcctcacagtggctgacatccgcaaacagagtgagcccttcttcaaggccaccccagaggagaagctcaagctggaggacttctttgcccgcaactcctatgtggctggccagtacgatgatgcagcctcctaccagcgcctcaacagccacatgaatgccctccacctggggtcacaggccaaccgcctcttctacctggccttgcccccgaccgtctacgaggccgtcaccaagaacattcacgagtcctgcatgagccagataggctggaaccgcatcatcgtggagaagcccttcgggagggacctgcagagctctgaccggctgtccaaccacatctcctccctgttccgtgaggaccagatctaccgcatcgaccactacctgggcaaggagatggtgcagaacctcatggtgctgagatttgccaacaggatcttcggccccatctggaaccgggacaacatcgcctgcgttatcctcaccttcaaggagccctttggcactgagggtcgcgggggctatttcgatgaatttgggatcatccggggacctggaagacaagggggatcaggaagtgagtcttgcagcttgtcactaggaagccttgtttggggtccccatgcccttgaaccaggtgaacagggcggggagctaaggcgagctctggcctcttccgtccccagggacgtgatgcagaaccacctactgcagatgctgtgtctggtggccatggagaagcccgcctccaccaactcagatgacgtccgtgatgagaaggtcaaggtgttgaaatgcatctcagaggtgcaggccaacaatgtggtcctgggccagtacgtggggaaccccgatggagagggcgaggccaccaaagggtacctggacgaccccacggtgccccgcgggtccaccaccgccacttttgcagccgtcgtcctctatgtggagaatgagaggtgggatggggtgcccttcatcctgcgctgcggcaaggccctgaacgagcgcaaggccgaggtgaggctgcagttccatgatgtggccggcgacatcttccaccagcagtgcaagcgcaacgagctggtgatccgcgtgcagcccaacgaggccgtgtacaccaagatgatgaccaagaagccgggcatgttcttcaaccccgaggagtcggagctggacctgacctacggcaacagatacaagaacgtgaagctccctgacgcctatgagcgcctcatcctggacgtcttctgcgggagccagatgcacttcgtgcgcagcgacgagctccgtgaggcctggcgtattttcaccccactgctgcaccagattgagctggagaagcccaagcccatcccctatatttatggcagccgaggccccacggaggcagacgagctgatgaagagagtgggtttccagtatgagggcacctacaagtgggtgaacccccacaagctctga

SEQ ID NO: 137290 - DNA, 2631 bp, Homo sapiens
  Payload ID: 6883
  Gene Symbol: G6PD
  Gene Name: glucose-6-phosphate dehydrogenase
  Uniprot ID: P11413
  ENST ID: ENST00000393562
  CDS Start-End: 385-2022
agggacagcccagaggaggcgtggccacgctgccggcggaagtggagccctccgcgagcgcgcgaggccgccggggcaggcggggaaaccggacagtaggggcggggccgggccggcgatggggatgcgggagcactacgcggagctgcacccgtgcccgccggaattggggatgcagagcagcggcagcgggtatggcaggcagccggcgggccggcctccagcgcaggtgcccgagaggcaggggctggcctgggatgcgcgcgcacctgccctcgccccgccccgcccgcacgaggggtggtggccgaggccccgccccgcacgcctcgcctgaggcgggtccgctcagcccaggcgcccgcccccgcccccgccgattaaatgggccggcggggctcagcccccggaaacggtcgtacacttcggggctgcgagcgcggagggcgacgacgacgaagcgcagacagcgtcatggcagagcaggtggccctgagccggacccaggtgtgcgggatcctgcgggaagagcttttccagggcgatgccttccatcagtcggatacacacatattcatcatcatgggtgcatcgggtgacctggccaagaagaagatctaccccaccatctggtggctgttccgggatggccttctgcccgaaaacaccttcatcgtgggctatgcccgttcccgcctcacagtggctgacatccgcaaacagagtgagcccttcttcaaggccaccccagaggagaagctcaagctggaggacttctttgcccgcaactcctatgtggctggccagtacgatgatgcagcctcctaccagcgcctcaacagccacatgaatgccctccacctggggtcacaggccaaccgcctcttctacctggccttgcccccgaccgtctacgaggccgtcaccaagaacattcacgagtcctgcatgagccagataggctggaaccgcatcatcgtggagaagcccttcgggagggacctgcagagctctgaccggctgtccaaccacatctcctccctgttccgtgaggaccagatctaccgcatcgaccactacctgggcaaggagatggtgcagaacctcatggtgctgagatttgccaacaggatcttcggccccatctggaaccgggacaacatcgcctgcgttatcctcaccttcaaggagccctttggcactgagggtcgcgggggctatttcgatgaatttgggatcatccgggacgtgatgcagaaccacctactgcagatgctgtgtctggtggccatggagaagcccgcctccaccaactcagatgacgtccgtgatgagaaggtcaaggtgttgaaatgcatctcagaggtgcaggccaacaatgtggtcctgggccagtacgtggggaaccccgatggagagggcgaggccaccaaagggtacctggacgaccccacggtgccccgcgggtccaccaccgccacttttgcagccgtcgtcctctatgtggagaatgagaggtgggatggggtgcccttcatcctgcgctgcggcaaggccctgaacgagcgcaaggccgaggtgaggctgcagttccatgatgtggccggcgacatcttccaccagcagtgcaagcgcaacgagctggtgatccgcgtgcagcccaacgaggccgtgtacaccaagatgatgaccaagaagccgggcatgttcttcaaccccgaggagtcggagctggacctgacctacggcaacagatacaagaacgtgaagctccctgacgcctatgagcgcctcatcctggacgtcttctgcgggagccagatgcacttcgtgcgcagcgacgagctccgtgaggcctggcgtattttcaccccactgctgcaccagattgagctggagaagcccaagcccatcccctatatttatggcagccgaggccccacggaggcagacgagctgatgaagagagtgggtttccagtatgagggcacctacaagtgggtgaacccccacaagctctgagccctgggcacccacctccacccccgccacggccaccctccttcccgccgcccgaccccgagtcgggaggactccgggaccattgacctcagctgcacattcctggccccgggctctggccaccctggcccgcccctcgctgctgctactacccgagcccagctacattcctcagctgccaagcactcgagaccatcctggcccctccagaccctgcctgagcccaggagctgagtcacctcctccactcactccagcccaacagaaggaaggaggagggcgcccattcgtctgtcccagagcttattggccactgggtctcactcctgagtggggccagggtgggagggagggacgagggggaggaaaggggcgagcacccacgtgagagaatctgcctgtggccttgcccgccagcctcagtgccacttgacattccttgtcaccagcaacatctcgagccccctggatgtcccctgtcccaccaactctgcactccatggccaccccgtgccacccgtaggcagcctctctgctataagaaaagcagacgcagcagctgggacccctcccaacctcaatgccctgccattaaatccgcaaacagcc

SEQ ID NO: 137291 - DNA, 1661 bp, Homo sapiens
  Payload ID: 6883
  Gene Symbol: G6PD
  Gene Name: glucose-6-phosphate dehydrogenase
  Uniprot ID: P11413
  ENST ID: ENST00000393564
  CDS Start-End: 114-1661
cgagaactcgggaagccggcgagaagtgtgaggccgcggtagggccgcatcccgctccggagagaagtctgagtccgccaggctctgcaggcccgcggaagctcgacagcgtcatggcagagcaggtggccctgagccggacccaggtgtgcgggatcctgcgggaagagcttttccagggcgatgccttccatcagtcggatacacacatattcatcatcatgggtgcatcgggtgacctggccaagaagaagatctaccccaccatctggtggctgttccgggatggccttctgcccgaaaacaccttcatcgtgggctatgcccgttcccgcctcacagtggctgacatccgcaaacagagtgagcccttcttcaaggccaccccagaggagaagctcaagctggaggacttctttgcccgcaactcctatgtggctggccagtacgatgatgcagcctcctaccagcgcctcaacagccacatgaatgccctccacctggggtcacaggccaaccgcctcttctacctggccttgcccccgaccgtctacgaggccgtcaccaagaacattcacgagtcctgcatgagccagataggctggaaccgcatcatcgtggagaagcccttcgggagggacctgcagagctctgaccggctgtccaaccacatctcctccctgttccgtgaggaccagatctaccgcatcgaccactacctgggcaaggagatggtgcagaacctcatggtgctgagatttgccaacaggatcttcggccccatctggaaccgggacaacatcgcctgcgttatcctcaccttcaaggagccctttggcactgagggtcgcgggggctatttcgatgaatttgggatcatccgggacgtgatgcagaaccacctactgcagatgctgtgtctggtggccatggagaagcccgcctccaccaactcagatgacgtccgtgatgagaaggtcaaggtgttgaaatgcatctcagaggtgcaggccaacaatgtggtcctgggccagtacgtggggaaccccgatggagagggcgaggccaccaaagggtacctggacgaccccacggtgccccgcgggtccaccaccgccacttttgcagccgtcgtcctctatgtggagaatgagaggtgggatggggtgcccttcatcctgcgctgcggcaaggccctgaacgagcgcaaggccgaggtgaggctgcagttccatgatgtggccggcgacatcttccaccagcagtgcaagcgcaacgagctggtgatccgcgtgcagcccaacgaggccgtgtacaccaagatgatgaccaagaagccgggcatgttcttcaaccccgaggagtcggagctggacctgacctacggcaacagatacaagaacgtgaagctccctgacgcctatgagcgcctcatcctggacgtcttctgcgggagccagatgcacttcgtgcgcagcgacgagctccgtgaggcctggcgtattttcaccccactgctgcaccagattgagctggagaagcccaagcccatcccctatatttatggcagccgaggccccacggaggcagacgagctgatgaagagagtgggtttccagtatgagggcacctacaagtgggtgaacccccacaagctctga

SEQ ID NO: 137292 - DNA, 817 bp, Homo sapiens
  Payload ID: 6883
  Gene Symbol: G6PD
  Gene Name: glucose-6-phosphate dehydrogenase
  ENST ID: ENST00000433845
  CDS Start-End: 49-817
acttcggggctgcgagcgcggagggcgacgacgacgaagcgcagcgtcatggcagagcaggtggccctgagccggacccaggtgtgcgggatcctgcgggaagagcttttccagggcgatgccttccatcagtcggatacacacatattcatcatcatgggtgcatcgggtgacctggccaagaagaagatctaccccaccatctggtggctgttccgggatggccttctgcccgaaaacaccttcatcgtgggctatgcccgttcccgcctcacagtggctgacatccgcaaacagagtgagcccttcttcaaggccaccccagaggagaagctcaagctggaggacttctttgcccgcaactcctatgtggctggccagtacgatgatgcagcctcctaccagcgcctcaacagccacatgaatgccctccacctggggtcacaggccaaccgcctcttctacctggccttgcccccgaccgtctacgaggccgtcaccaagaacattcacgagtcctgcatgagccagataggctggaaccgcatcatcgtggagaagcccttcgggagggacctgcagagctctgaccggctgtccaaccacatctcctccctgttccgtgaggaccagatctaccgcatcgaccactacctgggcaaggagatggtgcagaacctcatggtgctgagatttgccaacaggatcttcggccccatctggaaccgggacaacatcgcctgcgttatcctcaccttcaaggagccctttggcactgagggtcgcgggggctatttcgatgaatttgggatcatcc

SEQ ID NO: 137293 - DNA, 1074 bp, Homo sapiens
  Payload ID: 6883
  Gene Symbol: G6PD
  Gene Name: glucose-6-phosphate dehydrogenase
  ENST ID: ENST00000439227
  CDS Start-End: 59-1074
tcgtacacttcggggctgcgagcgcggagggcgacgacgacgaagcgcagacagcgtcatggcagagcaggtggccctgagccggacccaggtgtgcgggatcctgcgggaagagcttttccagggcgatgccttccatcagtcggatacacacatattcatcatcatgggtgcatcgggtgacctggccaagaagaagatctaccccaccatctggtggctgttccgggatggccttctgcccgaaaacaccttcatcgtgggctatgcccgttcccgcctcacagtggctgacatccgcaaacagagtgagcccttcttcaaggccaccccagaggagaagctcaagctggaggacttctttgcccgcaactcctatgtggctggccagtacgatgatgcagcctcctaccagcgcctcaacagccacatgaatgccctccacctggggtcacaggccaaccgcctcttctacctggccttgcccccgaccgtctacgaggccgtcaccaagaacattcacgagtcctgcatgagccagatcagaggctggaaccgcatcatcgtggagaagcccttcgggagggacctgcagagctctgaccggctgtccaaccacatctcctccctgttccgtgaggaccagatctaccgcatcgaccactacctgggcaaggagatggtgcagaacctcatggtgctgagatttgccaacaggatcttcggccccatctggaaccgggacaacatcgcctgcgttatcctcaccttcaaggagccctttggcactgagggtcgcgggggctatttcgatgaatttgggatcatccgggacgtgatgcagaaccacctactgcagatgctgtgtctggtggccatggagaagcccgcctccaccaactcagatgacgtccgtgatgagaaggtcaaggtgttgaaatgcatctcagaggtgcaggccaacaatgtggtcctgggccagtacgtggggaaccccgatggagagggcgaggccaccaaagggtacctggacgaccccacggtgccccgcgggtccaccaccgccacttttgc

SEQ ID NO: 137294 - DNA, 1056 bp, Homo sapiens
  Payload ID: 6883
  Gene Symbol: G6PD
  Gene Name: glucose-6-phosphate dehydrogenase
  ENST ID: ENST00000440967
  CDS Start-End: 95-1056
ccggcgagaagtgtgaggccgcggtagggccgcatcccgctccggagagaagtctgagtccgccaggctctgcaggcccgcggaagctcgcgtcatggcagagcaggtggccctgagccggacccaggtgtgcgggatcctgcgggaagagcttttccagggcgatgccttccatcagtcggatacacacatattcatcatcatgggtgcatcgggtgacctggccaagaagaagatctaccccaccatctggtggctgttccgggatggccttctgcccgaaaacaccttcatcgtgggctatgcccgttcccgcctcacagtggctgacatccgcaaacagagtgagcccttcttcaaggccaccccagaggagaagctcaagctggaggacttctttgcccgcaactcctatgtggctggccagtacgatgatgcagcctcctaccagcgcctcaacagccacatgaatgccctccacctggggtcacaggccaaccgcctcttctacctggccttgcccccgaccgtctacgaggccgtcaccaagaacattcacgagtcctgcatgagccagatcagaggctggaaccgcatcatcgtggagaagcccttcgggagggacctgcagagctctgaccggctgtccaaccacatctcctccctgttccgtgaggaccagatctaccgcatcgaccactacctgggcaaggagatggtgcagaacctcatggtgctgagatttgccaacaggatcttcggccccatctggaaccgggacaacatcgcctgcgttatcctcaccttcaaggagccctttggcactgagggtcgcgggggctatttcgatgaatttgggatcatccgggacgtgatgcagaaccacctactgcagatgctgtgtctggtggccatggagaagcccgcctccaccaactcagatgacgtccgtgatgagaaggtcaaggtgttgaaatgcatctcagaggtgcaggccaacaatgtggtcctgggccagtacgtggggaaccccgatggagagggcgaggccaccaa

SEQ ID NO: 137295 - DNA, 2631 bp, Homo sapiens; identical to SEQ ID NO: 137290
  Payload ID: 6883
  Gene Symbol: G6PD
  Gene Name: glucose-6-phosphate dehydrogenase
  Uniprot ID: P11413
  ENST ID: ENST00000621232
  CDS Start-End: 475-2022

SEQ ID NO: 137296 - DNA, 2210 bp, Homo sapiens
  Payload ID: 6884
  Gene Symbol: GPI
  Gene Name: glucose-6-phosphate isomerase
  Uniprot ID: P06744
  ENST ID: ENST00000356487
  CDS Start-End: 242-1918
agagaggagctgaggccccagatcagcggccgcgggcaaggtcgctcagcgggcacccggcctgggtatcggggcgcgggtcgggggcggggccggggctcaggggtggggccgggccgggccgggccgggcgcctgcgccataaaggccgccgcgcgcccacgcgcctcgcttgctgcgcgctgccggcgctccttcctcctcggctcgcgtctcactcagtgtaccttctagtcccgccatggccgctctcacccgggacccccagttccagaagctgcagcaatggtaccgcgagcaccgctccgagctgaacctgcgccgcctcttcgatgccaacaaggaccgcttcaaccacttcagcttgaccctcaacaccaaccatgggcatatcctggtggattactccaagaacctggtgacggaggacgtgatgcggatgctggtggacttggccaagtccaggggcgtggaggccgcccgggagcggatgttcaatggtgagaagatcaactacaccgagggtcgagccgtgctgcacgtggctctgcggaaccggtcaaacacacccatcctggtagacggcaaggatgtgatgccagaggtcaacaaggttctggacaagatgaagtctttctgccagcgtgtccggagcggtgactggaaggggtacacaggcaagaccatcacggacgtcatcaacattggcattggcggctccgacctgggacccctcatggtgactgaagcccttaagccatactcttcaggaggtccccgcgtctggtatgtctccaacattgatggaactcacattgccaaaaccctggcccagctgaaccccgagtcctccctgttcatcattgcctccaagacctttactacccaggagaccatcacgaatgcagagacggcgaaggagtggtttctccaggcggccaaggatccttctgcagtggcgaagcactttgttgccctgtctactaacacaaccaaagtgaaggagtttggaattgaccctcaaaacatgttcgagttctgggattgggtgggaggacgctactcgctgtggtcggccatcggactctccattgccctgcacgtgggttttgacaacttcgagcagctgctctcgggggctcactggatggaccagcacttccgcacgacgcccctggagaagaacgcccccgtcttgctggccctgctgggtatctggtacatcaactgctttgggtgtgagacacacgccatgctgccctatgaccagtacctgcaccgctttgctgcgtacttccagcagggcgacatggagtccaatgggaaatacatcaccaaatctggaacccgtgtggaccaccagacaggccccattgtgtggggggagccagggaccaatggccagcatgctttttaccagctcatccaccaaggcaccaagatgataccctgtgacttcctcatcccggtccagacccagcaccccatacggaagggtctgcatcacaagatcctcctggccaacttcttggcccagacagaggccctgatgaggggaaaatcgacggaggaggcccgaaaggagctccaggctgcgggcaagagtccagaggaccttgagaggctgctgccacataaggtctttgaaggaaatcgcccaaccaactctattgtgttcaccaagctcacaccattcatgcttggagccttggtcgccatgtatgagcacaagatcttcgttcagggcatcatctgggacatcaacagctttgaccagtggggagtggagctgggaaagcagctggctaagaaaatagagcctgagcttgatggcagtgctcaagtgacctctcacgacgcttctaccaatgggctcatcaacttcatcaagcagcagcgcgaggccagagtccaataaactcgtgctcatctgcagcctcctctgtgactcccctttctcttctcgtccctcctccccggagccggcactgcatgttcctggacaccacccagagcaccctctggttgtgggcttggaccacgagcccttagcagggaaggctggtctcccccagcctaacccccagcccctccatgtctatgctccctctgtgttagaattggctgaagtgtttttgtgcagctgacttttctgacccatgttcacgttgttcacatcccatgtagaaaaataaagatgccacggagga

SEQ ID NO: 137297 - DNA, 4000 bp, Homo sapiens
  Payload ID: 6884
  Gene Symbol: GPI
  Gene Name: glucose-6-phosphate isomerase
  Uniprot ID: P06744
  ENST ID: ENST00000415930
  CDS Start-End: 171-1880
aatagcccttaccaccagcagacacacatcatctgttgtacttgcttatttggcacatatgtatccacagcgcctagaacactgcctgtaacgtggaaggtgttcgatctatagagttttgtcgaatgaatgaatgaagccgactagtgcacagggagtgcagcggcgcgatggtagctctctgcagcctccaacacctgggctccagtgatccccgggctctgcccaccctccccactgccacttccgggcagaggccagcaaagcggcggcgcaagagtcccgccatggccgctctcacccgggacccccagttccagaagctgcagcaatggtaccgcgagcaccgctccgagctgaacctgcgccgcctcttcgatgccaacaaggaccgcttcaaccacttcagcttgaccctcaacaccaaccatgggcatatcctggtggattactccaagaacctggtgacggaggacgtgatgcggatgctggtggacttggccaagtccaggggcgtggaggccgcccgggagcggatgttcaatggtgagaagatcaactacaccgagggtcgagccgtgctgcacgtggctctgcggaaccggtcaaacacacccatcctggtagacggcaaggatgtgatgccagaggtcaacaaggttctggacaagatgaagtctttctgccagggacccctcatggtgactgaagcccttaagccatactcttcaggaggtccccgcgtctggtatgtctccaacattgatggaactcacattgccaaaaccctggcccagctgaaccccgagtcctccctgttcatcattgcctccaagacctttactacccaggagaccatcacgaatgcagagacggcgaaggagtggtttctccaggcggccaaggatccttctgcagtggcgaagcactttgttgccctgtctactaacacaaccaaagtgaaggagtttggaattgaccctcaaaacatgttcgagttctgggattgggtgggaggacgctactcgctgtggtcggccatcggactctccattgccctgcacgtgggttttgacaacttcgagcagctgctctcgggggctcactggatggaccagcacttccgcacgacgcccctggagaagaacgcccccgtcttgctggccctgctgggtatctggtacatcaactgctttgggtgtgagacacacgccatgctgccctatgaccagtacctgcaccgctttgctgcgtacttccagcagggcgacatggagtccaatgggaaatacatcaccaaatctggaacccgtgtggaccaccagacaggccccattgtgtggggggagccagggaccaatggccagcatgctttttaccagctcatccaccaaggcaccaagatgataccctgtgacttcctcatcccggtccagacccagcaccccatacggaagggtctgcatcacaagatcctcctggccaacttcttggcccagacagaggccctgatgaggggaaaatcgacggaggaggcccgaaaggagctccaggctgcgggcaagagtccagaggaccttgagaggctgctgccacataaggtctttgaaggaaatcgcccaaccaactctattgtgttcaccaagctcacaccattcatgcttggagccttggtcgccatgtatgagcacaagatcttcgttcagggcatcatctgggacatcaacagctttgaccagtggggagtggagctgggaaagcagctggctaagaaaatagagcctgagcttgatggcagtgctcaagtgacctctcacgacgcttctaccaatgggctcatcaacttcatcaagcagcagcgcgaggccagagtccaataaactcgtgctcatctgcagcctcctctgtgactcccctttctcttctcgtccctcctccccggagccggcactgcatgttcctggacaccacccagagcaccctctggttgtgggcttggaccacgagcccttagcagggaaggctggtctcccccagcctaacccccagcccctccatgtctatgctccctctgtgttagaattggctgaagtgtttttgtgcagctgacttttctgacccatgttcacgttgttcacatcccatgtagaaaaataaagatgccacggaggaggttgtaggctcagcctctgattttttttttcctgtgatggtgctttatgtagcagagggcaggagcgctcagcaggacgcaggctgtgcctctgcggacacttaacactaagtggtgagcgggtctagagtggagcaaggtgccctgagaagacaatagtggggtgggggcacaatcagtcaggacggcaacttggcctgtgtcaccaaatcccaagactgttttccactcctcacctctgtgactgcagaaattggatactctgttcactcgatggttctaaaaactgcattgagattatgtttgtttcgggtgaattcctggacaagaccgaggatgactgccatctcctggcaagacgctcaggtagttcttttgctttaaaaggcagatattgaaaactggaattttttttttttgagtctcgctctgtcacccagactggagtgcagtggtgcaatctcggctcactgcaacctccgcctcccgggttcaagctattctcctgcctcagcctcccgagtagctgggattacacggcgcacaccaccatacccagctaatttttgtatttttagtagtgaaggggttttaccatgttgggcaggctggtcttgaactcctgacctcaggtgatctgcccgcctcagcctcccacagtgctgggattacaggtatgagccaccacgcccggcccattttttttttttttttgacaacttttttttttttttgagacagggtcttgttccattgcccagactggagtgcagtggcatgatcacagctcactgcagccagtaatcctcttgcctcagcctcccaagtagttgagactacaggttgtaccactatgccctgctagttttttcattttttgtagagagacgggtcttttttttttttgagacggagtctcgctctgtcgcccaagctggagtgcagtagcacggtctcagctcattgcaagctccgcctcccaggttcacgccattctcctgcctcagactcctgtgtagctgggagtacaggcacctgccaccatgcccggctaattttttatatatttttttagcagagacagtgtctcactgtgttagtcaggatggtctcgatctcctgacctcgtgatccgcccgcctcagcctcccaaagtgctgggattacaggcgtgagccaccgcgcccagcaaggcgggtcttgctgtgtttcccagactagactggtcttgaattccagggctcaagagatctcccacctcagcctcccacagtgctgggattacaggcgtgagccgccacacccagcctattcaaaatttttttttcttagagacagggtctttgttgcccaggctggactgcagtgatacaatcatagctgactgaagcctcaaattcccaggctaaggtgatcttctcacctcagccttccaagtagctgggtccgcagatgcatgccagtacacccagctcatttaaaaaaaaatttttttcttttttgagagtcttgctttgttgcccaggctggagtgcagtggtgtgatctcggctcactgcaagctccacctcccggcttcacgccattctcctgcctcagcctcccgagtagctgggactacaggtgcccgccaccacacccggctaattttttgtatttttagtagagacggggtttcaccgtgttagccaggatggtcttgatctcctgacctcatgatccgcctgctttggcctcccaaagtgctgggattacaggcgtgagtcaccgcgcccggctcattttaaaatttttgtagatcagtgtactgttgtaaaaaaaaaaaaa

SEQ ID NO: 137298 - DNA, 557 bp, Homo sapiens
  Payload ID: 6884
  Gene Symbol: GPI
  Gene Name: glucose-6-phosphate isomerase
  ENST ID: ENST00000587521
  CDS Start-End: 228-557
atccgcgcctgcgctcaaccccgcctacacctgctccgtggcctccccggaggcgatgagccaaccccggtagctccagaggcgtggtcccctcgccttcgccggtcaacatgactcagcatcctcgcgcctagaacactgcctgtaacgtggaaggtgttcgatctatagagttttgtcgaatgaatgaatgaagccgactagtgcacagggagtgcagcggcgcgatggtagctctctgcagcctccaacacctgggctccagtgatccccgggctctgcccaccctccccactgccacttccgggcagaggccagcaaagcggcggcgcaagagtcccgccatggccgctctcacccgggacccccagttccagaagctgcagcaatggtaccgcgagcaccgctccgagctgaacctgcgccgcctcttcgatgccaacaaggaccgcttcaaccacttcagcttgaccctcaacaccaaccatgggcatatcctggtggattactccaagaacctggtgacggaggacgtgatgcggatgctggtggacttg

SEQ ID NO: 137299 - DNA, 678 bp, Homo sapiens
  Payload ID: 6884
  Gene Symbol: GPI
  Gene Name: glucose-6-phosphate isomerase
  ENST ID: ENST00000592144
  CDS Start-End: 1-32
agaggccagcaaagcggcggcgcaagaggtagggagagaggagctgaggccccagatcagcggccgcgggcaaggtcgctcagcgggcacccggcctggtcccgccatggccgctctcacccgggacccccagttccagaagctgcagcaatggtaccgcgagcaccgctccgagctgaacctgcgccgcctcttcgatgccaacaaggaccgcttcaaccacttcagcttgaccctcaacaccaaccatgggcatatcctggtggattactccaagaacctggtgacggaggacgtgatgcggatgctggtggacttggccaagtccaggggcgtggaggccgcccgggagcggatgttcaatggtgagaagatcaactacaccgagggtcgagccgtgctgcacgtggctctgcggaaccggtcaaacacacccatcctggtagacggcaaggatgtgatgccagaggtcaacaaggttctggacaagatgaagtctttctgccagcgtgtccggagcggtgactggaaggggtacacaggcaagaccatcacggacgtcatcaacattggcattggcggctccgacctgggacccctcatggtgactgaagcccttaagccatactcttcaggaggtccccgcgtctggtatgtctccaacattgatggaactca

SEQ ID NO: 137300 - DNA, 2021 bp, Homo sapiens
  Payload ID: 6884
  Gene Symbol: GPI
  Gene Name: glucose-6-phosphate isomerase
  ENST ID: ENST00000588991
  CDS Start-End: 1-1722
acttccgggcagaggccagcaaagcggcggcgcaagagtcccgccatggccgctctcacccgggacccccagttccagaagctgcagcaatggtaccgcgagcaccgctccgagctgaacctgcgccgcctcttcgatgccaacaaggaccgcttcaaccacttcagcttgaccctcaacaccaaccatgggcatatcctggtggattactccaagaacctggtgacggaggacgtgatgcggatgctggtggacttggccaagtccaggggcgtggaggccgcccgggagcggatgttcaatggtgagaagatcaactacaccgagggtcgagccgtgctgcacgtggctctgcggaaccggtcaaacacacccatcctggtagacggcaaggatgtgatgccagaggtcaacaaggttctggacaagatgaagtctttctgccagcgtgtccggagcggtgactggaaggggtacacaggcaagaccatcacggacgtcatcaacattggcattggcggctccgacctgggacccctcatggtgactgaagcccttaagccatactcttcaggaggtccccgcgtctggtatgtctccaacattgatggaactcacattgccaaaaccctggcccagctgaaccccgagtcctccctgttcatcattgcctccaagacctttactacccaggagaccatcacgaatgcagagacggcgaaggagtggtttctccaggcggccaaggatccttctgcagtggcgaagcactttgttgccctgtctactaacacaaccaaagtgaaggagtttggaattgaccctcaaaacatgttcgagttctgggattgggtgggaggacgctactcgctgtggtcggccatcggactctccattgccctgcacgtgggttttgacaacttcgagcagctgctctcgggggctcactggatggaccagcacttccgcacgacgcccctggagaagaacgcccccgtcttgctggccctgctgggtatctggtacatcaactgctttgggtgtgagacacacgccatgctgccctatgaccagtacctgcaccgctttgctgcgtacttccagcagggcgacatggagtccaatgggaaatacatcaccaaatctggaacccgtgtggaccaccagacaggccccattgtgtggggggagccagggaccaatggccagcatgctttttaccagctcatccaccaaggcaccaagatgataccctgtgacttcctcatcccggtccagacccagcaccccatacggaagggtctgcatcacaagatcctcctggccaacttcttggcccagacagaggccctgatgaggggaaaatcgacggaggaggcccgaaaggagctccaggctgcgggcaagagtccagaggaccttgagaggctgctgccacataaggtctttgaaggaaatcgcccaaccaactctattgtgttcaccaagctcacaccattcatgcttggagccttggtcgccatgtatgagcacaagatcttcgttcagggcatcatctgggacatcaacagctttgaccagtggggagtggagctgggaaagcagctggctaagaaaatagagcctgagcttgatggcagtgctcaagtgacctctcacgacgcttctaccaatgggctcatcaacttcatcaagcagcagcgcgaggccagagtccaataaactcgtgctcatctgcagcctcctctgtgactcccctttctcttctcgtccctcctccccggagccggcactgcatgttcctggacaccacccagagcaccctctggttgtgggcttggaccacgagcccttagcagggaaggctggtctcccccagcctaacccccagcccctccatgtctatgctccctctgtgttagaattggctgaagtgtttttgtgcagctgacttttctgacccatgttcacgttgttcacatcccatgtagaaaaataaagatgccacggaggaggttgta

SEQ ID NO: 137301 - DNA, 615 bp, Homo sapiens
  Payload ID: 6884
  Gene Symbol: GPI
  Gene Name: glucose-6-phosphate isomerase
  ENST ID: ENST00000592277
  CDS Start-End: 178-615
agtccctctgccttcactcccatggccacctgtgctccagggcctgcctgacccctgtccagcggccctgaagtaagcgcctagaacactgcctgtaacgtggaaggtgttcgatctatagagttttgtcgaatgaatgaatgaagccgactagtgcacagggagtgcagcggcgcgatggtagctctctgcagcctccaacacctgggctccagtgatccccgggctctgcccaccctccccactgccacttccgggcagaggccagcaaagcggcggcgcaagagtcccgccatggccgctctcacccgggacccccagttccagaagctgcagcaatggtaccgcgagcaccgctccgagctgaacctgcgccgcctcttcgatgccaacaaggaccgcttcaaccacttcagcttgaccctcaacaccaaccatgggcatatcctggtggattactccaagaacctggtgacggaggacgtgatgcggatgctggtggacttggccaagtccaggggcgtggaggccgcccgggagcggatgttcaatggtgagaagatcaactacaccgagggtcgagccgtgctgcacgtggctctgcggaaccggtca

SEQ ID NO: 137302 - DNA, 559 bp, Homo sapiens
  Payload ID: 6884
  Gene Symbol: GPI
  Gene Name: glucose-6-phosphate isomerase
  ENST ID: ENST00000591204
  CDS Start-End: 72-559
gcttgctgcgcgctgccggcgctccttcctcctcggctcgcgtctcactcagtgtaccttctagtcccgccatggccgctctcacccgggacccccagttccagaagctgcagcaatggtaccgcgagcaccgctccgagctgaacctgcgccgcctcttcgatgccaacaaggaccgcttcaaccacttcagcttgaccctcaacaccaaccatgggcatatcctggtggattactccaagaacctggtgacggaggacgtgatgcggatgctggtggacttggccaagtccaggggcgtggaggccgcccgggagcggatgttcaatggtgagaagatcaactacaccgagcgtgtccggagcggtgactggaaggggtacacaggcaagaccatcacggacgtcatcaacattggcattggcggctccgacctgggacccctcatggtgactgaagcccttaagccatactcttcaggaggtccccgcgtctggtatgtctccaacattgatggaactcacattgccaaaaccctggcccagctgaaccccgagtc

SEQ ID NO: 137303 - DNA, 529 bp, Homo sapiens
  Payload ID: 6884
  Gene Symbol: GPI
  Gene Name: glucose-6-phosphate isomerase
  ENST ID: ENST00000590375
  CDS Start-End: 52-529
agggagagaggagctgaggccccagatcagcggccgcgggcaagtcccgccatggccgctctcacccgggacccccagttccagaagctgcagcaatggtaccgcgagcaccgctccgagctgaacctgcgccgcctcttcgatgccaacaaggaccgcttcaaccacttcagcttgaccctcaacaccaaccatgggcatatcctggtggattactccaagaacctggtgacggaggacgtgatgcggatgctggtggacttggccaagtccaggggcgtggaggccgcccgggagcggatgttcaatggtgagaagatcaactacaccgagggtcgagccgtgctgcacgtggctctgcggaaccggtcaaacacacccatcctggtagacggcaaggatgtgatgccagaggtcaacaaggttctggacaagatgaagtctttctgccagcgtgtccggagcggtgactggaaggggtacacaggcaagaccatcacggacgtcatcaacattggcattggcggct

SEQ ID NO: 137304 - DNA, 571 bp, Homo sapiens
  Payload ID: 6884
  Gene Symbol: GPI
  Gene Name: glucose-6-phosphate isomerase
  ENST ID: ENST00000589640
  CDS Start-End: 72-571
gcttgctgcgcgctgccggcgctccttcctcctcggctcgcgtctcactcagtgtaccttctagtcccgccatggccgctctcacccgggacccccagttccagaagctgcagcaatggtaccgcgagcaccgctccgagctgaacctgcgccgcctcttcgatgccaacaaggaccgcttcaaccacttcagcttgaccctcaacaccaaccatgggcatatcctggtggattactccaagaacctggtgacggaggacgtgatgcggatgctggtggacttggccaagtccaggggcgtggaggccgcccgggagcggatgttcaatggtgagaagatcaactacaccgagggtcgagccgtgctgcacgtggctctgcggaaccggtcaaacacacccatcctggtagacggcaaggatgtgatgccagaggtcaacaaggttctggacaagatgaagtctttctgccagggacccctcatggtgactgaagcccttaagccatactcttcaggaggtccccgcgtctggtatgtctccaacattgatggaactcacattgccaaaac

SEQ ID NO: 137305 - DNA, 1799 bp, Homo sapiens
  Payload ID: 6884
  Gene Symbol: GPI
  Gene Name: glucose-6-phosphate isomerase
  ENST ID: ENST00000586425
  CDS Start-End: 26-1450
actcagtgtaccttctagtcccgccatggccgctctcacccgggacccccagttccagaagctgcagcaatggtaccgcgagcaccgctccgagctgaacctgcgccgcctcttcgatgccaacaaggaccgcttcaaccacttcagcttgaccctcaacaccaaccatgggcatatcctggtggattactccaagaacctggtgacggaggacgtgatgcggatgctggtggacttggccaagtccaggggcgtggaggccgcccgggagcggatgttcaatggtgagaagatcaactacaccgagggtcgagccgtgctgcacgtggctctgcggaaccggtcaaacacacccatcctggtagacggcaaggatgtgatgccagaggtcaacaaggttctggacaagatgaagtctttctgccagcgtgtccggagcggtgactggaaggggtacacaggcaagaccatcacggacgtcatcaacattggcattggcggctccgacctgggacccctcatggtgactgaagcccttaagccatactcttcaggaggtccccgcgtctggtatgtctccaacattgatggaactcacattgccaaaaccctggcccagctgaaccccgagtcctccctgttcatcattgcctccaagacctttactacccaggagaccatcacgaatgcagagacggcgaaggagtggtttctccaggcggccaaggatccttctgcagtggcgaagcactttgttgccctgtctactaacacaaccaaagtgaaggagtttggaattgaccctcaaaacatgttcgagttctgggattgggtgggaggacgctactcgctgtggtcggccatcggactctccattgccctgcacgtgggttttgacaacttcgagcagctgctctcgggggctcactggatggaccagcacttccgcacgacgcccctggagaagaacgcccccgtcttgctggccctgctgggtatctggtacatcaactgctttgggtgtgagacacacgccatgctgccctatgaccagtacctgcaccgctttgctgcgtacttccagcagggcgacatggagtccaatgggaaatacatcaccaaatctggaacccgtgtggaccaccagacaggccccattgtgtggggggagccagggaccaatggccagcatgctttttaccagctcatccaccaaggcaccaagatgataccctgtgacttcctcatcccggtccagacccagcaccccatacggaagggtctgcatcacaagatcctcctggccaacttcttggcccagacagaggccctgatgaggggaaaatcgacggaggaggcccgaaaggagctccaggctgcgggcaagagtccagaggaccttgagaggctgctgccacataagagtggagctgggaaagcagctggctaagaaaatagagcctgagcttgatggcagtgctcaagtgacctctcacgacgcttctaccaatgggctcatcaacttcatcaagcagcagcgcgaggccagagtccaataaactcgtgctcatctgcagcctcctctgtgactcccctttctcttctcgtccctcctccccggagccggcactgcatgttcctggacaccacccagagcaccctctggttgtgggcttggaccacgagcccttagcagggaaggctggtctcccccagcctaacccccagcccctccatgtctatgctccctctgtgttagaattggctgaagtgtttttgtgcagctgacttttctgacc

SEQ ID NO: 137306 - DNA, 565 bp, Homo sapiens
  Payload ID: 6884
  Gene Symbol: GPI
  Gene Name: glucose-6-phosphate isomerase
  ENST ID: ENST00000589399
  CDS Start-End: 81-565
acgcgcctcgcttgctgcgcgctgccggcgctccttcctcctcggctcgcgtctcactcagtgtaccttctagtcccgccatggccgctctcacccgggacccccagttccagaagctgcagcaatggtaccgcgagcaccgctccgagctgaacctgcgccgcctcttcgatgccaacaaggaccgcttcaaccacttcagcttgaccctcaacaccaaccatgggcatatcctggtggattactccaagaacctggtgacggaggacgtgatgcggatgctggtggacttggccaagtccaggggcgtggaggccgcccgggagcggatgttcaatggtgagaagatcaactacaccgaggatgtgatgccagaggtcaacaaggttctggacaagatgaagtctttctgccagcgtgtccggagcggtgactggaaggggtacacaggcaagaccatcacggacgtcatcaacattggcattggcggctccgacctgggacccctcatggtgactgaagcccttaagccatactcttcaggaggtccccgcgtctggtatgt

SEQ ID NO: 137307 - DNA, 810 bp, Homo sapiens
  Payload ID: 6884
  Gene Symbol: GPI
  Gene Name: glucose-6-phosphate isomerase
  ENST ID: ENST00000587384
  CDS Start-End: 411-810
aacatgactcagcatcctcggtgggctcgcctcctcccccggaacagctgtctaaaatccatgggcgtggaaacgccacgccacgccccgctcccgacttcttcagctcaggccccagaactgaccaccccaccagtcctctgccccagtccctctgccttcactcccatggccacctgtgctccagggcctgcctgacccctgtccagcggccctgaagtaaggtctgtgatgtctaaatgccgatacctcagtttccccatctttagaacggggctcttgtttggaactgtgcccgccacagcctgcacgcctagaacactgcctgtaacgtggaaggtgttcgatctatagagttttgtcgaatgaatgaatgaagccgactagtgcacagggagtgcagcggcgcgatggtagctctctgcagcctccaacacctgggctccagtgatccccgggctctgcccaccctccccactgccacttccgggcagaggccagcaaagcggcggcgcaagagtcccgccatggccgctctcacccgggacccccagttccagaagctgcagcaatggtaccgcgagcaccgctccgagctgaacctgcgccgcctcttcgatgccaacaaggaccgcttcaaccacttcagcttgaccctcaacaccaaccatgggcatatcctggtggattactccaagaacctggtgacggaggacgtgatgcggatgctggtggacttggccaagtccaggggcgtggaggccgcccgggagcggatgttcaatggtgagaagatcaactacaccgagg

SEQ ID NO: 137308 - DNA, 829 bp, Homo sapiens
  Payload ID: 6884
  Gene Symbol: GPI
  Gene Name: glucose-6-phosphate isomerase
  ENST ID: ENST00000633130
  CDS Start-End: 26-829
actcagtgtaccttctagtcccgccatggccgctctcacccgggacccccagttccagaagctgcagcaatggtaccgcgagcaccgctccgagctgaacctgcgccgcctcttcgatgccaacaaggaccgcttcaaccacttcagcttgaccctcaacaccaaccatgggcatatcctggtggattactccaagaacctggtgacggaggacgtgatgcggatgctggtggacttggccaagtccaggggcgtggaggccgcccgggagcggatgttcaatggtgagaagatcaactacaccgagggtcgagccgtgctgcacgtggctctgcggaaccggtcaaacacacccatcctggtagacggcaaggatgtgatgccagaggtcaacaaggttctggacaagatgaagtctttctgccagcgtgtccggagcggtgactggaaggggtacacaggcaagaccatcacggacgtcatcaacattggcattggcggctccgacctggggcccctcatggtgactgaagcccttaagccatactcttcaggaggtccccgcgtctggtatgtctccaacattgatggaactcacattgccaaaaccctggcccagctgaaccccgagtcctccctgttcatcattgcctccaagacctttactacccaggagaccatcacgaatgcagagacggcgaaggagtggtttctccaggcggccaaggatccttctgcagtggcgaagcactttgttgccctgtctactaacacaaccaaagtgaaggagtttggaattgaccctcaaaacatgttcgagttctgggat

SEQ ID NO: 137309 - DNA, 559 bp, Homo sapiens
  Payload ID: 6884
  Gene Symbol: GPI
  Gene Name: glucose-6-phosphate isomerase
  ENST ID: ENST00000632543
  CDS Start-End: 72-559
gcttgctgcgcgctgccggcgctccttcctcctcggctcgcgtctcactcagtgtaccttctagtcccgccatggccgctctcacccgggacccccagttccagaagctgcagcaatggtaccgcgagcaccgctccgagctgaacctgcgccgcctcttcgatgccaacaaggaccgcttcaaccacttcagcttgaccctcaacaccaaccatgggcatatcctggtggattactccaagaacctggtgacggaggacgtgatgcggatgctggtggacttggccaagtccaggggcgtggaggccgcccgggagcggatgttcaatggtgagaagatcaactacaccgagcgtgtccggagcggtgactggaaggggtacacaggcaagaccatcacggacgtcatcaacattggcattggcggctccgacctggggcccctcatggtgactgaagcccttaagccatactcttcaggaggtccccgcgtctggtatgtctccaacattgatggaactcacattgccaaaaccctggcccagctgaaccccgagtc

SEQ ID NO: 137310 - DNA, 529 bp, Homo sapiens; identical to SEQ ID NO: 137303
  Payload ID: 6884
  Gene Symbol: GPI
  Gene Name: glucose-6-phosphate isomerase
  ENST ID: ENST00000632809
  CDS Start-End: 52-529

SEQ ID NO: 137311 - DNA, 571 bp, Homo sapiens
  Payload ID: 6884
  Gene Symbol: GPI
  Gene Name: glucose-6-phosphate isomerase
  ENST ID: ENST00000631729
  CDS Start-End: 72-571
gcttgctgcgcgctgccggcgctccttcctcctcggctcgcgtctcactcagtgtaccttctagtcccgccatggccgctctcacccgggacccccagttccagaagctgcagcaatggtaccgcgagcaccgctccgagctgaacctgcgccgcctcttcgatgccaacaaggaccgcttcaaccacttcagcttgaccctcaacaccaaccatgggcatatcctggtggattactccaagaacctggtgacggaggacgtgatgcggatgctggtggacttggccaagtccaggggcgtggaggccgcccgggagcggatgttcaatggtgagaagatcaactacaccgagggtcgagccgtgctgcacgtggctctgcggaaccggtcaaacacacccatcctggtagacggcaaggatgtgatgccagaggtcaacaaggttctggacaagatgaagtctttctgccaggggcccctcatggtgactgaagcccttaagccatactcttcaggaggtccccgcgtctggtatgtctccaacattgatggaactcacattgccaaaac

SEQ ID NO: 137312 - DNA, 1007 bp, Homo sapiens
  Payload ID: 6884
  Gene Symbol: GPI
  Gene Name: glucose-6-phosphate isomerase
  ENST ID: ENST00000633059
  CDS Start-End: 171-1007
aatagcccttaccaccagcagacacacatcatctgttgtacttgcttatttggcacatatgtatccacagcgcctagaacactgcctgtaacgtggaaggtgttcgatctatagagttttgtcgaatgaatgaatgaagccgactagtgcacagggagtgcagcggcgcgatggtagctctctgcagcctccaacacctgggctccagtgatccccgggctctgcccaccctccccactgccacttccgggcagaggccagcaaagcggcggcgcaagagtcccgccatggccgctctcacccgggacccccagttccagaagctgcagcaatggtaccgcgagcaccgctccgagctgaacctgcgccgcctcttcgatgccaacaaggaccgcttcaaccacttcagcttgaccctcaacaccaaccatgggcatatcctggtggattactccaagaacctggtgacggaggacgtgatgcggatgctggtggacttggccaagtccaggggcgtggaggccgcccgggagcggatgttcaatggtgagaagatcaactacaccgagggtcgagccgtgctgcacgtggctctgcggaaccggtcaaacacacccatcctggtagacggcaaggatgtgatgccagaggtcaacaaggttctggacaagatgaagtctttctgccaggggcccctcatggtgactgaagcccttaagccatactcttcaggaggtccccgcgtctggtatgtctccaacattgatggaactcacattgccaaaaccctggcccagctgaaccccgagtcctccctgttcatcattgcctccaagacctttactacccaggagaccatcacgaatgcagagacggcgaaggagtggtttctccaggcggccaaggatccttctgcagtggcgaagcactttgttgccctgtctactaacacaaccaaagtgaaggagtttggaattgaccctcaaaacatgttcgagttctgggat

SEQ ID NO: 137313 - DNA, 809 bp, Homo sapiens
  Payload ID: 6884
  Gene Symbol: GPI
  Gene Name: glucose-6-phosphate isomerase
  ENST ID: ENST00000633375
  CDS Start-End: 411-809
aacatgactcagcatcctcggtgggctcgcctcctcccccggaacagctgtctaaaatccatgggcgtggaaacgccacgccacgccccgctcccgacttcttcagctcaggccccagaactgaccaccccaccagtcctctgccccagtccctctgccttcactcccatggccacctgtgctccagggcctgcctgacccctgtccagcggccctgaagtaaggtctgtgatgtctaaatgccgatacctcagtttccccatctttagaacggggctcttgtttggaactgtgcccgccacagcctgcacgcctagaacactgcctgtaacgtggaaggtgttcgatctatagagttttgtcgaatgaatgaatgaagccgactagtgcacagggagtgcagcggcgcgatggtagctctctgcagcctccaacacctgggctccagtgatccccgggctctgcccaccctccccactgccacttccgggcagaggccagcaaagcggcggcgcaagagtcccgccatggccgctctcacccgggacccccagttccagaagctgcagcaatggtaccgcgagcaccgctccgagctgaacctgcgccgcctcttcgatgccaacaaggaccgcttcaaccacttcagcttgaccctcaacaccaaccatgggcatatcctggtggattactccaagaacctggtgacggaggacgtgatgcggatgctggtggacttggccaagtccaggggcgtggaggccgcccgggagcggatgttcaatggtgagaagatcaactacaccgag

SEQ ID NO: 137314 - DNA, 565 bp, Homo sapiens
  Payload ID: 6884
  Gene Symbol: GPI
  Gene Name: glucose-6-phosphate isomerase
  ENST ID: ENST00000633941
  CDS Start-End: 81-565
acgcgcctcgcttgctgcgcgctgccggcgctccttcctcctcggctcgcgtctcactcagtgtaccttctagtcccgccatggccgctctcacccgggacccccagttccagaagctgcagcaatggtaccgcgagcaccgctccgagctgaacctgcgccgcctcttcgatgccaacaaggaccgcttcaaccacttcagcttgaccctcaacaccaaccatgggcatatcctggtggattactccaagaacctggtgacggaggacgtgatgcggatgctggtggacttggccaagtccaggggcgtggaggccgcccgggagcggatgttcaatggtgagaagatcaactacaccgaggatgtgatgccagaggtcaacaaggttctggacaagatgaagtctttctgccagcgtgtccggagcggtgactggaaggggtacacaggcaagaccatcacggacgtcatcaacattggcattggcggctccgacctggggcccctcatggtgactgaagcccttaagccatactcttcaggaggtccccgcgtctggtatgt

SEQ ID NO: 137315 - DNA, 1045 bp, Homo sapiens
  Payload ID: 6884
  Gene Symbol: GPI
  Gene Name: glucose-6-phosphate isomerase
  ENST ID: ENST00000632407
  CDS Start-End: 242-1045
agagaggagctgaggccccagatcagcggccgcgggcaaggtcgctcagcgggcacccggcctgggtatcggggcgcgggtcgggggcggggccggggctcaggggtggggccgggccgggccgggccgggcgcctgcgccataaaggccgccgcgcgcccacgcgcctcgcttgctgcgcgctgccggcgctccttcctcctcggctcgcgtctcactcagtgtaccttctagtcccgccatggccgctctcacccgggacccccagttccagaagctgcagcaatggtaccgcgagcaccgctccgagctgaacctgcgccgcctcttcgatgccaacaaggaccgcttcaaccacttcagcttgaccctcaacaccaaccatgggcatatcctggtggattactccaagaacctggtgacggaggacgtgatgcggatgctggtggacttggccaagtccaggggcgtggaggccgcccgggagcggatgttcaatggtgagaagatcaactacaccgagggtcgagccgtgctgcacgtggctctgcggaaccggtcaaacacacccatcctggtagacggcaaggatgtgatgccagaggtcaacaaggttctggacaagatgaagtctttctgccagcgtgtccggagcggtgactggaaggggtacacaggcaagaccatcacggacgtcatcaacattggcattggcggctccgacctggggcccctcatggtgactgaagcccttaagccatactcttcaggaggtccccgcgtctggtatgtctccaacattgatggaactcacattgccaaaaccctggcccagctgaaccccgagtcctccctgttcatcattgcctccaagacctttactacccaggagaccatcacgaatgcagagacggcgaaggagtggtttctccaggcggccaaggatccttctgcagtggcgaagcactttgttgccctgtctactaacacaaccaaagtgaaggagtttggaattgaccctcaaaacatgttcgagttctgggat

SEQ ID NO: 137316 - DNA, 678 bp, Homo sapiens
  Payload ID: 6884
  Gene Symbol: GPI
  Gene Name: glucose-6-phosphate isomerase
  ENST ID: ENST00000631851
  CDS Start-End: 1-32
agaggccagcaaagcggcggcgcaagaggtagggagagaggagctgaggccccagatcagcggccgcgggcaaggtcgctcagcgggcacccggcctggtcccgccatggccgctctcacccgggacccccagttccagaagctgcagcaatggtaccgcgagcaccgctccgagctgaacctgcgccgcctcttcgatgccaacaaggaccgcttcaaccacttcagcttgaccctcaacaccaaccatgggcatatcctggtggattactccaagaacctggtgacggaggacgtgatgcggatgctggtggacttggccaagtccaggggcgtggaggccgcccgggagcggatgttcaatggtgagaagatcaactacaccgagggtcgagccgtgctgcacgtggctctgcggaaccggtcaaacacacccatcctggtagacggcaaggatgtgatgccagaggtcaacaaggttctggacaagatgaagtctttctgccagcgtgtccggagcggtgactggaaggggtacacaggcaagaccatcacggacgtcatcaacattggcattggcggctccgacctggggcccctcatggtgactgaagcccttaagccatactcttcaggaggtccccgcgtctggtatgtctccaacattgatggaactca

SEQ ID NO: 137317 - DNA, 615 bp, Homo sapiens; identical to SEQ ID NO: 137301
  Payload ID: 6884
  Gene Symbol: GPI
  Gene Name: glucose-6-phosphate isomerase
  ENST ID: ENST00000634112
  CDS Start-End: 178-615

SEQ ID NO: 137318 - DNA, 849 bp, Homo sapiens
  Payload ID: 6884
  Gene Symbol: GPI
  Gene Name: glucose-6-phosphate isomerase
  ENST ID: ENST00000632704
  CDS Start-End: 1-849
acttccgggcagaggccagcaaagcggcggcgcaagagtcccgccatggccgctctcacccgggacccccagttccagaagctgcagcaatggtaccgcgagcaccgctccgagctgaacctgcgccgcctcttcgatgccaacaaggaccgcttcaaccacttcagcttgaccctcaacaccaaccatgggcatatcctggtggattactccaagaacctggtgacggaggacgtgatgcggatgctggtggacttggccaagtccaggggcgtggaggccgcccgggagcggatgttcaatggtgagaagatcaactacaccgagggtcgagccgtgctgcacgtggctctgcggaaccggtcaaacacacccatcctggtagacggcaaggatgtgatgccagaggtcaacaaggttctggacaagatgaagtctttctgccagcgtgtccggagcggtgactggaaggggtacacaggcaagaccatcacggacgtcatcaacattggcattggcggctccgacctggggcccctcatggtgactgaagcccttaagccatactcttcaggaggtccccgcgtctggtatgtctccaacattgatggaactcacattgccaaaaccctggcccagctgaaccccgagtcctccctgttcatcattgcctccaagacctttactacccaggagaccatcacgaatgcagagacggcgaaggagtggtttctccaggcggccaaggatccttctgcagtggcgaagcactttgttgccctgtctactaacacaaccaaagtgaaggagtttggaattgaccctcaaaacatgttcgagttctgggat

SEQ ID NO: 137319 - DNA, 557 bp, Homo sapiens; identical to SEQ ID NO: 137298
  Payload ID: 6884
  Gene Symbol: GPI
  Gene Name: glucose-6-phosphate isomerase
  ENST ID: ENST00000633181
  CDS Start-End: 228-557

SEQ ID NO: 137320 - DNA, 2604 bp, Homo sapiens
  Payload ID: 6885
  Gene Symbol:
  Gene Name: Glucose-6-phosphate translocase [Source:UniProtKB/Swiss-Prot
  Acc:O43826]
  Uniprot ID: O43826
  ENST ID: ENST00000631372
  CDS Start-End: 758-2047
gcttgcgcagccttcgctagccccgccccgtcctattcgggctcccgcctctgttcagttccagagacaattcatgggtcttggggccaccgaggcgctgtccctgaccaccagcacgagacccctttctatcgcgccagtcctgtggtctccgcacctctccagctcctgcacccccggcccccgtggttcccagccgcacagtagcgtgtcctgggtagcgtgaggacccacggggctgggcaggtgccacgagcccgccgcctcttcgccgcccgccgcctctcctcctctcccgcccgccgcctggccctcccctaccaggctgagcctctgggtgccagaagcgcggggcctccgggagaatacgtgcggtcgcccgctccgcgtgcgcctacgccttctgctccagttgctttcccaattgagcggaaaagccggggcatgttgccggggccctgggcgggacggttgtgccctgcagcccgaagcccgccggggcaccttcccgcccacgagctgcccagtccctctgcttgcggcccctgccaacgtcccacaggacactgggtccccttggagcctccccaggcttaatgattgtccagaaggcggctataaagggagcctgggaggctgggtggaggagggagcagaaaaaacccaactcagcagatctgggaactgtgagagcggcaagcaggaactgtggtcagaggctgtgcgtcttggctggtagggcctgctcttttctaccatggcagcccagggctatggctattatcgcactgtgatcttctcagccatgtttgggggctacagcctgtattacttcaatcgcaagaccttctcctttgtcatgccatcattggtggaagagatccctttggacaaggatgatttggggttcatcaccagcagccagtcggcagcttatgctatcagcaagtttgtcagtggggtgctgtctgaccagatgagtgctcgctggctcttctcttctgggctgctcctggttggcctggtcaacatattctttgcctggagctccacagtacctgtctttgctgccctctggttccttaatggcctggcccaggggctgggctggcccccatgtgggaaggtcctgcggaagtggtttgagccatctcagtttggcacttggtgggccatcctgtcaaccagcatgaacctggctggagggctgggccctatcctggcaaccatccttgcccagagctacagctggcgcagcacgctggccctatctggggcactgtgtgtggttgtctccttcctctgtctcctgctcatccacaatgaacctgctgatgttggactccgcaacctggaccccatgccctctgagggcaagaagggctccttgaaggaggagagcaccctgcaggagctgctgctgtccccttacctgtgggtgctctccactggttaccttgtggtgtttggagtaaagacctgctgtactgactggggccagttcttccttatccaggagaaaggacagtcagcccttgtaggtagctcctacatgagtgccctggaagttgggggccttgtaggcagcatcgcagctggctacctgtcagaccgggccatggcaaaggcgggactgtccaactacgggaaccctcgccatggcctgttgctgttcatgatggctggcatgacagtgtccatgtacctcttccgggtaacagtgaccagtgactcccccaagctctggatcctggtattgggagctgtatttggtttctcctcgtatggccccattgccctgtttggagtcatagccaacgagagtgcccctcccaacttgtgtggcacctcccacgccattgtgggactcatggccaatgtgggcggctttctggctgggctgcccttcagcaccattgccaagcactacagttggagcacagccttctgggtggctgaagtgatttgtgcggccagcacggctgccttcttcctcctacgaaacatccgcaccaagatgggccgagtgtccaagaaggctgagtgaagagagtccaggttccggagcaccatcccacggtggccttccccctgcacgctctgcggggagaaaaggaggggcctgcctggctagccctgaacctttcactttccatttctgcgccttttctgtcacccgggtggcgctggaagttatcagtggctagtgaggtcccagctccctgatcctatgctctatttaaaagataacctttggccttagactccgttagctcctatttcctgccttcagacaaacaggaaacttctgcagtcaggaaggctcctgtacccttcttcttttcctaggccctgtcctgcccgcatcctaccccatccccacctgaagtgaggctatccctgcagctgcagggcactaatgacccttgacttctgctgggtcctaagtcctctcagcagtgggtgactgctgttgccaatacctcagactccagggaaagagaggaggccatcattctcactgtaccactaggcgcagttggatataggtgggaagaaaaggtgacttgttatagaagattaaaactagatttgatactgaac

SEQ ID NO: 137321 - DNA, 8061 bp, Homo sapiens
  Payload ID: 6886
  Gene Symbol: GFOD1
  Gene Name: glucose-fructose oxidoreductase domain containing 1
  Uniprot ID: Q9NXC2
  ENST ID: ENST00000379284
  CDS Start-End: 285-1148
acttcataaagactctatgtggaggatagatgctaccgtggccgggctctcagccacgttcttctgcagtatgcagtagggaagggcacatttctcacatgccttcaccagattatagttttctgggagcaaagccaagtgctcccacctttgggtgctgacccaagaagagatattctgtgaacttctgctctttggttgggcaatctccgagagtcagttggttgggcatcggcaagaacgtcatctgcgaccgcacggccacgccgctggacgctttccgcatgacctcggccgcccactactaccccaagctcatgagcatcatgggcaacgtgctgcgcttcctgccggctttcgtgcgcatgaagcagctgatcgaggagggctacgtgggcgagccgctggtgtgtgaggtgcaggtgcacggcggcagcctgctgggcaagaagtacaactggagctgcgacgacttgatgggcggcggcggcctgcactccgtgggcacctacatcatcgacctgctcaccttcctcaccggccaaaaggccgtcaaggtccacgggctgctcaagaccttcgtgaagcagactgaccacatcaagggcatccgacagatcaccagcgatgacttctgcaccttccagatggtgctggagggcggggtgtgctgcaccgtcaccctcaacttcaacgtgcccggcgagttcaagcaggatgtcactgtggtgggctcagccgggcgcctgctggccgtgggcaccgacctgtacgggcagcgcaacagcgccccggagcaggagctgctggtgcaggacgccacgccggtgagcaactccctgcttccggagaaggccttcagcgacatcccctcgccctacctgcgcggcaccatcaagatgatgcaggcggtgcgccaggccttccaggaccaggacgaccggcgcacgtgggatgggcggcccctcaccatggccgccaccttcgacgactgcctgtatgccttgtgcgtggtggacaccatcaagaggtccagccagacgggcgagtggcagaacattgccatcatgaccgaggagccggagctgagccccgcctacctgatcagcgaggccatgcgccgcagcaggatgtccctctactgttagcacagattgagaacctcggggacttgagccttctgcaggggatgtccacagagagggaagggccgaggggagagggtgaccatggggaatgtggggatcagggaggtggagggacagtgtgaataaatggcatctaggaaggtaaactccaatcccggtgaccgaccccaaaccagactgttggtgggctgagctcctagcctggaagcattcaggagagcctgccattcctgggatgatccctgctgggtatttgcacgagagtggtttggtttagctgcctctgctgccctttactgtgacaagcaaggaggggttgcttccctccctacctcatccatcccacacaccttggccttctgcaagccaagtggttctgcaaggtcaaggcactagtatcagatggcaagctcagtgcccgggatacccactgctggcaggagaaggcccattttcacagtccacagaagcgtgttaggctggggttgggggtgggatgggctggtgagaaagttcaaattccaggaagccactttttattggatataaggtatctaacggcaaaagtacttagtagcaaagtggccaccttttgattgattgggcttcctcataggaagcactgagggtgtgtctttgtacttggttcattgcccttcacctggtagagaaagagaggtcagaaatagcaagcaaaaagcaggactcccaggagccacaagaaaagagcacaggctgcaccaaagcaggggcagcagagaataaaatatccctttgaacttgtcaacaattaaaaaactgcaaggagtcaccttataacactatttccagtaaaggtggaattgagtatcagagggattactgcggtgttaaggtagccctgccacgtggctctccaggcagggccaagaagacagcacaaagtatgggtttggccataagctcatatgctgcccccaaagactggggagagctgtgtgcctcagtgttgcagtgtgaattcctaaatagagggtaaagtgagcctagccaggaggtgtttggggctctatcgcgcatctctcctaccaagctgggcaagagcttttaggagattcatccagctttgtggatttagaaaggaagccttcagttccaatcagaatcctctttccttacaaaaaaaaaaaaaaaaaaaaaaaaaaaaaggattttccttagctccagcatttgctttcaggattctgacacctgagaatttgggggtaggtactaaacgaaacaaaacaaaaggacaacaaggaacattatttctagtgtttctaaaatgggggtttagaaccccttaaggggccatacttaggcttgaaaaggctaatgttggaaaaaacatgttcttctaattggtctgctgtctgtcttgtccttgcacactctgcttacagagttttgttagagatgctgaactgcaggctgggagcaggcagtgccaaaagggaacagacacacacacacatgcacgtgcacacacacacacacacacacacacacagatttttgaatggttgctaccgacaaatgtcgctgaaaccattctttaaaaattcagatctggtcttgaaagaaagagccaatcaagtgcattcagagaacagggaattatcctttgttatctttgtttaattcttcaccccacgtaagacatttgtcaagtgtggacgtggaagccattcctcataagtctacgtagcttttgttcacaggctcactgaagtccaacaggtgtctttacatgcaactgaggtttagagttcttttcagatagctgccattggaactagaagggaatctaagaggactggagtccacctccagcctgtgtaggcaaaatctgagaatgaacagcccaatcagttgcatccttcattgtcctccctagggtcaatattctttgaagcccaggctactcataggtgcaagtgtggtgtgtccaaacacgaggggaatgctgggcattttctagaacagagaagtaagtactgccttcctggaaagagtcgccctgcttcccgaggctttgctacagcactgcagggtgggtaagctgaaattccatgcgtggtttgttgtggtccctgacctgttgctgacagacttcatggtcagcattccagctcttgcagctatcagttccaaaccagagatttgctggaatggaagtctcccaataatagtttgaacagaggcccatgtcatggactgctttggttcacattcttcttctttttttttttttttttttgaaatggagtctcgctctgtcacccaagctggagtgcagtggtgtgatctcagctcactgcaacctctgcctcccaggttcaagcgattctcctgtctcagcctcccgagcagcagggactacgggtggctgccaccacagccggctaattttttgtatttttagtagagacggggtttcactgtattagccagcatggtctcgatctcctgacctcttgatccacctgccttggccttgcaaagtgctggggttgcaggcgtgagccaccacacccagctgattctggttcttctaaattgctccctgggaaagtagtttttggggaaacattggaattattattattattattttctagctagcctgaagggctccgattaaggatgaagggaaagtaaacaaaatgattcaatgggtttcatttttctaagtcattcataacctaaatagggatattcctggggtttcaattgtatgtttctgtactaaaccataatactcgcgaaatcttttcccaaaacttcgggttttggagagaggtccccacaaaggcctctaagctctgtaatacatatttaatgtctaaaacaaaaaatctcatttgaagctggggtattagaaagaacatatattctttaaaagaggcatgaaaaaatattttagtgtgtgtactcaaattttatctactgaaatgcatgtagtaggtaggtgaaggaacaagagaaagaaaagaactggatagttcattttctttaaatataaactgtagcaaatgggtttgagatactcctttagtgctccatttgcccttatcccaccacatgcaaagacttgatttggggtagctatatgaagctgaaatctctagccttcaacagtgttctgcagaaggactttgtttcagcccagcaccgttcatcatgcctttaggggtctgggtacccacagctgactttgacctaggactaaaacccagcaatcttttggctcctttctgctttgtttaatgtgtttcaagggcctcgatgcaaggaggcagtgctttaagagtcttcccatttagttcctgcatgcctgtttcgttcccatcaatgtgcgaatggcctagattccaagttatgagggagggtgtgggtcagggttcttacctggtatttaaaaaatgtttgggagtgccctgggcctatttgaaaagtttgaatctgtgatcactgtcagctcctccaagacttctcctctcaacagacaattgcattgtagggcaccccagaccccccttagcctacatggcagcaaataccactgtgccagttatatctggactctagggtagtcttggccaactccaagactggccaactccaagacttgtccactgtgtgcagagtattttaagtatgttatctcatacaatccataaaaacaaccctatagtgttgggtattgctatttcttttatacacatgagaaaatggaggcagtaagaggaagaggaacttgttcaaagtcacacaactgttaggcagaaatgaggtcattcaaatccttaatcttctcctccagaccacactgcctcccaggaagagatgtgggcacctcctgttcttgccaggcaggaaaccgctccttatcaatgtctacggggtctgctctcacacccaggaaggactgtgacaagcatggactaacctgcggctccactcagcctgctgtcagcaccctcctgttcagcaggatgcaacatctgatgttctgccaggaggctgtagagctgcacatagaagtagccagtgtttcttcccattccaaaatggaaatatcactcagccttttttaaaattgacttcctatgttcattttgattgtaggtgatgcagcaagcctcagggctggggattttcaaaatcttgttggctgactattatagatggccttggaatttgctcttgggggtctgaatataacgtaggaaaatgtcctttctcagggagtggggctttaaagttcgtttgtttgtcactccaattttagctgtgcactgcacctttctttgcacccctactctcttcatcttgtctcatagccacagctattgaatttggcctgtgatcataagttgggtttctgatctgatctcttgcattctggtgggtactgggggcagaatcagctttgttaatgattttctgggcagaaggtaaattcagctgcatctgaaggggcttcacagtccaatagccgtccttttgttttacataacagagagtgatggtcaaggccacccacatctttagtggtagagccaggacaaaaagtcaggttttctgcctcttaagtctcatgctgcctcacatagcacctccagagctctagggaaaggaggctcagagagatgaagtgacttgtctgaagtcctgtggctagtggcagagaagttggaattagacctgcattggacctcaattcgctgagcagttgcagggaaatctggaaatccttttttttttttttttgagacagagtcttactctgtcacccaggctggagtgcaatggcgtgatctcagctcactgcaacaccgcctcccgggttcaagcgattctcctgcctcagcctcctgagtagctgggattacagacgcacgccaccatgcccggctaatttttgtatttttagtagagacaaggtttccccatattggtcaggctggtcttgaactcctgaccttgtgatccgcccgccttgacctcccaaagtgctgggatgacaggcgtgatccaccgtgcccagccgggaaatccattttttaaaataaattcaattatgtcttgaatgtactcagaaaacgagctgtttaaaatgtcccattgtgactgtaatgtgaacaatgacctctaacttgtattttatttggcaaggatgggggatgtgcatcaaatcttcacctctgggatttcctgaggcttggtctacttggctcaccctccacctgcatccccaccccactcctagatattaatacaaatctagccttgacaccgcctactgctccaccaccgcctacgtttttggccatcagagccttggagtttacagagcagaggccatgacattggggagcttgtttaaaaatcaatgatcagaaccccacattttagtttccttttggggagaaagaggagggccgtggaagaaaaggggtgtgcagctggagcgttattatgtctttctcagcggcaggcatgcccgcctctccaccttctccccgccaggcacaggagccagcagctggagcgtgctctgagtttcaggggaccccccacccagactgactggggcttctgggacttctcataggaagagtcaagacctcctgcgcttctttaaaaggtgatgggctcagtgttcccagtggcatctggaggtgaagccggtactgtctcaggagtggaaggcaatggcccactggcctttttctcccccacgtcacagtccccatttgctggagcccttgagggggccaccgaaactgtggctctcattcagcctcccaaagtgttgcactactgaatactcctttctgtttacaccagcagtgaatagagtcatgaaaagaacatattatatgcaatggcttgatgcttagtgtggcaatcaaaagcttgcctgggcagatgtaggcaggggctagacaatagtcatggagttgtcaccaggtcactgtctctctccttccccttccaggtctctactgtcccctgcagccaccacaagggctaagctgttgaatgagccccttggtttttccttataaacgcaatgacttacttgtgattcttggtctaatcccaggctaagaaacaaaacaaaagcttgtgatctgacccattcctttgctgccttccttctctttcaggcacctggacgtatttagtattctgccctgtgccttgcccaggggagggagaagtttctagcaaatgtgactttctgtctgctgcctggtgcttttatagtacttcatctgctttttattgttgttgttgtgttttttaaccaaaatggcatttgtttggctgtcattgtcgagtatatatttattgtgttttacaaacatgagtatatatgtatgtatatgtataaaaccaaacttatatatataagaagtcaaggcatgtatactagatattttaaagagttatttatcaagggaaaaagatgtgtgttataaagtaaacagagtctatattttctatataatgtagatagtcaaacatagcttataaattataggaggttttggttttcttttttattattaaaggaaaaaaagaagaaaaaaaaagacaatgaatgcaactgttcttagtgtttttaaggccaaactactgtggaagctgggaggcggccctccctgcgggcctccagcagccctgtgcctgccgctaggagctccagagctgatgcccgttgtgatctctgcgatgctcgatgctcggagccagcggtcagcatcactcagccagctggcctgtgccgctctgacgtggcttccagctgttctccgcaatttgcattggtgggataaaggaatgaaaaggataaataaagatttaaaagaaaatacaa

SEQ ID NO: 137322 - DNA, 8751 bp, Homo sapiens
  Payload ID: 6886
  Gene Symbol: GFOD1
  Gene Name: glucose-fructose oxidoreductase domain containing 1
  Uniprot ID: Q9NXC2
  ENST ID: ENST00000379287
  CDS Start-End: 666-1838
gagcgaacatggcagcagaatgaggaggctggcgccgggtcgtggccgccgctgccgcgctgcagctcgggatcccagtccggcgcgctccgggccgcatccttagccggcctcctggcggccgcgggattatttcattcccaacggagagctaggaagaaaggagactcccccgcggagcggttccgtgctctggcagggtgtagacgtttgtctgtgcgattcgccggctgcgcaaacgacgcgggagagagccggtcccgggctgcggcggcgcggccgcggggatgagccggccatggagcggccttggcggggcgcacgcagcggactggcgctgccgcgggagcgcagcctgagccggggctccagggggcttcgaagcctccggcgccctgggggggtccctgccgccgactccgggaaggacgcgagccccgcgtggcggacactgccgcagtcaccgttctgaggcgccccgagcttgctccgcctgcagctcggtgcgctctgggcacccgggcgccttgcccggtgcacggcggctggcgcaccgcggctagattggctacaggagcggggtgcaggactggctagaggtgggtgtgtgcgcgcgttggactggagatccgagcagaagcagaaccaggcggctctgagcagccatgcttcccggggtgggcgtgttcggcaccagcctcacggcccgtgtcatcatcccgctgctgaaagacgagggcttcgcggtgaaggcgctgtggggccgcacgcaggaagaagcggaggagctggccaaggagatgagtgtccccttctacactagccgcattgatgaggtgctgctgcatcaggacgtggacttggtgtgcattaacctgccgccgcccctcaccagacagatcgctgtcaaaaccctaggcatcggcaagaacgtcatctgcgaccgcacggccacgccgctggacgctttccgcatgacctcggccgcccactactaccccaagctcatgagcatcatgggcaacgtgctgcgcttcctgccggctttcgtgcgcatgaagcagctgatcgaggagggctacgtgggcgagccgctggtgtgtgaggtgcaggtgcacggcggcagcctgctgggcaagaagtacaactggagctgcgacgacttgatgggcggcggcggcctgcactccgtgggcacctacatcatcgacctgctcaccttcctcaccggccaaaaggccgtcaaggtccacgggctgctcaagaccttcgtgaagcagactgaccacatcaagggcatccgacagatcaccagcgatgacttctgcaccttccagatggtgctggagggcggggtgtgctgcaccgtcaccctcaacttcaacgtgcccggcgagttcaagcaggatgtcactgtggtgggctcagccgggcgcctgctggccgtgggcaccgacctgtacgggcagcgcaacagcgccccggagcaggagctgctggtgcaggacgccacgccggtgagcaactccctgcttccggagaaggccttcagcgacatcccctcgccctacctgcgcggcaccatcaagatgatgcaggcggtgcgccaggccttccaggaccaggacgaccggcgcacgtgggatgggcggcccctcaccatggccgccaccttcgacgactgcctgtatgccttgtgcgtggtggacaccatcaagaggtccagccagacgggcgagtggcagaacattgccatcatgaccgaggagccggagctgagccccgcctacctgatcagcgaggccatgcgccgcagcaggatgtccctctactgttagcacagattgagaacctcggggacttgagccttctgcaggggatgtccacagagagggaagggccgaggggagagggtgaccatggggaatgtggggatcagggaggtggagggacagtgtgaataaatggcatctaggaaggtaaactccaatcccggtgaccgaccccaaaccagactgttggtgggctgagctcctagcctggaagcattcaggagagcctgccattcctgggatgatccctgctgggtatttgcacgagagtggtttggtttagctgcctctgctgccctttactgtgacaagcaaggaggggttgcttccctccctacctcatccatcccacacaccttggccttctgcaagccaagtggttctgcaaggtcaaggcactagtatcagatggcaagctcagtgcccgggatacccactgctggcaggagaaggcccattttcacagtccacagaagcgtgttaggctggggttgggggtgggatgggctggtgagaaagttcaaattccaggaagccactttttattggatataaggtatctaacggcaaaagtacttagtagcaaagtggccaccttttgattgattgggcttcctcataggaagcactgagggtgtgtctttgtacttggttcattgcccttcacctggtagagaaagagaggtcagaaatagcaagcaaaaagcaggactcccaggagccacaagaaaagagcacaggctgcaccaaagcaggggcagcagagaataaaatatccctttgaacttgtcaacaattaaaaaactgcaaggagtcaccttataacactatttccagtaaaggtggaattgagtatcagagggattactgcggtgttaaggtagccctgccacgtggctctccaggcagggccaagaagacagcacaaagtatgggtttggccataagctcatatgctgcccccaaagactggggagagctgtgtgcctcagtgttgcagtgtgaattcctaaatagagggtaaagtgagcctagccaggaggtgtttggggctctatcgcgcatctctcctaccaagctgggcaagagcttttaggagattcatccagctttgtggatttagaaaggaagccttcagttccaatcagaatcctctttccttacaaaaaaaaaaaaaaaaaaaaaaaaaaaaaggattttccttagctccagcatttgctttcaggattctgacacctgagaatttgggggtaggtactaaacgaaacaaaacaaaaggacaacaaggaacattatttctagtgtttctaaaatgggggtttagaaccccttaaggggccatacttaggcttgaaaaggctaatgttggaaaaaacatgttcttctaattggtctgctgtctgtcttgtccttgcacactctgcttacagagttttgttagagatgctgaactgcaggctgggagcaggcagtgccaaaagggaacagacacacacacacatgcacgtgcacacacacacacacacacacacacacagatttttgaatggttgctaccgacaaatgtcgctgaaaccattctttaaaaattcagatctggtcttgaaagaaagagccaatcaagtgcattcagagaacagggaattatcctttgttatctttgtttaattcttcaccccacgtaagacatttgtcaagtgtggacgtggaagccattcctcataagtctacgtagcttttgttcacaggctcactgaagtccaacaggtgtctttacatgcaactgaggtttagagttcttttcagatagctgccattggaactagaagggaatctaagaggactggagtccacctccagcctgtgtaggcaaaatctgagaatgaacagcccaatcagttgcatccttcattgtcctccctagggtcaatattctttgaagcccaggctactcataggtgcaagtgtggtgtgtccaaacacgaggggaatgctgggcattttctagaacagagaagtaagtactgccttcctggaaagagtcgccctgcttcccgaggctttgctacagcactgcagggtgggtaagctgaaattccatgcgtggtttgttgtggtccctgacctgttgctgacagacttcatggtcagcattccagctcttgcagctatcagttccaaaccagagatttgctggaatggaagtctcccaataatagtttgaacagaggcccatgtcatggactgctttggttcacattcttcttctttttttttttttttttttgaaatggagtctcgctctgtcacccaagctggagtgcagtggtgtgatctcagctcactgcaacctctgcctcccaggttcaagcgattctcctgtctcagcctcccgagcagcagggactacgggtggctgccaccacagccggctaattttttgtatttttagtagagacggggtttcactgtattagccagcatggtctcgatctcctgacctcttgatccacctgccttggccttgcaaagtgctggggttgcaggcgtgagccaccacacccagctgattctggttcttctaaattgctccctgggaaagtagtttttggggaaacattggaattattattattattattttctagctagcctgaagggctccgattaaggatgaagggaaagtaaacaaaatgattcaatgggtttcatttttctaagtcattcataacctaaatagggatattcctggggtttcaattgtatgtttctgtactaaaccataatactcgcgaaatcttttcccaaaacttcgggttttggagagaggtccccacaaaggcctctaagctctgtaatacatatttaatgtctaaaacaaaaaatctcatttgaagctggggtattagaaagaacatatattctttaaaagaggcatgaaaaaatattttagtgtgtgtactcaaattttatctactgaaatgcatgtagtaggtaggtgaaggaacaagagaaagaaaagaactggatagttcattttctttaaatataaactgtagcaaatgggtttgagatactcctttagtgctccatttgcccttatcccaccacatgcaaagacttgatttggggtagctatatgaagctgaaatctctagccttcaacagtgttctgcagaaggactttgtttcagcccagcaccgttcatcatgcctttaggggtctgggtacccacagctgactttgacctaggactaaaacccagcaatcttttggctcctttctgctttgtttaatgtgtttcaagggcctcgatgcaaggaggcagtgctttaagagtcttcccatttagttcctgcatgcctgtttcgttcccatcaatgtgcgaatggcctagattccaagttatgagggagggtgtgggtcagggttcttacctggtatttaaaaaatgtttgggagtgccctgggcctatttgaaaagtttgaatctgtgatcactgtcagctcctccaagacttctcctctcaacagacaattgcattgtagggcaccccagaccccccttagcctacatggcagcaaataccactgtgccagttatatctggactctagggtagtcttggccaactccaagactggccaactccaagacttgtccactgtgtgcagagtattttaagtatgttatctcatacaatccataaaaacaaccctatagtgttgggtattgctatttcttttatacacatgagaaaatggaggcagtaagaggaagaggaacttgttcaaagtcacacaactgttaggcagaaatgaggtcattcaaatccttaatcttctcctccagaccacactgcctcccaggaagagatgtgggcacctcctgttcttgccaggcaggaaaccgctccttatcaatgtctacggggtctgctctcacacccaggaaggactgtgacaagcatggactaacctgcggctccactcagcctgctgtcagcaccctcctgttcagcaggatgcaacatctgatgttctgccaggaggctgtagagctgcacatagaagtagccagtgtttcttcccattccaaaatggaaatatcactcagccttttttaaaattgacttcctatgttcattttgattgtaggtgatgcagcaagcctcagggctggggattttcaaaatcttgttggctgactattatagatggccttggaatttgctcttgggggtctgaatataacgtaggaaaatgtcctttctcagggagtggggctttaaagttcgtttgtttgtcactccaattttagctgtgcactgcacctttctttgcacccctactctcttcatcttgtctcatagccacagctattgaatttggcctgtgatcataagttgggtttctgatctgatctcttgcattctggtgggtactgggggcagaatcagctttgttaatgattttctgggcagaaggtaaattcagctgcatctgaaggggcttcacagtccaatagccgtccttttgttttacataacagagagtgatggtcaaggccacccacatctttagtggtagagccaggacaaaaagtcaggttttctgcctcttaagtctcatgctgcctcacatagcacctccagagctctagggaaaggaggctcagagagatgaagtgacttgtctgaagtcctgtggctagtggcagagaagttggaattagacctgcattggacctcaattcgctgagcagttgcagggaaatctggaaatccttttttttttttttttgagacagagtcttactctgtcacccaggctggagtgcaatggcgtgatctcagctcactgcaacaccgcctcccgggttcaagcgattctcctgcctcagcctcctgagtagctgggattacagacgcacgccaccatgcccggctaatttttgtatttttagtagagacaaggtttccccatattggtcaggctggtcttgaactcctgaccttgtgatccgcccgccttgacctcccaaagtgctgggatgacaggcgtgatccaccgtgcccagccgggaaatccattttttaaaataaattcaattatgtcttgaatgtactcagaaaacgagctgtttaaaatgtcccattgtgactgtaatgtgaacaatgacctctaacttgtattttatttggcaaggatgggggatgtgcatcaaatcttcacctctgggatttcctgaggcttggtctacttggctcaccctccacctgcatccccaccccactcctagatattaatacaaatctagccttgacaccgcctactgctccaccaccgcctacgtttttggccatcagagccttggagtttacagagcagaggccatgacattggggagcttgtttaaaaatcaatgatcagaaccccacattttagtttccttttggggagaaagaggagggccgtggaagaaaaggggtgtgcagctggagcgttattatgtctttctcagcggcaggcatgcccgcctctccaccttctccccgccaggcacaggagccagcagctggagcgtgctctgagtttcaggggaccccccacccagactgactggggcttctgggacttctcataggaagagtcaagacctcctgcgcttctttaaaaggtgatgggctcagtgttcccagtggcatctggaggtgaagccggtactgtctcaggagtggaaggcaatggcccactggcctttttctcccccacgtcacagtccccatttgctggagcccttgagggggccaccgaaactgtggctctcattcagcctcccaaagtgttgcactactgaatactcctttctgtttacaccagcagtgaatagagtcatgaaaagaacatattatatgcaatggcttgatgcttagtgtggcaatcaaaagcttgcctgggcagatgtaggcaggggctagacaatagtcatggagttgtcaccaggtcactgtctctctccttccccttccaggtctctactgtcccctgcagccaccacaagggctaagctgttgaatgagccccttggtttttccttataaacgcaatgacttacttgtgattcttggtctaatcccaggctaagaaacaaaacaaaagcttgtgatctgacccattcctttgctgccttccttctctttcaggcacctggacgtatttagtattctgccctgtgccttgcccaggggagggagaagtttctagcaaatgtgactttctgtctgctgcctggtgcttttatagtacttcatctgctttttattgttgttgttgtgttttttaaccaaaatggcatttgtttggctgtcattgtcgagtatatatttattgtgttttacaaacatgagtatatatgtatgtatatgtataaaaccaaacttatatatataagaagtcaaggcatgtatactagatattttaaagagttatttatcaagggaaaaagatgtgtgttataaagtaaacagagtctatattttctatataatgtagatagtcaaacatagcttataaattataggaggttttggttttcttttttattattaaaggaaaaaaagaagaaaaaaaaagacaatgaatgcaactgttcttagtgtttttaaggccaaactactgtggaagctgggaggcggccctccctgcgggcctccagcagccctgtgcctgccgctaggagctccagagctgatgcccgttgtgatctctgcgatgctcgatgctcggagccagcggtcagcatcactcagccagctggcctgtgccgctctgacgtggcttccagctgttctccgcaatttgcattggtgggataaaggaatgaaaaggataaataaagatttaaaagaaaatacaa

SEQ ID NO: 137323 - DNA, 2388 bp, Homo sapiens
  Payload ID: 6886
  Gene Symbol: GFOD1
  Gene Name: glucose-fructose oxidoreductase domain containing 1
  ENST ID: ENST00000603223
  CDS Start-End: 773-1219
gcaggaacaccggccgctgacagccaaactcgccaactccgccctcgtccccgcgggatcccagagcctgagccggcctggggccgaggccgcccgagccgcgaggcgagcgaacatggcagcagaatgaggaggctggcgccgggtcgtggccgccgctgccgcgctgcagctcgggatcccagtccggcgcgctccgggccgcatccttagccggcctcctggcggccgcgggattatttcattcccaacggagagctaggaagaaaggagactcccccgcggagcggttccgtgctctggcagggtgtagacgtttgtctgtgcgattcgccggctgcgcaaacgacgcgggagagagccggtcccgggctgcggcggcgcggccgcggggatgagccggccatggagcggccttggcggggcgcacgcagcggactggcgctgccgcgggagcgcagcctgagccggggctccagggggcttcgaagcctccggcgccctgggggggtccctgccgccgactccgggaaggacgcgagccccgcgtggcggacactgccgcagtcaccgttctgaggcgccccgagcttgctccgcctgcagctcggtgcgctctgggcacccgggcgccttgcccggtgcacggcggctggcgcaccgcggctagattggctacaggagcggggtgcaggactggctagaggtgggtgtgtgcgcgcgttggactggagatccgagcagaagcagaaccaggcggctctgagcagccatgcttcccggggtgggcgtgttcggcaccagcctcacggcccgtgtcatcatcccgctgctgaaagacgagggcttcgcggtgaaggcgctgtggggccgcacgcaggaagaagcggaggagctggccaaggagatgagtgtccccttctacactagccgcattgatgaggtgctgctgcatcaggacgtggacttggtgtgcattaacctgccgccgcccctcaccagacagatcgctgtcaaaaccctagaaccaggacatcagaggaagaaaatcagcagacagaaaaatactggggaaaaaaaaatgccacgtggttctgttcagctgagcttctgctccctccagcacccccacatgggacatttgtttaccccccacgatgctgctcttggagagtcccaggggacaggtttcaagcccttagggatgcagcctgtctaacttaatatgcacagccgttcacatccagggcacagaggcagcctggctttccctggaggcccacggggaccacaatgctgcatttgtctgtggaactgagatttagctgcacattcttgcctgaatgcagcgggcctccagccacagcctgctggcatgggggattccaggagggatgtgcttcatgagccggcaattgcccttctttccagtccccagacccagtcaagattacagatagatgcgttcatcgcgcgcaggtgctggggaagccagtgggacatcactggctacattcaccaacaggattttccaactgcagtatttatcggtttttcaaacgaattcaacatctgtattcctcacccatttactgagtggctacaatgtgtaaggaaatattctcagtcatggggagttagaaaaggtcaaaggcatataagatatggcatgtgctctgagagaactcatcatctatccagaacctactcatcacttttggaaagagaagagaaactagcattctatggagtacttaccatgtgccagatttggtgtgagacatagtacgagtgttactcatttacgtctcatggccaacctccaatgtggacatttagcatctccatcttacaagtgagaaatttcactgtagagaggttaaatatcatgtgtcattgattctgtgacatgtattattttcacatttgaacatctgaaatatagatatgtctaaaagggcttttctttcttggtagtaagataactgtaggtctttgcagtagtgtcttagattatgtgaaatatggtattttggcaagtgtacatggctaagaacaagtggaatcagaattcaacttaagtttgcttgactccaaagcttatgtgttttccagtataatgtgctgcagtatcaatggtctgtatgaacaaaggccatatcatttttattgacaaagtatagaaacggggaaatggtgactgaactggaacttgcatcatctaattccataactgaggagacaatagcctggggactgcatgtatcccacaggatgttaaaaaattgagaaaatgttatttcatgatcttcacttctctgttgattataacttatttttgaagaggctaaaataaatggcaaactcttgtatggataagatataaaa

SEQ ID NO: 137324 - DNA, 2481 bp, Homo sapiens
  Payload ID: 6886
  Gene Symbol: GFOD1
  Gene Name: glucose-fructose oxidoreductase domain containing 1
  Uniprot ID: Q9NXC2
  ENST ID: ENST00000612338
  CDS Start-End: 230-1093
gcctgaataaaaggccgcacacgtgtgtcgggttttcttgggtgcgatagaggacctgcccttcagcagcggtggcgccctgctagggtcgtttgtttctttctgctgtgagttagtttagcgtgagattgcagatgttaccatcggctggaattatttcgtctgcgctggaggcatcggcaagaacgtcatctgcgaccgcacggccacgccgctggacgctttccgcatgacctcggccgcccactactaccccaagctcatgagcatcatgggcaacgtgctgcgcttcctgccggctttcgtgcgcatgaagcagctgatcgaggagggctacgtgggcgagccgctggtgtgtgaggtgcaggtgcacggcggcagcctgctgggcaagaagtacaactggagctgcgacgacttgatgggcggcggcggcctgcactccgtgggcacctacatcatcgacctgctcaccttcctcaccggccaaaaggccgtcaaggtccacgggctgctcaagaccttcgtgaagcagactgaccacatcaagggcatccgacagatcaccagcgatgacttctgcaccttccagatggtgctggagggcggggtgtgctgcaccgtcaccctcaacttcaacgtgcccggcgagttcaagcaggatgtcactgtggtgggctcagccgggcgcctgctggccgtgggcaccgacctgtacgggcagcgcaacagcgccccggagcaggagctgctggtgcaggacgccacgccggtgagcaactccctgcttccggagaaggccttcagcgacatcccctcgccctacctgcgcggcaccatcaagatgatgcaggcggtgcgccaggccttccaggaccaggacgaccggcgcacgtgggatgggcggcccctcaccatggccgccaccttcgacgactgcctgtatgccttgtgcgtggtggacaccatcaagaggtccagccagacgggcgagtggcagaacattgccatcatgaccgaggagccggagctgagccccgcctacctgatcagcgaggccatgcgccgcagcaggatgtccctctactgttagcacagattgagaacctcggggacttgagccttctgcaggggatgtccacagagagggaagggccgaggggagagggtgaccatggggaatgtggggatcagggaggtggagggacagtgtgaataaatggcatctaggaaggtaaactccaatcccggtgaccgaccccaaaccagactgttggtgggctgagctcctagcctggaagcattcaggagagcctgccattcctgggatgatccctgctgggtatttgcacgagagtggtttggtttagctgcctctgctgccctttactgtgacaagcaaggaggggttgcttccctccctacctcatccatcccacacaccttggccttctgcaagccaagtggttctgcaaggtcaaggcactagtatcagatggcaagctcagtgcccgggatacccactgctggcaggagaaggcccattttcacagtccacagaagcgtgttaggctggggttgggggtgggatgggctggtgagaaagttcaaattccaggaagccactttttattggatataaggtatctaacggcaaaagtacttagtagcaaagtggccaccttttgattgattgggcttcctcataggaagcactgagggtgtgtctttgtacttggttcattgcccttcacctggtagagaaagagaggtcagaaatagcaagcaaaaagcaggactcccaggagccacaagaaaagagcacaggctgcaccaaagcaggggcagcagagaataaaatatccctttgaacttgtcaacaattaaaaaactgcaaggagtcaccttataacactatttccagtaaaggtggaattgagtatcagagggattactgcggtgttaaggtagccctgccacgtggctctccaggcagggccaagaagacagcacaaagtatgggtttggccataagctcatatgctgcccccaaagactggggagagctgtgtgcctcagtgttgcagtgtgaattcctaaatagagggtaaagtgagcctagccaggaggtgtttggggctctatcgcgcatctctcctaccaagctgggcaagagcttttaggagattcatccagctttgtggatttagaaaggaagccttcagttccaatcagaatcctctttccttacaaaaaaaaaaaaaaaaaaaaaaaaaaaaaggattttccttagctccagcatttgctttcaggattctgacacctgagaatttgggggtaggtactaaacgaaacaaaacaaaaggacaacaaggaacattatttctagtgtttctaaaatgggggtttagaaccccttaaggggccatacttaggcttgaaaaggctaatgttggaaaaaacatgttcttctaattggtc

SEQ ID NO: 137325 - DNA, 2126 bp, Homo sapiens
  Payload ID: 6887
  Gene Symbol: GFOD2
  Gene Name: glucose-fructose oxidoreductase domain containing 2
  Uniprot ID: Q3B7J2
  ENST ID: ENST00000268797
  CDS Start-End: 347-1504
cagctcccggctacggcccctcccagcgcaggcccatccccgttatggagcatgcgcagtcctcctgccgtcccgcccctccctttccagagcccccagttccttagaaaccaggcggcgcgttcccggtggcggcgccctggactcccgggcccgcgcatccccgccagccttccttaaggcggatgggtggcccccgagaccccgtcggacccatggtttccagtgcagcgcggagtgggcgatgccagcgtgccaggagccatgtctgaccaggacgtttggaagatcatatccatgccagaggctcttgtgaggagatgagttggtaaagagagaggctgggatgaagatgctgccaggagtgggcgtgtttgggactggcagctccgcccgagttctggtcccactgctgagggcagaagggttcactgttgaggccctgtgggggaagactgaggaggaggcgaagcagcttgctgaggagatgaacatcgccttctacaccagccggactgatgacatcttgctgcatcaagatgtggatctggtgtgcatcagcatcccccctccactcacccggcagatatccgtgaaggctctaggtattgggaagaatgtggtttgcgagaaggcagcaacatcggtggatgccttccggatggtgacagcctcgcgctactacccgcagctcatgagcctggtagggaacgtgctgcgcttcctgcctgccttcgtgcgcatgaaacagctgatttcggaacactatgtgggagcggtgatgatctgtgatgcccgcatctactcaggcagcctgctgagccccagctatggctggatctgtgatgagctcatgggcggcgggggcttgcacaccatggggacctacattgtggacctgctgacccacctgaccggccggagagccgagaaggtgcacgggctgctcaagacattcgtgaggcagaacgctgccatccgtggcatccggcacgtcactagcgatgacttctgtttcttccagatgctcatgggtgggggtgtgtgtagcacagtgacactcaacttcaacatgccaggcgcctttgtgcatgaagtcatggtggtaggctctgcaggacgcctcgtcgcccggggagccgacctctatgggcagaagaactctgccacgcaagaggagctgctcttgagggactcgctggcagtgggcgcaggactgcctgagcaggggccccaggatgtcccgctgctgtacctgaagggcatggtctacatggtgcaggccttgcgccagtccttccaggggcagggcgaccgccgcacctgggaccgcacccctgtctccatggccgcctccttcgaggatgggctgtacatgcagagcgtggtggatgccatcaagaggtcgagccgatccggggagtgggaggctgtggaggtgctgacggaggagcccgacaccaaccagaacctgtgtgaggcacttcagcggaacaacctatgagcctgcacctgggctccttgccacagggcagagggaccagggaggggaacaggagccagacatgacagggacttggccctagcagagacagtgtctttcatttaatgagtctgggtgaagccagaggtggctctgggacttcgccccctccagtggctcatctgctcctcagacttgcagggtggcaaatgttcctgttgccaggttaccacggtgtgcacagggcagagctgccgccaggcctcctcatggtgatgccagtgagtcggaccaggaaaggctcaccctggggagcccttcagcctgatccgcagtcctaacagggtgagaaagcacaagaggggccagctcggctgaggcctgaggagaaatgatgagaagttttgtttcgttcttgggctggggcatctcaggaacagtgagggcaacaagctgtccctcagggaccctcacctgccctcccatgtgaccaggcccttcccaggtggggactggggcttgctttattaagtgagctcttgggcttttgaagtaggacagagggccctggtttggcagagaggaggcaagggagggctttagaacatctgagaaatgttaataaataattcagaaaatagga

SEQ ID NO: 137326 - DNA, 2029 bp, Homo sapiens
  Payload ID: 6887
  Gene Symbol: GFOD2
  Gene Name: glucose-fructose oxidoreductase domain containing 2
  Uniprot ID: Q3B7J2
  ENST ID: ENST00000602496
  CDS Start-End: 250-588
agttccttagaaaccaggcggcgcgttcccggtggcggcgccctggactcccgggcccgcgcatccccgccagccttccttaaggcggatgggtggcccccgagaccccgtcggacccatggtttccagtgcagcgcggagtgggcgatgccagcgtgccaggagccatgtctgaccaggacgtttggaagatcatatccatgccagaggctcttgtgaggagatgagttggtaaagagagaggctgggatgaagatgctgccaggagtgggcgtgtttgggactggcagctccgcccgagttctggtcccactgctgagggcagaagggttcactgttgaggccctgtgggggaagactgaggaggaggcgaagcagcttgctgaggagatgaacatcgccttctacaccagccggactgatgacatcttgctgcatcaagatgtggatctggtgtgcatcagcatcccccctccactcacccggcagatatccgtgaaggctctaggtacgcccggcaggccacagcaggggcagatcatgtctctccctctgggcagtcctctgagggtcactcctctcctctgagctctccttcctgggctcgcatctgcagggaggagaactctgggacatcacttgtccctgaagcagtgcttggggagggcatgaaaaaagacatagcctaacctacctcccatctgtaaatccctgaacagaaattaaggaaatactctaagagacagccatcaaggggctggagatggttgcatctcagtcaacataaagtttgcctctgtgaagttagaggtcagagccctgggtggcggggaattggttgtgactagtgtgtttgttctcccatttctggggcacacagcaccacaggaaggagaggctgtgtagcaaggctaccatttcccatgttttgtcagcgtttgactatagtgagcacacacccttcctgccaaactgcagtcttgtattgccggaggacaggaaggctctgccagcattgggcttccctgacaggatccgtcgacagcctgcttacatgacatctccactcccttgggaagttttgggcttggtaacctcttgcccctgactgggcatggcctgctgagctgttctcctacagttcccgttggtcttctatttccagtcaactggagtcaacttcttctctttatctaatataaatcagaacctagtttactaagtaaacaaaccagtaaacattcagccagcaatttttattttattttgagacagagtttccctcttgttgcaatgagccaagattataccactgggtaacaaagcgagtccccatctaaaaaaacaaaaacagactatttttcagattcaagaagagaggtctttccctctttcctcacctcttgaggcatgaaacaggaattccttatcctagttttatcaccaccaaactcctagcagtcataaaagtcctttttcctctaaacccacctcctctctgcctcacactgcagtatccactctgtcgccagcagcgaggcattatagcaggaggcttctgaattggccagaacagcagctctcaggtggggtgtctgagaacctcatttcctcattacatccctccctggtcagccatatgtgttcagcagccaaatggcaaaattcacccccagaactgtgattgtcttccctaatctggaaggcccacaagtgtggagaagcactggagaccctccagaagcagtagtgctagcagtcaggggctactctccctgccgggccccgtgcaagggcctggccaccctatcccaggtatgtgacacttggctggctgttctttattgtcctgctagtacctgttgtaaagcttcttttattaaagaagagcaggagattgaagtgtcataaattgaagagattcacaccaacacggcacatgtatacatatgtaacaaacctgcacgttgtgcacatgtaccctagaacttaaagtataataacaaaatatgtattaaaaaaataaata

SEQ ID NO: 137327 - DNA, 819 bp, Homo sapiens
  Payload ID: 6887
  Gene Symbol: GFOD2
  Gene Name: glucose-fructose oxidoreductase domain containing 2
  ENST ID: ENST00000602855
  CDS Start-End: 256-528
gcccccagttccttagaaaccaggcggcgcgttcccggtggcggcgccctggactcccgggcccgcgcatccccgccagccttccttaaggcggatgggtggcccccgagaccccgtcggacccatggtttccagtgcagcgcggagtgggcgatgccagcgtgccaggagccatgtctgaccaggacgtttggaagatcatatccatgccagaggctcttgtgaggagatgagttggtaaagagagaggctgggatgaagatgctgccaggagtgggcgtgtttgggactggcagctccgcccgagttctggtcccactgctgagggcagaagggttcactgttgaggccctgtgggggaagactgaggaggaggcgaagcagcttgctgaggagatgaacatcgccttctacaccagccggactgatgacatcttgctgcatcaagatgtggatctggtgtgcatcagcatcccccctccactcacccggcagatatccgtgaaggctctagagagctctctctgaggatgtgtgacattggagttattcattcattggtcaccaaatgcttgggaggtcagatggtggctcccagattgaattcagaaatagacctaagtcaacactttagcagcaagttggttcaaggggaagcaagccgctattggtcacttgactccttgccatcccttgtggcttgaatgcaggctggaaaggtgaggtgtgtccggagccagaactctggaggctctcagtcttcttcctgaattttagggttccccacagagaccatttccaagctatacgggaagaaag

SEQ ID NO: 137328 - DNA, 1991 bp, Homo sapiens
  Payload ID: 6887
  Gene Symbol: GFOD2
  Gene Name: glucose-fructose oxidoreductase domain containing 2
  ENST ID: ENST00000602377
  CDS Start-End: 265-531
ctttccagagcccccagttccttagaaaccaggcggcgcgttcccggtggcggcgccctggactcccgggcccgcgcatccccgccagccttccttaaggcggatgggtggcccccgagaccccgtcggacccatggtttccagtgcagcgcggagtgggcgatgccagcgtgccaggagccatgtctgaccaggacgtttggaagatcatatccatgccagaggctcttgtgaggagatgagttggtaaagagagaggctgggatgaagatgctgccaggagtgggcgtgtttgggactggcagctccgcccgagttctggtcccactgctgagggcagaagggttcactgttgaggccctgtgggggaagactgaggaggaggcgaagcagcttgctgaggagatgaacatcgccttctacaccagccggactgatgacatcttgctgcatcaagatgtggatctggtattgggaagaatgtggtttgcgagaaggcagcaacatcggtggatgccttccggatggtgacagcctcgcgctactacccgcagctcatgagcctggtagggaacgtgctgcgcttcctgcctgccttcgtgcgcatgaaacagctgatttcggaacactatgtgggagcggtgatgatctgtgatgcccgcatctactcaggcagcctgctgagccccagctatggctggatctgtgatgagctcatgggcggcgggggcttgcacaccatggggacctacattgtggacctgctgacccacctgaccggccggagagccgagaaggtgcacgggctgctcaagacattcgtgaggcagaacgctgccatccgtggcatccggcacgtcactagcgatgacttctgtttcttccagatgctcatgggtgggggtgtgtgtagcacagtgacactcaacttcaacatgccaggcgcctttgtgcatgaagtcatggtggtaggctctgcaggacgcctcgtcgcccggggagccgacctctatgggcagaagaactctgccacgcaagaggagctgctcttgagggactcgctggcagtgggcgcaggactgcctgagcaggggccccaggatgtcccgctgctgtacctgaagggcatggtctacatggtgcaggccttgcgccagtccttccaggggcagggcgaccgccgcacctgggaccgcacccctgtctccatggccgcctccttcgaggatgggctgtacatgcagagcgtggtggatgccatcaagaggtcgagccgatccggggagtgggaggctgtggaggtgctgacggaggagcccgacaccaaccagaacctgtgtgaggcacttcagcggaacaacctatgagcctgcacctgggctccttgccacagggcagagggaccagggaggggaacaggagccagacatgacagggacttggccctagcagagacagtgtctttcatttaatgagtctgggtgaagccagaggtggctctgggacttcgccccctccagtggctcatctgctcctcagacttgcagggtggcaaatgttcctgttgccaggttaccacggtgtgcacagggcagagctgccgccaggcctcctcatggtgatgccagtgagtcggaccaggaaaggctcaccctggggagcccttcagcctgatccgcagtcctaacagggtgagaaagcacaagaggggccagctcggctgaggcctgaggagaaatgatgagaagttttgtttcgttcttgggctggggcatctcaggaacagtgagggcaacaagctgtccctcagggaccctcacctgccctcccatgtgaccaggcccttcccaggtggggactggggcttgctttattaagtgagctcttgggcttttgaagtaggacagagggccctggtttggcagagaggaggcaagggagggctttagaacatctgagaaatgttaataaataattcagaaaataggaca

SEQ ID NO: 137329 - DNA, 5507 bp, Homo sapiens
  Payload ID: 6887
  Gene Symbol: GFOD2
  Gene Name: glucose-fructose oxidoreductase domain containing 2
  Uniprot ID: Q3B7J2
  ENST ID: ENST00000602279
  CDS Start-End: 226-564
gttcccggtggcggcgccctggactcccgggcccgcgcatccccgccagccttccttaaggcggatgggtggcccccgagaccccgtcggacccatggtttccagtgcagcgcggagtgggcgatgccagcgtgccaggagccatgtctgaccaggacgtttggaagatcatatccatgccagaggctcttgtgaggagatgagttggtaaagagagaggctgggatgaagatgctgccaggagtgggcgtgtttgggactggcagctccgcccgagttctggtcccactgctgagggcagaagggttcactgttgaggccctgtgggggaagactgaggaggaggcgaagcagcttgctgaggagatgaacatcgccttctacaccagccggactgatgacatcttgctgcatcaagatgtggatctggtgtgcatcagcatcccccctccactcacccggcagatatccgtgaaggctctaggtacgcccggcaggccacagcaggggcagatcatgtctctccctctgggcagtcctctgagggtcactcctctcctctgagctctccttcctgggctcgcatctgcagggaggagaactctgggacatcacttgtccctgaagcagtgcttggggagggcatgaaaaaagacatagcctaacctacctcccatctgtaaatccctgaacagaaattaaggaaatactctaagagacagccatcaaggggctggagatggttgcatctcagtcaacataaagtttgcctctgtgaagttagaggtcagagccctgggtggcggggaattggttgtgactagtgtgtttgttctcccatttctggggcacacagcaccacaggaaggagaggctgtgtagcaaggctaccatttcccatgttttgtcagcgtttgactatagtgagcacacacccttcctgccaaactgcagtcttgtattgccggaggacaggaaggctctgccagcattgggcttccctgacaggatccgtcgacagcctgcttacatgacatctccactcccttgggaagttttgggcttggtaacctcttgcccctgactgggcatggcctgctgagctgttctcctacagttcccgttggtcttctatttccagtcaactggagtcaacttcttctctttatctaatataaatcagaacctagtttactaagtaaacaaaccagtaaacattcagccagcaatttttattttattttgagacagagtttccctcttgttgcccaggctggagttcaatggcgcaatcccggctcactgcaaccttcgcctcccaggttcaagtgattctcctgcctcagcctcccaagtagctgggattacaggtgcctgccaccacacccagctaatttttgtatttttagtagagacagggtttcaccacattggccaggctggtctcgaactcctgacctcaggtgatccatccgcctcggcctcccaaagtgctgggattacaggtgtgagccaccatgcccagcatttttttaaaattattattattattttattttatttttttagatggagtctcactctgttgcccaggctggagtgtgcattggtgcaatctcagctcactgcaacctccacctcccaggttcaagcgatactcctgcctcggctttgcaagtagccaggactacaggcatgtgccaccacgcccagctaatttttgtctttttagtacagatggggttttgttatgttggccaggctggtctcgggctcctgacctcaggtgatccacctgccttggccgcctcccaaagtgctgggattacaggcaggagccaccacacccagcctcaattatttttttaatgcctcctgtgtgccagtcactgtcctgatgtcattttggacattcaaagctgtgttagattggacccctccctgtcttcagattttatagtccaattgaggcaactagaaataacacacattacaaggtagatgacagaagacatagtcacaattcaactagcacatacttacttgactgagtaactgttttatgtgaggtaataggagccaagtgtctccttgatgcagccgaagatctctaggtcgaggaaccggtgccatgaggttgtcctccactcttcctgaccactgccatggtggcaaacctcagggtctgctacttatctcctccctcattctgaggaatgtcataggaaggtgtctgtcacctctggctcagtgggtagggaaggataaatgttctttgaagtgagaaagaacttcagtctgtccggttgtcaatttggagcaagtaagttttggccttattgtttgtttcttccagagagctctctctgaggatgtgtgacattggagttattcattcattggtcaccaaatgcttgggaggtcagatggtggctcccagattgaattcagaaatagacctaagtcaacactttagcagcaagttggttcaaggggaagcaagccgctattggtcacttgactccttgccatcccttgtggcttgaatgcaggctggaaaggtgaggtgtgtccggagccagaactctggaggctctcagtcttcttcctgaattttagggttccccacagagaccatttccaagctatacgggaagaaagaggaaaccccagggttctttggcaacaagcttgctttttttctggttcttggtatgctccaccagcagcagcatcacctgggagcttgttagaaactgaattctcagctgggcaacatagtgggatcccgtctctacaaaaaagtttaaaaattagccaggcatggtggcacgcgactgtggtcccagctacttgggaggctgaggcagaaggatcgcttgagcccaggagatagaggctgcagtgagcagtgatcatgcactccagcttgagtgacagagtaagactgtctcaaaagcaaacaaacaaaaagaaatctaaattctcaggccccactccaaacctactgaatctctgggatccagctatctgtgtctgaacaagccttgcaggtgactctggtggacatgaaggattgagagccactgatccaatcattttgaattaaactgaggcccaggagcattaaggaatgacatcttggttacatttcaccaagtcttcgtgctgtgatttttctctccttgctagagctttatatttttaccttacttctaaggccacgagatcatttcttgccctcattattagtttttcctaaaattaatgattggacttaaccttccagagataatacttttcatatcacagctctttttatggcatcttgttttctgctttggtctgacctatgttcttcatcttctacctccgatttcatccttaaagctttcccatgaatttcttaaaggggagaggggaagggccctaatatattttattcttcagttcagaagtggttcaggaaattatattttaagtgcaaggtgcccctagcatctttgccacagttgaatgttttcttaagtctgtcactaaaaggtgggcttctgtgcccaattcttggcacttctgtggttcattagaaaaacactaagtttgcaggccaggcttggtggctcatgcatgtaatcccagcactttgggaggccgaggcgggcggatcacaaggtcaggagtttgagaccagcctgaccaacctggtgaaacctcgtctatactaaaaacacaaaaattagctgggcgtgttggcacgtgcctatagtcccagctactcaggaggctgaggcaggagaattgcttgaacccaggagatggaggttgcagtgagccgagatcacgccactgcactccagtctgggtgacagagcgagactccatctcaaaaaaaaaagaaaagaaaagtaaaaagaaaacatttttgtagagacaggatcttgctgtgttgttcaagctggtttcgaactcctaacctcaggcaatcatcctactttggccccccaaagtgctggaattataggtgggagccactgtgcccagcagatttcagcttctccaatctctcccttgacttcctggcaggagagctagataaactcaggtagacatgtctttcatggctacccaaagactctgtacagctagccctcaggagcctgtttaagtcaagatgtccttgcagtcccacactgatactactgagccctaagtttaagagtgctgttattcagggttgggctcagtgcctcacacctctaatccagcactttgggaggccaaggtgggcagatcgcttgaactcaggagttaaataccagcctgagcaacatgatgaaatcccatctctaccaaaaatacaaaaaattagctgggcacagtggcgtgcacctgtggtcccagctacttgggaggctgaggtgggaggttagcttgagcccaggaagcggaggttgcaatgagccaagattataccactgggtaacaaagcgagtccccatctaaaaaaacaaaaacagactatttttcagattcaagaagagaggtctttccctctttcctcacctcttgaggcatgaaacaggaattccttatcctagttttatcaccaccaaactcctagcagtcataaaagtcctttttcctctaaacccacctcctctctgcctcacactgcagtatccactctgtcgccagcagcgaggcattatagcaggaggcttctgaattggccagaacagcagctctcaggtggggtgtctgagaacctcatttcctcattacatccctccctggtcagccatatgtgttcagcagccaaatggcaaaattcacccccagaactgtgattgtcttccctaatctggaaggcccacaagtgtggagaagcactggagaccctccagaagcagtagtgctagcagtcaggggctactctccctgccgggccccgtgcaagggcctggccaccctatcccaggtatgtgacacttggctggctgttctttattgtcctgctagtacctgttgtaaagcttcttttattaaagaagagcaggagattgaagtgtcataaattgaagagattcacaccaacacggcacatgtatacatatgtaacaaacctgcacgttgtgcacatgtaccctagaacttaaagtataataacaaaatatgtattaaaaaaataaataaataaattgaagagattgaatgatgtcatagactaccaatccacatgccttgttccttgctgcagcactgaggtttgtaatcctgggagtttagacctacgtaagatgcccataagtacaaatgacagatgctctgtggggttcttcagggtcaaggtggcagaggtgggggtaggaagtgagaggagggggaagggttgaccagaggcaccaatttgtctcctgtgggcttggtcagtatgtgagctaccagggggccaggctgggcctgactctcggagaggcctaataaacagtacgtatgataaaacaact

SEQ ID NO: 137330 - DNA, 402 bp, Homo sapiens
  Payload ID: 6887
  Gene Symbol: GFOD2
  Gene Name: glucose-fructose oxidoreductase domain containing 2
  ENST ID: ENST00000602627
  CDS Start-End: 1-311
ggaagactgaggaggaggcgaagcagcttgctgaggagatgaacatcgccttctacaccagccggactgatgacatcttgctgcatcaagatgtggatctggtgtgcatcagcatcccccctccactcacccggcagatatccgtgaaggctctaggaagtacctgtggagtgccagagtggagcctggatggctgtggaggagaagcccaggtgcacacattgcccagatgggcttcaactagaagggtattgggaagaatgtggtttgcgagaaggcagcaacatcggtggatgccttccggatggtgacagcctcgcgctactacccgcagctcatgagcctggtagggaacgtgctgcgcttcctgcctgccttcgtgcgcatgaaacagctgatttc

SEQ ID NO: 137331 - DNA, 3626 bp, Homo sapiens
  Payload ID: 6888
  Gene Symbol: GAA
  Gene Name: glucosidase, alpha
  acid
  Uniprot ID: P10253
  ENST ID: ENST00000302262
  CDS Start-End: 220-3078
cagttgggaaagctgaggttgtcgccggggccgcgggtggaggtcggggatgaggcagcaggtaggacagtgacctcggtgacgcgaaggaccccggccacctctaggttctcctcgtccgcccgttgttcagcgagggaggctctgcgcgtgccgcagctgacggggaaactgaggcacggagcgggcctgtaggagctgtccaggccatctccaaccatgggagtgaggcacccgccctgctcccaccggctcctggccgtctgcgccctcgtgtccttggcaaccgctgcactcctggggcacatcctactccatgatttcctgctggttccccgagagctgagtggctcctccccagtcctggaggagactcacccagctcaccagcagggagccagcagaccagggccccgggatgcccaggcacaccccggccgtcccagagcagtgcccacacagtgcgacgtcccccccaacagccgcttcgattgcgcccctgacaaggccatcacccaggaacagtgcgaggcccgcggctgttgctacatccctgcaaagcaggggctgcagggagcccagatggggcagccctggtgcttcttcccacccagctaccccagctacaagctggagaacctgagctcctctgaaatgggctacacggccaccctgacccgtaccacccccaccttcttccccaaggacatcctgaccctgcggctggacgtgatgatggagactgagaaccgcctccacttcacgatcaaagatccagctaacaggcgctacgaggtgcccttggagaccccgcatgtccacagccgggcaccgtccccactctacagcgtggagttctccgaggagcccttcggggtgatcgtgcgccggcagctggacggccgcgtgctgctgaacacgacggtggcgcccctgttctttgcggaccagttccttcagctgtccacctcgctgccctcgcagtatatcacaggcctcgccgagcacctcagtcccctgatgctcagcaccagctggaccaggatcaccctgtggaaccgggaccttgcgcccacgcccggtgcgaacctctacgggtctcaccctttctacctggcgctggaggacggcgggtcggcacacggggtgttcctgctaaacagcaatgccatggatgtggtcctgcagccgagccctgcccttagctggaggtcgacaggtgggatcctggatgtctacatcttcctgggcccagagcccaagagcgtggtgcagcagtacctggacgttgtgggatacccgttcatgccgccatactggggcctgggcttccacctgtgccgctggggctactcctccaccgctatcacccgccaggtggtggagaacatgaccagggcccacttccccctggacgtccagtggaacgacctggactacatggactcccggagggacttcacgttcaacaaggatggcttccgggacttcccggccatggtgcaggagctgcaccagggcggccggcgctacatgatgatcgtggatcctgccatcagcagctcgggccctgccgggagctacaggccctacgacgagggtctgcggaggggggttttcatcaccaacgagaccggccagccgctgattgggaaggtatggcccgggtccactgccttccccgacttcaccaaccccacagccctggcctggtgggaggacatggtggctgagttccatgaccaggtgcccttcgacggcatgtggattgacatgaacgagccttccaacttcatcaggggctctgaggacggctgccccaacaatgagctggagaacccaccctacgtgcctggggtggttggggggaccctccaggcggccaccatctgtgcctccagccaccagtttctctccacacactacaacctgcacaacctctacggcctgaccgaagccatcgcctcccacagggcgctggtgaaggctcgggggacacgcccatttgtgatctcccgctcgacctttgctggccacggccgatacgccggccactggacgggggacgtgtggagctcctgggagcagctcgcctcctccgtgccagaaatcctgcagtttaacctgctgggggtgcctctggtcggggccgacgtctgcggcttcctgggcaacacctcagaggagctgtgtgtgcgctggacccagctgggggccttctaccccttcatgcggaaccacaacagcctgctcagtctgccccaggagccgtacagcttcagcgagccggcccagcaggccatgaggaaggccctcaccctgcgctacgcactcctcccccacctctacacactgttccaccaggcccacgtcgcgggggagaccgtggcccggcccctcttcctggagttccccaaggactctagcacctggactgtggaccaccagctcctgtggggggaggccctgctcatcaccccagtgctccaggccgggaaggccgaagtgactggctacttccccttgggcacatggtacgacctgcagacggtgccagtagaggcccttggcagcctcccacccccacctgcagctccccgtgagccagccatccacagcgaggggcagtgggtgacgctgccggcccccctggacaccatcaacgtccacctccgggctgggtacatcatccccctgcagggccctggcctcacaaccacagagtcccgccagcagcccatggccctggctgtggccctgaccaagggtggggaggcccgaggggagctgttctgggacgatggagagagcctggaagtgctggagcgaggggcctacacacaggtcatcttcctggccaggaataacacgatcgtgaatgagctggtacgtgtgaccagtgagggagctggcctgcagctgcagaaggtgactgtcctgggcgtggccacggcgccccagcaggtcctctccaacggtgtccctgtctccaacttcacctacagccccgacaccaaggtcctggacatctgtgtctcgctgttgatgggagagcagtttctcgtcagctggtgttagccgggcggagtgtgttagtctctccagagggaggctggttccccagggaagcagagcctgtgtgcgggcagcagctgtgtgcgggcctgggggttgcatgtgtcacctggagctgggcactaaccattccaagccgccgcatcgcttgtttccacctcctgggccggggctctggcccccaacgtgtctaggagagctttctccctagatcgcactgtgggccggggccctggagggctgctctgtgttaataagattgtaaggtttgccctcctcacctgttgccggcatgcgggtagtattagccacccccctccatctgttcccagcaccggagaagggggtgctcaggtggaggtgtggggtatgcacctgagctcctgcttcgcgcctgctgctctgccccaacgcgaccgctgcccggctgcccagagggctggatgcctgccggtccccgagcaagcctgggaactcaggaaaattcacaggacttgggagattctaaatcttaagtgcaattatttttaataaaaggggcatttggaatc

SEQ ID NO: 137332 - DNA, 3549 bp, Homo sapiens
  Payload ID: 6888
  Gene Symbol: GAA
  Gene Name: glucosidase, alpha
  acid
  Uniprot ID: P10253
  ENST ID: ENST00000390015
  CDS Start-End: 145-3003
tccgcgggcggccagggcgcgcgtgcgcggaggttctcctcgtccgcccgttgttcagcgagggaggctctgcgcgtgccgcagctgacggggaaactgaggcacggagcgggcctgtaggagctgtccaggccatctccaaccatgggagtgaggcacccgccctgctcccaccggctcctggccgtctgcgccctcgtgtccttggcaaccgctgcactcctggggcacatcctactccatgatttcctgctggttccccgagagctgagtggctcctccccagtcctggaggagactcacccagctcaccagcagggagccagcagaccagggccccgggatgcccaggcacaccccggccgtcccagagcagtgcccacacagtgcgacgtcccccccaacagccgcttcgattgcgcccctgacaaggccatcacccaggaacagtgcgaggcccgcggctgttgctacatccctgcaaagcaggggctgcagggagcccagatggggcagccctggtgcttcttcccacccagctaccccagctacaagctggagaacctgagctcctctgaaatgggctacacggccaccctgacccgtaccacccccaccttcttccccaaggacatcctgaccctgcggctggacgtgatgatggagactgagaaccgcctccacttcacgatcaaagatccagctaacaggcgctacgaggtgcccttggagaccccgcatgtccacagccgggcaccgtccccactctacagcgtggagttctccgaggagcccttcggggtgatcgtgcgccggcagctggacggccgcgtgctgctgaacacgacggtggcgcccctgttctttgcggaccagttccttcagctgtccacctcgctgccctcgcagtatatcacaggcctcgccgagcacctcagtcccctgatgctcagcaccagctggaccaggatcaccctgtggaaccgggaccttgcgcccacgcccggtgcgaacctctacgggtctcaccctttctacctggcgctggaggacggcgggtcggcacacggggtgttcctgctaaacagcaatgccatggatgtggtcctgcagccgagccctgcccttagctggaggtcgacaggtgggatcctggatgtctacatcttcctgggcccagagcccaagagcgtggtgcagcagtacctggacgttgtgggatacccgttcatgccgccatactggggcctgggcttccacctgtgccgctggggctactcctccaccgctatcacccgccaggtggtggagaacatgaccagggcccacttccccctggacgtccagtggaacgacctggactacatggactcccggagggacttcacgttcaacaaggatggcttccgggacttcccggccatggtgcaggagctgcaccagggcggccggcgctacatgatgatcgtggatcctgccatcagcagctcgggccctgccgggagctacaggccctacgacgagggtctgcggaggggggttttcatcaccaacgagaccggccagccgctgattgggaaggtatggcccgggtccactgccttccccgacttcaccaaccccacagccctggcctggtgggaggacatggtggctgagttccatgaccaggtgcccttcgacggcatgtggattgacatgaacgagccttccaacttcatcaggggctctgaggacggctgccccaacaatgagctggagaacccaccctacgtgcctggggtggttggggggaccctccaggcggccaccatctgtgcctccagccaccagtttctctccacacactacaacctgcacaacctctacggcctgaccgaagccatcgcctcccacagggcgctggtgaaggctcgggggacacgcccatttgtgatctcccgctcgacctttgctggccacggccgatacgccggccactggacgggggacgtgtggagctcctgggagcagctcgcctcctccgtgccagaaatcctgcagtttaacctgctgggggtgcctctggtcggggccgacgtctgcggcttcctgggcaacacctcagaggagctgtgtgtgcgctggacccagctgggggccttctaccccttcatgcggaaccacaacagcctgctcagtctgccccaggagccgtacagcttcagcgagccggcccagcaggccatgaggaaggccctcaccctgcgctacgcactcctcccccacctctacacactgttccaccaggcccacgtcgcgggggagaccgtggcccggcccctcttcctggagttccccaaggactctagcacctggactgtggaccaccagctcctgtggggggaggccctgctcatcaccccagtgctccaggccgggaaggccgaagtgactggctacttccccttgggcacatggtacgacctgcagacggtgccagtagaggcccttggcagcctcccacccccacctgcagctccccgtgagccagccatccacagcgaggggcagtgggtgacgctgccggcccccctggacaccatcaacgtccacctccgggctgggtacatcatccccctgcagggccctggcctcacaaccacagagtcccgccagcagcccatggccctggctgtggccctgaccaagggtggggaggcccgaggggagctgttctgggacgatggagagagcctggaagtgctggagcgaggggcctacacacaggtcatcttcctggccaggaataacacgatcgtgaatgagctggtacgtgtgaccagtgagggagctggcctgcagctgcagaaggtgactgtcctgggcgtggccacggcgccccagcaggtcctctccaacggtgtccctgtctccaacttcacctacagccccgacaccaaggtcctggacatctgtgtctcgctgttgatgggagagcagtttctcgtcagctggtgttagccgggcggagtgtgttagtctctccagagggaggctggttccccagggaagcagagcctgtgtgcgggcagcagctgtgtgcgggcctgggggttgcatgtgtcacctggagctgggcactaaccattccaagccgccgcatcgcttgtttccacctcctgggccggggctctggcccccaacgtgtctaggagagctttctccctagatcgcactgtgggccggggccctggagggctgctctgtgttaataagattgtaaggtttgccctcctcacctgttgccggcatgcgggtagtattagccacccccctccatctgttcccagcaccggagaagggggtgctcaggtggaggtgtggggtatgcacctgagctcctgcttcgcgcctgctgctctgccccaacgcgaccgctgcccggctgcccagagggctggatgcctgccggtccccgagcaagcctgggaactcaggaaaattcacaggacttgggagattctaaatcttaagtgcaattatttttaataaaaggggcatttggaa

SEQ ID NO: 137333 - DNA, 812 bp, Homo sapiens
  Payload ID: 6888
  Gene Symbol: GAA
  Gene Name: glucosidase, alpha
  acid
  ENST ID: ENST00000577106
  CDS Start-End: 187-812
cggagtctccgcgggcggccagggcgcgcgtgcgcggaggttctcctcgtccgcccgttgttcagcgagggaggctctgcgcgtgccgcagctgacggggaaactgaggcacggagcgggtgagacacctgacgtctgccccgcgctgccggcggcctgtaggagctgtccaggccatctccaaccatgggagtgaggcacccgccctgctcccaccggctcctggccgtctgcgccctcgtgtccttggcaaccgctgcactcctggggcacatcctactccatgatttcctgctggttccccgagagctgagtggctcctccccagtcctggaggagactcacccagctcaccagcagggagccagcagaccagggccccgggatgcccaggcacaccccggccgtcccagagcagtgcccacacagtgcgacgtcccccccaacagccgcttcgattgcgcccctgacaaggccatcacccaggaacagtgcgaggcccgcggctgttgctacatccctgcaaagcaggggctgcagggagcccagatggggcagccctggtgcttcttcccacccagctaccccagctacaagctggagaacctgagctcctctgaaatgggctacacggccaccctgacccgtaccacccccaccttcttccccaaggacatcctgaccctgcggctggacgtgatgatggagactgagaaccgcctccacttcacgatcaaagatccagctaacaggcgctacgaggtgcccttggagaccccgcatgtccacagccgggcaccgtccccactcta

SEQ ID NO: 137334 - DNA, 723 bp, Homo sapiens
  Payload ID: 6888
  Gene Symbol: GAA
  Gene Name: glucosidase, alpha
  acid
  ENST ID: ENST00000572080
  CDS Start-End: 1-281
tggagaacccaccctacgtgcctggggtggttggggggaccctccaggcggccaccatctgtgcctccagccaccagtttctctccacacactacaacctgcacaacctctacggcctgaccgaagccatcgcctcccacagggcgctggtgaaggctcgggggacacgcccatttgtgatctcccgctcgacctttgctggccacggccgatacgccggccactggacgggggacgtgtggagctcctgggagcagctcgcctcctccgtgccagcctgaggaccagcctgactctgccctcccagaaatcctgcagtttaacctgctgggggtgcctctggtcggggccgacgtctgcggcttcctgggcaacacctcagaggagctgtgtgtgcgctggacccagctgggggccttctaccccttcatgcggaaccacaacagcctgctcagtctgccccaggagccgtacagcttcagcgagccggcccagcaggccatgaggaaggccctcaccctgcgctacgcactcctcccccacctctacacactgttccaccaggcccacgtcgcgggggagaccgtggcccggcccctcttcctggagttccccaaggactctagcacctggactgtggaccaccagctcctgtggggggaggccctgctcatcaccccagtgctccaggccgggaaggccgaagtgactggctacttcccc

SEQ ID NO: 137335 - DNA, 956 bp, Homo sapiens
  Payload ID: 6888
  Gene Symbol: GAA
  Gene Name: glucosidase, alpha
  acid
  ENST ID: ENST00000570803
  CDS Start-End: 103-956
acccgcctctgcgcgcccccgggcacgaccccggagtctccgcgggcggccagggcgcgcgtgcgcggaggcctgtaggagctgtccaggccatctccaaccatgggagtgaggcacccgccctgctcccaccggctcctggccgtctgcgccctcgtgtccttggcaaccgctgcactcctggggcacatcctactccatgatttcctgctggttccccgagagctgagtggctcctccccagtcctggaggagactcacccagctcaccagcagggagccagcagaccagggccccgggatgcccaggcacaccccggccgtcccagagcagtgcccacacagtgcgacgtcccccccaacagccgcttcgattgcgcccctgacaaggccatcacccaggaacagtgcgaggcccgcggctgttgctacatccctgcaaagcaggggctgcagggagcccagatggggcagccctggtgcttcttcccacccagctaccccagctacaagctggagaacctgagctcctctgaaatgggctacacggccaccctgacccgtaccacccccaccttcttccccaaggacatcctgaccctgcggctggacgtgatgatggagactgagaaccgcctccacttcacgatcaaagatccagctaacaggcgctacgaggtgcccttggagaccccgcatgtccacagccgggcaccgtccccactctacagcgtggagttctccgaggagcccttcggggtgatcgtgcgccggcagctggacggccgcgtgctgctgaacacgacggtggcgcccctgttctttgcggaccagttccttcagctgtccacctcgctgccctcgcagtatatcacaggcctcgccgagcacctcagtcccctgatgctcagcaccagctggaccaggatcaccctgtggaaccgggaccttgcgcc

SEQ ID NO: 137336 - DNA, 3906 bp, Homo sapiens
  Payload ID: 6889
  Gene Symbol: GANAB
  Gene Name: glucosidase, alpha
  neutral AB
  Uniprot ID: Q14697
  ENST ID: ENST00000346178
  CDS Start-End: 17-2917
gcaaactctgcacaagatggcggcggtagcggcagtggcggcgcgtaggaggcggtcttgggcgtctttggtactggcttttttaggggtctgcctggggattacccttgctgtggatagaagcaactttaagacctgtgaagagagttctttctgcaagcgacagagaagcatacggccaggcctctctccataccgagccttgctggactctctacagcttggtcctgattccctcacggtccatctgatccatgaggtcaccaaggtgttgctggtgctagagcttcaggggcttcaaaagaacatgactcggttcaggattgatgagctggagcctcggcgaccccgataccgtgtaccagatgttttggtggctgatccaccaatagcccggctttctgtctctggtcgtgatgagaacagtgtggagttaaccatggctgagggaccctacaagatcatcttgacagcacggccattccgccttgacctactagaggaccgaagtcttttgcttagtgtcaatgcccgaggactcttggagtttgagcatcagagggcccctagggtctctttctcggataaggttaatctcacgcttggtagcatatgggataagatcaagaaccttttctctaggcaaggatcaaaagacccagctgagggcgatggggcccagcctgaggaaacacccagggatggcgacaagccagaggagactcaggggaaggcagagaaagatgagccaggagcctgggaggagacattcaaaactcactctgacagcaagccgtatggccccatgtctgtgggtttggacttctctctgccaggcatggagcatgtctatgggatccctgagcatgcagacaacctgaggctgaaggtcactgagggtggggagccatatcgcctctacaatttggatgtgttccagtatgagctgtacaacccaatggccttgtatgggtctgtgcctgtgctcctggcacacaaccctcatcgcgacttgggcatcttctggctcaatgctgcagagacctgggttgatatatcttccaacactgccgggaagaccctgtttgggaagatgatggactacctgcagggctctggggagaccccacagacagatgttcgctggatgtcagagactggcatcattgacgtcttcctgctgctggggccctccatctctgatgttttccggcaatatgctagtctcacaggaacccaggcgttgcccccactcttctccctcggctaccaccagagccgttggaactaccgggacgaggctgatgtgctggaagtggatcagggctttgatgatcacaacctgccctgtgatgtcatctggctagacattgaacatgctgatggcaagcggtatttcacctgggaccccagtcgcttccctcagccccgcaccatgcttgagcgcttggcttctaagaggcggaagctggtggccatcgtagacccccacatcaaggtggactccggctaccgagttcacgaggagctgcggaacctggggctgtatgttaaaacccgggatggctctgactatgagggctggtgctggccaggctcagctggttaccctgacttcactaatcccacgatgagggcctggtgggctaacatgttcagctatgacaattatgagggctcagctcccaacctctttgtctggaatgacatgaacgaaccatctgtgttcaatggtcctgaggtcaccatgctcaaggatgcccagcattatgggggctgggagcaccgggatgtgcataacatctatggcctttatgtgcacatggcgactgctgatgggctgagacagcgctctgggggcatggaacgcccctttgtcctggccagggccttcttcgctggctcccagcgctttggagccgtgtggacaggggacaacactgccgagtgggaccatttgaagatctctattcctatgtgtctcagcttggggctggtgggactttccttctgtggggcggatgtgggtggcttcttcaaaaacccagagccagagctgcttgtgcgctggtaccagatgggtgcttaccagccattcttccgggcacatgcccacttggacactgggcgacgagagccatggctgttaccatctcagcacaatgatataatccgagatgccttgggccagcgatattctttgctgcccttctggtacaccctcttatatcaggcccatcgggaaggcattcctgtcatgaggcccctgtgggtgcagtaccctcaggatgtgactaccttcaatatagatgatcagtacttgcttggggatgcgttgctggttcaccctgtatcagactctggagcccatggtgtccaggtctatctgcctggccaaggggaggtgtggtatgacattcaaagctaccagaagcatcatggtccccagaccctgtacctgcctgtaactctaagcagtatccctgtgttccagcgtggagggacaatcgtgcctcgatggatgcgagtgcggcggtcttcagaatgtatgaaggatgaccccatcactctctttgttgcacttagccctcagggtacagctcaaggagagctctttctggatgatgggcacacgttcaactatcagactcgccaagagttcctgctgcgtcgattctcattctctggcaacacccttgtctccagctcagcagaccctgaaggacactttgagacaccaatctggattgagcgggtggtgataataggggctggaaagccagcagctgtggtactccagacaaaaggatctccagaaagccgcctgtccttccagcatgaccctgagacctctgtgttggtcctgcgcaagcctggcatcaatgtggcatctgattggagtattcacctgcgataacccaagggatgttctgggttagggggagggaaggggagcattagtgctgagagatattctttcttctgccttggagttcggccctccccagacttcacttatgctagtctaagacccagattctgccaacatttgggcaggatgagagggctgaccctgggctccaaattcctcttgtgatctcctcacctctcccactccattgataccaactctttcccttcattcccccaacatcctgttgctctaactggagcacattcacttacgaacaccaggaaaccacagggcccttgtcgccccttctctttcccttatttaggagccctgaactcccccagagtctatccattcatgcctcttgtatgttgatgccacttcttggaagaagatgagggcaatgagttagggctccttttccccttccctcccaccagattgctctcccacctttcatttcttcctccaggctttactcccctttttatgccccaccgatacactgggaccaccccttaccccggacaggatgaatggatcaaaggagtgaggttgctaaagaacatccttttccctctcattctacccttttcctctccccgattccttgtagagctgctgcaattcttagaggggcagttctacctcctctgtccctcggcagaaagacgtttccacacctcttaggggatgcgcattaaacttcttttgcccccttcttgtcccctttgaggggcacttaagatggagaaatcagttgtggtttcagtgaatcatggtcacctgtatttattgctaggagaagcctgagggtggggggagatgatcatgtgtgctcggggttggctggaagccctgggtggggggttgggggaggactaatggggagtcggggaatatttgtgggtattttttttacttcctcttggttcccagctgtgacacgttttgatcaaaggagaaacaataaagggataaaccataaataa

SEQ ID NO: 137337 - DNA, 3608 bp, Homo sapiens
  Payload ID: 6889
  Gene Symbol: GANAB
  Gene Name: glucosidase, alpha
  neutral AB
  Uniprot ID: Q14697
  ENST ID: ENST00000356638
  CDS Start-End: 18-2852
agcaaactctgcacaagatggcggcggtagcggcagtggcggcgcgtaggaggcggtcttgggcgtctttggtactggcttttttaggggtctgcctggggattacccttgctgtggatagaagcaactttaagacctgtgaagagagttctttctgcaagcgacagagaagcatacggccaggcctctctccataccgagccttgctggactctctacagcttggtcctgattccctcacggtccatctgatccatgaggtcaccaaggtgttgctggtgctagagcttcaggggcttcaaaagaacatgactcggttcaggattgatgagctggagcctcggcgaccccgataccgtgtaccagatgttttggtggctgatccaccaatagcccggctttctgtctctggtcgtgatgagaacagtgtggagttaaccatggctgagggaccctacaagatcatcttgacagcacggccattccgccttgacctactagaggaccgaagtcttttgcttagtgtcaatgcccgaggactcttggagtttgagcatcagagggcccctagggtctcgcaaggatcaaaagacccagctgagggcgatggggcccagcctgaggaaacacccagggatggcgacaagccagaggagactcaggggaaggcagagaaagatgagccaggagcctgggaggagacattcaaaactcactctgacagcaagccgtatggccccatgtctgtgggtttggacttctctctgccaggcatggagcatgtctatgggatccctgagcatgcagacaacctgaggctgaaggtcactgagggtggggagccatatcgcctctacaatttggatgtgttccagtatgagctgtacaacccaatggccttgtatgggtctgtgcctgtgctcctggcacacaaccctcatcgcgacttgggcatcttctggctcaatgctgcagagacctgggttgatatatcttccaacactgccgggaagaccctgtttgggaagatgatggactacctgcagggctctggggagaccccacagacagatgttcgctggatgtcagagactggcatcattgacgtcttcctgctgctggggccctccatctctgatgttttccggcaatatgctagtctcacaggaacccaggcgttgcccccactcttctccctcggctaccaccagagccgttggaactaccgggacgaggctgatgtgctggaagtggatcagggctttgatgatcacaacctgccctgtgatgtcatctggctagacattgaacatgctgatggcaagcggtatttcacctgggaccccagtcgcttccctcagccccgcaccatgcttgagcgcttggcttctaagaggcggaagctggtggccatcgtagacccccacatcaaggtggactccggctaccgagttcacgaggagctgcggaacctggggctgtatgttaaaacccgggatggctctgactatgagggctggtgctggccaggctcagctggttaccctgacttcactaatcccacgatgagggcctggtgggctaacatgttcagctatgacaattatgagggctcagctcccaacctctttgtctggaatgacatgaacgaaccatctgtgttcaatggtcctgaggtcaccatgctcaaggatgcccagcattatgggggctgggagcaccgggatgtgcataacatctatggcctttatgtgcacatggcgactgctgatgggctgagacagcgctctgggggcatggaacgcccctttgtcctggccagggccttcttcgctggctcccagcgctttggagccgtgtggacaggggacaacactgccgagtgggaccatttgaagatctctattcctatgtgtctcagcttggggctggtgggactttccttctgtggggcggatgtgggtggcttcttcaaaaacccagagccagagctgcttgtgcgctggtaccagatgggtgcttaccagccattcttccgggcacatgcccacttggacactgggcgacgagagccatggctgttaccatctcagcacaatgatataatccgagatgccttgggccagcgatattctttgctgcccttctggtacaccctcttatatcaggcccatcgggaaggcattcctgtcatgaggcccctgtgggtgcagtaccctcaggatgtgactaccttcaatatagatgatcagtacttgcttggggatgcgttgctggttcaccctgtatcagactctggagcccatggtgtccaggtctatctgcctggccaaggggaggtgtggtatgacattcaaagctaccagaagcatcatggtccccagaccctgtacctgcctgtaactctaagcagtatccctgtgttccagcgtggagggacaatcgtgcctcgatggatgcgagtgcggcggtcttcagaatgtatgaaggatgaccccatcactctctttgttgcacttagccctcagggtacagctcaaggagagctctttctggatgatgggcacacgttcaactatcagactcgccaagagttcctgctgcgtcgattctcattctctggcaacacccttgtctccagctcagcagaccctgaaggacactttgagacaccaatctggattgagcgggtggtgataataggggctggaaagccagcagctgtggtactccagacaaaaggatctccagaaagccgcctgtccttccagcatgaccctgagacctctgtgttggtcctgcgcaagcctggcatcaatgtggcatctgattggagtattcacctgcgataacccaagggatgttctgggttagggggagggaaggggagcattagtgctgagagatattctttcttctgccttggagttcggccctccccagacttcacttatgctagtctaagacccagattctgccaacatttgggcaggatgagagggctgaccctgggctccaaattcctcttgtgatctcctcacctctcccactccattgataccaactctttcccttcattcccccaacatcctgttgctctaactggagcacattcacttacgaacaccaggaaaccacagggcccttgtcgccccttctctttcccttatttaggagccctgaactcccccagagtctatccattcatgcctcttgtatgttgatgccacttcttggaagaagatgagggcaatgagttagggctccttttccccttccctcccaccagattgctctcccacctttcatttcttcctccaggctttactcccctttttatgccccaccgatacactgggaccaccccttaccccggacaggatgaatggatcaaaggagtgaggttgctaaagaacatccttttccctctcattctacccttttcctctccccgattccttgtagagctgctgcaattcttagaggggcagttctacctcctctgtccctcggcagaaagacgtttccacacctcttaggggatgcgcattaaacttcttttgcccccttcttgtcccctttgaggggcacttaagatggagaaatca

SEQ ID NO: 137338 - DNA, 3718 bp, Homo sapiens
  Payload ID: 6889
  Gene Symbol: GANAB
  Gene Name: glucosidase, alpha
  neutral AB
  Uniprot ID: Q14697
  ENST ID: ENST00000532402
  CDS Start-End: 4-162
aagatggcggcggtagcggcagtggcggcgcgtaggaggcggtcttgggcgtctttggtactggcttttttaggggtctgcctggggattacccttgctgtggatagaagcaactttaagacctgtgaagagagttctttctgcaagtgttgctggtgctagagcttcaggggcttcaaaagaacatgactcggttcaggattgatgagctggagcctcggcgaccccgataccgtgtaccagatgttttggtggctgatccaccaatagcccggctttctgtctctggtcgtgatgagaacagtgtggagttaaccatggctgagggaccctacaagatcatcttgacagcacggccattccgccttgacctactagaggaccgaagtcttttgcttagtgtcaatgcccgaggactcttggagtttgagcatcagagggcccctagggtctcgcaaggatcaaaagacccagctgagggcgatggggcccagcctgaggaaacacccagggatggcgacaagccagaggagactcaggggaaggcagagaaagatgagccaggagcctgggaggagacattcaaaactcactctgacagcaagccgtatggccccatgtctgtgggtttggacttctctctgccaggcatggagcatgtctatgggatccctgagcatgcagacaacctgaggctgaaggtcactgagggtggggagccatatcgcctctacaatttggatgtgttccagtatgagctgtacaacccaatggccttgtatgggtctgtgcctgtgctcctggcacacaaccctcatcgcgacttgggcatcttctggctcaatgctgcagagacctgggttgatatatcttccaacactgccgggaagaccctgtttgggaagatgatggactacctgcagggctctggggagaccccacagacagatgttcgctggatgtcagagactggcatcattgacgtcttcctgctgctggggccctccatctctgatgttttccggcaatatgctagtctcacaggaacccaggcgttgcccccactcttctccctcggctaccaccagagccgttggaactaccgggacgaggctgatgtgctggaagtggatcagggctttgatgatcacaacctgccctgtgatgtcatctggctagacattgaacatgctgatggcaagcggtatttcacctgggaccccagtcgcttccctcagccccgcaccatgcttgagcgcttggcttctaagaggcggaagctggtggccatcgtagacccccacatcaaggtggactccggctaccgagttcacgaggagctgcggaacctggggctgtatgttaaaacccgggatggctctgactatgagggctggtgctggccaggctcagctggttaccctgacttcactaatcccacgatgagggcctggtgggctaacatgttcagctatgacaattatgagggctcagctcccaacctctttgtctggaatgacatgaacgaaccatctgtgttcaatggtcctgaggtcaccatgctcaaggatgcccagcattatgggggctgggagcaccgggatgtgcataacatctatggcctttatgtgcacatggcgactgctgatgggctgagacagcgctctgggggcatggaacgcccctttgtcctggccagggccttcttcgctggctcccagcgctttggagccgtgtggacaggggacaacactgccgagtgggaccatttgaagatctctattcctatgtgtctcagcttggggctggtgggactttccttctgtggggcggatgtgggtggcttcttcaaaaacccagagccagagctgcttgtgcgctggtaccagatgggtgcttaccagccattcttccgggcacatgcccacttggacactgggcgacgagagccatggctgttaccatctcagcacaatgatataatccgagatgccttgggccagcgatattctttgctgcccttctggtacaccctcttatatcaggcccatcgggaaggcattcctgtcatgaggcccctgtgggtgcagtaccctcaggatgtgactaccttcaatatagatgatcagtacttgcttggggatgcgttgctggttcaccctgtatcagactctggagcccatggtgtccaggtctatctgcctggccaaggggaggtgtggtatgacattcaaagctaccagaagcatcatggtccccagaccctgtacctgcctgtaactctaagcagtatccctgtgttccagcgtggagggacaatcgtgcctcgatggatgcgagtgcggcggtcttcagaatgtatgaaggatgaccccatcactctctttgttgcacttagccctcagggtacagctcaaggagagctctttctggatgatgggcacacgttcaactatcagactcgccaagagttcctgctgcgtcgattctcattctctggcaacacccttgtctccagctcagcagaccctgaaggacactttgagacaccaatctggattgagcgggtggtgataataggggctggaaagccagcagctgtggtactccagacaaaaggatctccagaaagccgcctgtccttccagcatgaccctgagacctctgtgttggtcctgcgcaagcctggcatcaatgtggcatctgattggagtattcacctgcgataacccaagggatgttctgggttagggggagggaaggggagcattagtgctgagagatattctttcttctgccttggagttcggccctccccagacttcacttatgctagtctaagacccagattctgccaacatttgggcaggatgagagggctgaccctgggctccaaattcctcttgtgatctcctcacctctcccactccattgataccaactctttcccttcattcccccaacatcctgttgctctaactggagcacattcacttacgaacaccaggaaaccacagggcccttgtcgccccttctctttcccttatttaggagccctgaactcccccagagtctatccattcatgcctcttgtatgttgatgccacttcttggaagaagatgagggcaatgagttagggctccttttccccttccctcccaccagattgctctcccacctttcatttcttcctccaggctttactcccctttttatgccccaccgatacactgggaccaccccttaccccggacaggatgaatggatcaaaggagtgaggttgctaaagaacatccttttccctctcattctacccttttcctctccccgattccttgtagagctgctgcaattcttagaggggcagttctacctcctctgtccctcggcagaaagacgtttccacacctcttaggggatgcgcattaaacttcttttgcccccttcttgtcccctttgaggggcacttaagatggagaaatcagttgtggtttcagtgaatcatggtcacctgtatttattgctaggagaagcctgagggtggggggagatgatcatgtgtgctcggggttggctggaagccctgggtggggggttgggggaggactaatggggagtcggggaatatttgtgggtattttttttacttcctcttggttcccagctgtgacacgttttgatcaaaggagaaacaataaagggataaaccataaataa

SEQ ID NO: 137339 - DNA, 577 bp, Homo sapiens
  Payload ID: 6889
  Gene Symbol: GANAB
  Gene Name: glucosidase, alpha
  neutral AB
  ENST ID: ENST00000529737
  CDS Start-End: 25-255
gtcaaggagcaaactctgcacaagatggcggcggtagcggcagtggcggcgcgtaggaggcggtcttgggcgtctttggtactggcttttttaggggtctgcctggggattacccttgctgtggatagaagcaactttaagacctgtgaagagagttctttctgcgacagagaagcatacggccaggcctctctccataccgagccttgctggactctctacagcttggtcctgattccctcacggtccatctgatccatgaggtcaccaaggtgttgctggtgctagagcttcaggggcttcaaaagaacatgactcggttcaggattgatgagctggagcctcggcgaccccgataccgtgtaccagatgttttggtggctgatccaccaatagcccggctttctgtctctggtcgtgatgagaacagtgtggagttaaccatggctgagggaccctacaagatcatcttgacagcacggccattccgccttgacctactagaggaccgaagtcttttgcttagtgtcaatgcccgaggactcttggagtttgagcatcagagggcccctagggt

SEQ ID NO: 137340 - DNA, 533 bp, Homo sapiens
  Payload ID: 6889
  Gene Symbol: GANAB
  Gene Name: glucosidase, alpha
  neutral AB
  Uniprot ID: Q14697
  ENST ID: ENST00000526210
  CDS Start-End: 15-173
aaactctgcacaagatggcggcggtagcggcagtggcggcgcgtaggaggcggtcttgggcgtctttggtactggcttttttaggggtctgcctggggattacccttgctgtggatagaagcaactttaagacctgtgaagagagttctttctgcaagtgttgctggtgctagagcttcaggggcttcaaaagaacatgactcggttcaggattgatgagctggagcctcggcgaccccgataccgtgtaccagatgttttggtggctgatccaccaatagcccggctttctgtctctggtcgtgatgagaacagtgtggagttaaccatggctgagggaccctacaagatcatcttgacagcacggccattccgccttgacctactagaggaccgaagtcttttgcttagtgtcaatgcccgaggactcttggagtttgagcatcagagggcccctagggtctcgtgagtacaggggttgggactgcagggaacctagtgtgaaagagcataggggtgttgtgaggtctggc

SEQ ID NO: 137341 - DNA, 390 bp, Homo sapiens
  Payload ID: 6889
  Gene Symbol: GANAB
  Gene Name: glucosidase, alpha
  neutral AB
  ENST ID: ENST00000525994
  CDS Start-End: 34-390
aggtttggggtcaaggagcaaactctgcacaagatggcggcggtagcggcagtggcggcgcgtaggaggcggctttctgtctctggtcgtgatgagaacagtgtggagttaaccatggctgagggaccctacaagatcatcttgacagcacggccattccgccttgacctactagaggaccgaagtcttttgcttagtgtcaatgcccgaggactcttggagtttgagcatcagagggcccctagggtctctttctcggataaggttaatctcacgcttggtagcatatgggataagatcaagaaccttttctctaggcaaggatcaaaagacccagctgagggcgatggggcccagcctgaggaaacacccagggatggcgacaaggca

SEQ ID NO: 137342 - DNA, 737 bp, Homo sapiens
  Payload ID: 6889
  Gene Symbol: GANAB
  Gene Name: glucosidase, alpha
  neutral AB
  Uniprot ID: Q14697
  ENST ID: ENST00000534613
  CDS Start-End: 18-176
agcaaactctgcacaagatggcggcggtagcggcagtggcggcgcgtaggaggcggtcttgggcgtctttggtactggcttttttaggggtctgcctggggattacccttgctgtggatagaagcaactttaagacctgtgaagagagttctttctgcaagtgttgctggtgctagagcttcaggggcttcaaaagaacatgactcggttcaggattgatgagctggagcctcggcgaccccgataccgtgtaccagatgttttggtggctgatccaccaatagcccggctttctgtctctggtcgtgatgagaacagtgtggagttaaccatggctgagggaccctacaagatcatcttgacagcacggccattccgccttgacctactagaggaccgaagtcttttgcttagtgtcaatgcccgaggactcttggagtttgagcatcagagggcccctagggtctctttctcggataaggttaatctcacgcttggtagcatatgggataagatcaagaaccttttctctaggcaaggatcaaaagacccagctgagggcgatggggcccagcctgaggaaacacccagggatggcgacaagccagaggagactcaggggaaggcagagaaagatgagccaggagcctgggaggagacattcaaaactcactctgacagcaagccgtatggccccatgtctgtgggtttggacttctctctgccaggcatggagc

SEQ ID NO: 137343 - DNA, 2626 bp, Homo sapiens
  Payload ID: 6889
  Gene Symbol: GANAB
  Gene Name: glucosidase, alpha
  neutral AB
  ENST ID: ENST00000534779
  CDS Start-End: 34-2592
aggtttggggtcaaggagcaaactctgcacaagatggcggcggtagcggcagtggcggcgcgtaggaggcggctttctgtctctggtcgtgatgagaacagtgtggagttaaccatggctgagggaccctacaagatcatcttgacagcacggccattccgccttgacctactagaggaccgaagtcttttgcttagtgtcaatgcccgaggactcttggagtttgagcatcagagggcccctagggtctctttctcggataaggttaatctcacgcttggtagcatatgggataagatcaagaaccttttctctaggcaaggatcaaaagacccagctgagggcgatggggcccagcctgaggaaacacccagggatggcgacaagccagaggagactcaggggaaggcagagaaagatgagccaggagcctgggaggagacattcaaaactcactctgacagcaagccgtatggccccatgtctgtgggtttggacttctctctgccaggcatggagcatgtctatgggatccctgagcatgcagacaacctgaggctgaaggtcactgagggtggggagccatatcgcctctacaatttggatgtgttccagtatgagctgtacaacccaatggccttgtatgggtctgtgcctgtgctcctggcacacaaccctcatcgcgacttgggcatcttctggctcaatgctgcagagacctgggttgatatatcttccaacactgccgggaagaccctgtttgggaagatgatggactacctgcagggctctggggagaccccacagacagatgttcgctggatgtcagagactggcatcattgacgtcttcctgctgctggggccctccatctctgatgttttccggcaatatgctagtctcacaggaacccaggcgttgcccccactcttctccctcggctaccaccagagccgttggaactaccgggacgaggctgatgtgctggaagtggatcagggctttgatgatcacaacctgccctgtgatgtcatctggctagacattgaacatgctgatggcaagcggtatttcacctgggaccccagtcgcttccctcagccccgcaccatgcttgagcgcttggcttctaagaggcggaagctggtggccatcgtagacccccacatcaaggtggactccggctaccgagttcacgaggagctgcggaacctggggctgtatgttaaaacccgggatggctctgactatgagggctggtgctggccaggctcagctggttaccctgacttcactaatcccacgatgagggcctggtgggctaacatgttcagctatgacaattatgagggctcagctcccaacctctttgtctggaatgacatgaacgaaccatctgtgttcaatggtcctgaggtcaccatgctcaaggatgcccagcattatgggggctgggagcaccgggatgtgcataacatctatggcctttatgtgcacatggcgactgctgatgggctgagacagcgctctgggggcatggaacgcccctttgtcctggccagggccttcttcgctggctcccagcgctttggagccgtgtggacaggggacaacactgccgagtgggaccatttgaagatctctattcctatgtgtctcagcttggggctggtgggactttccttctgtggggcggatgtgggtggcttcttcaaaaacccagagccagagctgcttgtgcgctggtaccagatgggtgcttaccagccattcttccgggcacatgcccacttggacactgggcgacgagagccatggctgttaccatctcagcacaatgatataatccgagatgccttgggccagcgatattctttgctgcccttctggtacaccctcttatatcaggcccatcgggaaggcattcctgtcatgaggcccctgtgggtgcagtaccctcaggatgtgactaccttcaatatagatgatcagtacttgcttggggatgcgttgctggttcaccctgtatcagactctggagcccatggtgtccaggtctatctgcctggccaaggggaggtgtggtatgacattcaaagctaccagaagcatcatggtccccagaccctgtacctgcctgtaactctaagcagtatccctgtgttccagcgtggagggacaatcgtgcctcgatggatgcgagtgcggcggtcttcagaatgtatgaaggatgaccccatcactctctttgttgcacttagccctcagggtacagctcaaggagagctctttctggatgatgggcacacgttcaactatcagactcgccaagagttcctgctgcgtcgattctcattctctggcaacacccttgtctccagctcagcagaccctgaaggacactttgagacaccaatctggattgagcgggtggtgataataggggctggaaagccagcagctgtggtactccagacaaaaggatctccagaaagccgcctgtccttccagcatgaccctgagacctctgtgttggtcctgcgcaagcctggcatcaatgtggcatctgattggagtattcacctgcgataacccaagggatgttctgggttagggggagggaagg

SEQ ID NO: 137344 - DNA, 3836 bp, Homo sapiens
  Payload ID: 6889
  Gene Symbol: GANAB
  Gene Name: glucosidase, alpha
  neutral AB
  ENST ID: ENST00000540933
  CDS Start-End: 310-2853
agacagctgcccggcggcgctcaggtcgaaccaatcataaggccggaaggggcgggaactaggatacgtggctgagcgcgcgcgatggggcgggaggtttggggtcaaggagcaaactctgcacaagatggcggcggtagcggcagtggcggcgcgtaggaggcggtcttgggcgtctttggtactggcttttttaggggtctgcctggggattacccttgctgtggatagaagcaactttaagacctgtgaagagagttctttctgcaagtgttgctggtgctagagcttcaggggcttcaaaagaacatgactcggttcaggattgatgagctggagcctcggcgaccccgataccgtgtaccagatgttttggtggctgatccaccaatagcccggctttctgtctctggtcgtgatgagaacagtgtggagttaaccatggctgagggaccctacaagatcatcttgacagcacggccattccgccttgacctactagaggaccgaagtcttttgcttagtgtcaatgcccgaggactcttggagtttgagcatcagagggcccctagggtctcgcaaggatcaaaagacccagctgagggcgatggggcccagcctgaggaaacacccagggatggcgacaagccagaggagactcaggggaaggcagagaaagatgagccaggagcctgggaggagacattcaaaactcactctgacagcaagccgtatggccccatgtctgtgggtttggacttctctctgccaggcatggagcatgtctatgggatccctgagcatgcagacaacctgaggctgaaggtcactgagggtggggagccatatcgcctctacaatttggatgtgttccagtatgagctgtacaacccaatggccttgtatgggtctgtgcctgtgctcctggcacacaaccctcatcgcgacttgggcatcttctggctcaatgctgcagagacctgggttgatatatcttccaacactgccgggaagaccctgtttgggaagatgatggactacctgcagggctctggggagaccccacagacagatgttcgctggatgtcagagactggcatcattgacgtcttcctgctgctggggccctccatctctgatgttttccggcaatatgctagtctcacaggaacccaggcgttgcccccactcttctccctcggctaccaccagagccgttggaactaccgggacgaggctgatgtgctggaagtggatcagggctttgatgatcacaacctgccctgtgatgtcatctggctagacattgaacatgctgatggcaagcggtatttcacctgggaccccagtcgcttccctcagccccgcaccatgcttgagcgcttggcttctaagaggcggaagctggtggccatcgtagacccccacatcaaggtggactccggctaccgagttcacgaggagctgcggaacctggggctgtatgttaaaacccgggatggctctgactatgagggctggtgctggccaggctcagctggttaccctgacttcactaatcccacgatgagggcctggtgggctaacatgttcagctatgacaattatgagggctcagctcccaacctctttgtctggaatgacatgaacgaaccatctgtgttcaatggtcctgaggtcaccatgctcaaggatgcccagcattatgggggctgggagcaccgggatgtgcataacatctatggcctttatgtgcacatggcgactgctgatgggctgagacagcgctctgggggcatggaacgcccctttgtcctggccagggccttcttcgctggctcccagcgctttggagccgtgtggacaggggacaacactgccgagtgggaccatttgaagatctctattcctatgtgtctcagcttggggctggtgggactttccttctgtggggcggatgtgggtggcttcttcaaaaacccagagccagagctgcttgtgcgctggtaccagatgggtgcttaccagccattcttccgggcacatgcccacttggacactgggcgacgagagccatggctgttaccatctcagcacaatgatataatccgagatgccttgggccagcgatattctttgctgcccttctggtacaccctcttatatcaggcccatcgggaaggcattcctgtcatgaggcccctgtgggtgcagtaccctcaggatgtgactaccttcaatatagatgatcagtacttgcttggggatgcgttgctggttcaccctgtatcagactctggagcccatggtgtccaggtctatctgcctggccaaggggaggtgtggtatgacattcaaagctaccagaagcatcatggtccccagaccctgtacctgcctgtaactctaagcagtatccctgtgttccagcgtggagggacaatcgtgcctcgatggatgcgagtgcggcggtcttcagaatgtatgaaggatgaccccatcactctctttgttgcacttagccctcagggtacagctcaaggagagctctttctggatgatgggcacacgttcaactatcagactcgccaagagttcctgctgcgtcgattctcattctctggcaacacccttgtctccagctcagcagaccctgaaggacactttgagacaccaatctggattgagcgggtggtgataataggggctggaaagccagcagctgtggtactccagacaaaaggatctccagaaagccgcctgtccttccagcatgaccctgagacctctgtgttggtcctgcgcaagcctggcatcaatgtggcatctgattggagtattcacctgcgataacccaagggatgttctgggttagggggagggaaggggagcattagtgctgagagatattctttcttctgccttggagttcggccctccccagacttcacttatgctagtctaagacccagattctgccaacatttgggcaggatgagagggctgaccctgggctccaaattcctcttgtgatctcctcacctctcccactccattgataccaactctttcccttcattcccccaacatcctgttgctctaactggagcacattcacttacgaacaccaggaaaccacagggcccttgtcgccccttctctttcccttatttaggagccctgaactcccccagagtctatccattcatgcctcttgtatgttgatgccacttcttggaagaagatgagggcaatgagttagggctccttttccccttccctcccaccagattgctctcccacctttcatttcttcctccaggctttactcccctttttatgccccaccgatacactgggaccaccccttaccccggacaggatgaatggatcaaaggagtgaggttgctaaagaacatccttttccctctcattctacccttttcctctccccgattccttgtagagctgctgcaattcttagaggggcagttctacctcctctgtccctcggcagaaagacgtttccacacctcttaggggatgcgcattaaacttcttttgcccccttcttgtcccctttgaggggcacttaagatggagaaatcagttgtggtttcagtgaatcatggtcacctgtatttattgctaggagaagcctgagggtggggggagatgatcatgtgtgctcggggttggctggaagccctgggtggggggttgggggaggactaatggggagtcggggaatatttgtgggtattttttttacttcctcttggttcccagctgtgacacgttttgatcaaaggagaaacaataaagggataaaccat

SEQ ID NO: 137345 - DNA, 7781 bp, Homo sapiens
  Payload ID: 6890
  Gene Symbol: GANC
  Gene Name: glucosidase, alpha
  neutral C
  Uniprot ID: Q8TET4
  ENST ID: ENST00000318010
  CDS Start-End: 241-2985
ataatcaagacaaatttgccaaataaatcattgtagaaacgctagtttgggcctgaaaaattccaggagcaagagtcaagatttgtcactccatgagaatctggaggggactcccttcccagaaacttgacgatgaagtactggttgtaattttagaaagacacccaatcggcttttttaaaagatcgcccagggcccttgtcctgagagctgggagctggtcggagtgacagagaagccatggaagcagcagtgaaagaggaaataagtcttgaagatgaagctgtagataaaaacattttcagagactgtaacaagatcgcattttacaggcgtcagaaacagtggctttccaagaagtccacctatcaggcattattggattcagtcacaacagatgaagacagcaccaggttccaaatcatcaatgaagcaagtaaggttcctctcctggctgaaatttatggtatagaaggaaacattttcaggcttaaaattaatgaagagactcctctaaaacccagatttgaagttccggatgtcctcacaagcaagccaagcactgtaaggctgatttcatgctctggggacacaggcagtctgatattggcagatggaaaaggagacctgaagtgccatatcacagcaaacccattcaaggtagacttggtgtctgaagaagaggttgtgattagcataaattccctgggccaattatactttgagcatctacagattcttcacaaacaaagagctgctaaagaaaatgaggaggagacatcagtggacacctctcaggaaaatcaagaagatctgggcctgtgggaagagaaatttggaaaatttgtggatatcaaagctaatggcccttcttctattggtttggatttctccttgcatggatttgagcatctttatgggatcccacaacatgcagaatcacaccaacttaaaaatactggtgatggagatgcttaccgtctttataacctggatgtctatggataccaaatatatgataaaatgggcatttatggttcagtaccttatctcctggcccacaaactgggcagaactataggtattttctggctgaatgcctcggaaacactggtggagatcaatacagagcctgcagtagagtacacactgacccagatgggcccagttgctgctaaacaaaaggtcagatctcgcactcatgtgcactggatgtcagagagtggcatcattgatgtttttctgctgacaggacctacaccttctgatgtcttcaaacagtactcacaccttacaggcacacaagccatgccccctcttttctctttgggataccaccagtgccgctggaactatgaagatgagcaggatgtaaaagcagtggatgcagggtttgatgagcatgacattccttatgatgccatgtggctggacatagagcacactgagggcaagaggtacttcacctgggacaaaaacagattcccaaaccccaagaggatgcaagagctgctcaggagcaaaaagcgtaagcttgtggtcatcagtgatccccacatcaagattgatcctgactactcagtatatgtgaaggccaaagatcagggcttctttgtgaagaatcaggaaggggaagactttgaaggggtgtgttggccaggtctctcctcttacctggatttcaccaatcccaaggtcagagagtggtattcaagtctttttgctttccctgtttatcagggatctacggacatcctcttcctttggaatgacatgaatgagccttctgtctttagagggccagagcaaaccatgcagaagaatgccattcatcatggcaattgggagcacagagagctccacaacatctacggtttttatcatcaaatggctactgcagaaggactgataaaacgatctaaagggaaggagagaccctttgttcttacacgttctttctttgctggatcacaaaagtatggtgccgtgtggacaggcgacaacacagcagaatggagcaacttgaaaatttctatcccaatgttactcactctcagcattactgggatctctttttgcggagctgacataggcgggttcattgggaatccagagacagagctgctagtgcgttggtaccaggctggagcctaccagcccttcttccgtggccatgccaccatgaacaccaagcgacgagagccctggctctttggggaggaacacacccgactcatccgagaagccatcagagagcgctatggcctcctgccatattggtattctctgttctaccatgcacacgtggcttcccaacctgtcatgaggcctctgtgggtagagttccctgatgaactaaagacttttgatatggaagatgaatacatgctggggagtgcattattggttcatccagtcacagaaccaaaagccaccacagttgatgtgtttcttccaggatcaaatgaggtctggtatgactataagacatttgctcattgggaaggagggtgtactgtaaagatcccagtagccttggacactattccagtgtttcagcgaggtggaagtgtgataccaataaagacaactgtaggaaaatccacaggctggatgactgaatcctcctatggactccgggttgctctaagcactaagggttcttcagtgggtgagttatatcttgatgatggccattcattccaatacctccaccagaagcaatttttgcacaggaagttttcattctgttccagtgttctgatcaatagttttgctgaccagaggggtcattatcccagcaagtgtgtggtggagaagatcttggtcttaggcttcaggaaggagccatcttctgtgactacccactcatctgatggtaaagatcagcctgtggcttttacgtattgtgccaaaacatccatcctgagcctggagaagctctcactcaacattgccactgactgggaggtccgcatcatatgacaaagaactgcccctggtgatgtgagcagggacctgcctgcccctttcaacctttcccctcaccttttttgagatttttgctgcaatctgtttgccttccctgaatcaaaataatctttcattcgtcaccattatactaatgaacaatagatttcatgtttcaaaatttcagattttacatgttaagatgtactaacaatattccttgtatcaaacatctccttttctccctgatacatagccctgagacatttatagcgttcaggagtcttctattgcttccattccttcagcagggctgcgtgggtctgttttaacgtgggccaagcctacctgggcagcccatttgccagggcttgcctcaggccatgcagcattggcgctctggctgcagcagctgagttgctcaaggccagtgtccaagtggacagcagcctctggtactccccccagttatcttccacccacatggactgggcagagcagccctcttctgtgtgcactgcatacgctgcagccgtgggagttattctcccctagagatcgacttggcagcacgaaggattcttttctctttcatgcttctcaggctcaatagtttctaattaatcttaaaatccatgtcttttacattgtttttttaattaagtgctgtttactaaccaaataatatttataacatgagtaagctataattaataacaatgaaataaatacccatgtacccaccactggacttcagaagtagaactcatgactgggactaggatgaggcaagggagaccctggccttgggcacaaaatgtaagggatgccaaaaaaatacagtaatcaaagtaagtaatatttcaatccaatatttttaaaaatcagaattaatgcaaaaaaaaccatgatgaacaaaatattaaaatttaaaataaagacaggattagtattactgagttttccttttgtcccaggctctaatatggcttggcatggggcagaacattacaacataccagtcgtgtcatggtgcccaaggctccacagacctcagtggctccctgctgcctgccacagcatctgttttagcagcctcgactcctcagcactcctcagcacacacctcttcttatcaggcttcctccacttagcaacttgctaacggccacctctgtgccttctgatccctgggcgccaatatcctcctgcccttaccatccttccaggcccaacttaaatcccactttcccatgaagcctaactgcgtgaacacccctacccccatacccattagcagtgattttgcccttccccgtaatgctgtcccacttataactgtgctctacttagcattctcagggatcataccttaatgttttcagtatgtctgcgttctcctactagattgtatgtccctcaagagcatgttctgtttctcttctgtctgacagagcactattatacctgactttcagtaactgttagctgtgattagttagctggtggatttaattgattaaaaaattacgattgaatgtatttccatctgatttgcttttctggtacaagattcttcccaaaggcaatcaacattgtgcatttccttgtggacacatttcatagtatgagttgagatttgagctctgcaccatatgtaagctcacagagacctgcacagattctttgctcctatttctgtaagttttgcagttgagaagaaaggagcaagcttatattagctgaagccatggtgcctatcttcaaatttcccttgccaacctaaaataaaacttagccagaagactgggtgctcctccctaatataaatgatagtttttaatagcatttacagttgaataagaactatctttaggtcaacatttattgcacgtctagtcttccatttaaaatattattggaggaatggagcagtaactagtagagtaagttaatgaggaactgctctgttttgacccaaatctatattgaaacatttggctagagacaagtggagacagcctgggtgtttttaatggttttctgctcttattgcttctcacactttacctacctcccatttctgaatttgtgtaccagagagcaacatggggctgagttggcctacaggtattgttacttttttgtggctaattcttaatatggtttcataggaaactggattttatataagaaattttattcatttcaacagggttcctaaaaaagctctaaaatgaatgcatagtgtgtctttccttcaagatgtaaatgtcaaggaatgagttggcaaatcagtttaaaaacacaaactacccaacagaaaaatgtaagtataatctttcagagtggcaatctggcaacaatataaaaaatattttaattttaataaaaatatgtgggggtctcactatgttgcccaggctagtcttgaactcccggactcaaacaatcctcctgccttgacctcccaaagggctggggctataggcatgagccactgtgcctggccttacctcctctgttggaacagttggcaacattggaatgggatcttttgattacatggtaatttttttacttttgagcattgtattaggatcatatagaagaattttcttggttttaagaaaaatacaattctggagtttggtctgtgtgcagaattccttcactttgtcacatccttttcactatcaaggcatcaaaatgataagcagcagaaacacagtcaaagcacataaacactgggagttgaatagtttttagctaattaaccactctgcctgaaagccttagtaatgagattcctaggatttccacctaccaaaccctcgaagggctactctagactaaaataacttctcaggccagtgggtagaaagccatcagcagctccactggaaacaggctatcatattagccactgacaatggaggccatatagctagcattctaggagaaatagcagagacattggcatcttatatcagatctgcttgtctcatgacaagccttgctaaaggctatagtgccacacgaagacttgccagaattagacagctgctgctgctttttttttttttttttttttttttattgagacagaatcttgctctgtcacccaggatggagtgcaatggcacgatctcggctaactgcaacctctgctttccgggttcaagcgattcttctgcctcagcatcctgagtaaccgagattacaggcatgctccaccaggcccagctaatttttgtatttttagtagagaaaggttttcaccatgttggccaggctgacctcgaactcctgacctcatgtaatccacctgcctctgcctcccaaagtgcaacagctgcttcttgacagttgtttccacccaggccgacggtattagattgctgtccaatcagagccagggaaaggggagcctgactatttacatgcaaggatacagagatcttatacctaattcacatcaattaaatcttagtcaagcatttacttccaaggaaatcaagagacctggagtctagtttgcttctacagtgaactggctgagtgatcttggccatggcatttgacctctctgggctttgttaaagaaaagagataatctctagcctgggtgcagtggcttacgcctgtaatcccagcactttgggaggccgaggcagggggttcacttgagttcaggagttcgagaccaacctggccaacatggtgaagccccatctctactaaaaataacaaaaattagcagggcatggtggcacatgcctgtaatctcagctgttcaggagactgaggcaggagaatcgcttgaacccgggaggcggaagttgcagtgagctaagattgcaccagtgcactccagcctggtgacagagagagactccatctaaaaaaaaaaaaagagagataatctctaaaattttgtgagttttctgatacttaactgtcaaaatacagcagatatctcaagtttcctcagttgtaaaatggacttagtgaaacttgcagagtttttctacaaatttaaaatatcttatgtgtacagaaagggaaaaatagtaacattaccagggagaaacccagtaaacatcactttaggcaagtgatcaaagttgacatcacctgtaataaaacctatcaatatcatgtgcccccaaatatggtttgaggaggtagccatgtcacatctgtgacagtcttcccctaaatccataacctcagtctaatcatgtgaaaaatatcagagaaacccaaatttagggtcattctacaaaaacctgacaagtactcttcaaaagtgtcacggtcatgagagacaaagactgtggaatgatcagagactggaggacactatctttgcaactcttttgtaagtctttgcaagtcttttgtaagtctaaaattattttaaaataaaaagttttttaaaggtctctgtgaagtggctagctcccagtaggcacttaatgaatgagaggtattataatgataagcaaagacattgcttccaatagtgttagtaatcaaagaaatgcttcttggtggaaaagacagagccattagttggcaatgctgtgcagcagaaaccattccagccacagatattacatgaccgtgggtgaaatatgttataaaaactagttctttatccttgaaggggcttctgggaattgaaatgtgcagttgtttatgtgttcattatctgccctttgttcatgggctcgagttggacttctccctgatagcattggtttccacagctgtgccattgaataaaccttgagtttggacctgtt

SEQ ID NO: 137346 - DNA, 1437 bp, Homo sapiens
  Payload ID: 6890
  Gene Symbol: GANC
  Gene Name: glucosidase, alpha
  neutral C
  ENST ID: ENST00000440615
  CDS Start-End: 241-1089
ataatcaagacaaatttgccaaataaatcattgtagaaacgctagtttgggcctgaaaaattccaggagcaagagtcaagatttgtcactccatgagaatctggaggggactcccttcccagaaacttgacgatgaagtactggttgtaattttagaaagacacccaatcggcttttttaaaagatcgcccagggcccttgtcctgagagctgggagctggtcggagtgacagagaagccatggaagcagcagtgaaagaggaaataagtcttgaagatgaagctgtagataaaaacattttcagagactgtaacaagatcgcattttacaggcgtcagaaacagtggctttccaagaagtccacctatcaggcattattggattcagtcacaacagatgaagacagcaccaggttccaaatcatcaatgaagcaagtaaggtcaggtgccaggaccagagcccaacaactctggatgccttcaaaggcaaagaaaccacagtccaggaggagacacaggatctcagcacaagacagcacctggctcaaaaggaagctgaggagcctgataaacaaggacaaattacctgggacatcagcaacgtagctcccaagactgagaactttgaggacctcttggaacaaactccatgctcagcctgtttgcaaggtttcaccagagacaacacttccagcagcttctccgaggatgcaggaatatctctgagcacctctgtgaagttaccccttgcctcttcatctaagcctaatgaaaatgaagctttgcccaaccagccaccttctcagcagataaggcacaactaccgcttattagccagtactgtgtctgcagaaatggccaggaacaggcagctaatttgggaactggccagacaatcagaagcacacctggacaggccagttgtccttggggaacaggccagtgcccagcgtgaggttgccagtattctttgtagaaaatcagtgcttgcaataaaccaactggctgcaactgtagaagggacaattagtgtcctacagcaatttaatgaactattagaccatcctctggatcccgggaggtcttgatcacagctggtagaggtggccactcactgttctatgtcttttaggttaacagttctttacataacagtgaagagtcctggtgcctcaggaaaagcaagatcaacctaccaaggaagagttgatggagtcataattttcctacttaacacccactgcaaatttaaatatgtgttctagggctgtttgttaattctattatggtctttactaattgtgattcccagttctgggtgaataaaaagtttttgttttaatgtaattgtgatcaacactatgcttgaagacatagacaaagctatttctaccaccatgatgtttacaaaatatctggtattttcgcctatatgg

SEQ ID NO: 137347 - DNA, 1052 bp, Homo sapiens
  Payload ID: 6890
  Gene Symbol: GANC
  Gene Name: glucosidase, alpha
  neutral C
  ENST ID: ENST00000562859
  CDS Start-End: 632-1052
gctacggttgccggtcccgcactgaaaaacgacagtggtgacgggtgagctcccagaagcagaagaatgacaggcaacacctgaagccacgcagccgccgccatcttcacagccgtggagtgcctaccgaaagcatttcaccctcttccggttcgtcccgccttcttccggctctgctctaagggcgggattatccgggtcctggaaacgtcgcggagcttgtttgctgtgcggcgtagcggcccctctctcagacagtcgtctgtgcgccgtgagactttggacctactgcgcaggcgtcatcctgttggaacctggactcattgcgtacacgccctcaccgccgcccagtttcggttcctaacaaaagcacgttcctcatcagccacccataatcaagacaaatttgccaaataaatcattgtagaaacgctagtttgggcctgaaaaattccaggagcaagagtcaagatttgtcactccatgagaatctggaggggactcccttcccagaaacttgacgatgaagtactggttgtaattttagaaagacacccaatcggcttttttaaaagatcgcccagggcccttgtcctgagagctgggagctggtcggagtgacagagaagccatggaagcagcagtgaaagaggaaataagtcttgaagatgaagctgtagataaaaacattttcagagactgtaacaagatcgcattttacaggcgtcagaaacagtggctttccaagaagtccacctatcaggcattattggattcagtcacaacagatgaagacagcaccaggttccaaatcatcaatgaagcaagtaaggttcctctcctggctgaaatttatggtatagaaggaaacattttcaggcttaaaattaatgaagagactcctctaaaacccagatttgaagttccggatgtcctcacaagcaagccaagcactgtaaggctgatttcatgctctggggacacaggcagtctgatattggcagatggaaaaggagacctgaagtgccatatcacagcaaacccattcaagg

SEQ ID NO: 137348 - DNA, 676 bp, Homo sapiens
  Payload ID: 6890
  Gene Symbol: GANC
  Gene Name: glucosidase, alpha
  neutral C
  ENST ID: ENST00000562170
  CDS Start-End: 474-676
tcggcagcagctacggttgccggtcccgcactgaaaaacgacagtggtgacgggtgagctcccagaagcagaagaatgacaggcaacacctgaagccacgcagccgccgccatcttcacagccgtggagtgcctaccgaaagcatttcaccctcttccggactcattgcgtacacgccctcaccgccgcccagtttcggttcctaacaaaagcacgttcctcatcagccacccataatcaagacaaatttgccaaataaatcattgtagaaacgctagtttgggcctgaaaaattccaggagcaagagtcaagatttgtcactccatgagaatctggaggggactcccttcccagaaacttgacgatgaagtactggttgtaattttagaaagacacccaatcggcttttttaaaagatcgcccagggcccttgtcctgagagctgggagctggtcggagtgacagagaagccatggaagcagcagtgaaagaggaaataagtcttgaagatgaagctgtagataaaaacattttcagagactgtaacaagatcgcattttacaggcgtcagaaacagtggctttccaagaagtccacctatcaggcattattggattcagtcacaacagatgaagacagcaccaggttccaaatcatcaatgaagcaagtaaggt

SEQ ID NO: 137349 - DNA, 2512 bp, Homo sapiens
  Payload ID: 6890
  Gene Symbol: GANC
  Gene Name: glucosidase, alpha
  neutral C
  ENST ID: ENST00000566442
  CDS Start-End: 702-1775
ttttctgtctcccagccgttaaaggttttaggaccaggcaggcaccccgtgcaggatttggctctctacttccgctcgccccagcccttcatcccttctaagtcaatgtcagactttggggccagaaagtctggaaaagccctaagcctggctgcccaagtggcgtctagtagtgagttctccggtttgggtggtatttaagcaaaggctggaattcggcggtggtggagtacacgcgattcctagactgggtagtgtaacaaccttcaaaggccccttctagccctgaagagtacgatgctgcagtacaatctggctggagacctagcctccagcaaagacccggccggcacttcccacccttaaccgaaaacggagacagagagggactcattgcgtacacgccctcaccgccgcccagtttcggttcctaacaaaagcacgttcctcatcagccacccataatcaagacaaatttgccaaataaatcattgtagaaacgctagtttgggcctgaaaaattccaggagcaagagtcaagatttgtcactccatgagaatctggaggggactcccttcccagaaacttgacgatgaagtactggttgtaattttagaaagacacccaatcggcttttttaaaagatcgcccagggcccttgtcctgagagctgggagctggtcggagtgacagagaagccatggaagcagcagtgaaagaggaaataagtcttgaagatgaagctgtagataaaaacattttcagagactgtaacaagatcgcattttacaggcgtcagaaacagtggctttccaagaagtccacctatcaggcattattggattcagtcacaacagatgaagacagcaccaggttccaaatcatcaatgaagcaagtaaggttcctctcctggctgaaatttatggtatagaaggaaacattttcaggcttaaaattaatgaagagactcctctaaaacccagatttgaagttccggatgtcctcacaagcaagccaagcactgtaaggctgatttcatgctctggggacacaggcagtctgatattggcagatggaaaaggagacctgaagtgccatatcacagcaaacccattcaaggtagacttggtgtctgaagaagaggttgtgattagcataaattccctgggccaattatactttgagcatctacagattcttcacaaacaaagagctgctaaagaaaatgaggaggagacatcagtggacacctctcaggaaaatcaagaagatctgggcctgtgggaagagaaatttggaaaatttgtggatatcaaagctaatggcccttcttctattggtttggatttctccttgcatggatttgagcatctttatgggatcccacaacatgcagaatcacaccaacttaaaaatactggtgatggagatgcttaccgtctttataacctggatgtctatggataccaaatatatgataaaatgggcatttatggttcagtaccttatctcctggcccacaaactgggcagaactataggtattttctggctgaatgcctcggaaacactggtggagatcaatacagagcctgcagtagagtacacactgacccagatgggcccagttgctgctaaacaaaaggtcagatctcgcactcatgtgcactggatgtcagagagtggcatcattgatgtttttctgctgacaggacctacaccttctgatgtcttcaaacagtactcacaccttacagacattggagaaaaatagctctcagtctgaggaagatactgagaaaaggaaagaagttgaaagcatcttgaagaaaaattcagattggatatgggattggacaagttggccagaaaatattccccacaaggagttcctctttaaagcacctgaagcacgtagctacccagcatggaatttaaagcctgatgaggaaagggggcattttctcagcagaatttccaaagggttttgctgctgtctcatctggtggccatgggattggggatctatattggaaggcatctgacaacttctaccagcaccttttgatgaataatttgaatccagctttgtgcgtatagtggggatttctatctgagcttgtgacacagctaactcaggagctgttatggtccttgggtggctgtttcacttgtttttatttgttctgtaaatactgctttcctaatttagtaaaatgaaagaatagacactaaaatcacactgacctatacttatacctatagaatcagttaataagggtatcagactgattaatatctactgtaacaatttggcagtgagttttctttggatattagtataaatatgtaagtatcgttttaatatattagtcatgatatagcattttaaaaattatctgtaacctgaattctgttaaaacactttatattccaaaagaatgaatgacagtgatattaaaatcactacattaaagggtttgcccagaataaatattgtggccttactta

SEQ ID NO: 137350 - DNA, 940 bp, Homo sapiens
  Payload ID: 6890
  Gene Symbol: GANC
  Gene Name: glucosidase, alpha
  neutral C
  ENST ID: ENST00000561871
  CDS Start-End: 912-940
cgttagtgaagtgaatactcaccgacggtatcggaatgtgccatttggaccggtcggcagcagctacggttgccggtcccgcactgaaaaacgacagtggtgacgggtgagctcccagaagcagaagaatgacaggcaacacctgaagccacgcagccgccgccatcttcacagccgtggagtgcctaccgaaagcatttcaccctcttccggttcgtcccgccttcttccggctctgctctaagggcgggattatccgggtcctggaaacgtcgcggagcttgtttgctgtgcggcgtagcggcccctctctcagacagtcgtctgtgcgccgtgagactttggacctactgcgcaggcgtcatcctgttggaacctggtcagctgggttagagagatcgctacatgccagcctggcctgagtcttttctgtctcccagccgttaaaggttttaggaccaggcaggcaccccgtgcaggatttggctctctacttccgctcgccccagcccttcatcccttctaagtcaatgtcagactttggggccagaaagtctggaaaagccctaagcctggctgcccaagtggcgtctagtagactcattgcgtacacgccctcaccgccgcccagtttcggttcctaacaaaagcacgttcctcatcagccacccataatcaagacaaatttgccaaataaatcattgtagaaacgctagtttgggcctgaaaaattccaggagcaagagtcaagatttgtcactccatgagaatctggaggggactcccttcccagaaacttgacgatgaagtactggttgtaattttagaaagacacccaatcggcttttttaaaagatcgcccagggcccttgtcctgagagctgggagctggtcggagtgacagagaagccatggaagcagcagtgaaagaggaaataag

SEQ ID NO: 137351 - DNA, 672 bp, Homo sapiens
  Payload ID: 6890
  Gene Symbol: GANC
  Gene Name: glucosidase, alpha
  neutral C
  ENST ID: ENST00000566690
  CDS Start-End: 362-672
tgagggctctttactaaggttcccctgccaagtagaaacctgaggaaaaggttaaatgcaacaactgctgagtaaatgccctgccagatatttttgctgagaatttctcaagttgattccagcaaagtggtgggttcccattaagaggaactggctccctttccgacttagtcacagagttttattcgtgatctatcatcattccaaacacgtcgttgtctggtatgactataagacatttgctcattgggaaggagggtgtactgtaaagatcccagtagccttggacactattccagtgtttcagcgaggtggaagtgtgataccaataaagacaactgtaggaaaatccacaggctggatgactgaatcctcctatggactccgggttgctctaagcactaagggttcttcagtgggtgagttatatcttgatgatggccattcattccaatacctccaccagaagcaatttttgcacaggaagttttcattctgttccagtgttctgatcaatagttttgctgaccagaggggtcattatcccagcaagtgtgtggtggagaagatcttggtcttaggcttcaggaaggagccatcttctgtgactacccactcatctgatggtaaagatcagcctgtggcttttacgtattgtgccaaaacatccat

SEQ ID NO: 137352 - DNA, 535 bp, Homo sapiens
  Payload ID: 6890
  Gene Symbol: GANC
  Gene Name: glucosidase, alpha
  neutral C
  ENST ID: ENST00000567784
  CDS Start-End: 239-352
aatcaagacaaatttgccaaataaatcattgtagaaacgctagtttgggcctgaaaaattccaggagcaagagtcaagatttgtcactccatgagaatctggaggggactcccttcccagaaacttgacgatgaagtactggttgtaattttagaaagacacccaatcggcttttttaaaagatcgcccagggcccttgtcctgagagctgggagctggtcggagtgacagagaagccatggaagcagcagtgaaagaggaaataagtcttgaagatgaagctgtagataaaaacattttcagagactgtaacaagatcgcattttacaggaagaaaagcgtattatgttaattctgaacaggtatctagagggaagtctacagtgaatgcctggcgtcagaaacagtggctttccaagaagtccacctatcaggcattattggattcagtcacaacagatgaagacagcaccaggttccaaatcatcaatgaagcaagtaaggttcctctcctggctgaaatttatggtataga

SEQ ID NO: 137353 - DNA, 775 bp, Homo sapiens
  Payload ID: 6890
  Gene Symbol: GANC
  Gene Name: glucosidase, alpha
  neutral C
  ENST ID: ENST00000570013
  CDS Start-End: 219-332
ataaatcattgtagaaacgctagtttgggcctgaaaaattccaggagcaagagtcaagatttgtcactccatgagaatctggaggggactcccttcccagaaacttgacgatgaagtactggttgtaattttagaaagacacccaatcggcttttttaaaagatcgcccagggcccttgtcctgagagctgggagctggtcggagtgacagagaagccatggaagcagcagtgaaagaggaaataagtcttgaagatgaagctgtagataaaaacattttcagagactgtaacaagatcgcattttacaggaagaaaagcgtattatgttaattctgaacaggtatctagagggaagtctacagtgaatgcctggcgtcagaaacagtggctttccaagaagtccacctatcaggcattattggattcagtcacaacagatgaagacagcaccaggttccaaatcatcaatgaagcaagtaagcctgtttgcaaggtttcaccagagacaacacttccagcagcttctccgaggatgcaggaatatctctgagcacctctgtgaagttaccccttgcctcttcatctaagcctaatgaaaatgaagctttgcccaaccagccaccttctcagcagataaggcacaactaccgcttattagccagtactgtgtctgcagaaatggccaggaacaggcagctaatttgggaactggccagacaatcagaagcacacctggacaggccagttgtccttggggaacaggccagtgccca

SEQ ID NO: 137354 - DNA, 555 bp, Homo sapiens
  Payload ID: 6890
  Gene Symbol: GANC
  Gene Name: glucosidase, alpha
  neutral C
  ENST ID: ENST00000567596
  CDS Start-End: 215-555
aaagatgaattggtgaggattccaaggaggatcagaatgatttttagtcttcacactttgactagtaaaagtctggtatgactataagacatttgctcattgggaaggagggtgtactgtaaagatcccagtagccttggacactattccagtgtttcagcgaggtggaagtgtgataccaataaagacaactgtaggaaaatccacaggctggatgactgaatcctcctatggactccgggttgctctaagcactaagggttcttcagtgggtgagttatatcttgatgatggccattcattccaatacctccaccagaagcaatttttgcacaggaagttttcattctgttccagtgttctgatcaatagttttgctgaccagaggggtcattatcccagcaagtgtgtggtggagaagatcttggtcttaggcttcaggaaggagccatcttctgtgactacccactcatctgatggtaaagatcagcctgtggcttttacgtattgtgccaaaacatccatcctgagcctggagaagctctcactcaacat

SEQ ID NO: 137355 - DNA, 1672 bp, Homo sapiens
  Payload ID: 6891
  Gene Symbol: GBA2
  Gene Name: glucosidase, beta (bile acid) 2
  ENST ID: ENST00000378088
  CDS Start-End: 384-902
taggctgtgatggaatctgaaatgaagtttgacaaggaccatgatggactcattgaaaatggaggctatgcagaccagacctatgatggatgggtgaccacaggccccaggttagcgggtaggggtttccaggaggcctgaggtgagaaactgggcaacaagggattgtagggctcaagaaagaatgactcattgtctattacacggcatgggagcagctggagctgccagtctgacccccaaacccatgtccctgatcagtgcttactgtggagggctgtggctggcagctgtggctgtgatggtccagatggctgctctgtgtggggcacaggacatccaggataagttttcttctatcctcagccggggccaagaagcctatgagagactgctgtggaatggtgagttcggggagcctaagtagtcttaaggcagctgagaggacaccaggagccttatttttctcttcctcgactccaggccgctattacaactatgacagcagctctcggcctcagtctcgtagtgttatgtctgaccagtgtgctggacagtggttcctgaaggcctgtggcctaggagaaggagacactgaggtgtttcctacccaacatgtggtccgtgctctccaaactatctttgagctgaacgtccaggcctttgcaggaggggccatgggggctgtgaatgggatgcagccccatggtgtccctgataaatccagtgtgcagtctgatgaagtctgggtgggtgtggtctacgggctggcagctaccatgatccaagaggtaatgcactccttttcccatctctccaccatctgtatcctggcccagaaaacttcctcaaccaccaaatttcttcaaggcataacccaatgccatcttgtccgtctataaagcctcccatttttccctggtatgcattccagctcctgccttcaggcttctgtctgtgggtcatagttatctcctccacttgctgggagctccttgaaggcaaagactctactgcctccatctatccagtggaagtggctcttcagagggtgccaagttagtatgtatgactgtcatctctcccaacagggcctgacttgggagggcttccagacagctgaaggctgctaccgtaccgtgtgggagcgcctgggtctggccttccagaccccagaggcatactgccagcagcgagtgttccgctcactggcctacatgcggccactgagcatatgggccatgcagctagccctgcaacagcagcagcacaaaaaggcctcctggccaaaagtcaaacagggcacaggactaaggacagggcctatgtttggaccaaaggaagccatggcaaacctgagcccagagtgagccgtctgaactgtgggagggaagtgctaacagcccagcctccagcctggcctttcctccttcccctctgaacctcctgcaaccctgagccatcaggacaatcataccccttcccttctctccacccaattgtgccagtaaatgggggttgagggtgacctaggcagcattagaatcacttatttatttctttcctcacctgttccctgactgcgtgaaatgttcagggaggtcagttgatttccccaggtacattcatggtgtgacagacacatgggtacaaataaaagacccagaaagcc

SEQ ID NO: 137356 - DNA, 3757 bp, Homo sapiens
  Payload ID: 6891
  Gene Symbol: GBA2
  Gene Name: glucosidase, beta (bile acid) 2
  Uniprot ID: Q9HCG7
  ENST ID: ENST00000378094
  CDS Start-End: 515-3148
gggctcgggtcatcccggcgcccagggtcaccttcccacgggctggcacctgggcgcgggcgctgccccggagccggccggcgggacctggcgcccaatcctgggggacccggtgccgtggcccaggggccgggccgaggtcccgggggcggtgccttgcgggcccgtcccggggcggtgcctggtgggctggccccgcggctcctcccctctctgcgggcccagtcgccctttggccgggcgagctaatcgtcggctcaatgacgacgaggcccgacccttcccgtccaggacctacagagacaaccgaaggagagcccaaggcggcttctttgctgtcgccgcccccactgaagcaagagctccccggctccactgaaacaccagctcatttaagctttccccaacgcccggccctccgggacgatacctaacaacgaccggcgcccgcatctggaataggctggcgagatacttagtatccgagggctcgggacttggcgccatcgaggtcatggggacccaggatccagggaacatgggaaccggcgtcccagcctcggagcagataagctgtgccaaagaggatccacaagtttattgccctgaagagactggcggcaccaaggatgtgcaggttacagactgtaagagtcccgaagacagccgacccccaaaagagacggactgctgcaatccggaggactctgggcagctgatggtttcctatgagggtaaagctatgggctaccaggtgcctccctttggctggcgcatctgtctggctcatgagtttacagagaagaggaaaccctttcaagctaacaacgtctccctaagcaacatgataaagcatataggcatgggcttgaggtacctgcagtggtggtaccggaagacccatgtggaaaagaagacacctttcatcgacatgatcaattctgtacccctaagacagatttatggttgtcccttgggtggcatcgggggaggcactattacccgtggctggagaggccagttctgtcgttggcagcttaaccctggaatgtatcagcaccggacagtcatcgctgaccaattcacagtgtgcctgcgtcgggaagggcagactgtgtaccagcaagtcctgtccctggagcgcccaagtgtcctccgcagctggaactggggcctgtgtgggtactttgctttctaccatgccctctatccccgagcctggactgtctatcagcttcctggccagaatgtcaccctcacctgccgtcagatcacacccatcttgccccatgactaccaggacagcagcctgcctgtaggagtctttgtgtgggatgtggaaaatgaaggggacgaagctctagatgtgtccatcatgttctccatgcggaatggactgggtggtggagacgatgccccagggggtttgtggaatgagcccttctgtctggagcgtagcggggaaactgtccgggggctgctcctgcatcatccaacccttccaaacccctacacgatggctgtggctgcacgagtcacggcagctaccacggtaacccacatcacagcctttgaccctgacagcacggggcagcaggtgtggcaggatctacttcaggatggacagctggactctcccactggccaaagcacccctacgcagaaaggagtaggcattgctggagctgtgtgtgtttccagcaagttgcgacctcgaggccagtgccgcctggagttttcactggcttgggacatgcccaggatcatgtttggagctaaaggccaagtccactacaggcggtatacaaggttctttggccaggatggagatgcagcacctgccctcagccactatgcactgtgccgatacgcagagtgggaagagaggatctcagcttggcagagcccggtattggatgacagatcactgcctgcctggtacaaatctgcgctgttcaatgaactatacttcctggctgatggaggcacagtgtggctggaagttcttgaggactccctaccagaggagctgggcagaaacatgtgtcacctccgccccaccctacgggactacggtcgatttggctaccttgagggccaggagtaccgcatgtacaacacatatgatgtccacttttatgcttcctttgccctcatcatgctctggcccaaacttgagctcagcctacagtatgacatggctctggccactctcagggaggacctgacacggcgacggtacctgatgagtggggtgatggcacctgtgaaaaggaggaacgtcatcccccatgatattggggacccagatgatgaaccatggctccgcgtcaatgcatatttaatccatgatactgctgattggaaggacctgaacctgaagtttgtgctgcaggtttatcgggactattacctcacgggtgatcaaaacttcctgaaggacatgtggcctgtgtgtctagctgtgatggaatctgaaatgaagtttgacaaggaccatgatggactcattgaaaatggaggctatgcagaccagacctatgatggatgggtgaccacaggccccagtgcttactgtggagggctgtggctggcagctgtggctgtgatggtccagatggctgctctgtgtggggcacaggacatccaggataagttttcttctatcctcagccggggccaagaagcctatgagagactgctgtggaatggccgctattacaactatgacagcagctctcggcctcagtctcgtagtgttatgtctgaccagtgtgctggacagtggttcctgaaggcctgtggcctaggagaaggagacactgaggtgtttcctacccaacatgtggtccgtgctctccaaactatctttgagctgaacgtccaggcctttgcaggaggggccatgggggctgtgaatgggatgcagccccatggtgtccctgataaatccagtgtgcagtctgatgaagtctgggtgggtgtggtctacgggctggcagctaccatgatccaagagctcctgccttcaggcttctgtctgtgggtcatagttatctcctccacttgctgggagctccttgaaggcaaagactctactgcctccatctatccagtggaagtggctcttcagagggtgccaagttagtatgtatgactgtcatctctcccaacagggcctgacttgggagggcttccagacagctgaaggctgctaccgtaccgtgtgggagcgcctgggtctggccttccagaccccagaggcatactgccagcagcgagtgttccgctcactggcctacatgcggccactgagcatatgggccatgcagctagccctgcaacagcagcagcacaaaaaggcctcctggccaaaagtcaaacagggcacaggactaaggacagggcctatgtttggaccaaaggaagccatggcaaacctgagcccagagtgagccgtctgaactgtgggagggaagtgctaacagcccagcctccagcctggcctttcctccttcccctctgaacctcctgcaaccctgagccatcaggacaatcataccccttcccttctctccacccaattgtgccagtaaatgggggttgagggtgacctaggcagcattagaatcacttatttatttctttcctcacctgttccctgactgcgtgaaatgttcagggaggtcagttgatttccccaggtacattcatggtgtgacagacacatgggtacaaataaaagacccagaaagcc

SEQ ID NO: 137357 - DNA, 3611 bp, Homo sapiens
  Payload ID: 6891
  Gene Symbol: GBA2
  Gene Name: glucosidase, beta (bile acid) 2
  Uniprot ID: Q9HCG7
  ENST ID: ENST00000378103
  CDS Start-End: 525-3308
agaccggaaagggctcgggtcatcccggcgcccagggtcaccttcccacgggctggcacctgggcgcgggcgctgccccggagccggccggcgggacctggcgcccaatcctgggggacccggtgccgtggcccaggggccgggccgaggtcccgggggcggtgccttgcgggcccgtcccggggcggtgcctggtgggctggccccgcggctcctcccctctctgcgggcccagtcgccctttggccgggcgagctaatcgtcggctcaatgacgacgaggcccgacccttcccgtccaggacctacagagacaaccgaaggagagcccaaggcggcttctttgctgtcgccgcccccactgaagcaagagctccccggctccactgaaacaccagctcatttaagctttccccaacgcccggccctccgggacgatacctaacaacgaccggcgcccgcatctggaataggctggcgagatacttagtatccgagggctcgggacttggcgccatcgaggtcatggggacccaggatccagggaacatgggaaccggcgtcccagcctcggagcagataagctgtgccaaagaggatccacaagtttattgccctgaagagactggcggcaccaaggatgtgcaggttacagactgtaagagtcccgaagacagccgacccccaaaagagacggactgctgcaatccggaggactctgggcagctgatggtttcctatgagggtaaagctatgggctaccaggtgcctccctttggctggcgcatctgtctggctcatgagtttacagagaagaggaaaccctttcaagctaacaacgtctccctaagcaacatgataaagcatataggcatgggcttgaggtacctgcagtggtggtaccggaagacccatgtggaaaagaagacacctttcatcgacatgatcaattctgtacccctaagacagatttatggttgtcccttgggtggcatcgggggaggcactattacccgtggctggagaggccagttctgtcgttggcagcttaaccctggaatgtatcagcaccggacagtcatcgctgaccaattcacagtgtgcctgcgtcgggaagggcagactgtgtaccagcaagtcctgtccctggagcgcccaagtgtcctccgcagctggaactggggcctgtgtgggtactttgctttctaccatgccctctatccccgagcctggactgtctatcagcttcctggccagaatgtcaccctcacctgccgtcagatcacacccatcttgccccatgactaccaggacagcagcctgcctgtaggagtctttgtgtgggatgtggaaaatgaaggggacgaagctctagatgtgtccatcatgttctccatgcggaatggactgggtggtggagacgatgccccagggggtttgtggaatgagcccttctgtctggagcgtagcggggaaactgtccgggggctgctcctgcatcatccaacccttccaaacccctacacgatggctgtggctgcacgagtcacggcagctaccacggtaacccacatcacagcctttgaccctgacagcacggggcagcaggtgtggcaggatctacttcaggatggacagctggactctcccactggccaaagcacccctacgcagaaaggagtaggcattgctggagctgtgtgtgtttccagcaagttgcgacctcgaggccagtgccgcctggagttttcactggcttgggacatgcccaggatcatgtttggagctaaaggccaagtccactacaggcggtatacaaggttctttggccaggatggagatgcagcacctgccctcagccactatgcactgtgccgatacgcagagtgggaagagaggatctcagcttggcagagcccggtattggatgacagatcactgcctgcctggtacaaatctgcgctgttcaatgaactatacttcctggctgatggaggcacagtgtggctggaagttcttgaggactccctaccagaggagctgggcagaaacatgtgtcacctccgccccaccctacgggactacggtcgatttggctaccttgagggccaggagtaccgcatgtacaacacatatgatgtccacttttatgcttcctttgccctcatcatgctctggcccaaacttgagctcagcctacagtatgacatggctctggccactctcagggaggacctgacacggcgacggtacctgatgagtggggtgatggcacctgtgaaaaggaggaacgtcatcccccatgatattggggacccagatgatgaaccatggctccgcgtcaatgcatatttaatccatgatactgctgattggaaggacctgaacctgaagtttgtgctgcaggtttatcgggactattacctcacgggtgatcaaaacttcctgaaggacatgtggcctgtgtgtctagctgtgatggaatctgaaatgaagtttgacaaggaccatgatggactcattgaaaatggaggctatgcagaccagacctatgatggatgggtgaccacaggccccagtgcttactgtggagggctgtggctggcagctgtggctgtgatggtccagatggctgctctgtgtggggcacaggacatccaggataagttttcttctatcctcagccggggccaagaagcctatgagagactgctgtggaatggccgctattacaactatgacagcagctctcggcctcagtctcgtagtgttatgtctgaccagtgtgctggacagtggttcctgaaggcctgtggcctaggagaaggagacactgaggtgtttcctacccaacatgtggtccgtgctctccaaactatctttgagctgaacgtccaggcctttgcaggaggggccatgggggctgtgaatgggatgcagccccatggtgtccctgataaatccagtgtgcagtctgatgaagtctgggtgggtgtggtctacgggctggcagctaccatgatccaagagggcctgacttgggagggcttccagacagctgaaggctgctaccgtaccgtgtgggagcgcctgggtctggccttccagaccccagaggcatactgccagcagcgagtgttccgctcactggcctacatgcggccactgagcatatgggccatgcagctagccctgcaacagcagcagcacaaaaaggcctcctggccaaaagtcaaacagggcacaggactaaggacagggcctatgtttggaccaaaggaagccatggcaaacctgagcccagagtgagccgtctgaactgtgggagggaagtgctaacagcccagcctccagcctggcctttcctccttcccctctgaacctcctgcaaccctgagccatcaggacaatcataccccttcccttctctccacccaattgtgccagtaaatgggggttgagggtgacctaggcagcattagaatcacttatttatttctttcctcacctgttccctgactgcgtgaaatgttcagggaggtcagttgatttccccaggtacattcatggtgtgacagacacatgggtacaaataaaagacccagaaagcca

SEQ ID NO: 137358 - DNA, 2387 bp, Homo sapiens
  Payload ID: 6892
  Gene Symbol: GBA
  Gene Name: glucosidase, beta, acid
  Uniprot ID: P04062
  ENST ID: ENST00000327247
  CDS Start-End: 234-1844
tccccagggctgcttttctcgcggctgcgggtggtcgggctgcatcctgccttcagagtcttactgcgcggggccccagtctccagtcccgcccaggcgcctttgcaggctgcggtgggatttcgttttgcctccggttggggctgctgtttctcttcgccgacgtggatcctctatccttcagagactctggaacccctgtggtcttctcttcatctaatgaccctgaggggatggagttttcaagtccttccagagaggaatgtcccaagcctttgagtagggtaagcatcatggctggcagcctcacaggattgcttctacttcaggcagtgtcgtgggcatcaggtgcccgcccctgcatccctaaaagcttcggctacagctcggtggtgtgtgtctgcaatgccacatactgtgactcctttgaccccccgacctttcctgcccttggtaccttcagccgctatgagagtacacgcagtgggcgacggatggagctgagtatggggcccatccaggctaatcacacgggcacaggcctgctactgaccctgcagccagaacagaagttccagaaagtgaagggatttggaggggccatgacagatgctgctgctctcaacatccttgccctgtcaccccctgcccaaaatttgctacttaaatcgtacttctctgaagaaggaatcggatataacatcatccgggtacccatggccagctgtgacttctccatccgcacctacacctatgcagacacccctgatgatttccagttgcacaacttcagcctcccagaggaagataccaagctcaagatacccctgattcaccgagccctgcagttggcccagcgtcccgtttcactccttgccagcccctggacatcacccacttggctcaagaccaatggagcggtgaatgggaaggggtcactcaagggacagcccggagacatctaccaccagacctgggccagatactttgtgaagttcctggatgcctatgctgagcacaagttacagttctgggcagtgacagctgaaaatgagccttctgctgggctgttgagtggataccccttccagtgcctgggcttcacccctgaacatcagcgagacttcattgcccgtgacctaggtcctaccctcgccaacagtactcaccacaatgtccgcctactcatgctggatgaccaacgcttgctgctgccccactgggcaaaggtggtactgacagacccagaagcagctaaatatgttcatggcattgctgtacattggtacctggactttctggctccagccaaagccaccctaggggagacacaccgcctgttccccaacaccatgctctttgcctcagaggcctgtgtgggctccaagttctgggagcagagtgtgcggctaggctcctgggatcgagggatgcagtacagccacagcatcatcacgaacctcctgtaccatgtggtcggctggaccgactggaaccttgccctgaaccccgaaggaggacccaattgggtgcgtaactttgtcgacagtcccatcattgtagacatcaccaaggacacgttttacaaacagcccatgttctaccaccttggccacttcagcaagttcattcctgagggctcccagagagtggggctggttgccagtcagaagaacgacctggacgcagtggcactgatgcatcccgatggctctgctgttgtggtcgtgctaaaccgctcctctaaggatgtgcctcttaccatcaaggatcctgctgtgggcttcctggagacaatctcacctggctactccattcacacctacctgtggcgtcgccagtgatggagcagatactcaaggaggcactgggctcagcctgggcattaaagggacagagtcagctcacacgctgtctgtgactaaagagggcacagcagggccagtgtgagcttacagcgacgtaagcccaggggcaatggtttgggtgactcactttcccctctaggtggtgccaggggctggaggcccctagaaaaagatcagtaagccccagtgtccccccagcccccatgcttatgtgaacatgcgctgtgtgctgcttgctttggaaactgggcctgggtccaggcctagggtgagctcactgtccgtacaaacacaagatcagggctgagggtaaggaaaagaagagactaggaaagctgggcccaaaactggagactgtttgtctttcctggagatgcagaactgggcccgtggagcagcagtgtcagcatcagggcggaagccttaaagcagcagcgggtgtgcccaggcacccagatgattcctatggcaccagccaggaaaaatggcagctcttaaaggagaaaatgtttgagccca

SEQ ID NO: 137359 - DNA, 2276 bp, Homo sapiens
  Payload ID: 6892
  Gene Symbol: GBA
  Gene Name: glucosidase, beta, acid
  Uniprot ID: P04062
  ENST ID: ENST00000368373
  CDS Start-End: 123-1733
gctaacctagtgcctatagctaaggcaggtacctgcatccttgtttttgtttagtggatcctctatccttcagagactctggaacccctgtggtcttctcttcatctaatgaccctgaggggatggagttttcaagtccttccagagaggaatgtcccaagcctttgagtagggtaagcatcatggctggcagcctcacaggattgcttctacttcaggcagtgtcgtgggcatcaggtgcccgcccctgcatccctaaaagcttcggctacagctcggtggtgtgtgtctgcaatgccacatactgtgactcctttgaccccccgacctttcctgcccttggtaccttcagccgctatgagagtacacgcagtgggcgacggatggagctgagtatggggcccatccaggctaatcacacgggcacaggcctgctactgaccctgcagccagaacagaagttccagaaagtgaagggatttggaggggccatgacagatgctgctgctctcaacatccttgccctgtcaccccctgcccaaaatttgctacttaaatcgtacttctctgaagaaggaatcggatataacatcatccgggtacccatggccagctgtgacttctccatccgcacctacacctatgcagacacccctgatgatttccagttgcacaacttcagcctcccagaggaagataccaagctcaagatacccctgattcaccgagccctgcagttggcccagcgtcccgtttcactccttgccagcccctggacatcacccacttggctcaagaccaatggagcggtgaatgggaaggggtcactcaagggacagcccggagacatctaccaccagacctgggccagatactttgtgaagttcctggatgcctatgctgagcacaagttacagttctgggcagtgacagctgaaaatgagccttctgctgggctgttgagtggataccccttccagtgcctgggcttcacccctgaacatcagcgagacttcattgcccgtgacctaggtcctaccctcgccaacagtactcaccacaatgtccgcctactcatgctggatgaccaacgcttgctgctgccccactgggcaaaggtggtactgacagacccagaagcagctaaatatgttcatggcattgctgtacattggtacctggactttctggctccagccaaagccaccctaggggagacacaccgcctgttccccaacaccatgctctttgcctcagaggcctgtgtgggctccaagttctgggagcagagtgtgcggctaggctcctgggatcgagggatgcagtacagccacagcatcatcacgaacctcctgtaccatgtggtcggctggaccgactggaaccttgccctgaaccccgaaggaggacccaattgggtgcgtaactttgtcgacagtcccatcattgtagacatcaccaaggacacgttttacaaacagcccatgttctaccaccttggccacttcagcaagttcattcctgagggctcccagagagtggggctggttgccagtcagaagaacgacctggacgcagtggcactgatgcatcccgatggctctgctgttgtggtcgtgctaaaccgctcctctaaggatgtgcctcttaccatcaaggatcctgctgtgggcttcctggagacaatctcacctggctactccattcacacctacctgtggcgtcgccagtgatggagcagatactcaaggaggcactgggctcagcctgggcattaaagggacagagtcagctcacacgctgtctgtgactaaagagggcacagcagggccagtgtgagcttacagcgacgtaagcccaggggcaatggtttgggtgactcactttcccctctaggtggtgccaggggctggaggcccctagaaaaagatcagtaagccccagtgtccccccagcccccatgcttatgtgaacatgcgctgtgtgctgcttgctttggaaactgggcctgggtccaggcctagggtgagctcactgtccgtacaaacacaagatcagggctgagggtaaggaaaagaagagactaggaaagctgggcccaaaactggagactgtttgtctttcctggagatgcagaactgggcccgtggagcagcagtgtcagcatcagggcggaagccttaaagcagcagcgggtgtgcccaggcacccagatgattcctatggcaccagccaggaaaaatggcagctcttaaaggagaaaatgtttgagccca

SEQ ID NO: 137360 - DNA, 1817 bp, Homo sapiens
  Payload ID: 6892
  Gene Symbol: GBA
  Gene Name: glucosidase, beta, acid
  Uniprot ID: P04062
  ENST ID: ENST00000428024
  CDS Start-End: 341-1690
ctcttttccaatccaggtcccgccccgactccccagggctgcttttctcgcggctgcgggtggtcgggctgcatcctgccttcagagtcttactgcgcggggccccagtctccagtcccgcccaggcgcctttgcaggctgcggtgggatttcgttttgcctccggttggggctgctgtttctcttcgccgacggtgcccgcccctgcatccctaaaagcttcggctacagctcggtggtgtgtgtctgcaatgccacatactgtgactcctttgaccccccgacctttcctgcccttggtaccttcagccgctatgagagtacacgcagtgggcgacggatggagctgagtatggggcccatccaggctaatcacacgggcacaggcctgctactgaccctgcagccagaacagaagttccagaaagtgaagggatttggaggggccatgacagatgctgctgctctcaacatccttgccctgtcaccccctgcccaaaatttgctacttaaatcgtacttctctgaagaaggaatcggatataacatcatccgggtacccatggccagctgtgacttctccatccgcacctacacctatgcagacacccctgatgatttccagttgcacaacttcagcctcccagaggaagataccaagctcaagatacccctgattcaccgagccctgcagttggcccagcgtcccgtttcactccttgccagcccctggacatcacccacttggctcaagaccaatggagcggtgaatgggaaggggtcactcaagggacagcccggagacatctaccaccagacctgggccagatactttgtgaagttcctggatgcctatgctgagcacaagttacagttctgggcagtgacagctgaaaatgagccttctgctgggctgttgagtggataccccttccagtgcctgggcttcacccctgaacatcagcgagacttcattgcccgtgacctaggtcctaccctcgccaacagtactcaccacaatgtccgcctactcatgctggatgaccaacgcttgctgctgccccactgggcaaaggtggtactgacagacccagaagcagctaaatatgttcatggcattgctgtacattggtacctggactttctggctccagccaaagccaccctaggggagacacaccgcctgttccccaacaccatgctctttgcctcagaggcctgtgtgggctccaagttctgggagcagagtgtgcggctaggctcctgggatcgagggatgcagtacagccacagcatcatcacgaacctcctgtaccatgtggtcggctggaccgactggaaccttgccctgaaccccgaaggaggacccaattgggtgcgtaactttgtcgacagtcccatcattgtagacatcaccaaggacacgttttacaaacagcccatgttctaccaccttggccacttcagcaagttcattcctgagggctcccagagagtggggctggttgccagtcagaagaacgacctggacgcagtggcactgatgcatcccgatggctctgctgttgtggtcgtgctaaaccgctcctctaaggatgtgcctcttaccatcaaggatcctgctgtgggcttcctggagacaatctcacctggctactccattcacacctacctgtggcgtcgccagtgatggagcagatactcaaggaggcactgggctcagcctgggcattaaagggacagagtcagctcacacgctgtctgtgactaaagagggcacagcagggccagtgtgagcttacagcgacgtaagccca

SEQ ID NO: 137361 - DNA, 2063 bp, Homo sapiens
  Payload ID: 6892
  Gene Symbol: GBA
  Gene Name: glucosidase, beta, acid
  Uniprot ID: P04062
  ENST ID: ENST00000427500
  CDS Start-End: 164-1627
acatgacccatccacatcgggaagccggaattacttgcagggctaacctagtgcctatagctaaggcaggtacctgcatccttgtttttgtttagtggatcctctatccttcagagactctggaacccctgtggtcttctcttcatctaatgaccctgaggggatggagttttcaagtccttccagagaggaatgtcccaagcctttgagtagggtaagcatcatggctggcagcctcacaggattgcttctacttcaggcagtgtcgtgggcatcaggtgcccgcccctgcatccctaaaagcttcggctacagctcggtggtgtgtgtctgcaatgccacatactgtgactcctttgaccccccgacctttcctgcccttggtaccttcagccgctatgagagtacacgcagtgggcgacggatggagctgagtatggggcccatccaggctaatcacacgggcacaggaatcggatataacatcatccgggtacccatggccagctgtgacttctccatccgcacctacacctatgcagacacccctgatgatttccagttgcacaacttcagcctcccagaggaagataccaagctcaagatacccctgattcaccgagccctgcagttggcccagcgtcccgtttcactccttgccagcccctggacatcacccacttggctcaagaccaatggagcggtgaatgggaaggggtcactcaagggacagcccggagacatctaccaccagacctgggccagatactttgtgaagttcctggatgcctatgctgagcacaagttacagttctgggcagtgacagctgaaaatgagccttctgctgggctgttgagtggataccccttccagtgcctgggcttcacccctgaacatcagcgagacttcattgcccgtgacctaggtcctaccctcgccaacagtactcaccacaatgtccgcctactcatgctggatgaccaacgcttgctgctgccccactgggcaaaggtggtactgacagacccagaagcagctaaatatgttcatggcattgctgtacattggtacctggactttctggctccagccaaagccaccctaggggagacacaccgcctgttccccaacaccatgctctttgcctcagaggcctgtgtgggctccaagttctgggagcagagtgtgcggctaggctcctgggatcgagggatgcagtacagccacagcatcatcacgaacctcctgtaccatgtggtcggctggaccgactggaaccttgccctgaaccccgaaggaggacccaattgggtgcgtaactttgtcgacagtcccatcattgtagacatcaccaaggacacgttttacaaacagcccatgttctaccaccttggccacttcagcaagttcattcctgagggctcccagagagtggggctggttgccagtcagaagaacgacctggacgcagtggcactgatgcatcccgatggctctgctgttgtggtcgtgctaaaccgctcctctaaggatgtgcctcttaccatcaaggatcctgctgtgggcttcctggagacaatctcacctggctactccattcacacctacctgtggcgtcgccagtgatggagcagatactcaaggaggcactgggctcagcctgggcattaaagggacagagtcagctcacacgctgtctgtgactaaagagggcacagcagggccagtgtgagcttacagcgacgtaagcccaggggcaatggtttgggtgactcactttcccctctaggtggtgccaggggctggaggcccctagaaaaagatcagtaagccccagtgtccccccagcccccatgcttatgtgaacatgcgctgtgtgctgcttgctttggaaactgggcctgggtccaggcctagggtgagctcactgtccgtacaaacacaagatcagggctgagggtaaggaaaagaagagactaggaaagctgggcccaaaactggagactgtttgtctttcctggagatgcagaactgggcccgtggagcagcagtgtcagcatca

SEQ ID NO: 137362 - DNA, 2387 bp, Homo sapiens
  Payload ID: 6892
  Gene Symbol: GBA
  Gene Name: glucosidase, beta, acid
  ENST ID: ENST00000574670
  CDS Start-End: 234-1844
tccccagggctgcttttctcgcggctgcgggtggtcgggctgcatcctgccttcagagtcttactgcgcggggccccagtctccagtcccgcccaggcgcctttgcaggctgcggtgggatttcgttttgcctccggttggggctgctgtttctcttcgccgacgtggatcctctatccttcagagactctggaacccctgtggtcttctcttcatctaatgaccctgaggggatggagttttcaagtccttccagagaggaatgtcccaagcctttgagtagggtaagcatcatggctggcagcctcacaggattgcttctacttcaggcagtgtcgtgggcatcaggtgcccgcccctgcatccctaaaagcttcggctacagctcggtggtgtgtgtctgcaatgccacatactgtgactcctttgaccccccgacctttcctgcccttggtaccttcagccgctatgagagtacacgcagtgggcgacggatggagctgagtatggggcccatccaggctaatcacacgggcacaggcctgctactgaccctgcagccagaacagaagttccagaaagtgaagggatttggaggggccatgacagatgctgctgctctcaacatccttgccctgtcaccccctgcccaaaatttgctacttaaatcgtacttctctgaagaaggaatcggatataacatcatccgggtacccatggccagctgtgacttctccatccgcacctacacctatgcagacacccctgatgatttccagttgcacaacttcagcctcccagaggaagataccaagctcaagatacccctgattcaccgagccctgcagttggcccagcgtcccgtttcactccttgccagcccctggacatcacccacttggctcaagaccaatggagcggtgaatgggaaggggtcactcaagggacagcccggagacatctaccaccagacctgggccagatactttgtgaagttcctggatgcctatgctgagcacaagttacagttctgggcagtgacagctgaaaatgagccttctgctgggctgttgagtggataccccttccagtgcctgggcttcacccctgaacatcagcgagacttcattgcccgtgacctaggtcctaccctcgccaacagtactcaccacaatgtccgcctactcatgctggatgaccaacgcttgctgctgccccactgggcaaaggtggtactgacagacccagaagcagctaaatatgttcatggcattgctgtacattggtacctggactttctggctccagccaaagccaccctaggggagacacaccgcctgttccccaacaccatgctctttgcctcagaggcctgtgtgggctccaagttctgggagcagagtgtgcggctaggctcctgggatcgagggatgcagtacagccacagcatcatcacgaacctcctgtaccatgtggtcggctggaccgactggaaccttgccctgaaccccgaaggaggacccaattgggtgcgtaactttgtcgacagtcccatcattgtagacatcaccaaggacacgttttacaaacagcccatgttctaccaccttggccacttcagcaagttcattcctgagggctcccagagagtggggctggttgccagtcagaagaacgacctggacgcagtggcactgatgcatcccgatggctctgctgttgtggtcgtgctaaaccgctcctctaaggatgtgcctcttaccatcaaggatcctgctgtgggcttcctggagacaatctcacctggctactccattcacacctacctgtggtgtcgccagtgatggagcagatactcaaggaggcactgggctcagcctgggcattaaagggacagagtcagctcacacgctgtctgtgactaaagagggcacagcagggccagtgtgagcttacagcgacgtaagcccaggggcaatggtttgggtgactcactttcccctctaggtggtgccaggggctggaggcccctagaaaaagatcagtaagccccagtgtccccccagcccccatgcttatgtgaacatgcgctgtgtgctgcttgctttggaaactgggcctgggtccaggcctagggtgagctcactgtccgtacaaacacaagatcagggctgagggtaaggaaaagaagagactaggaaagctgggcccaaaactggagactgtttgtctttcctggagatgcagaactgggcccgtggagcagcagtgtcagcatcagggcggaagccttaaagcagcagcgggtgtgcccaggcacccagatgattcctatggcaccagccaggaaaaatggcagctcttaaaggagaaaatgtttgagccca

SEQ ID NO: 137363 - DNA, 2276 bp, Homo sapiens
  Payload ID: 6892
  Gene Symbol: GBA
  Gene Name: glucosidase, beta, acid
  ENST ID: ENST00000572338
  CDS Start-End: 123-1733
gctaacctagtgcctatagctaaggcaggtacctgcatccttgtttttgtttagtggatcctctatccttcagagactctggaacccctgtggtcttctcttcatctaatgaccctgaggggatggagttttcaagtccttccagagaggaatgtcccaagcctttgagtagggtaagcatcatggctggcagcctcacaggattgcttctacttcaggcagtgtcgtgggcatcaggtgcccgcccctgcatccctaaaagcttcggctacagctcggtggtgtgtgtctgcaatgccacatactgtgactcctttgaccccccgacctttcctgcccttggtaccttcagccgctatgagagtacacgcagtgggcgacggatggagctgagtatggggcccatccaggctaatcacacgggcacaggcctgctactgaccctgcagccagaacagaagttccagaaagtgaagggatttggaggggccatgacagatgctgctgctctcaacatccttgccctgtcaccccctgcccaaaatttgctacttaaatcgtacttctctgaagaaggaatcggatataacatcatccgggtacccatggccagctgtgacttctccatccgcacctacacctatgcagacacccctgatgatttccagttgcacaacttcagcctcccagaggaagataccaagctcaagatacccctgattcaccgagccctgcagttggcccagcgtcccgtttcactccttgccagcccctggacatcacccacttggctcaagaccaatggagcggtgaatgggaaggggtcactcaagggacagcccggagacatctaccaccagacctgggccagatactttgtgaagttcctggatgcctatgctgagcacaagttacagttctgggcagtgacagctgaaaatgagccttctgctgggctgttgagtggataccccttccagtgcctgggcttcacccctgaacatcagcgagacttcattgcccgtgacctaggtcctaccctcgccaacagtactcaccacaatgtccgcctactcatgctggatgaccaacgcttgctgctgccccactgggcaaaggtggtactgacagacccagaagcagctaaatatgttcatggcattgctgtacattggtacctggactttctggctccagccaaagccaccctaggggagacacaccgcctgttccccaacaccatgctctttgcctcagaggcctgtgtgggctccaagttctgggagcagagtgtgcggctaggctcctgggatcgagggatgcagtacagccacagcatcatcacgaacctcctgtaccatgtggtcggctggaccgactggaaccttgccctgaaccccgaaggaggacccaattgggtgcgtaactttgtcgacagtcccatcattgtagacatcaccaaggacacgttttacaaacagcccatgttctaccaccttggccacttcagcaagttcattcctgagggctcccagagagtggggctggttgccagtcagaagaacgacctggacgcagtggcactgatgcatcccgatggctctgctgttgtggtcgtgctaaaccgctcctctaaggatgtgcctcttaccatcaaggatcctgctgtgggcttcctggagacaatctcacctggctactccattcacacctacctgtggtgtcgccagtgatggagcagatactcaaggaggcactgggctcagcctgggcattaaagggacagagtcagctcacacgctgtctgtgactaaagagggcacagcagggccagtgtgagcttacagcgacgtaagcccaggggcaatggtttgggtgactcactttcccctctaggtggtgccaggggctggaggcccctagaaaaagatcagtaagccccagtgtccccccagcccccatgcttatgtgaacatgcgctgtgtgctgcttgctttggaaactgggcctgggtccaggcctagggtgagctcactgtccgtacaaacacaagatcagggctgagggtaaggaaaagaagagactaggaaagctgggcccaaaactggagactgtttgtctttcctggagatgcagaactgggcccgtggagcagcagtgtcagcatcagggcggaagccttaaagcagcagcgggtgtgcccaggcacccagatgattcctatggcaccagccaggaaaaatggcagctcttaaaggagaaaatgtttgagccca

SEQ ID NO: 137364 - DNA, 2174 bp, Homo sapiens
  Payload ID: 6892
  Gene Symbol: GBA
  Gene Name: glucosidase, beta, acid
  ENST ID: ENST00000613861
  CDS Start-End: 164-1627
acatgacccatccacatcgggaagccggaattacttgcagggctaacctagtgcctatagctaaggcaggtacctgcatccttgtttttgtttagtggatcctctatccttcagagactctggaacccctgtggtcttctcttcatctaatgaccctgaggggatggagttttcaagtccttccagagaggaatgtcccaagcctttgagtagggtaagcatcatggctggcagcctcacaggattgcttctacttcaggcagtgtcgtgggcatcaggtgcccgcccctgcatccctaaaagcttcggctacagctcggtggtgtgtgtctgcaatgccacatactgtgactcctttgaccccccgacctttcctgcccttggtaccttcagccgctatgagagtacacgcagtgggcgacggatggagctgagtatggggcccatccaggctaatcacacgggcacaggaatcggatataacatcatccgggtacccatggccagctgtgacttctccatccgcacctacacctatgcagacacccctgatgatttccagttgcacaacttcagcctcccagaggaagataccaagctcaagatacccctgattcaccgagccctgcagttggcccagcgtcccgtttcactccttgccagcccctggacatcacccacttggctcaagaccaatggagcggtgaatgggaaggggtcactcaagggacagcccggagacatctaccaccagacctgggccagatactttgtgaagttcctggatgcctatgctgagcacaagttacagttctgggcagtgacagctgaaaatgagccttctgctgggctgttgagtggataccccttccagtgcctgggcttcacccctgaacatcagcgagacttcattgcccgtgacctaggtcctaccctcgccaacagtactcaccacaatgtccgcctactcatgctggatgaccaacgcttgctgctgccccactgggcaaaggtggtactgacagacccagaagcagctaaatatgttcatggcattgctgtacattggtacctggactttctggctccagccaaagccaccctaggggagacacaccgcctgttccccaacaccatgctctttgcctcagaggcctgtgtgggctccaagttctgggagcagagtgtgcggctaggctcctgggatcgagggatgcagtacagccacagcatcatcacgaacctcctgtaccatgtggtcggctggaccgactggaaccttgccctgaaccccgaaggaggacccaattgggtgcgtaactttgtcgacagtcccatcattgtagacatcaccaaggacacgttttacaaacagcccatgttctaccaccttggccacttcagcaagttcattcctgagggctcccagagagtggggctggttgccagtcagaagaacgacctggacgcagtggcactgatgcatcccgatggctctgctgttgtggtcgtgctaaaccgctcctctaaggatgtgcctcttaccatcaaggatcctgctgtgggcttcctggagacaatctcacctggctactccattcacacctacctgtggtgtcgccagtgatggagcagatactcaaggaggcactgggctcagcctgggcattaaagggacagagtcagctcacacgctgtctgtgactaaagagggcacagcagggccagtgtgagcttacagcgacgtaagcccaggggcaatggtttgggtgactcactttcccctctaggtggtgccaggggctggaggcccctagaaaaagatcagtaagccccagtgtccccccagcccccatgcttatgtgaacatgcgctgtgtgctgcttgctttggaaactgggcctgggtccaggcctagggtgagctcactgtccgtacaaacacaagatcagggctgagggtaaggaaaagaagagactaggaaagctgggcccaaaactggagactgtttgtctttcctggagatgcagaactgggcccgtggagcagcagtgtcagcatcagggcggaagccttaaagcagcagcgggtgtgcccaggcacccagatgattcctatggcaccagccaggaaaaatggcagctcttaaaggagaaaatgtttgagcccagtca

SEQ ID NO: 137365 - DNA, 2400 bp, Homo sapiens
  Payload ID: 6892
  Gene Symbol: GBA
  Gene Name: glucosidase, beta, acid
  ENST ID: ENST00000618489
  CDS Start-End: 504-1853
ctctctctctctcgctcgctctctcgctctctcgctctctctcgctcgctctctcgctctcgctctctctctctctccggctcgccagcgacacttgttcgttcaacttgaccaatgagacttgaggaagggctctgagtcccgcctctgcatgagtgaccgtctcttttccaatccaggtcccgccccgactccccagggctgcttttctcgcggctgcgggtggtcgggctgcatcctgccttcagagtcttactgcgcggggccccagtctccagtcccgcccaggcgcctttgcaggctgcggtgggatttcgttttgcctccggttggggctgctgtttctcttcgccgacggtgcccgcccctgcatccctaaaagcttcggctacagctcggtggtgtgtgtctgcaatgccacatactgtgactcctttgaccccccgacctttcctgcccttggtaccttcagccgctatgagagtacacgcagtgggcgacggatggagctgagtatggggcccatccaggctaatcacacgggcacaggcctgctactgaccctgcagccagaacagaagttccagaaagtgaagggatttggaggggccatgacagatgctgctgctctcaacatccttgccctgtcaccccctgcccaaaatttgctacttaaatcgtacttctctgaagaaggaatcggatataacatcatccgggtacccatggccagctgtgacttctccatccgcacctacacctatgcagacacccctgatgatttccagttgcacaacttcagcctcccagaggaagataccaagctcaagatacccctgattcaccgagccctgcagttggcccagcgtcccgtttcactccttgccagcccctggacatcacccacttggctcaagaccaatggagcggtgaatgggaaggggtcactcaagggacagcccggagacatctaccaccagacctgggccagatactttgtgaagttcctggatgcctatgctgagcacaagttacagttctgggcagtgacagctgaaaatgagccttctgctgggctgttgagtggataccccttccagtgcctgggcttcacccctgaacatcagcgagacttcattgcccgtgacctaggtcctaccctcgccaacagtactcaccacaatgtccgcctactcatgctggatgaccaacgcttgctgctgccccactgggcaaaggtggtactgacagacccagaagcagctaaatatgttcatggcattgctgtacattggtacctggactttctggctccagccaaagccaccctaggggagacacaccgcctgttccccaacaccatgctctttgcctcagaggcctgtgtgggctccaagttctgggagcagagtgtgcggctaggctcctgggatcgagggatgcagtacagccacagcatcatcacgaacctcctgtaccatgtggtcggctggaccgactggaaccttgccctgaaccccgaaggaggacccaattgggtgcgtaactttgtcgacagtcccatcattgtagacatcaccaaggacacgttttacaaacagcccatgttctaccaccttggccacttcagcaagttcattcctgagggctcccagagagtggggctggttgccagtcagaagaacgacctggacgcagtggcactgatgcatcccgatggctctgctgttgtggtcgtgctaaaccgctcctctaaggatgtgcctcttaccatcaaggatcctgctgtgggcttcctggagacaatctcacctggctactccattcacacctacctgtggtgtcgccagtgatggagcagatactcaaggaggcactgggctcagcctgggcattaaagggacagagtcagctcacacgctgtctgtgactaaagagggcacagcagggccagtgtgagcttacagcgacgtaagcccaggggcaatggtttgggtgactcactttcccctctaggtggtgccaggggctggaggcccctagaaaaagatcagtaagccccagtgtccccccagcccccatgcttatgtgaacatgcgctgtgtgctgcttgctttggaaactgggcctgggtccaggcctagggtgagctcactgtccgtacaaacacaagatcagggctgagggtaaggaaaagaagagactaggaaagctgggcccaaaactggagactgtttgtctttcctggagatgcagaactgggcccgtggagcagcagtgtcagcatcagggcggaagccttaaagcagcagcgggtgtgcccaggcacccagatgattcctatggcaccagccaggaaaaatggcagctcttaaaggagaaaatgtttgagcccagtca

SEQ ID NO: 137366 - DNA, 1232 bp, Homo sapiens
  Payload ID: 6893
  Gene Symbol: GBA3
  Gene Name: glucosidase, beta, acid 3 (gene/pseudogene)
  ENST ID: ENST00000503442
  CDS Start-End: 92-580
cattttctgtttgcacaattgcctggctcctctggccaaagggtgctctgcttctggcagctgaagatcccagtagacagcttcttaaaccatggctttccctgcaggatttggatgggcggcagccactgcagcttatcaagtagaaggaggctgggatgcagatggaaaaggcccttgtgtctgggacacatttactcatcagggaggagagagagttttcaagaaccagactggcgatgtagcttgtggcagctacactctgtgggaggaagatttgaaatgtatcaaacagcttggattgactcattaccgcttctctctttcctggtcacgtctgttacctgatgggacgacaggtttcatcaaccagaaagctatccaacttgataaagtcaatcttcaagtatattgtgcatggtctcttctggataactttgagtggaaccagggatacagcagccggtttggtctcttccacgttgattttgaagacccagctagaccccgagtcccttacacatcggccaaggaataagccaagatcatccgaaacaatggccttgaagcacatctgtaggcaagatggctgagaaatacaggagaggcgtctgcttttggaaaggaaatctgctttggtgatgatctttcaggcaatctcaacttacttctttaatcaacatttaatatcaatggatctgtgattaaatgtctgaatatgtaatgcctcgtgaagtatttaataatggcctttatttgtatttggatcaatgaggtttttaaaaaaaatggaagagaaaaccactaaccttgatttttgtattgcaaaatcagatagacctggaaacataaatttaaatccttagacatttttctagaaaaaaatgcaaagtttataaagatgatacaaccatgatttgcaactgtaacaggagaccatttattataagcgtacctgtttgtgaacttaattattctgattccataagctgtttttgcttaggtgatccactgccatgtgatccataatttttctacataaaaaatcaaagttaaaagtcacattatacagttatgcattcatttcaacaaaatagtgaattgataatctacttgttaatatattcggcccatattttgtgtgtttggacaagtacatctcccttttgcctaatgaacttttgaaaaataataaaataatagaataaattagactttgaatggcagaaaaa

SEQ ID NO: 137367 - DNA, 2018 bp, Homo sapiens
  Payload ID: 6893
  Gene Symbol: GBA3
  Gene Name: glucosidase, beta, acid 3 (gene/pseudogene)
  ENST ID: ENST00000511446
  CDS Start-End: 518-1414
aatgtccctttacacttgcttggtggagataactcttcccttccatttagaagaaaacgtaggaggctgggatgcagatggaaaaggcccttgtgtctgggacacatttactcatcagggaggagagagagttttcaagaaccagactggcgatgtagcttgtggcagctacactctgtgggaggaagatttgaaatgtatcaaacagcttggattgactcattaccgcttctctctttcctggtcacgtctgttacctgatgggacgacaggtttcatcaaccagaaaggaattgattattacaacaagatcatcgatgatttgttaaaaaatggggttactcccattgtgaccctctaccactttgatttgcctcagactttagaagaccaaggaggttggttgtcagaggcaatcattgaatcctttgacaaatatgctcagttttgcttcagtacctttggggatcgtgtcaagcagtggatcaccataaatgaagctaatgttctttctgtgatgtcatatgacttaggtatgtttcctccgggtatccctcactttgggactggaggttatcaggcagctcataatttgattaaggctcatgccagatcctggcacagctatgattccttatttcgaaaaaagcagaaaggtatggtgtctctatcactttttgcggtctggttggaaccagcagatcccaactcagtgtctgaccaggaagctgctaaaagagccatcactttccatctggatttatttgctaaacccatattcatcgatggtgattatcctgaagttgtcaagtctcagattgcctccatgagtcaaaagcaaggctatccatcatcgaggcttccagaattcactgaagaagagaagaaaatgatcaaaggcactgctgatttttttgctgtgcaatattatacaactcgcttaatcaagtaccaggagaacaagaaaggagaactaggtattctccaggatgcggaaattgaattttttccagatccatcttggaaaaatgtggattggatctacgtggtaccatggggagtatgtaaactactgaaatatattaaggatacatataataaccctgtaatttacatcactgagaatgggtttccccagagtgacccagcgcctcttgatgacactcaacgctgggagtatttcagacaaacatttcaggaactgttcaaagctatccaacttgataaagtcaatcttcaagtatattgtgcatggtctcttctggataactttgagtggaaccagggatacagcagccggtttggtctcttccacgttgattttgaagacccagctagaccccgagtcccttacacatcggccaaggaataagccaagatcatccgaaacaatggccttgaagcacatctgtaggcaagatggctgagaaatacaggagaggcgtctgcttttggaaaggaaatctgctttggtgatgatctttcaggcaatctcaacttacttctttaatcaacatttaatatcaatggatctgtgattaaatgtctgaatatgtaatgcctcgtgaagtatttaataatggcctttatttgtatttggatcaatgaggtttttaaaaaaaatggaagagaaaaccactaaccttgatttttgtattgcaaaatcagatagacctggaaacataaatttaaatccttagacatttttctagaaaaaaatgcaaagtttataaagatgatacaaccatgatttgcaactgtaacaggagaccatttattataagcgtacctgtttgtgaacttaattattctgattccataagctgtttttgcttaggtgatccactgccatgtgatccataatttttctacataaaaaatcaaagttaaaagtcacattatacagttatgcattcatttcaacaaaatagtgaattgataatctacttgttaatatattcggcccatattttgtgtgtttggacaagtacatctcccttttgcctaatgaacttttg

SEQ ID NO: 137368 - DNA, 2164 bp, Homo sapiens
  Payload ID: 6893
  Gene Symbol: GBA3
  Gene Name: glucosidase, beta, acid 3 (gene/pseudogene)
  ENST ID: ENST00000508166
  CDS Start-End: 103-1512
gggtgagagctcattttctgtttgcacaattgcctggctcctctggccaaagggtgctctgcttctggcagctgaagatcccagtagacagcttcttaaaccatggctttccctgcaggatttggatgggcggcagccactgcagcttatcaagtagaaggaggctgggatgcagatggaaaaggcccttgtgtctgggacacatttactcatcagggaggagagagagttttcaagaaccagactggcgatgtagcttgtggcagctacactctgtgggaggaagatttgaaatgtatcaaacagcttggattgactcattaccgcttctctctttcctggtcacgtctgttacctgatgggacgacaggtttcatcaaccagaaaggaattgattattacaacaagatcatcgatgatttgttaaaaaatggggttactcccattgtgaccctctaccactttgatttgcctcagactttagaagaccaaggaggttggttgtcagaggcaatcattgaatcctttgacaaatatgctcagttttgcttcagtacctttggggatcgtgtcaagcagtggatcaccataaatgaagctaatgttctttctgtgatgtcatatgacttaggtatgtttcctccgggtatccctcactttgggactggaggttatcaggcagctcataatttgattaaggctcatgccagatcctggcacagctatgattccttatttcgaaaaaagcagaaaggtatggtgtctctatcactttttgcggtctggttggaaccagcagatcccaactcagtgtctgaccaggaagctgctaaaagagccatcactttccatctggatttatttgctaaacccatattcatcgatggtgattatcctgaagttgtcaagtctcagattgcctccatgagtcaaaagcaaggctatccatcatcgaggcttccagaattcactgaagaagagaagaaaatgatcaaaggcactgctgatttttttgctgtgcaatattatacaactcgcttaatcaagtaccaggagaacaagaaaggagaactaggtattctccaggatgcggaaattgaattttttccagatccatcttggaaaaatgtggattggatctacgtggtaccatggggagtatgtaaactactgaaatatattaaggatacatataataaccctgtaatttacatcactgagaatgggtttccccagagtgacccagcgcctcttgatgacactcaacgctgggagtatttcagacaaacatttcaggaactgttcaaagctatccaacttgataaagtcaatcttcaagtatattgtgcatggtctcttctggataactttgagtggaaccagggatacagcagccggtttggtctcttccacgttgattttgaagacccagctagaccccgagtcccttacacatcggccaaggaataagccaagatcatccgaaacaatggccttgaagcacatctgtaggcaagatggctgagaaatacaggagaggcgtctgcttttggaaaggaaatctgctttggtgatgatctttcaggcaatctcaacttacttctttaatcaacatttaatatcaatggatctgtgattaaatgtctgaatatgtaatgcctcgtgaagtatttaataatggcctttatttgtatttggatcaatgaggtttttaaaaaaaatggaagagaaaaccactaaccttgatttttgtattgcaaaatcagatagacctggaaacataaatttaaatccttagacatttttctagaaaaaaatgcaaagtttataaagatgatacaaccatgatttgcaactgtaacaggagaccatttattataagcgtacctgtttgtgaacttaattattctgattccataagctgtttttgcttaggtgatccactgccatgtgatccataatttttctacataaaaaatcaaagttaaaagtcacattatacagttatgcattcatttcaacaaaatagtgaattgataatctacttgttaatatattcggcccatattttgtgtgtttggacaagtacatctcccttttgcctaatgaacttttgaaaaataataaaataatagaataaattagactttgaatggcagaaaaa

SEQ ID NO: 137369 - DNA, 2154 bp, Homo sapiens
  Payload ID: 6893
  Gene Symbol: GBA3
  Gene Name: glucosidase, beta, acid 3 (gene/pseudogene)
  ENST ID: ENST00000610628
  CDS Start-End: 103-1509
gggtgagagctcattttctgtttgcacaattgcctggctcctctggccaaagggtgctctgcttctggcagctgaagatcccagtagacagcttcttaaaccatggctttccctgcaggatttggatgggcggcagccactgcagcttatcaagtagaaggaggctgggatgcagatggaaaaggcccttgtgtctgggacacatttactcatcagggaggagagagagttttcaagaaccagactggcgatgtagcttgtggcagctacactctgtgggaggaagatttgaaatgtatcaaacagcttggattgactcattaccgcttctctctttcctggtcacgtctgttacctgatgggacgacaggtttcatcaaccagaaaggaattgattattacaacaagatcatcgatgatttgttaaaaaatggggttactcccattgtgaccctctaccactttgatttgcctcagactttagaagaccaaggaggttggttgtcagaggcaatcattgaatcctttgacaaatatgctcagttttgcttcagtacctttggggatcgtgtcaagcagtggatcaccataaatgaagctaatgttctttctgtgatgtcatatgacttaggtatgtttcctccgggtatccctcactttgggactggaggttatcaggcagctcataatttgattaaggctcatgccagatcctggcacagctatgattccttatttcgaaaaaagcagaaaggtatggtgtctctatcactttttgcggtctggttggaaccagcagatcccaactcagtgtctgaccaggaagctgctaaaagagccatcactttccatctggatttatttgctaaacccatattcatcgatggtgattatcctgaagttgtcaagtctcagattgcctccatgagtcaaaagcaaggctatccatcatcgaggcttccagaattcactgaagaagagaagaaaatgatcaaaggcactgctgatttttttgctgtgcaatattatacaactcgcttaatcaagtaccaggagaacaagaaaggagaactaggtattctccaggatgcggaaattgaattttttccagatccatcttggaaaaatgtggattggatctacgtggtaccatggggagtatgtaaactactgaaatatattaaggatacatataataaccctgtaatttacatcactgagaatgggtttccccagagtgacccagcgcctcttgatgacactcaacgctgggagtatttcagacaaacatttcaggaactgttcaaagctatccaacttgataaagtcaatcttcaagtatattgtgcatggtctcttctggataactttgagtggaaccagggatacagcagccggtttggtctcttccacgttgattttgaagacccagctagaccccgagtcccttacacatcggccaaggaagccaagatcatccgaaacaatggccttgaagcacatctgtaggcaagatggctgagaaatacaggagaggcgtctgcttttggaaaggaaatctgctttggtgatgatctttcaggcaatctcaacttacttctttaatcaacatttaatatcaatggatctgtgattaaatgtctgaatatgtaatgcctcgtgaagtatttaataatggcctttatttgtatttggatcaatgaggtttttaaaaaaaatggaagagaaaaccactaaccttgatttttgtattgcaaaatcagatagacctggaaacataaatttaaatccttagacatttttctagaaaaaaatgcaaagtttataaagatgatacaaccatgatttgcaactgtaacaggagaccatttattataagcgtacctgtttgtgaacttaattattctgattccataagctgtttttgcttaggtgatccactgccatgtgatccataatttttctacataaaaaatcaaagttaaaagtcacattatacagttatgcattcatttcaacaaaatagtgaattgataatctacttgttaatatattcggcccatattttgtgtgtttggacaagtacatctcccttttgcctaatgaacttttgaaaaataataaaataatagaataaattagactttgaatggc

SEQ ID NO: 137370 - DNA, 1233 bp, Homo sapiens
  Payload ID: 6893
  Gene Symbol: GBA3
  Gene Name: glucosidase, beta, acid 3 (gene/pseudogene)
  ENST ID: ENST00000613293
  CDS Start-End: 103-588
gggtgagagctcattttctgtttgcacaattgcctggctcctctggccaaagggtgctctgcttctggcagctgaagatcccagtagacagcttcttaaaccatggctttccctgcaggatttggatgggcggcagccactgcagcttatcaagtagaaggaggctgggatgcagatggaaaaggcccttgtgtctgggacacatttactcatcagggaggagagagagttttcaagaaccagactggcgatgtagcttgtggcagctacactctgtgggaggaagatttgaaatgtatcaaacagcttggattgactcattaccgcttctctctttcctggtcacgtctgttacctgatgggacgacaggtttcatcaaccagaaagctatccaacttgataaagtcaatcttcaagtatattgtgcatggtctcttctggataactttgagtggaaccagggatacagcagccggtttggtctcttccacgttgattttgaagacccagctagaccccgagtcccttacacatcggccaaggaagccaagatcatccgaaacaatggccttgaagcacatctgtaggcaagatggctgagaaatacaggagaggcgtctgcttttggaaaggaaatctgctttggtgatgatctttcaggcaatctcaacttacttctttaatcaacatttaatatcaatggatctgtgattaaatgtctgaatatgtaatgcctcgtgaagtatttaataatggcctttatttgtatttggatcaatgaggtttttaaaaaaaatggaagagaaaaccactaaccttgatttttgtattgcaaaatcagatagacctggaaacataaatttaaatccttagacatttttctagaaaaaaatgcaaagtttataaagatgatacaaccatgatttgcaactgtaacaggagaccatttattataagcgtacctgtttgtgaacttaattattctgattccataagctgtttttgcttaggtgatccactgccatgtgatccataatttttctacataaaaaatcaaagttaaaagtcacattatacagttatgcattcatttcaacaaaatagtgaattgataatctacttgttaatatattcggcccatattttgtgtgtttggacaagtacatctcccttttgcctaatgaacttttgaaaaataataaaataatagaataaattagactttgaatggc

SEQ ID NO: 137371 - DNA, 1937 bp, Homo sapiens
  Payload ID: 6894
  Gene Symbol: GXYLT1
  Gene Name: glucoside xylosyltransferase 1
  Uniprot ID: Q4G148
  ENST ID: ENST00000280876
  CDS Start-End: 67-1296
tccctccgctccagttcgtcggggcgggcgcggcggcggcggcgaaggaggagcgcggccggggcgatgcggcgctacctgcgcgtcgtggtgctgtgtgtggcctgcggcttctgctcgctcctttacgctttcagccagctcgccgtgtccctggaagaaggaacgggcggcggtggcgggaagccgcaggccgcggtggcttcctggctcgcgggcggcggacgcggcgccgtgagaggcgccggcgtcgcgggccccgcagcgcatcccggcgtgtcggacaggtacagtctgaaaatacagcctgttgagaaaatgcatctagctgtagttgcctgtggtgaaagactggaagaaactatgaccatgttgaagtcagctatcattttcagcatcaaacctcttcaattccatatttttgctgaagatcagctacatcatagctttaaaggcagacttgacaactggtcatttctacaaacatttaattatacgttataccccataacctttccaagtgagaatgcagcagagtggaaaaaactctttaaaccatgtgcttcgcagagattgttcttgccgttaatcctgaaagaagttgactcactattgtatgtcgacactgatatcctttttttacgaccagttgatgatatttggtctttactaaagaaatttaattccacacaaattgctgcaatggcaccagaacatgaggaacctcgaataggatggtataatcgctttgctaggcatccatattatggaaaaactggagtaaactctggagttatgttgatgaacatgactcgaatgagaaggaagtatttcaagaatgatatgacaactgtacgactacaatggggagatatacttatgccattgcttaaaaaatacaaactaaacatcacatggggtgatcaagatctattgaatatcgtgttttttcataatccagaaagcctttttgtttttccgtgtcaatggaattatcgaccagatcattgtatatatggaagcaattgccaagaagcagaagaaggaggaatctttattcttcatgggaacagaggtgtttaccatgacgataagcaaccagcatttagagctgtttatgaagcactgagaaattgttcttttgaagatgacaacatccgttccttattaaaacctttagaactggaactacaaaaaacagtgcatacatactgtggaaaaatttacaaaatatttatcaaacaactagcaaaaagtgtaagagatcgttatgccagatcaccaaaggaaaagtgattcttggtgactgcttaatcaaatggatgaaaacaaagaatcagaagataagtgtgaaggaatcgtcttggatgaagtattcaggaaggaattactcatctccagaataattttttttttcctaaagaagttaagtaagcagtattttcaggtaatgaagaataagttaaaatcttgggcctcaacattgaacattttttatctctgatgttttgtaatgttacttgctatcattccagtattgatgaaaatactattgaatgggtttaacctgcagacttctgttgactcatactctcaagagtggtaggggtgtgtagatggagaaaatgtacctcaaacagtgccaacactcaagactgtgagtagagcaataattttatgtcagcactaacctcactttaaaagtgtgagaaaaaagtttgtttacaggagcagaaacaggtctgttgtttctgaagaaatgtgatgtaactgatgtaaccattgacaatctatgtgtgcctttatacatttcatctctgttttaaaatatttttatgacaatcatgtttaaaattatttttagattacaagtaagctgcatgttaaaaattgagctgtgtaaggtagaggaaaaatagtgaaaactttgggatttt

SEQ ID NO: 137372 - DNA, 7497 bp, Homo sapiens
  Payload ID: 6894
  Gene Symbol: GXYLT1
  Gene Name: glucoside xylosyltransferase 1
  Uniprot ID: Q4G148
  ENST ID: ENST00000398675
  CDS Start-End: 234-1556
gcggcagaggcggtgtccaggcttccgggcgggtagtccttcggctccggagccgcgactgcgctcgcctaggtggtgggcggggagggaaggaagggagcgggcgcaaggcggcggcggcggctgcgggtgaggaacttgttgcgcccgcggctgcgcggtgcccctccctccgctccagttcgtcggggcgggcgcggcggcggcggcgaaggaggagcgcggccggggcgatgcggcgctacctgcgcgtcgtggtgctgtgtgtggcctgcggcttctgctcgctcctttacgctttcagccagctcgccgtgtccctggaagaaggaacgggcggcggtggcgggaagccgcaggccgcggtggcttcctggctcgcgggcggcggacgcggcgccgtgagaggcgccggcgtcgcgggccccgcagcgcatcccggcgtgtcggacaggtgtaaagatttctctctgtgttactggaatccctattggatgctgccctctgatgtttgtggaatgaactgcttttgggaagcggcttttaggtacagtctgaaaatacagcctgttgagaaaatgcatctagctgtagttgcctgtggtgaaagactggaagaaactatgaccatgttgaagtcagctatcattttcagcatcaaacctcttcaattccatatttttgctgaagatcagctacatcatagctttaaaggcagacttgacaactggtcatttctacaaacatttaattatacgttataccccataacctttccaagtgagaatgcagcagagtggaaaaaactctttaaaccatgtgcttcgcagagattgttcttgccgttaatcctgaaagaagttgactcactattgtatgtcgacactgatatcctttttttacgaccagttgatgatatttggtctttactaaagaaatttaattccacacaaattgctgcaatggcaccagaacatgaggaacctcgaataggatggtataatcgctttgctaggcatccatattatggaaaaactggagtaaactctggagttatgttgatgaacatgactcgaatgagaaggaagtatttcaagaatgatatgacaactgtacgactacaatggggagatatacttatgccattgcttaaaaaatacaaactaaacatcacatggggtgatcaagatctattgaatatcgtgttttttcataatccagaaagcctttttgtttttccgtgtcaatggaattatcgaccagatcattgtatatatggaagcaattgccaagaagcagaagaaggaggaatctttattcttcatgggaacagaggtgtttaccatgacgataagcaaccagcatttagagctgtttatgaagcactgagaaattgttcttttgaagatgacaacatccgttccttattaaaacctttagaactggaactacaaaaaacagtgcatacatactgtggaaaaatttacaaaatatttatcaaacaactagcaaaaagtgtaagagatcgttatgccagatcaccaaaggaaaagtgattcttggtgactgcttaatcaaatggatgaaaacaaagaatcagaagataagtgtgaaggaatcgtcttggatgaagtattcaggaaggaattactcatctccagaataattttttttttcctaaagaagttaagtaagcagtattttcaggtaatgaagaataagttaaaatcttgggcctcaacattgaacattttttatctctgatgttttgtaatgttacttgctatcattccagtattgatgaaaatactattgaatgggtttaacctgcagacttctgttgactcatactctcaagagtggtaggggtgtgtagatggagaaaatgtacctcaaacagtgccaacactcaagactgtgagtagagcaataattttatgtcagcactaacctcactttaaaagtgtgagaaaaaagtttgtttacaggagcagaaacaggtctgttgtttctgaagaaatgtgatgtaactgatgtaaccattgacaatctatgtgtgcctttatacatttcatctctgttttaaaatatttttatgacaatcatgtttaaaattatttttagattacaagtaagctgcatgttaaaaattgagctgtgtaaggtagaggaaaaatagtgaaaactttgggattttaatctgtgtgtgcgtgtttgtgtgtgagagagagtgagaaatgtagtgtttcattttgtatgcattaaactgtcttgccaaaactcagatctaagattgttaaatagatatttggggaatttttttttaatcactttaaatgaaaaacgtcagctttactgggcattctggaagcaaaatatattatgctgatggtaaagtgagaaccttaagagtatactcatgatggtggaaagtgtgatggaccaaaatgcataagctatatacttcctgtgagtagtaattttagttacaatggagtagaaaaatatggtccatttaaacttgtcttctacctcataacggccttgcaagatacttttgaagaagcaaatgtctagagccttactttaagtaagttaaacaacttaagtggatgatttggaataagattgttacatccagctgtagaaaatgtggttttaattgggttgatgtgcatttttgaatatcacctaagacagttaatttttttaaatcttgagaaattacttctttggcattcttgacctgttagctaatataactatagattctgaatacttagcatatactatgctggggcacatatcttattttaccaacaatatgattatctatatggttatcttctttttctccctgatattttaatgctcaagtagaaaatggaaaatcatgaaggaaaaatacaacctgtgaaaattgtggcagttagctttgtgaagacacagtgacctctgtggagacatggaatatgcagaaagagatggttagtacagttgttctgtcgtctgcagttcagtcagggacaaattgagagaggaaagtttaagcagggtgcattagaagttgataaccagtccagcattcttagaacagatgggtttagagaacacgagttgtagttccttggcagaatgccatggtgaatataagaaactgtgaaattgagcttactgagtagaaaatgagaatactaaaaatgtgaagtttggagggtatgtattagatcatttctaatggtcctcaaataatgatcattgcctgcctgactatgtaagattcttgttgggagcttaagaatagattcctgagctaggcctttggagactctggcatgctgtgtctaggagggagtctgtaaaacaatttttaatgaagaaatttaaaaattacacaaaactagaatagtgcattggtactcaacatccagatctgacacttatcactatcttaccatgtttgcttcatttgtcatttttttgtttgcttaagtatcttaaaatcccatacattgtgttatttcactgctgtgaacactttgggtagataccacgatatcacacctaacagaggcagcagcagtccttcggcttcatctcatagccagtccttaagcaaatttccctgattatctcaaaaatcatcttctagttggtttgttagaatcaacagaatataagtcacatgatgatttcgtttttaacaatcacctcagatgactttgatgttagctactttgagaaccactggaaattattttgccaacttgaaagttcaagttaggataccacaattcttggcacgtttggtggattataaatgtgattttgaaatattagaggaagcatttggggttaatgacaggatatgaatttatattagtaagtttgataagataaaatttcctcagtgaacggagaatctcagccccatgggctctaattgattgggacttgtgtagagcgtggtcacagtttaatccaactggactgtatgctgtggtctcactcatgttgtggcttatttacactgtcacacacactacattgtggatcagttggaaggttcttcatctggtttatttagacctgacctaattgatcattttaccataaattgaattatagtgaaaactgtcttttgggtactgtttctacctaaaattaaaggtatcacaaaatatgtataataatttttaaatgaattttctgaatttatctttagacaaggtaattcttttgaattctaaagaaatgcagttcttggagttgatgagaggttaaattatagatggacaacttagagaacgtattccatcttcatataaatggtctttcataaaacatagtgtatctatgcagtttatataaactacatgatttattatttgagtctatgtattctgacctcagaactatctctgggctacagtattaccaaagtgggatgcctttaaaatgcagtcaaacttcatttgtatgaagtagaaaagaacttgggaaacctttaaaaatatatattgtgatttatgctttaagaaaatgcatacttttttctaatgaagagtagttcataatatataagggttttaaggccctgaaataacattagtgcttactcattgctctctcatcttgcctccagtcagatgttattggtatagtgaaaagaagaccagattttgaactagatctggattctctttttagtaactcaggcatgttatttacccttctctgtgccttaggtttttaagtacaatcagtgtacccttcaaacctcacaagatgaaactcagaagagataatggatttggaagcattttgcgtggcttatattatgccacgccagtgttactgttgaagttctgttttgttcgttgttttctgtacagagcgttcagtttactcaggctgaatgttttctgacatatatctccagtatgaatttgtttatgtaaggaagagtttttcaggaagagaaagtagagaagaaaagaatgatgtaactaaatcaaaaaagaaggaaaagagaggaagtgagaaaaggggtgaggaaagagaaaggagtaagaatggggatggcaaagggcagagtaagagaaaagatggaatgagtgtatggaaaattgagaagtagagatggagagaaatggtgtggaaacatttactttttgagttgtagccctcacactacatcagtttgcttgcctgggctctctggggtcaggaaaggtgctgacttccatggaatggggcagcagggcctgctgtatttggtttgttagtactagagttgtttcccaatcaccctactcactgatcatttagtgccaattcaacattttatgtcttttttttttagtggatcccagtttgtgagctaggacctgtggaaatacaagtatcttcctttttaactttattgttttagccatcccaagtgttagactgcaagactaactacatattccccagtggaggttggaagtggaggggactgcttcattaggtctgaagggggccaaggaatgtgttgcagcagttttcgcagatgatactgacgagaggccaggtttgggaatcactgccctgccttggatggcaaattaagcaataaattacacctatttattcctcagttgggatactttcagttgaaccattctgagtagatttaagagaacaaaagacagcagaaataccttaaaagatattattggctgtcttatttttcagatatttgtatttaataaataccttagtagtagtcagaacctctttgagatgtttttagaaagaccactgatttgttttttaaaataatttttttggttccttagagtagagaagaaaagtaggggtgcaatatgtcaggtgtggggccagttatccatttattaaatgcaatttcaagtgtcttaaaaacaataattgccttattgcattttaatatttaataaagtagattaaataaagatttgtattataacagttattcttttatccattgccaaagcaacccttttttgcctattaaaatctggctaaactgttctgatgttgtttcttaattcattaaacatgaaactaggttttacaaactaaattatataaagacagaagtctaaaaatggtaccagaaaatttttttttaaaaaattaatgtgttattcaaatatccagcaattaaagactcatgagaaaaacagaatagcatattagatgtaacagtttaaaatggattgcaaatcaatgtcagacttaaatagaaaatatttattatcacctcatttctaccaataatttcagatgtttaatgggactttgaaaagataggaaaaaatagaaatgaaaatttatctcacctttaatactgtgaatactatttggagggtccctggtcagacatttaaatatcaaacttaagaactgacatggagcctttgattagtttatatacaggatctgaatatttacacacatagcacactatagcaacctcttgtaaaaaatcatgaagatagaattcaacagtgtatattctattaaaaagtaaattggctgggtgtggtggctcatgcatgtaatcccagcactttgggaggccgaggcaggaggatcgcttgagcccaagagtttgagaccagcctaggtgacaaagtgagaccccatctctacaaaaaaattaaaaaattatccagatgtggtggtgtttgcctgcggtcctagctacacaggaagttgaggcaggaggattgcttgagtgcaagagtttgaggctgcagagagccaagattgcaccattgcactccagcctgggtgacagagcgagaccctgtctcaaaaaataaaggaaattggctttgactatgaaaaacagccattttcaacctttttataaaacctcttcagggaatattggaatattatttttgtcaggcaaaaataatccagggcttgagcattgctgtagaatatgttatctgttcaaaacttagcagagcacgcatgcatcacatgcattgtcatcagtatttgagagctgaaccaatggtttttgatggttgccgtaacagaagatctgtgaagaggatggtggtttgcacctgttcctgaagtcaaactggaaaaggttgcaggtatttcaattttctcaatcattttgcataaatgtattaatattttgagtagtaatagttctaaacctgcaggaaggcatcattgtatactgtggtatgtagagaatactactcttacactgctctttatcttaaaatgttttggtatactgtgaatattttcctctaagtatttggtgtattttgacagttattaaaggagaatataaaattaaagattctggtctaaactaagaataatggaaagttgcttcgtcctgccttagaggagttttcagttcatcctcttcttgagaaactatgtgttgctgttactaaataaacatttactcaataaacgttttatttcctcaaa

SEQ ID NO: 137373 - DNA, 3260 bp, Homo sapiens
  Payload ID: 6895
  Gene Symbol: GXYLT2
  Gene Name: glucoside xylosyltransferase 2
  Uniprot ID: A0PJZ3
  ENST ID: ENST00000389617
  CDS Start-End: 162-1493
gtcgccgccgccgccggccgcccgccggccgccacgaccccagtccccggcgggcgggcggaggaggcgaccgccgcgcgctgctgcactcatcctgccgccgccgcgatgcgcagaggggccgagccgcctgggggccgccgccgccgccgcgccgcaccatgaagctccgcagcaaggcggcggcgctgctcttgctcgcgctggccgcgctgctgctggcgctgctgtccctgcgcgctggccgcgctgagcccccagcgctgcccgcgcgccccgcgtccgccccgcagcgccaccccgcgcctgtccccgcgcgctggccggggccgggcgccctccccggggccagcccgggagttcggaggcgccggcccccgcgtccgcgcccccgagcgggccgccggggcgctgcgagactggagaagttggcgaggaggcctggagaacccaggagtttccaagctgtgctgccacccgagctctggatccacctggctgtggtggcctgtggcaatcggctggaggagacgctggtcatgctcaaatcagctgtgctttttagccacaggaagatccaattccacatcttcactgaagactctctgaagcccgagtttgataagcagttacgccagtggcctgactcatatacaaagaagtttgagcacagaatctaccccatcacattttctgttggaaaccctcaggagtggaagaaattgttcaaaccctgtgctgcccagagactctttcttccggtgattttaaaggatgtggactcacttctctacgtggacaccgatgtcctctttctgagacctgttgatgacatctggaagcttctgaggctgtttaattccacccagcttgcagccatggcccctgagcacgaaatccccaagattggctggtacagccgctttgctaggcatcctttctatggctctgcaggagttaattcaggagtcatgttaatgaatttaactcggataagaagtacccagttcaagaacagcatgattccaacaggcctggcttgggaggacatgttgtaccctctgtaccagaagtacaagaatgccatcacgtggggagaccaggatttattaaatattattttttatttcaacccagagtgtctctatgtattcccctgccagtggaactaccgtcccgatcactgcatgtacggaagcaactgcagagaggctgagcatgaaggtgtgtctgttctgcatggaaaccgaggcgtctaccatgacgataagcaaccaacgttcagagcactctatgaagcaatacgggattttccctttcaagacaatctctttcaatccatgtattacccccttcagctgaagtttttggagactgtgcacactttatgtggacgaatcccgcaagtttttctgaagcaaattgagaaaacaatgaaaagggcttatgagaaacacgtcatcatccatgttggccccaaccagatgcactgaatattttgtcttgttgcaagtcaattaggtgtcttgtgaccaaggaaatactaatctctaagctgcctgggtctttttgtgtgaatatttaatggtgctccatgactgttgagttttaaaaacctcgttaaattttgccaaatcagttgcccccaaaagggaatatgcttttccttatttttttttctaaaatgctatttatctctaaggaaaaaaaaaaaagactattactcatttaacattgtttaagcaggttgagctagctgtgaaaatagcttttgtgagccttctaattcctaaacgtctgagaccatttcagtggcacctgaggtgttatattgatctagcattcctgagactctttctatgcaactgactcccccacacccgtgttataaaagtaatacacacttttgaaacagagagacacacttgtagagcatatgggtcaagggctcaacatcaagattagattagccataatcctattgaccagtggaaaagattgtttccattttaaagcagttccttacaaccttttttctctacttttgcattttccactctaacacacatctaaaacaggtaatctcagtaaaagctggcctttttgctgagatttttatgtgggagactaaaatattagatgagatgattatgtgtacagaattttatttaaaatacatctgagagaatcattcagatacttgggtagtgttaaaggatgaagcatgtatctgggggtatttcttctttttctttctttctttttttttttttttttttttttgagacggaatctcactctgtagcccaggctagaatgcagtggcaggatctcggctcactgcagcttccacctcctgggttcaagtgattctcatgcctcagcctccccagtagctgggattacaagtgtgtgccaccacacccggctaatttttgtatttttagtagagacacggttttaccatgttggccaggctggtcttgatctccagacctcaagtgatctgcctgcctcagcctcccaaagtgctgggattacaagtgtgagccactgcactcagccaatctgggagtatttctaaagaaaaaaattactttgatttgtggaggactaaatcataatacatttctatgcaacaatagcttctgagaggaaattcaggaatgtttgtgtttaccacagacaaaaacatttgatctgttaatcatcagtagctgtggtcatctctctttcttaaactcttgggcaatgggtggaaatcagagaccaacttcaaatttaatgtgtaaaaaacaaatagttcagctgcttctattggtaagaaaattcaacttcctaccagccttagaaaggtctctttaaacaatttctttccccctagggttacctagctggtccatacaggttttatcacctcactgcaaggaggaagttgaatattctgttccccacggggatctggcttaatccctagttgctcatatagttggtatcagcatagcaatattttgcataatgctttatttttctcaaatgactattgcatagatgatcttgatatttgcaacagcctagtggatttggtagggtcctgaatcatctctataaggcaaacaaggaaattgtaacacaaagaaataaacatattgaatataattgctattctgtaagacatacagtctgtgtaagatgtatcttatttacagagacatttttgaaaattaaaatattaaatactttttgttatatagagacaa

SEQ ID NO: 137374 - DNA, 754 bp, Homo sapiens
  Payload ID: 6895
  Gene Symbol: GXYLT2
  Gene Name: glucoside xylosyltransferase 2
  ENST ID: ENST00000498315
  CDS Start-End: 449-754
ctccacagcccttgtgtcagctgtcgaagtttagcaatactatttccaaacatgggccagtaggcagccagcaggcaccagacagctgagtgctggcagaaaaagcctcagacacctatagcagtccaaacagtgactcatcctgctattgccaggataaatatgggaataaatggtatttttctctaagcaggaagaattgtcaaaatgcttatcactttataaaatataacagattgtgcctgatcatgttttgaaatgttctaaccattcactcgccggttttttgttgtttttacttttttgagtttagtaatagctttcacttgttttccctctttctaggaggcctggagaacccaggagtttccaagctgtgctgccacccgagctctggatccacctggctgtggtggcctgtggcaatcggctggaggagacgctggtcatgctcaaatcagctgtgctttttagccacaggaagatccaattccacatcttcactgaagactctctgaagcccgagtttgataagcagttacgccagtggcctgactcatatacaaagaagtttgagcacagaatctaccccatcacattttctgttggaaaccctcaggagtggaagaaattgttcaaaccctgtgctgcccagagactctttcttccggtgattttaaaggatgtggactcacttctctacgtggacaccgatgtcctctttctgagacctgttgatgacatctggaagctt

SEQ ID NO: 137375 - DNA, 494 bp, Homo sapiens
  Payload ID: 6895
  Gene Symbol: GXYLT2
  Gene Name: glucoside xylosyltransferase 2
  ENST ID: ENST00000491839
  CDS Start-End: 1-494
atggcccctgagcacgaaatccccaagattggctggtacagccgctttgctaggcatcctttctatggctctgcaggagttaattcaggagtcatgttaatgaatttaactcggataagaagtacccagttcaagaacagcatgattccaacaggcctggcttgggaggacatgttgtaccctctgtaccagaagtacaagaatgccatcacgtggggagaccaggatttattaaatattattttttatttcaacccagagtgtctctatgtattcccctgccagtggaactaccgtcccgatcactgcatgtacggaagcaactgcagagaggctgagcatgaaggtgtgtctgttctgcatggaaaccgaggcgtctaccatgacgataagcaaccaacgttcagagcactctatgaagcaatacgggatattttgagaagagggggaaaaaggaagtttgtcctgtcctggatcagtttctttgtcatgta

SEQ ID NO: 137376 - DNA, 5037 bp, Homo sapiens
  Payload ID: 6896
  Gene Symbol: GLCE
  Gene Name: glucuronic acid epimerase
  Uniprot ID: O94923
  ENST ID: ENST00000261858
  CDS Start-End: 229-2082
cacacaagcgcttccttgccgagaggctggagctgcggcaccgcaggcctgagccaccccttctctgctgtctccttctcttcctcagggctcccgtgtctgctcgccctccgacgctgctcaggaatttgacaagaaactgaagttttgattcagatatattttgaattgaaaccagagatgttctagagtttagattctttcatttgattaaggtatggtctgaatatgcgttgcttggcagctcgggtcaactataagactttgattattatctgcgcactcttcactttggtcacagtacttttgtggaataagtgttccagtgacaaagcaatccagtttccacggcgttcgagtagtggcttcagagtggatgggtttgaaaaaagagcagcagcatctgagagtaacaactatatgaaccacgtggccaaacaacagtctgaggaagcattccctcaggaacagcagaaagcaccccctgttgttgggggcttcaatagcaatgtgggaagtaaggtgttagggctcaaatatgaagaaattgactgtctcataaatgatgaacacacaattaaagggagacgagaggggaacgaagtctttcttccattcacttgggttgagaaatattttgatgtttatggaaaggtggttcagtatgatggctatgatcggtttgaattctctcatagctattccaaagtctatgcacagagagccccctatcaccccgatggtgtgtttatgtcttttgaaggctacaatgtggaagtccgagacagagtcaagtgcataagtggggttgaaggtgtgccattatctacacaatggggacctcaaggctatttctatccaatccagattgcacagtatggattaagtcattacagcaagaatctaactgagaaacctcctcacatagaggtatatgaaacagcagaagacagagacaaaaacaagcctaatgactggactgtgccaaagggctgctttatggcgaatgtggctgataagtctagattcaccaatgtcaaacagtttattgcaccagaaaccagtgaaggtgtatccttgcaactgggaaacacaaaagattttattatttcatttgacctcaagttcttgacaaatggaagtgtgtccgtggttctagagaccacagaaaagaatcagctcttcactatacattatgtctcaaatgctcagctaattgcttttaaagaaagagatatatactatggcattgggcccagaacttcatggagcacagttaccagggacctggtcactgacctcaggaaaggagtgggtctttcaaacacaaaagctgtcaagccaaccaaaataatgcccaagaaggtggttaggttgattgcaaaaggtaagggattcctcgacaacattaccatctctaccacagcccacatggctgcattttttgctgctagtgattggctagtaaggaaccaggatgagaaaggtggctggccaattatggtgacccgtaagttaggggaagggttcaagtctttagagccaggatggtattctgccatggcccaagggcaagccatttctacattagtcagggcctatctgttaacaaaagaccatatattcctcaattcagctttaagggcaacagccccttataagtttctatctgagcagcatggagttaaagctgtgtttatgaataaacatgactggtatgaagaatatccaaccacacctagctcttttgttttaaatggctttatgtattctttaattgggctgtatgacttaaaagaaactgcaggggaaaaactcggaaaagaagcaaggtccttgtatgagcgtggcatggaatctcttaaagccatgctgcccttgtatgacactggctcaggaaccatctatgacctccgtcacttcatgcttggcatcgctcctaacctggctcgctgggactatcataccacccacatcaatcagttgcagctactcagtaccattgatgagtccccagtcttcaaagaatttgtcaagaggtggaaaagctaccttaaaggcagcagggcaaagcacaactagagctcacaaccaaaactgcacttcagcctctgctgtacacagaaactacaggctctgtctcaggagagcataggcacattttaaaaggttatgtactaggtttttgtggattctatcaaagtgataagtgatccttaaaaccagccttctaaaataattgcattccatgggttgggtatttagaaatgtaggtggcatttagaacacaatgtttaatcaatgggctgaacaaagatgcttcactttgccttgcccatcaccctatacagtttcgcagatagtctagtcactctatgtgagaaagataatggtaagtagttgctactggccaactgtctagcacttacctgaaaacttagtatggagctcttttaaaatgtgattatttatatttatgttgaaagcggactttaaaaaaaataatgtgctgtaacacagtaaatatgtacttgtagcctggatagcagactgtgttcaactttttaaaaagatgtttcctttctaaagattaatttcttgggagcaaatgagtatttgttgcatttgttcaatttgttgtatatggtgaatatttaattatggttttcttgaaacgtgtaaattaaaaacacaatcagtgttcaggcttcagttatataatgtaagcacaactaaaatgaaacttgttgactgcacaagaaattacaaaaatgtttctgttttgaaacttgatctacaatcagtaaaagtttgataatcagtatatcccttcccaacccccattgtgacagtttctttttgtcactgtctagaattttgtattttatttcagactataccttggagttttgtatattttgagagagatatttttgggacattattttggaaacttattacaaatctaaatttggaaaggagctagtagctttaaggccaccaccatattttacttttttaggatttttccccctttaaataaaaatattagatcaaatactatatgcaagaaatcatagcaaagtttttttttcctaccaagatcattcttgatcatcagcttcccaaactagtaagtctgtgcatcattgggtgtttttttttaatttaattttaaattatcccagctattagatagaagggatgttactgcacttatgtgtaatcagatctttatttaggtatacatatcctcctataccgcacataaatagatttcagagcccccatacaatgggcagtgtctgctatagggcttcaggcattaaataaaaccgagggttgttgattttgctgtgacagtacactaaatcaatactatatcttatacagtttgaaaatatgataccctacactttcaggggaccgagtctgacaaacacaatacatttatctgtgacctatatcaagtacacatttaggagccaggtaggttacctgcttacacactatattttaattgaattcaaactatcaagcactacttagaaactggaaaacatatatatgttagcatcaaagggggcagaagcaaagaagatacagatctgcactgaagacattagactggccatagaaaagtaagcttgaactcccaattgatgtgaccacactcttcttaattttgttcacagtaaaaacacttttttgagttattaggcttacccctagcttttgacctttgcatttcatatatgttagatgtctcagcaagaatatctggtctcccctaatttttattcccagtgccgatgttcaaaataaactttctccagtctgggaaccttttttacttccccatatttgttattatttagaatggttcatacgtctgctttgtttgcatactggtcttcagattatgagactcgatgataacagtatggtactgcttctgtgacaaatatcgtgccttaacaatgtggctgtccttttccactgaagaaggaaagacgttttgatctagaaatagcgttgtgatttccttgctgttggttttacactgccttccacattgcaacagcaagttgatttcttgtgatcccagaattttctaagaggatgagttgaatctatagcagcattgtcagtacagaccagtggttctcaaactttaaaatgcctcagcatcacttgggagcttattgaaatgcagatcccagagtcagtaaatctgcctgtgaagtatgatagtctgcatttgtaatgagcattcaagtgattctgatgcaggtgagctgggggcatacagggaggaacactgccctggactatccattgcatttttgcctctaaacaactacagaattttctagggttttaaattatgtaaaatgtttacttattctgagcttagagagaatggggagggtatttttaaattttattgttttatttctttaagtttttctttgctttaagattataggtattaggtttgtttttgtttttccacttatcttgagttcactttgatgttaaatctattgctacttcagttgtaaaaccagccaaaagtttctggatgaaggtcaagtttgaccttttaggagttattgtacataaaggcttcatccacgaaccatccagcgcacagaagcaagtgcaaaaatgacacaagcacaactctccagacgtggctccttctcctttctcagtgcagactctcactgaaagctgctattttcatcctccttgtggttgcttttcttgtttctcttccattgtacatgtgggttatataccatatgttaaatatgcaataaagtgtttacaggatgcccttctgaagggtagtcctttgtaaagctgtacagactttgcagtttaagcacaatgtgcacatgttagttttatatacagcaaaacttgattttttgcagatggaaaggtattttgtttctatacaaagtaaatggattgtttgtgcttaatgtaaagccgctttataaaactgtaaaataaagtttttttctt

SEQ ID NO: 137377 - DNA, 4840 bp, Homo sapiens
  Payload ID: 6896
  Gene Symbol: GLCE
  Gene Name: glucuronic acid epimerase
  ENST ID: ENST00000559420
  CDS Start-End: 206-1867
gtatggtctgaatatgcgttgcttggcagctcgggtcaactataagactttgattattatctgcgcactcttcactttggtcacagtacttttgtggaataagtgttccagtgacaaagcaatccagtttccacggcgttcgagtagtggcttcagagtggatgggtttgaaaaaagagcagcagcatctgagagtaacaactatatgaaccacgtggccaaacaacagtctgaggaagcattccctcaggaacagcagaaagcaccccctgttgttgggggcttcaatagcaatgtgggaagtaaggtgttagggctcaaatatgaagaaattgactgtctcataaatgatgaacacacaattaaagggagacgagaggggaacgaagtctttcttccattcacttgggttgagaaatattttgatgtttatggaaaggtggttcagtatgatggctatgatcggtttgaattctctcatagctattccaaagtctatgcacagagagccccctatcaccccgatggtgtgtttatgtcttttgaaggctacaatgtggaagtccgagacagagtcaagtgcataagtggggttgaaggtgtgccattatctacacaatggggacctcaaggctatttctatccaatccagattgcacagtatggattaagtcattacagcaagaatctaactgagaaacctcctcacatagaggtatatgaaacagcagaagacagagacaaaaacaagcctaatgactggactgtgccaaagggctgctttatggcgaatgtggctgataagtctagattcaccaatgtcaaacagtttattgcaccagaaaccagtgaaggtgtatccttgcaactgggaaacacaaaagattttattatttcatttgacctcaagttcttgacaaatggaagtgtgtccgtggttctagagaccacagaaaagaatcagctcttcactatacattatgtctcaaatgctcagctaattgcttttaaagaaagagatatatactatggcattgggcccagaacttcatggagcacagttaccagggacctggtcactgacctcaggaaaggagtgggtctttcaaacacaaaagctgtcaagccaaccaaaataatgcccaagaaggtggttaggttgattgcaaaaggtaagggattcctcgacaacattaccatctctaccacagcccacatggctgcattttttgctgctagtgattggctagtaaggaaccaggatgagaaaggtggctggccaattatggtgacccgtaagttaggggaagggttcaagtctttagagccaggatggtattctgccatggcccaagggcaagccatttctacattagtcagggcctatctgttaacaaaagaccatatattcctcaattcagctttaagggcaacagccccttataagtttctatctgagcagcatggagttaaagctgtgtttatgaataaacatgactggtatgaagaatatccaaccacacctagctcttttgttttaaatggctttatgtattctttaattgggctgtatgacttaaaagaaactgcaggggaaaaactcggaaaagaagcaaggtccttgtatgagcgtggcatggaatctcttaaagccatgctgcccttgtatgacactggctcaggaaccatctatgacctccgtcacttcatgcttggcatcgctcctaacctggctcgctgggactatcataccacccacatcaatcagttgcagctactcagtaccattgatgagtccccagtcttcaaagaatttgtcaagaggtggaaaagctaccttaaaggcagcagggcaaagcacaactagagctcacaaccaaaactgcacttcagcctctgctgtacacagaaactacaggctctgtctcaggagagcataggcacattttaaaaggttatgtactaggtttttgtggattctatcaaagtgataagtgatccttaaaaccagccttctaaaataattgcattccatgggttgggtatttagaaatgtaggtggcatttagaacacaatgtttaatcaatgggctgaacaaagatgcttcactttgccttgcccatcaccctatacagtttcgcagatagtctagtcactctatgtgagaaagataatggtaagtagttgctactggccaactgtctagcacttacctgaaaacttagtatggagctcttttaaaatgtgattatttatatttatgttgaaagcggactttaaaaaaaataatgtgctgtaacacagtaaatatgtacttgtagcctggatagcagactgtgttcaactttttaaaaagatgtttcctttctaaagattaatttcttgggagcaaatgagtatttgttgcatttgttcaatttgttgtatatggtgaatatttaattatggttttcttgaaacgtgtaaattaaaaacacaatcagtgttcaggcttcagttatataatgtaagcacaactaaaatgaaacttgttgactgcacaagaaattacaaaaatgtttctgttttgaaacttgatctacaatcagtaaaagtttgataatcagtatatcccttcccaacccccattgtgacagtttctttttgtcactgtctagaattttgtattttatttcagactataccttggagttttgtatattttgagagagatatttttgggacattattttggaaacttattacaaatctaaatttggaaaggagctagtagctttaaggccaccaccatattttacttttttaggatttttccccctttaaataaaaatattagatcaaatactatatgcaagaaatcatagcaaagtttttttttcctaccaagatcattcttgatcatcagcttcccaaactagtaagtctgtgcatcattgggtgtttttttttaatttaattttaaattatcccagctattagatagaagggatgttactgcacttatgtgtaatcagatctttatttaggtatacatatcctcctataccgcacataaatagatttcagagcccccatacaatgggcagtgtctgctatagggcttcaggcattaaataaaaccgagggttgttgattttgctgtgacagtacactaaatcaatactatatcttatacagtttgaaaatatgataccctacactttcaggggaccgagtctgacaaacacaatacatttatctgtgacctatatcaagtacacatttaggagccaggtaggttacctgcttacacactatattttaattgaattcaaactatcaagcactacttagaaactggaaaacatatatatgttagcatcaaagggggcagaagcaaagaagatacagatctgcactgaagacattagactggccatagaaaagtaagcttgaactcccaattgatgtgaccacactcttcttaattttgttcacagtaaaaacacttttttgagttattaggcttacccctagcttttgacctttgcatttcatatatgttagatgtctcagcaagaatatctggtctcccctaatttttattcccagtgccgatgttcaaaataaactttctccagtctgggaaccttttttacttccccatatttgttattatttagaatggttcatacgtctgctttgtttgcatactggtcttcagattatgagactcgatgataacagtatggtactgcttctgtgacaaatatcgtgccttaacaatgtggctgtccttttccactgaagaaggaaagacgttttgatctagaaatagcgttgtgatttccttgctgttggttttacactgccttccacattgcaacagcaagttgatttcttgtgatcccagaattttctaagaggatgagttgaatctatagcagcattgtcagtacagaccagtggttctcaaactttaaaatgcctcagcatcacttgggagcttattgaaatgcagatcccagagtcagtaaatctgcctgtgaagtatgatagtctgcatttgtaatgagcattcaagtgattctgatgcaggtgagctgggggcatacagggaggaacactgccctggactatccattgcatttttgcctctaaacaactacagaattttctagggttttaaattatgtaaaatgtttacttattctgagcttagagagaatggggagggtatttttaaattttattgttttatttctttaagtttttctttgctttaagattataggtattaggtttgtttttgtttttccacttatcttgagttcactttgatgttaaatctattgctacttcagttgtaaaaccagccaaaagtttctggatgaaggtcaagtttgaccttttaggagttattgtacataaaggcttcatccacgaaccatccagcgcacagaagcaagtgcaaaaatgacacaagcacaactctccagacgtggctccttctcctttctcagtgcagactctcactgaaagctgctattttcatcctccttgtggttgcttttcttgtttctcttccattgtacatgtgggttatataccatatgttaaatatgcaataaagtgtttacaggatgcccttctgaagggtagtcctttgtaaagctgtacagactttgcagtttaagcacaatgtgcacatgttagttttatatacagcaaaacttgattttttgcagatggaaaggtattttgtttctatacaaagtaaatggattgtttgtgcttaatgtaaagccgctttataaaactgtaaaataaagtttttttcttaaaaagaatatacctgga

SEQ ID NO: 137378 - DNA, 2300 bp, Homo sapiens
  Payload ID: 6897
  Gene Symbol: GUSB
  Gene Name: glucuronidase, beta
  Uniprot ID: P08236
  ENST ID: ENST00000304895
  CDS Start-End: 132-2087
gtcctcaaccaagatggcgcggatggcttcaggcgcatcacgacaccggcgcgtcacgcgacccgccctacgggcacctcccgcgcttttcttagcgccgcagacggtggccgagcgggggaccgggaagcatggcccgggggtcggcggttgcctgggcggcgctcgggccgttgttgtggggctgcgcgctggggctgcagggcgggatgctgtacccccaggagagcccgtcgcgggagtgcaaggagctggacggcctctggagcttccgcgccgacttctctgacaaccgacgccggggcttcgaggagcagtggtaccggcggccgctgtgggagtcaggccccaccgtggacatgccagttccctccagcttcaatgacatcagccaggactggcgtctgcggcattttgtcggctgggtgtggtacgaacgggaggtgatcctgccggagcgatggacccaggacctgcgcacaagagtggtgctgaggattggcagtgcccattcctatgccatcgtgtgggtgaatggggtcgacacgctagagcatgaggggggctacctccccttcgaggccgacatcagcaacctggtccaggtggggcccctgccctcccggctccgaatcactatcgccatcaacaacacactcacccccaccaccctgccaccagggaccatccaatacctgactgacacctccaagtatcccaagggttactttgtccagaacacatattttgactttttcaactacgctggactgcagcggtctgtacttctgtacacgacacccaccacctacatcgatgacatcaccgtcaccaccagcgtggagcaagacagtgggctggtgaattaccagatctctgtcaagggcagtaacctgttcaagttggaagtgcgtcttttggatgcagaaaacaaagtcgtggcgaatgggactgggacccagggccaacttaaggtgccaggtgtcagcctctggtggccgtacctgatgcacgaacgccctgcctatctgtattcattggaggtgcagctgactgcacagacgtcactggggcctgtgtctgacttctacacactccctgtggggatccgcactgtggctgtcaccaagagccagttcctcatcaatgggaaacctttctatttccacggtgtcaacaagcatgaggatgcggacatccgagggaagggcttcgactggccgctgctggtgaaggacttcaacctgcttcgctggcttggtgccaacgctttccgtaccagccactacccctatgcagaggaagtgatgcagatgtgtgaccgctatgggattgtggtcatcgatgagtgtcccggcgtgggcctggcgctgccgcagttcttcaacaacgtttctctgcatcaccacatgcaggtgatggaagaagtggtgcgtagggacaagaaccaccccgcggtcgtgatgtggtctgtggccaacgagcctgcgtcccacctagaatctgctggctactacttgaagatggtgatcgctcacaccaaatccttggacccctcccggcctgtgacctttgtgagcaactctaactatgcagcagacaagggggctccgtatgtggatgtgatctgtttgaacagctactactcttggtatcacgactacgggcacctggagttgattcagctgcagctggccacccagtttgagaactggtataagaagtatcagaagcccattattcagagcgagtatggagcagaaacgattgcagggtttcaccaggatccacctctgatgttcactgaagagtaccagaaaagtctgctagagcagtaccatctgggtctggatcaaaaacgcagaaaatacgtggttggagagctcatttggaattttgccgatttcatgactgaacagtcaccgacgagagtgctggggaataaaaaggggatcttcactcggcagagacaaccaaaaagtgcagcgttccttttgcgagagagatactggaagattgccaatgaaaccaggtatccccactcagtagccaagtcacaatgtttggaaaacagcctgtttacttgagcaagactgataccacctgcgtgtcccttcctccccgagtcagggcgacttccacagcagcagaacaagtgcctcctggactgttcacggcagaccagaacgtttctggcctgggttttgtggtcatctattctagcagggaacactaaaggtggaaataaaagattttctattatggaaataaagagttggcatgaaagtggctactgaaaa

SEQ ID NO: 137379 - DNA, 1742 bp, Homo sapiens
  Payload ID: 6897
  Gene Symbol: GUSB
  Gene Name: glucuronidase, beta
  Uniprot ID: P08236
  ENST ID: ENST00000421103
  CDS Start-End: 29-1546
acggtggccgagcgggggaccgggaagcatggcccgggggtcggcggttgcctgggcggcgctcgggccgttgttgtggggctgcgcgctggggctgcagggcgggatgctgtacccccaggagagcccgtcgcgggagtgcaaggagctggacggcctctggagcttccgcgccgacttctctgacaaccgacgccggggcttcgaggagcagtggtaccggcggccgctgtgggagtcaggccccaccgtggacatgccagttccctccagcttcaatgacatcagccaggactggcgtctgcggcattttgtcggctgggtgtggtacgaacgggaggtgatcctgccggagcgatggacccaggacctgcgcacaagagtggtgctgaggattggcagtgcccattcctatgccatcgtgtgggtgaatggggtcgacacgctagagcatgaggggggctacctccccttcgaggccgacatcagcaacctggtccaggtgcagctgactgcacagacgtcactggggcctgtgtctgacttctacacactccctgtggggatccgcactgtggctgtcaccaagagccagttcctcatcaatgggaaacctttctatttccacggtgtcaacaagcatgaggatgcggacatccgagggaagggcttcgactggccgctgctggtgaaggacttcaacctgcttcgctggcttggtgccaacgctttccgtaccagccactacccctatgcagaggaagtgatgcagatgtgtgaccgctatgggattgtggtcatcgatgagtgtcccggcgtgggcctggcgctgccgcagttcttcaacaacgtttctctgcatcaccacatgcaggtgatggaagaagtggtgcgtagggacaagaaccaccccgcggtcgtgatgtggtctgtggccaacgagcctgcgtcccacctagaatctgctggctactacttgaagatggtgatcgctcacaccaaatccttggacccctcccggcctgtgacctttgtgagcaactctaactatgcagcagacaagggggctccgtatgtggatgtgatctgtttgaacagctactactcttggtatcacgactacgggcacctggagttgattcagctgcagctggccacccagtttgagaactggtataagaagtatcagaagcccattattcagagcgagtatggagcagaaacgattgcagggtttcaccaggatccacctctgatgttcactgaagagtaccagaaaagtctgctagagcagtaccatctgggtctggatcaaaaacgcagaaaatacgtggttggagagctcatttggaattttgccgatttcatgactgaacagtcaccgacgagagtgctggggaataaaaaggggatcttcactcggcagagacaaccaaaaagtgcagcgttccttttgcgagagagatactggaagattgccaatgaaaccaggtatccccactcagtagccaagtcacaatgtttggaaaacagcctgtttacttgagcaagactgataccacctgcgtgtcccttcctccccgagtcagggcgacttccacagcagcagaacaagtgcctcctggactgttcacggcagaccagaacgtttctggcctgggttttgtggtcatctattctagcagggaacactaaaggtggaaataaaagattttctattatggaaataaagagttggcatg

SEQ ID NO: 137380 - DNA, 1983 bp, Homo sapiens
  Payload ID: 6897
  Gene Symbol: GUSB
  Gene Name: glucuronidase, beta
  ENST ID: ENST00000447929
  CDS Start-End: 14-448
gggaccgggaagcatggcccgggggtcggcggttgcctgggcggcgctcgggccgttgttgtggggctgcgcgctggggctgcagggcgggatgctgtacccccaggagagcccgtcgcgggagtgcaaggagctggacggcctctggagcttccgcgccgacttctctgacaaccgacgccggggcttcgaggagcagtggtaccggcggccgctgtgggagtcaggccccaccgtggacatgccagttccctccagcttcaatgacatcagccaggactggcgtctgcggcattttgtcggctgggtgtggtacgaacgggaggtgatcctgccggagcgatggacccaggacctgcgcacaagagtggtgctgaggattggcagtgcccattcctatgccatcgtggtatcccaagggttactttgtccagaacacatattttgactttttcaactacgctggactgcagcggtctgtacttctgtacacgacacccaccacctacatcgatgacatcaccgtcaccaccagcgtggagcaagacagtgggctggtgaattaccagatctctgtcaagggcagtaacctgttcaagttggaagtgcgtcttttggatgcagaaaacaaagtcgtggcgaatgggactgggacccagggccaacttaaggtgccaggtgtcagcctctggtggccgtacctgatgcacgaacgccctgcctatctgtattcattggaggtgcagctgactgcacagacgtcactggggcctgtgtctgacttctacacactccctgtggggatccgcactgtggctgtcaccaagagccagttcctcatcaatgggaaacctttctatttccacggtgtcaacaagcatgaggatgcggacatccgagggaagggcttcgactggccgctgctggtgaaggacttcaacctgcttcgctggcttggtgccaacgctttccgtaccagccactacccctatgcagaggaagtgatgcagatgtgtgaccgctatgggattgtggtcatcgatgagtgtcccggcgtgggcctggcgctgccgcagttcttcaacaacgtttctctgcatcaccacatgcaggtgatggaagaagtggtgcgtagggacaagaaccaccccgcggtcgtgatgtggtctgtggccaacgagcctgcgtcccacctagaatctgctggctactacttgaagatggtgatcgctcacaccaaatccttggacccctcccggcctgtgacctttgtgagcaactctaactatgcagcagacaagggggctccgtatgtggatgtgatctgtttgaacagctactactcttggtatcacgactacgggcacctggagttgattcagctgcagctggccacccagtttgagaactggtataagaagtatcagaagcccattattcagagcgagtatggagcagaaacgattgcagggtttcaccaggatccacctctgatgttcactgaagagtaccagaaaagtctgctagagcagtaccatctgggtctggatcaaaaacgcagaaaatacgtggttggagagctcatttggaattttgccgatttcatgactgaacagtcaccgacgagagtgctggggaataaaaaggggatcttcactcggcagagacaaccaaaaagtgcagcgttccttttgcgagagagatactggaagattgccaatgaaaccaggtatccccactcagtagccaagtcacaatgtttggaaaacagcctgtttacttgagcaagactgataccacctgcgtgtcccttcctccccgagtcagggcgacttccacagcagcagaacaagtgcctcctggactgttcacggcagaccagaacgtttctggcctgggttttgtggtcatctattctagcagggaacactaaaggtggaaataaaagattttctattatggaaataaagagttggcatgaaa

SEQ ID NO: 137381 - DNA, 1859 bp, Homo sapiens
  Payload ID: 6897
  Gene Symbol: GUSB
  Gene Name: glucuronidase, beta
  ENST ID: ENST00000430730
  CDS Start-End: 33-437
gcagacggtggccgagcgggggaccgggaagcatggcccgggggtcggcggttgcctgggcggcgctcgggccgttgttgtggggctgcgcgctggggctgcagggcgggatgctgtacccccaggagagcccgtcgcgggagtgcaaggagctggacggcctctggagcttccgcgccgacttctctgacaaccgacgccggggcttcgaggagcagtggtaccggcggccgctgtgggagtcaggccccaccgtggacatgccagttccctccagcttcaatgacatcagccaggactggcgtctgcggcattttgtcggctgggtgtggtacgaacgggaggtgatcctgccggagcgatggacccaggacctgcgcacaagagtggtgctgaggattggcagtgcccattcctatgccatcgtgggctggtgaattaccagatctctgtcaagggcagtaacctgttcaagttggaagtgcgtcttttggatgcagaaaacaaagtcgtggcgaatgggactgggacccagggccaacttaaggtgccaggtgtcagcctctggtggccgtacctgatgcacgaacgccctgcctatctgtattcattggaggtgcagctgactgcacagacgtcactggggcctgtgtctgacttctacacactccctgtggggatccgcactgtggctgtcaccaagagccagttcctcatcaatgggaaacctttctatttccacggtgtcaacaagcatgaggatgcggacatccgagggaagggcttcgactggccgctgctggtgaaggacttcaacctgcttcgctggcttggtgccaacgctttccgtaccagccactacccctatgcagaggaagtgatgcagatgtgtgaccgctatgggattgtggtcatcgatgagtgtcccggcgtgggcctggcgctgccgcagttcttcaacaacgtttctctgcatcaccacatgcaggtgatggaagaagtggtgcgtagggacaagaaccaccccgcggtcgtgatgtggtctgtggccaacgagcctgcgtcccacctagaatctgctggctactacttgaagatggtgatcgctcacaccaaatccttggacccctcccggcctgtgacctttgtgagcaactctaactatgcagcagacaagggggctccgtatgtggatgtgatctgtttgaacagctactactcttggtatcacgactacgggcacctggagttgattcagctgcagctggccacccagtttgagaactggtataagaagtatcagaagcccattattcagagcgagtatggagcagaaacgattgcagggtttcaccaggatccacctctgatgttcactgaagagtaccagaaaagtctgctagagcagtaccatctgggtctggatcaaaaacgcagaaaatacgtggttggagagctcatttggaattttgccgatttcatgactgaacagtcaccgacgagagtgctggggaataaaaaggggatcttcactcggcagagacaaccaaaaagtgcagcgttccttttgcgagagagatactggaagattgccaatgaaaccaggtatccccactcagtagccaagtcacaatgtttggaaaacagcctgtttacttgagcaagactgataccacctgcgtgtcccttcctccccgagtcagggcgacttccacagcagcagaacaagtgcctcctggactgttcacggcagaccagaacgtttctggcctgggttttgtggtcatctattctagcagggaacactaaaggtggaaataaaagattttctattatggaaataaagagttggcatgaaa

SEQ ID NO: 137382 - DNA, 933 bp, Homo sapiens
  Payload ID: 6897
  Gene Symbol: GUSB
  Gene Name: glucuronidase, beta
  ENST ID: ENST00000446111
  CDS Start-End: 31-465
agacggtggccgagcgggggaccgggaagcatggcccgggggtcggcggttgcctgggcggcgctcgggccgttgttgtggggctgcgcgctggggctgcagggcgggatgctgtacccccaggagagcccgtcgcgggagtgcaaggagctggacggcctctggagcttccgcgccgacttctctgacaaccgacgccggggcttcgaggagcagtggtaccggcggccgctgtgggagtcaggccccaccgtggacatgccagttccctccagcttcaatgacatcagccaggactggcgtctgcggcattttgtcggctgggtgtggtacgaacgggaggtgatcctgccggagcgatggacccaggacctgcgcacaagagtggtgctgaggattggcagtgcccattcctatgccatcgtggtatcccaagggttactttgtccagaacacatattttgactttttcaactacgctggactgcagcggtctgtacttctgtacacgacacccaccacctacatcgatgacatcaccgtcaccaccagcgtggagcaagacagtggtgagggcttctgggctggtgaattaccagatctctgtcaagggcagtaacctgttcaagttggaagtgcgtcttttggatgcagaaaacaaagtcgtggcgaatgggactgggacccagggccaacttaaggtgccaggtgtcagcctctggtggccgtacctgatgcacgaacgccctgcctatctgtattcattggaggtaatggtggtttgggacatgcctaagggaggtcttttgcccccatgtggtgaccctggcttcagcaggagcccaagacaggtggatgggcaggcatggtcctctgagctttctgatgtttctcacccttggtgggaggcccattttcttttttttttttttt

SEQ ID NO: 137383 - DNA, 1029 bp, Homo sapiens
  Payload ID: 6898
  Gene Symbol: GAD1
  Gene Name: glutamate decarboxylase 1 (brain, 67kDa)
  Uniprot ID: Q99259
  ENST ID: ENST00000344257
  CDS Start-End: 201-875
gagggaactagcgagaacgaggaagcagctggaggtgacgccgggcagattacgcctgtcagggccgagccgagcggatcgctgggcgctgtgcagaggaaaggcgggagtgcccggctcgctgtcgcagagccgagcctgtttctgcgccggaccagtcgaggactctggacagtagaggccccgggacgaccgagctgatggcgtcttcgaccccatcttcgtccgcaacctcctcgaacgcgggagcggaccccaataccactaacctgcgccccacaacgtacgatacctggtgcggcgtggcccatggatgcaccagaaaactggggctcaagatctgcggcttcttgcaaaggaccaacagcctggaagagaagagtcgccttgtgagtgccttcaaggagaggcaatcctccaagaacctgctttcctgtgaaaacagcgaccgggatgcccgcttccggcgcacagagactgacttctctaatctgtttgctagagatctgcttccggctaagaacggtgaggagcaaaccgtgcaattcctcctggaagtggtggacatactcctcaactatgtccgcaagacatttgatcgctccaccaaggtgctggactttcatcacccacaccagttgctggaaggcatggagggcttcaacttggagctctctgaccaccccgagtccctggagcagatcctggttgactgcagagacaccttgaagtatggggttcgcacaggtcatcctcgatttttcaaccagctctccactggattggatattattggcctagctggagaatggctgacatcaacggccaataccaacatgccatcagacatgagggagtgttggttgctacggtgatggggctcagagcagaaccaaagcatgattgtgacctccagaggtgatggtaactgcacacatggtttccaagggtcttcctcctaaatttccaggggcctcccaaggaaaatggacatattctttttggaaataaaatacttctaccaacata

SEQ ID NO: 137384 - DNA, 3604 bp, Homo sapiens
  Payload ID: 6898
  Gene Symbol: GAD1
  Gene Name: glutamate decarboxylase 1 (brain, 67kDa)
  Uniprot ID: Q99259
  ENST ID: ENST00000358196
  CDS Start-End: 551-2335
gaattcttcgtaggaattatcttttccctcctctcacccgacagcctgcctatttccaaaggaaaaaaaaaaagcgtgttgagtacgttctggattactcataagaccttttttttttccttccgggcgcaaaaccgtgagctggatttataatcgccctataaagctccagaggcggtcaggcacctgcagaggagccccgccgctccgccgactagctgcccccgcgagcaacggcctcgtgatttccccgccgatccggtccccgcctccccactctgcccccgcctaccccggagccgtgcagccgcctctccgaatctctctcttctcctggcgctcgcgtgcgagagggaactagcgagaacgaggaagcagctggaggtgacgccgggcagattacgcctgtcagggccgagccgagcggatcgctgggcgctgtgcagaggaaaggcgggagtgcccggctcgctgtcgcagagccgagcctgtttctgcgccggaccagtcgaggactctggacagtagaggccccgggacgaccgagctgatggcgtcttcgaccccatcttcgtccgcaacctcctcgaacgcgggagcggaccccaataccactaacctgcgccccacaacgtacgatacctggtgcggcgtggcccatggatgcaccagaaaactggggctcaagatctgcggcttcttgcaaaggaccaacagcctggaagagaagagtcgccttgtgagtgccttcaaggagaggcaatcctccaagaacctgctttcctgtgaaaacagcgaccgggatgcccgcttccggcgcacagagactgacttctctaatctgtttgctagagatctgcttccggctaagaacggtgaggagcaaaccgtgcaattcctcctggaagtggtggacatactcctcaactatgtccgcaagacatttgatcgctccaccaaggtgctggactttcatcacccacaccagttgctggaaggcatggagggcttcaacttggagctctctgaccaccccgagtccctggagcagatcctggttgactgcagagacaccttgaagtatggggttcgcacaggtcatcctcgatttttcaaccagctctccactggattggatattattggcctagctggagaatggctgacatcaacggccaataccaacatgtttacatatgaaattgcaccagtgtttgtcctcatggaacaaataacacttaagaagatgagagagatagttggatggtcaagtaaagatggtgatgggatattttctcctgggggcgccatatccaacatgtacagcatcatggctgctcgctacaagtacttcccggaagttaagacaaagggcatggcggctgtgcctaaactggtcctcttcacctcagaacagagtcactattccataaagaaagctggggctgcacttggctttggaactgacaatgtgattttgataaagtgcaatgaaagggggaaaataattccagctgattttgaggcaaaaattcttgaagccaaacagaagggatatgttcccttttatgtcaatgcaactgctggcacgactgtttatggagcttttgatccgatacaagagattgcagatatatgtgagaaatataacctttggttgcatgtcgatgctgcctggggaggtgggctgctcatgtccaggaagcaccgccataaactcaacggcatagaaagggccaactcagtcacctggaaccctcacaagatgatgggcgtgctgttgcagtgctctgccattctcgtcaaggaaaagggtatactccaaggatgcaaccagatgtgtgcaggatacctcttccagccagacaagcagtatgatgtctcctacgacaccggggacaaggcaattcagtgtggccgccacgtggatatcttcaagttctggctgatgtggaaagcaaagggcacagtgggatttgaaaaccagatcaacaaatgcctggaactggctgaatacctctatgccaagattaaaaacagagaagaatttgagatggttttcaatggcgagcctgagcacacaaacgtctgtttttggtatattccacaaagcctcaggggtgtgccagacagccctcaacgacgggaaaagctacacaaggtggctccaaaaatcaaagccctgatgatggagtcaggtacgaccatggttggctaccagccccaaggggacaaggccaacttcttccggatggtcatctccaacccagccgctacccagtctgacattgacttcctcattgaggagatagaaagactgggccaggatctgtaatcatccttcgcagaacatgagtttatgggaatgccttttccctctggcactccagaacaaacctctatatgttgctgaaacacacaggccatttcattgagggaaaacataatatcttgaagaatattgttaaaaccttacttaaagcttgtttgttctagttagcaggaaatagtgttctttttaaaaagttgcacattaggaacagagtatatatgtacagttatacatacctctctctatatatacatgtatagtgagtgtggcttagtaatagatcacggcatgtttcccgctccaagagaattcactttaccttcagcagttaccgaggagctaaacatgctgccaaccagcttgtccaacaactccaggaaaactgtttttcaaaacgccatgtcctaggggccgagggaaatgctgttggtgagaatcgacctcactgtcagcgtttctccacctgaagtgatgatggatgagaaaaaacaccaccaaatgacaagtcacaccctccccattagtatcctgttaggggaaaatagtagcagagtcattgttacaggtgtactatggctgtatttttagagattaatttgtgtagattgtgtaaattcctgttgtctgaccttggtggtgggagggggagactatgtgtcatgatttcaatgattgtttaattgtaggtcaatgaaatatttgcttatttatattcagagatgtaccatgttaaagaggcgtcttgtattttcttcccatttgtaatgtatcttatttatatatgaagtaagttctgaaaactgtttatggtattttcgtgcatttgtgagccaaagagaaaagattaaaattagtgagatttgtatttatattagagtgcccttaaaataatgatttaagcattttactgtctgtaagagaattctaagattgtacataaagtcatatatatggaaatcctgttacttaaatagcatctgctcttctcttacgctctctgtctggctgtacgtctggtgttctcaatgcttttctagcaactgttggataataactagatctcctgtaattttgtagtagttgatgaccaatctctgtgactcgcttagctgaaacctaaggcaacatttccgaagaccttctgaagatctcagataaagtgaccaggctcacaactgtttttgaagaagggaaattcacactgtgcgttttagagtatgcaagaagaatataaataaataaaaatattctccatggagaatttgaacaaaa

SEQ ID NO: 137385 - DNA, 1252 bp, Homo sapiens
  Payload ID: 6898
  Gene Symbol: GAD1
  Gene Name: glutamate decarboxylase 1 (brain, 67kDa)
  Uniprot ID: Q99259
  ENST ID: ENST00000375272
  CDS Start-End: 427-1101
gcaaaaccgtgagctggatttataatcgccctataaagctccagaggcggtcaggcacctgcagaggagccccgccgctccgccgactagctgcccccgcgagcaacggcctcgtgatttccccgccgatccggtccccgcctccccactctgcccccgcctaccccggagccgtgcagccgcctctccgaatctctctcttctcctggcgctcgcgtgcgagagggaactagcgagaacgaggaagcagctggaggtgacgccgggcagattacgcctgtcagggccgagccgagcggatcgctgggcgctgtgcagaggaaaggcgggagtgcccggctcgctgtcgcagagccgaggtggcctgtttctgcgccggaccagtcgaggactctggacagtagaggccccgggacgaccgagctgatggcgtcttcgaccccatcttcgtccgcaacctcctcgaacgcgggagcggaccccaataccactaacctgcgccccacaacgtacgatacctggtgcggcgtggcccatggatgcaccagaaaactggggctcaagatctgcggcttcttgcaaaggaccaacagcctggaagagaagagtcgccttgtgagtgccttcaaggagaggcaatcctccaagaacctgctttcctgtgaaaacagcgaccgggatgcccgcttccggcgcacagagactgacttctctaatctgtttgctagagatctgcttccggctaagaacggtgaggagcaaaccgtgcaattcctcctggaagtggtggacatactcctcaactatgtccgcaagacatttgatcgctccaccaaggtgctggactttcatcacccacaccagttgctggaaggcatggagggcttcaacttggagctctctgaccaccccgagtccctggagcagatcctggttgactgcagagacaccttgaagtatggggttcgcacaggtcatcctcgatttttcaaccagctctccactggattggatattattggcctagctggagaatggctgacatcaacggccaataccaacatgccatcagacatgagggagtgttggttgctacggtgatggggctcagagcagaaccaaagcatgattgtgacctccagaggtgatggtaactgcacacatggtttccaagggtcttcctcctaaatttccaggggcctcccaaggaaaatggacatattctttttggaaataaaatacttctaccaac

SEQ ID NO: 137386 - DNA, 556 bp, Homo sapiens
  Payload ID: 6898
  Gene Symbol: GAD1
  Gene Name: glutamate decarboxylase 1 (brain, 67kDa)
  ENST ID: ENST00000456864
  CDS Start-End: 194-556
aggtagaggagaaacgctgaaaccggaccgaaacctcgccctaggcttagcgatggctaaaaaccggctgggataagagggaggcaagcaacattccgactcgctgctttctggctgtctggagtgcaagcctgtttctgcgccggaccagtcgaggactctggacagtagaggccccgggacgaccgagctgatggcgtcttcgaccccatcttcgtccgcaacctcctcgaacgcgggagcggaccccaataccactaacctgcgccccacaacgtacgatacctggtgcggcgtggcccatggatgcaccagaaaactggggctcaagatctgcggcttcttgcaaaggaccaacagcctggaagagaagagtcgccttgtgagtgccttcaaggagaggcaatcctccaagaacctgctttcctgtgaaaacagcgaccgggatgcccgcttccggcgcacagagactgacttctctaatctgtttgctagagatctgcttccggctaagaacggtgaggagcaaaccgtgcaattcctcctggaagtggtg

SEQ ID NO: 137387 - DNA, 639 bp, Homo sapiens
  Payload ID: 6898
  Gene Symbol: GAD1
  Gene Name: glutamate decarboxylase 1 (brain, 67kDa)
  ENST ID: ENST00000445006
  CDS Start-End: 528-639
gtgcgtgtcatcaaccttcaaacgtgattaatcaggaggccttcttttcccatcaccaagggggccaaagcgaggagcgagcgcatagcaaaagggacgcggggtccttttctctgccggtggcactgggtagctgtggccagctccagaggcggtcaggcacctgcagaggagccccgccgctccgccgactagctgcccccgcgagcaacggcctcgtgatttccccgccgatccggtccccgcctccccactctgcccccgcctaccccggagccgtgcagccgcctctccgaatctctctcttctcctggcgctcgcgtgcgagagggaactagcgagaacgaggaagcagctggaggtgacgccgggcagattacgcctgtcagggccgagccgagcggatcgctgggcgctgtgcagaggaaaggcgggagtgcccggctcgctgtcgcagagccgagcctgtttctgcgccggaccagtcgaggactctggacagtagaggccccgggacgaccgagctgatggcgtcttcgaccccatcttcgtccgcaacctcctcgaacgcgggagcggaccccaataccactaacctgcgccccacaacgtacgatacctggtgcggcgtggcccatg

SEQ ID NO: 137388 - DNA, 529 bp, Homo sapiens
  Payload ID: 6898
  Gene Symbol: GAD1
  Gene Name: glutamate decarboxylase 1 (brain, 67kDa)
  ENST ID: ENST00000454603
  CDS Start-End: 274-529
attttcctgcctcccagctgtgagtgttgtgtggtctgttgggatgggggtgtggatttagctatgatccttcaaaaaagtccagaataattcagggaactatctttaaagtacaaaaacagcaaatggaccttagctccgacttaagcagaatgaaaggttaagtaacgcttcccccagttctcgtctcgggagacagacgtttaaccgcctgtttctgcgccggaccagtcgaggactctggacagtagaggccccgggacgaccgagctgatggcgtcttcgaccccatcttcgtccgcaacctcctcgaacgcgggagcggaccccaataccactaacctgcgccccacaacgtacgatacctggtgcggcgtggcccatggatgcaccagaaaactggggctcaagatctgcggcttcttgcaaaggaccaacagcctggaagagaagagtcgccttgtgagtgccttcaaggagaggcaatcctccaagaacctgctttcctgtgaaaacagcgaccgggatg

SEQ ID NO: 137389 - DNA, 1780 bp, Homo sapiens
  Payload ID: 6898
  Gene Symbol: GAD1
  Gene Name: glutamate decarboxylase 1 (brain, 67kDa)
  ENST ID: ENST00000414527
  CDS Start-End: 75-776
gcagagccgagcctgtttctgcgccggaccagtcgaggactctggacagtagaggccccgggacgaccgagctgatggcgtcttcgaccccatcttcgtccgcaacctcctcgaacgcgggagcggaccccaataccactaacctgcgccccacaacgtacgatacctggtgcggcgtggcccatggatgcaccagaaaactggggctcaagatctgcggcttcttgcaaaggaccaacagcctggaagagaagagtcgccttgtgagtgccttcaaggagaggcaatcctccaagaacctgctttcctgtgaaaacagcgaccgggatgcccgcttccggcgcacagagactgacttctctaatctgtttgctagagatctgcttccggctaagaacggtgaggagcaaaccgtgcaattcctcctggaagtggtggacatactcctcaactatgtccgcaagacatttgatcgctccaccaaggtgctggactttcatcacccacaccagttgctggaaggcatggagggcttcaacttggagctctctgaccaccccgagtccctggagcagatcctggttgactgcagagacaccttgaagtatggggttcgcacaggtcatcctcgatttttcaaccagctctccactggattggatattattggcctagctggagaatggctgacatcaacggccaataccaacatggggcgccatatccaacatgtacagcatcatggctgctcgctacaagtacttcccggaagttaagacaaagggcatggcggctgtgcctaaactggtcctcttcacctcagaacagagtcactattccataaagaaagctggggctgcacttggctttggaactgacaatgtgattttgataaagtgcaatgaaagggggaaaataattccagctgattttgaggcaaaaattcttgaagccaaacagaagggatatgttcccttttatgtcaatgcaactgctggcacgactgtttatggagcttttgatccgatacaagagattgcagatatatgtgagaaatataacctttggttgcatgtcgatgctgcctggggaggtgggctgctcatgtccaggaagcaccgccataaactcaacggcatagaaagggccaactcagtcacctggaaccctcacaagatgatgggcgtgctgttgcagtgctctgccattctcgtcaaggaaaagggtatactccaaggatgcaaccagatgtgtgcaggatacctcttccagccagacaagcagtatgatgtctcctacgacaccggggacaaggcaattcagtgtggccgccacgtggatatcttcaagttctggctgatgtggaaagcaaagggcacagtgggatttgaaaaccagatcaacaaatgcctggaactggctgaatacctctatgccaagattaaaaacagagaagaatttgagatggttttcaatggcgagcctgagcacacaaacgtctgtttttggtatattccacaaagcctcaggggtgtgccagacagccctcaacgacgggaaaagctacacaaggtggctccaaaaatcaaagccctgatgatggagtcaggtacgaccatggttggctaccagccccaaggggacaaggccaacttcttccggatggtcatctccaacccagccgctacccagtctgacattgacttcctcattgaggagatagaaagactgggccaggatctgtaatcatccttcgcagaacatgagtttatgggaatgc

SEQ ID NO: 137390 - DNA, 571 bp, Homo sapiens
  Payload ID: 6898
  Gene Symbol: GAD1
  Gene Name: glutamate decarboxylase 1 (brain, 67kDa)
  ENST ID: ENST00000455008
  CDS Start-End: 226-571
ttcttatccctgccctccggattcacgccccggggaagcacggaggctgaggctctagttgaagtggggcaagagcgattttcccttgagcttccatgctgcgagcgcctgtccctccaaagggcgcctgggcagcagcagccgaaggcgctactaggaacgcctgtttctgcgccggaccagtcgaggactctggacagtagaggccccgggacgaccgagctgatggcgtcttcgaccccatcttcgtccgcaacctcctcgaacgcgggagcggaccccaataccactaacctgcgccccacaacgtacgatacctggtgcggcgtggcccatggatgcaccagaaaactggggctcaagatctgcggcttcttgcaaaggaccaacagcctggaagagaagagtcgccttgtgagtgccttcaaggagaggcaatcctccaagaacctgctttcctgtgaaaacagcgaccgggatgcccgcttccggcgcacagagactgacttctctaatctgtttgctagagatctgcttccggctaagaacggtgaggagcaaaccgtgcaat

SEQ ID NO: 137391 - DNA, 3988 bp, Homo sapiens
  Payload ID: 6898
  Gene Symbol: GAD1
  Gene Name: glutamate decarboxylase 1 (brain, 67kDa)
  Uniprot ID: Q99259
  ENST ID: ENST00000493875
  CDS Start-End: 823-2100
ggtagaggagaaacgctgaaaccggaccgaaacctcgccctaggcttagcgatggctaaaaaccggctgggataagagggaggcaagcaacattccgactcgctgctttctggctgtctggagtgcaaggtgactgtggttcttctctggccaagtccgagggagaacgtaaagatatgggcctttttccccctctcaccttgtctcaccaaagtccctagtccccggagcagttagcctctttctttccagggaattagccagacacaacaacgggaaccagacaccgaaccagacatgcccgccccgtgcgccctccccccgctggcccacacgccggctgctgagtgcccaatggggcttgtagcggctcggctggaaaatcgctcactgagcgctcccctgtgctcctagcctagtcccccacacccttgcgtcttgtactggccttggacccccaccccgaccccgaccccgcctcgtctcggcgcttcactccaggtcgcgccgatgcaccgccagactcgagagcggcccagggctacgctccctgcgccccagtaccggagctagcgcgcacgtctcctccgctgcccccacccctgcgcacccctaccaggcaggctcgctgcctttcctccctcttgtctctccagagccggatcttcaaggggagcctccgtgcccccggctgctcagtccctccggtgtgcaggaccccggaagtcctccccgcacagctctcgcttctctttgcagcctgtttctgcgccggaccagtcgaggactctggacagtagaggccccgggacgaccgagctgatggcgtcttcgaccccatcttcgtccgcaacctcctcgaacgcgggagcggaccccaataccactaacctgcgccccacaacgtacgatacctggtgcggcgtggcccatggatgcaccagaaaactggggctcaagatctgcggcttcttgcaaaggaccaacagcctggaagagaagagtcgccttgtgagtgccttcaaggagaggcaatcctccaagaacctgctttcctgtgaaaacagcgaccgggatgcccgcttccggcgcacagagactgacttctctaatctgtttgctagagatctgcttccggctaagaacggtgaggagcaaaccgtgcaattcctcctggaagtggtggacatactcctcaactatgtccgcaagacatttgatcgctccaccaaggtgctggactttcatcacccacaccagttgctggaaggcatggagggcttcaacttggagctctctgaccaccccgagtccctggagcagatcctggttgactgcagagacaccttgaagtatggggttcgcacaggtcatcctcgatttttcaaccagctctccactggattggatattattggcctagctggagaatggctgacatcaacggccaataccaacatgtttacatatgaaattgcaccagtgtttgtcctcatggaacaaataacacttaagaagatgagagagatagttggatggtcaagtaaagatggtgatgggatattttctcctgggggcgccatatccaacatgtacagcatcatggctgctcgctacaagtacttcccggaagttaagacaaagggcatggcggctgtgcctaaactggtcctcttcacctcagaacagagtcactattccataaagaaagctggggctgcacttggctttggaactgacaatgtgattttgataaagtgcaatgaaagggggaaaataattccagctgattttgaggcaaaaattcttgaagccaaacagaagggatatgttcccttttatgtcaatgcaactgctggcacgactgtttatggagcttttgatccgatacaagagattgcagatatatgtgagaaatataacctttggttgcatgtcgatggatttaacttctcacaattggccaataggatcatctgccttgctactgaactaatgactaacaaaggctgtgtcacgtggcatcccaactattcagtaaacatgcatcatggctgcctggggaggtgggctgctcatgtccaggaagcaccgccataaactcaacggcatagaaagggccaactcagtcacctggaaccctcacaagatgatgggcgtgctgttgcagtgctctgccattctcgtcaaggaaaagggtatactccaaggatgcaaccagatgtgtgcaggatacctcttccagccagacaagcagtatgatgtctcctacgacaccggggacaaggcaattcagtgtggccgccacgtggatatcttcaagttctggctgatgtggaaagcaaagggcacagtgggatttgaaaaccagatcaacaaatgcctggaactggctgaatacctctatgccaagattaaaaacagagaagaatttgagatggttttcaatggcgagcctgagcacacaaacgtctgtttttggtatattccacaaagcctcaggggtgtgccagacagccctcaacgacgggaaaagctacacaaggtggctccaaaaatcaaagccctgatgatggagtcaggtacgaccatggttggctaccagccccaaggggacaaggccaacttcttccggatggtcatctccaacccagccgctacccagtctgacattgacttcctcattgaggagatagaaagactgggccaggatctgtaatcatccttcgcagaacatgagtttatgggaatgccttttccctctggcactccagaacaaacctctatatgttgctgaaacacacaggccatttcattgagggaaaacataatatcttgaagaatattgttaaaaccttacttaaagcttgtttgttctagttagcaggaaatagtgttctttttaaaaagttgcacattaggaacagagtatatatgtacagttatacatacctctctctatatatacatgtatagtgagtgtggcttagtaatagatcacggcatgtttcccgctccaagagaattcactttaccttcagcagttaccgaggagctaaacatgctgccaaccagcttgtccaacaactccaggaaaactgtttttcaaaacgccatgtcctaggggccgagggaaatgctgttggtgagaatcgacctcactgtcagcgtttctccacctgaagtgatgatggatgagaaaaaacaccaccaaatgacaagtcacaccctccccattagtatcctgttaggggaaaatagtagcagagtcattgttacaggtgtactatggctgtatttttagagattaatttgtgtagattgtgtaaattcctgttgtctgaccttggtggtgggagggggagactatgtgtcatgatttcaatgattgtttaattgtaggtcaatgaaatatttgcttatttatattcagagatgtaccatgttaaagaggcgtcttgtattttcttcccatttgtaatgtatcttatttatatatgaagtaagttctgaaaactgtttatggtattttcgtgcatttgtgagccaaagagaaaagattaaaattagtgagatttgtatttatattagagtgcccttaaaataatgatttaagcattttactgtctgtaagagaattctaagattgtacataaagtcatatatatggaaatcctgttacttaaatagcatctgctcttctcttacgctctctgtctggctgtacgtctggtgttctcaatgcttttctagcaactgttggataataactagatctcctgtaattttgtagtagttgatgaccaatctctgtgactcgcttagctgaaacctaaggcaacatttccgaagaccttctgaagatctcagataaagtgaccaggctcacaactgtttttgaagaagggaaattcacactgtgcgttttagagtatgcaagaagaatataaataaataaaaatattctccatggagaatttgaacaaaa

SEQ ID NO: 137392 - DNA, 461 bp, Homo sapiens
  Payload ID: 6898
  Gene Symbol: GAD1
  Gene Name: glutamate decarboxylase 1 (brain, 67kDa)
  ENST ID: ENST00000486850
  CDS Start-End: 1-254
cgtacgatacctggtgcggcgtggcccatggatgcaccagaaaactggggctcaagatctgcggcttcttgcaaaggaccaacagcctggaagagaagagtcgccttgtgagtgccttcaaggagaggcaatcctccaagaacctgctttcctgtgaaaacagcgaccgggatgcccgcttccggcgcacagagactgacttctctaatctgtttgctagaggtagcccctgccccactcccgccccatgctagccagtagatttcttatttgagtttcttgactttttcctgcaattttacttcttttatcaagaaatgtcattattctctctgaacccacatgaaactgcttttgtgactttgggggaatataattgactccctccctccctgctggccaggtctccatcattttggaaactggatgaaggcagtcaataaaagtcaactctaaagaca

SEQ ID NO: 137393 - DNA, 3700 bp, Homo sapiens
  Payload ID: 6898
  Gene Symbol: GAD1
  Gene Name: glutamate decarboxylase 1 (brain, 67kDa)
  Uniprot ID: Q99259
  ENST ID: ENST00000625689
  CDS Start-End: 551-1828
gaattcttcgtaggaattatcttttccctcctctcacccgacagcctgcctatttccaaaggaaaaaaaaaaagcgtgttgagtacgttctggattactcataagaccttttttttttccttccgggcgcaaaaccgtgagctggatttataatcgccctataaagctccagaggcggtcaggcacctgcagaggagccccgccgctccgccgactagctgcccccgcgagcaacggcctcgtgatttccccgccgatccggtccccgcctccccactctgcccccgcctaccccggagccgtgcagccgcctctccgaatctctctcttctcctggcgctcgcgtgcgagagggaactagcgagaacgaggaagcagctggaggtgacgccgggcagattacgcctgtcagggccgagccgagcggatcgctgggcgctgtgcagaggaaaggcgggagtgcccggctcgctgtcgcagagccgagcctgtttctgcgccggaccagtcgaggactctggacagtagaggccccgggacgaccgagctgatggcgtcttcgaccccatcttcgtccgcaacctcctcgaacgcgggagcggaccccaataccactaacctgcgccccacaacgtacgatacctggtgcggcgtggcccatggatgcaccagaaaactggggctcaagatctgcggcttcttgcaaaggaccaacagcctggaagagaagagtcgccttgtgagtgccttcaaggagaggcaatcctccaagaacctgctttcctgtgaaaacagcgaccgggatgcccgcttccggcgcacagagactgacttctctaatctgtttgctagagatctgcttccggctaagaacggtgaggagcaaaccgtgcaattcctcctggaagtggtggacatactcctcaactatgtccgcaagacatttgatcgctccaccaaggtgctggactttcatcacccacaccagttgctggaaggcatggagggcttcaacttggagctctctgaccaccccgagtccctggagcagatcctggttgactgcagagacaccttgaagtatggggttcgcacaggtcatcctcgatttttcaaccagctctccactggattggatattattggcctagctggagaatggctgacatcaacggccaataccaacatgtttacatatgaaattgcaccagtgtttgtcctcatggaacaaataacacttaagaagatgagagagatagttggatggtcaagtaaagatggtgatgggatattttctcctgggggcgccatatccaacatgtacagcatcatggctgctcgctacaagtacttcccggaagttaagacaaagggcatggcggctgtgcctaaactggtcctcttcacctcagaacagagtcactattccataaagaaagctggggctgcacttggctttggaactgacaatgtgattttgataaagtgcaatgaaagggggaaaataattccagctgattttgaggcaaaaattcttgaagccaaacagaagggatatgttcccttttatgtcaatgcaactgctggcacgactgtttatggagcttttgatccgatacaagagattgcagatatatgtgagaaatataacctttggttgcatgtcgatggatttaacttctcacaattggccaataggatcatctgccttgctactgaactaatgactaacaaaggctgtgtcacgtggcatcccaactattcagtaaacatgcatcatggctgcctggggaggtgggctgctcatgtccaggaagcaccgccataaactcaacggcatagaaagggccaactcagtcacctggaaccctcacaagatgatgggcgtgctgttgcagtgctctgccattctcgtcaaggaaaagggtatactccaaggatgcaaccagatgtgtgcaggatacctcttccagccagacaagcagtatgatgtctcctacgacaccggggacaaggcaattcagtgtggccgccacgtggatatcttcaagttctggctgatgtggaaagcaaagggcacagtgggatttgaaaaccagatcaacaaatgcctggaactggctgaatacctctatgccaagattaaaaacagagaagaatttgagatggttttcaatggcgagcctgagcacacaaacgtctgtttttggtatattccacaaagcctcaggggtgtgccagacagccctcaacgacgggaaaagctacacaaggtggctccaaaaatcaaagccctgatgatggagtcaggtacgaccatggttggctaccagccccaaggggacaaggccaacttcttccggatggtcatctccaacccagccgctacccagtctgacattgacttcctcattgaggagatagaaagactgggccaggatctgtaatcatccttcgcagaacatgagtttatgggaatgccttttccctctggcactccagaacaaacctctatatgttgctgaaacacacaggccatttcattgagggaaaacataatatcttgaagaatattgttaaaaccttacttaaagcttgtttgttctagttagcaggaaatagtgttctttttaaaaagttgcacattaggaacagagtatatatgtacagttatacatacctctctctatatatacatgtatagtgagtgtggcttagtaatagatcacggcatgtttcccgctccaagagaattcactttaccttcagcagttaccgaggagctaaacatgctgccaaccagcttgtccaacaactccaggaaaactgtttttcaaaacgccatgtcctaggggccgagggaaatgctgttggtgagaatcgacctcactgtcagcgtttctccacctgaagtgatgatggatgagaaaaaacaccaccaaatgacaagtcacaccctccccattagtatcctgttaggggaaaatagtagcagagtcattgttacaggtgtactatggctgtatttttagagattaatttgtgtagattgtgtaaattcctgttgtctgaccttggtggtgggagggggagactatgtgtcatgatttcaatgattgtttaattgtaggtcaatgaaatatttgcttatttatattcagagatgtaccatgttaaagaggcgtcttgtattttcttcccatttgtaatgtatcttatttatatatgaagtaagttctgaaaactgtttatggtattttcgtgcatttgtgagccaaagagaaaagattaaaattagtgagatttgtatttatattagagtgcccttaaaataatgatttaagcattttactgtctgtaagagaattctaagattgtacataaagtcatatatatggaaatcctgttacttaaatagcatctgctcttctcttacgctctctgtctggctgtacgtctggtgttctcaatgcttttctagcaactgttggataataactagatctcctgtaattttgtagtagttgatgaccaatctctgtgactcgcttagctgaaacctaaggcaacatttccgaagaccttctgaagatctcagataaagtgaccaggctcacaactgtttttgaagaagggaaattcacactgtgcgttttagagtatgcaagaagaatataaataaataaaaatattctccatg

SEQ ID NO: 137394 - DNA, 2462 bp, Homo sapiens
  Payload ID: 6899
  Gene Symbol: GAD2
  Gene Name: glutamate decarboxylase 2 (pancreatic islets and brain, 65kDa)
  Uniprot ID: Q05329
  ENST ID: ENST00000259271
  CDS Start-End: 146-1903
acccgccctcgccgctcggccccgccggtccccgcgcggtgccctcctcccgccacacgggcacgcacgcgcgcgcagggccaagcccgaggcagctcgcccgcagctcgcactcgcaggcgacctgctccagtctccaaagccgatggcatctccgggctctggcttttggtctttcgggtcggaagatggctctggggattccgagaatcccggcacagcgcgagcctggtgccaagtggctcagaagttcacgggcggcatcggaaacaaactgtgcgccctgctctacggagacgccgagaagccggcggagagcggcgggagccaacccccgcgggccgccgcccggaaggccgcctgcgcctgcgaccagaagccctgcagctgctccaaagtggatgtcaactacgcgtttctccatgcaacagacctgctgccggcgtgtgatggagaaaggcccactttggcgtttctgcaagatgttatgaacattttacttcagtatgtggtgaaaagtttcgatagatcaaccaaagtgattgatttccattatcctaatgagcttctccaagaatataattgggaattggcagaccaaccacaaaatttggaggaaattttgatgcattgccaaacaactctaaaatatgcaattaaaacagggcatcctagatacttcaatcaactttctactggtttggatatggttggattagcagcagactggctgacatcaacagcaaatactaacatgttcacctatgaaattgctccagtatttgtgcttttggaatatgtcacactaaagaaaatgagagaaatcattggctggccagggggctctggcgatgggatattttctcccggtggcgccatatctaacatgtatgccatgatgatcgcacgctttaagatgttcccagaagtcaaggagaaaggaatggctgctcttcccaggctcattgccttcacgtctgaacatagtcatttttctctcaagaagggagctgcagccttagggattggaacagacagcgtgattctgattaaatgtgatgagagagggaaaatgattccatctgatcttgaaagaaggattcttgaagccaaacagaaagggtttgttcctttcctcgtgagtgccacagctggaaccaccgtgtacggagcatttgaccccctcttagctgtcgctgacatttgcaaaaagtataagatctggatgcatgtggatgcagcttggggtgggggattactgatgtcccgaaaacacaagtggaaactgagtggcgtggagagggccaactctgtgacgtggaatccacacaagatgatgggagtccctttgcagtgctctgctctcctggttagagaagagggattgatgcagaattgcaaccaaatgcatgcctcctacctctttcagcaagataaacattatgacctgtcctatgacactggagacaaggccttacagtgcggacgccacgttgatgtttttaaactatggctgatgtggagggcaaaggggactaccgggtttgaagcgcatgttgataaatgtttggagttggcagagtatttatacaacatcataaaaaaccgagaaggatatgagatggtgtttgatgggaagcctcagcacacaaatgtctgcttctggtacattcctccaagcttgcgtactctggaagacaatgaagagagaatgagtcgcctctcgaaggtggctccagtgattaaagccagaatgatggagtatggaaccacaatggtcagctaccaacccttgggagacaaggtcaatttcttccgcatggtcatctcaaacccagcggcaactcaccaagacattgacttcctgattgaagaaatagaacgccttggacaagatttataataaccttgctcaccaagctgttccacttctctagagaacatgccctcagctaagccccctactgagaaacttcctttgagaattgtgcgacttcacaaaatgcaaggtgaacaccactttgtctctgagaacagacgttaccaattatggagtgtcaccagctgccaaaatcgtaggtgttggctctgctggtcactggagtagttgctactcttcagaatatggacaaagaaggcacaggtgtaaatatagtagcaggatgaggaacctcaaactgggtatcattttgcacgtgctcttctgttctcaaatgctaaatgcaaacactgtgtatttattagttaggtgtgccaaactaccgttcccaaattggtgtttctgaatgacatcaacattcccccaacattactccattactaaagacagaaaaaaataaaaacataaaatatacaaacatgtggcaacctgttcttcctaccaaatataaacttgtgtatgatccaagtattttatctgtgttgtctctctaaacccaaataaatgtgtaaatgtggacaca

SEQ ID NO: 137395 - DNA, 680 bp, Homo sapiens
  Payload ID: 6899
  Gene Symbol: GAD2
  Gene Name: glutamate decarboxylase 2 (pancreatic islets and brain, 65kDa)
  ENST ID: ENST00000376248
  CDS Start-End: 190-579
tccaagagggctctgaggccgtggcgctcttcccccagcgcggcccttgggatggcgggtggccgacgatccaggcgctcgtgcgctcactgaatcgatgacggctggcttccctaggccgctggggcctcggacctgctgccggcgtgtgatggagaaaggcccactttggcgtttctgcaagatgttatgaacattttacttcagtatgtggtgaaaagtttcgatagatcaaccaaagtgattgatttccattatcctaatgagcttctccaagaatataattgggaattggcagaccaaccacaaaatttggaggaaattttgatgcattgccaaacaactctaaaatatgcaattaaaacagggcatcctagatacttcaatcaactttctactggtttggatatggttggattagcagcagactggctgacatcaacagcaaatactaacatgttcacctatgaaattgctccagtatttgtgcttttggaatatgtcacactaaagaaaatgagagaaatcattggctggccagggggctctggcgatgggatattttctcccggtacatgatatttcaactttctttgtgttttttcttctaatatgcaatgccttgttgtaaacctagggaagattaaaaatctagcctatgcctctgcttaggttaaata

SEQ ID NO: 137396 - DNA, 5858 bp, Homo sapiens
  Payload ID: 6899
  Gene Symbol: GAD2
  Gene Name: glutamate decarboxylase 2 (pancreatic islets and brain, 65kDa)
  Uniprot ID: Q05329
  ENST ID: ENST00000376261
  CDS Start-End: 504-2261
gcggccgcccgcacttcccgcctctggctcgcccgaggacgcgctggcacgcctcccaccccctcactctgactccagctggcgtgcatggtctgcctcgcatcctcacgactcagctccctccctctctcgtgtttttttcctccgccgccccctcattcatccccactgggctccctttccctcaaatgctctggggctctccgcgctttcctgagtccgggctccgaggacccttaggtagtcccggtctcttttaaagctccccggcttccaaagggttgccacgtccctaaaccctgtctccagctcgcatacacacacgcacagacacgcacgttttctgttcctgcgtgacacccgccctcgccgctcggccccgccggtccccgcgcggtgccctcctcccgccacacgggcacgcacgcgcgcgcagggccaagcccgaggcagctcgcccgcagctcgcactcgcaggcgacctgctccagtctccaaagccgatggcatctccgggctctggcttttggtctttcgggtcggaagatggctctggggattccgagaatcccggcacagcgcgagcctggtgccaagtggctcagaagttcacgggcggcatcggaaacaaactgtgcgccctgctctacggagacgccgagaagccggcggagagcggcgggagccaacccccgcgggccgccgcccggaaggccgcctgcgcctgcgaccagaagccctgcagctgctccaaagtggatgtcaactacgcgtttctccatgcaacagacctgctgccggcgtgtgatggagaaaggcccactttggcgtttctgcaagatgttatgaacattttacttcagtatgtggtgaaaagtttcgatagatcaaccaaagtgattgatttccattatcctaatgagcttctccaagaatataattgggaattggcagaccaaccacaaaatttggaggaaattttgatgcattgccaaacaactctaaaatatgcaattaaaacagggcatcctagatacttcaatcaactttctactggtttggatatggttggattagcagcagactggctgacatcaacagcaaatactaacatgttcacctatgaaattgctccagtatttgtgcttttggaatatgtcacactaaagaaaatgagagaaatcattggctggccagggggctctggcgatgggatattttctcccggtggcgccatatctaacatgtatgccatgatgatcgcacgctttaagatgttcccagaagtcaaggagaaaggaatggctgctcttcccaggctcattgccttcacgtctgaacatagtcatttttctctcaagaagggagctgcagccttagggattggaacagacagcgtgattctgattaaatgtgatgagagagggaaaatgattccatctgatcttgaaagaaggattcttgaagccaaacagaaagggtttgttcctttcctcgtgagtgccacagctggaaccaccgtgtacggagcatttgaccccctcttagctgtcgctgacatttgcaaaaagtataagatctggatgcatgtggatgcagcttggggtgggggattactgatgtcccgaaaacacaagtggaaactgagtggcgtggagagggccaactctgtgacgtggaatccacacaagatgatgggagtccctttgcagtgctctgctctcctggttagagaagagggattgatgcagaattgcaaccaaatgcatgcctcctacctctttcagcaagataaacattatgacctgtcctatgacactggagacaaggccttacagtgcggacgccacgttgatgtttttaaactatggctgatgtggagggcaaaggggactaccgggtttgaagcgcatgttgataaatgtttggagttggcagagtatttatacaacatcataaaaaaccgagaaggatatgagatggtgtttgatgggaagcctcagcacacaaatgtctgcttctggtacattcctccaagcttgcgtactctggaagacaatgaagagagaatgagtcgcctctcgaaggtggctccagtgattaaagccagaatgatggagtatggaaccacaatggtcagctaccaacccttgggagacaaggtcaatttcttccgcatggtcatctcaaacccagcggcaactcaccaagacattgacttcctgattgaagaaatagaacgccttggacaagatttataataaccttgctcaccaagctgttccacttctctaggtagacaattaagttgtcacaaactgtgtgaatgtatttgtagtttgttccaaagtaaatctatttctatattgtggtgtcaaagtagagtttaaaaattaaacaaaaaagacattgctccttttaaaagtcctttcttaagtttagaatacctctctaagaattcgtgacaaaaggctatgttctaatcaataaggaaaagcttaaaattgttataaatacttcccttacttttaatatagtgtgcaaagcaaactttattttcacttcagactagtaggactgaatagtgccaaattgcccctgaatcataaaaggttctttggggtgcagtaaaaaggacaaagtaaatataaaatatatgttgacaataaaaactcttgcctttttcatagtattagaaaaaaatttctaatttacctatagcaacatttcaaatgtatttaaatacatataattttacaaaaggaaaatatatatattaaaaaagatatcctattttgtaacatatagatttttattttatataggttatacaaactgcgggggcagatataaaatctaagccagatttttttttcctttctcttaatggaggcacaataaaacacttagcaaagttattttgaaacattgacccacgaaattcttaaaaggtattattgcttctttctatacatgttatggcttatcacatctctaaagttagtatttcaagacaaacacaaaagaatactgcgagttctttaaaataattgatcccattggcagtaagattctcttcccctttaagttttccacccattttactcttagcggactcactctgcaagcgtgacaaaccaggcttcatctcagattaaattagggtaattgtctctattctgctttccagttcggcctgttttgaacagaaggttgatgctagttcttgaggcatcttccaaatagtattcttttattaggtcatttgaattaattagagaaagtaaaaataaaaccttatcagcctgagcaaagaggaatgaagcacactcccagaatgtggtgagcccagaaaattaaagttggccttgggagaagagatctctgtgggacaataatgacatcatcctggcgccatattgccactgtccaggaaagagaaatttacctccaggccagttgcgcatttccatcccctccccattcctccccacaaagtctctcccactagactccctaccactgggacccaaaatagttactttatattccatgggtggttgtttttcttccatgaaatgagcctctcaccctagattttgaggcattatcttaagattttcctttatccatctcccatcgagatccaaagtgaccagaatatgcagaaataataagatccttagaattcaaaatagtatttttaaaacatccttctttccctgtgaacctgatagaaaaacatgagctaacaaaagcttccatagatatttatggggtcacacatcgtcagattccaagtgctgattggagaacaatagattgatatgcagactgcaaatgcaaatttaggaacattctccatttctgaatggaccaggtagttcagtactcagactgcaggtatacaagggaagagagaaggccctgcccttcaacgggtagaaatgccctacaatataacatagagaaatgccctataatataaccacaggatccagccatctgaaattttcataagcttccccctacattatttctcctaggctatatgcaaaaacagtgataacttgatatgaacatggctttgggccctttctgtctagaaaaacaaatgggttcactatgacaatcagaaataaactctttcatctgtcccgcagaatttcatgaaggagtaaccttccattctaggctttgtctaatggccaagcattagacaaagcattagaaagcagttcctttctcaaaactgcctgctgagaataagcacatagctgcccgactatccggagcctcaggcccaaaggttccacttcagagacagagatgctaattgatccaacctgctgtccttcgtggagaagacagtggggcccagtgccctggtgaaccaaccctgctgtactccaggatgctttatcttttgagttacagatcctagattataaactgctgctttttaggttaatgagatggtaaaattttaaaggacaatttgtgcctatatatgaaattccagcaaaacaattctagcaacaacaatagctcttcttccccgctcccctaccccttcccagtactccttcaaattggctgagagccttgctcaggcctgtgcagggaaatccttaccaactgtagcccaaagaaggaagcaaataaaagcctagtaggtcccagtagtttaataaatcatcttgaaaggagatgtggaatcaggtcagaagagagtaagggaggaagggagggagggagggagggagggaaggagggagggaggaaggaaatgaagggagggagggagggaggaaagaagggagattatttttaatattagcccaaattcccagtgccatggtctttatgtgtgcccattctttacaaatcttagaaaagtttggttttagctttaatcagaactgacatggccattttcatttatacagcaatattgtgtttatcatttaaaatacttgaacaaacaagtgtgatatgtctttatctgagacctatacatggtatggacttcatatactgccacaggatgtgaggaaagaaaaggaaatcaattctgactgtgttgcctttattatctggataatactgtcttgtcacctcagattggggttgtgcactttagatctgaactgtacagtgttgcaaatcaacatgtgtttctgtaaaagcttgtacaatatattattgatatgtctttttctgtgtggtagctgtattgaactttgatattatgaaaactacatttgcatctgttcctgttctctctctctctctctttcctaactatatgccctccacatcggctctaatagagaacatgccctcagctaagccccctactgagaaacttcctttgagaattgtgcgacttcacaaaatgcaaggtgaacaccactttgtctctgagaacagacgttaccaattatggagtgtcaccagctgccaaaatcgtaggtgttggctctgctggtcactggagtagttgctactcttcagaatatggacaaagaaggcacaggtgtaaatatagtagcaggatgaggaacctcaaactgggtatcattttgcacgtgctcttctgttctcaaatgctaaatgcaaacactgtgtatttattagttaggtgtgccaaactaccgttcccaaattggtgtttctgaatgacatcaacattcccccaacattactccattactaaagacagaaaaaaataaaaacataaaatatacaaacatgtggcaacctgttcttcctaccaaatataaacttgtgtatgatccaagtattttatctgtgttgtctctctaaacccaaataaatgtgtaaatgtggacaca

SEQ ID NO: 137397 - DNA, 641 bp, Homo sapiens
  Payload ID: 6899
  Gene Symbol: GAD2
  Gene Name: glutamate decarboxylase 2 (pancreatic islets and brain, 65kDa)
  ENST ID: ENST00000428517
  CDS Start-End: 78-641
gcgcgcgcagggccaagcccgaggcagctcgcccgcagctcgcactcgcaggcgacctgctccagtctccaaagccgatggcatctccgggctctggcttttggtctttcgggtcggaagatggctctggggattccgagaatcccggcacagcgcgagcctggtgccaagtggctcagaagttcacgggcggcatcggaaacaaactgtgcgccctgctctacggagacgccgagaagccggcggagagcggcgggagccaacccccgcgggccgccgcccggaaggccgcctgcgcctgcgaccagaagccctgcagctgctccaaagtggatgtcaactacgcgtttctccatgcaacagacctgctgccggcgtgtgatggagaaaggcccactttggcgtttctgcaagatgttatgaacattttacttcagtatgtggtgaaaagtttcgatagatcaaccaaagtgattgatttccattatcctaatgagcttctccaagaatataattgggaattggcagaccaaccacaaaatttggaggaaattttgatgcattgccaaacaactctaaaatatgcaattaaaacaggtattgtctcatcgaaaataataaagctcttttttcgtttacaa

SEQ ID NO: 137398 - DNA, 3759 bp, Homo sapiens
  Payload ID: 6900
  Gene Symbol: GADL1
  Gene Name: glutamate decarboxylase-like 1
  Uniprot ID: Q6ZQY3
  ENST ID: ENST00000282538
  CDS Start-End: 152-1717
gcgcgtcctcgtccctccgtttgcactggtgttctctccgcggctgcctggtgcacctgcgggtcccccggggggcgctgcctcggcaaccaccgtcgccgcccagactgcgggagccgcgcccggggcagcctggagtgggggagcggagatgagcagcgactcggaccgccagtgtcctgtggacggagatattgatcaacaagagatgattccaagtaagaagaatgctgttcttgtggatggggttgtgctgaatggtcctacaacagatgcaaaagctggagaaaaatttgttgaagaggcctgtaggctaataatggaagaggtggttttgaaagctacagatgtcaatgagaaggtgtgtgaatggaggcctcctgaacaactgaaacagcttcttgatttggagatgagagactcaggcgagccaccccataaactattggaactctgtcgggatgtcatacactacagtgtcaaaactaaccacccaagatttttcaaccaattgtatgctggacttgattattactccttggtggcccgatttatgaccgaagcattgaatccaagtgtttatacgtatgaggtgtccccagtgtttctgttagtggaagaagcggttctgaagaaaatgattgaatttattggctggaaagaaggggatggaatatttaacccaggtggctcagtgtccaatatgtatgcaatgaatttagctagatacaaatattgtcctgatattaaggaaaaggggctgtctggttcgccaagattaatccttttcacatctgcagagtgtcattactctatgaagaaggcagcctcttttcttgggattggcactgagaatgtttgctttgtggaaacagatggaagaggtaaaatgatacctgaggaactggagaagcaagtctggcaagccagaaaagagggggcagcaccgtttcttgtctgtgccacttctggtacaactgtgttgggagcttttgaccctctggatgaaatagcagacatctgcgagaggcacagcctctggcttcatgtagatgcttcttggggtggctcagctttgatgtcgaggaagcaccgcaagcttctgcatggcatccacagggctgactctgtggcctggaacccacacaagatgctgatggctgggatccagtgctgtgctctccttgtgaaagacaaatctgatcttcttaaaaaatgctactctgccaaggcatcttacctcttccagcaggataaattctatgatgtgagctatgacacaggagacaagtctatccagtgtagcagaagaccagatgcattcaagttctggatgacctggaaggccctgggtacattaggccttgaagaaagagttaatcgtgctcttgctttatctaggtacctagtagatgaaatcaagaaaagagaaggattcaagttactgatggaacctgaatatgccaatatttgcttttggtacattccaccgagcctcagagagatggaagaaggacccgagttctgggcaaaacttaatttggtggccccagccattaaggagaggatgatgaagaagggaagcttgatgctgggctaccagccgcaccggggaaaggtcaacttcttccgccaggtggtgatcagccctcaagtgagccgggaggacatggacttcctcctggatgagatagacttactgggtaaagacatgtagctgtggctttggtcccccagaggcatagatcctatcctgggagagtttagatccagaacatcttggagatacacagtagattgcagcccttctgatgagaaatagggaatactcccagtccaggcccagcaaaaccaaaatgctaagcaatgaatattaaggactctctagctgcctgggcattactgttgctaaaagaagaaagtttaaaaaaaaaaatgattttctcaaggaatgcccctggaacacagctctgaagagagtttagtaagtaccatgtaggttctggattctaagcttacattgctctttaaagaacttataaactaacggtttaaagcagtggttctcaaagtgtggtccctggactatcagcatcaaagcatcacctgggaacttgctaaaaatgcagattctcaggctttctctagaccaactggatcagaagctctgggggtgaggcccagtattctgtgttttaacaagcccgtcagggaattctgatgcacagtaaaatccgagaaacactggtttaagaaaaaccttgtaatgatcgaatacccactctgatgttttgccagcaaagggatatctaatatttcagaagcctctgagccagtctttgaaaaaatacaactatggcatctgcagcacaaatatttaaggacatcagaagcatgtcaaagctatttttaaagagagaaactgtataagatgtttacttcatagagatttatgttttatgcaggctgaatgtttatctcaaaagttaaaattatccattctcaaaagttaaaattatatatatatatatatatacacacacacacatatatatatatatataattcaaagcacaataattgaaagcacaataattgacagaaaaatacaggttctattaataaattaataaactgttggtcttcaaaatagaaatgcatgtaatatccatattagttttttcttggtagacaactggaaggttttcttttttttcgtctatgactaattttctttattcaagatacctgaactggggtgctttttaagaaaaatttgggaaatatatatgtttctgtgatatacatatatacatatatatgtatatatatacacacacatacatatgtgtgtgtatagtatatatatatatacacacatatatgtttctgtgttcctcttttagcttgaggggcttgtttattatcttgctctgtgcctcatagggaataaacacaatgaagtccagggttgtacaacattccctttcctaagctttgaaatgtcagtatagattattaagtggtttatattacagaatctgggattcagcagactttcagtgtaaatgcttcctccatttctcctgagagtgggtgattttaattctatctctgaccctggtcctaggtttctaggagagttttgtttaactaagaaattgacagaattcataggtgtgggtgtagagttcaccaagataagattatgaatataattaaaggtctgcattaaaaggtgaatgattgaagagtgttaaagcattagacttagcacattcaataaccttttcgtactccattgttaaccaatgtcatttaaattttgagtactatttgcttttattgcttattttcattttagtgtgcacagtttctcggtatctctattggtcaaagaatattaaatctgtctctgaattacttcaaattctcaggtgaaacctattggtgtgtgtgtgtgtgtgtgtgtgtttattttgcatttcttgttgcctttttgttttaatgtctacataaaatatttctaaaattgatgtttgtaacaatttgggtttcatgaaacaaaaaggaacattactatacttagtgttgttgacttttcttttcctgtcatctcctctttactggattgtaccaatacattttagaagtgaactggacttggttggcattttagtttaatgactgaaaaagtaggttgaaagctctctgtattttagttaacaccttgaataaaatggaaaaagcagttatagc

SEQ ID NO: 137399 - DNA, 4509 bp, Homo sapiens
  Payload ID: 6900
  Gene Symbol: GADL1
  Gene Name: glutamate decarboxylase-like 1
  Uniprot ID: Q6ZQY3
  ENST ID: ENST00000454381
  CDS Start-End: 48-1304
agactgcgggagccgcgcccggggcagcctggagtgggggagcggagatgagcagcgactcggaccgccagtgtcctgtggacggagatattgatcaacaagagatgattccaagtaagaagaatgctgttcttgtggatggggttgtgctgaatggtcctacaacagatgcaaaagctggagaaaaatttgttgaagaggcctgtaggctaataatggaagaggtggttttgaaagctacagatgtcaatgagaaggtgtgtgaatggaggcctcctgaacaactgaaacagcttcttgatttggagatgagagactcaggcgagccaccccataaactattggaactctgtcgggatgtcatacactacagtgtcaaaactaaccacccaagatttttcaaccaattgtatgctggacttgattattactccttggtggcccgatttatgaccgaagcattgaatccaagtgtttatacgtatgaggtgtccccagtgtttctgttagtggaagaagcggttctgaagaaaatgattgaatttattggctggaaagaaggggatggaatatttaacccaggtggctcagtgtccaatatgtatgcaatgaatttagctagatacaaatattgtcctgatattaaggaaaaggggctgtctggttcgccaagattaatccttttcacatctgcagagtgtcattactctatgaagaaggcagcctcttttcttgggattggcactgagaatgtttgctttgtggaaacagatggaagaggtaaaatgatacctgaggaactggagaagcaagtctggcaagccagaaaagagggggcagcaccgtttcttgtctgtgccacttctggtacaactgtgttgggagcttttgaccctctggatgaaatagcagacatctgcgagaggcacagcctctggcttcatgtagatgcttcttggggtggctcagctttgatgtcgaggaagcaccgcaagcttctgcatggcatccacagggctgactctgtggcctggaacccacacaagatgctgatggctgggatccagtgctgtgctctccttgtgaaagacaaatctgatcttcttaaaaaatgctactctgccaaggcatcttacctcttccagcaggataaattctatgatgtgagctatgacacaggagacaagtctatccagtgtagcagaagaccagatgcattcaagttctggatgacctggaaggccctgggtacattaggccttgaagaaagagttaatcgtgctcttgctttatctaggtactagcctctctctctctctctctctctctctttctgtgtgtgtgtgtgtgtgtgtgtgtgtgtgtgtgtgtgtgtgtgtctatctgtgtctgtaataggaagacctaaggaaagtaatacttgaaatgtgttgcaagtacatgttttcatttgtgcattatttcatccaatacacattttctcagtacctactaagtgttaggaattatgaacagagcagtcctatcacctccctccaagatcctagcctactgagatgcacaaatgaccctcatttttggcaaggtgaggtatagagtccaagatcaatcaggagggcttctctagtgtgttcttgaggcacactggcagaggctccttggaggaagtgactttcaactgagatctaatgaagagaaggtggtattgtttgactctgtgtccccacccagatctcatcttgaattgtattcccgtaattcccaggtgttgtgggagggacctggtgggaaataatttgaattatgggggctattttccccatactgcactgatagtgaataagtctcacaagatctgatggttttatcaggggtttctacttttgcattcttcctcgttttctcttgctgctgccatgcaagaagtgcctttcggcttccgccatgaattgaggcctccccagccatgtggaactgtaagtccaattaaacctttttcttcccagtcttgggtatgtatttatcagcagcatgaaaacagactaatatggtaaattagtaccagtagaatggggtgctgctgaaaagatacccaaaaatgtggaagcgactttggaactgggtaacaggcagaggttgaaatagtttgaagggctcagaagaagacaggaaaattcagaacttcctagagacttgttgaatggctttgacaaaaatgctgatagtgatacgaacaataaggtccaggctgaggtagtctcagatggagatgaggaacttgttgggaactggagcaaagttgactcttgttacgttttagcaaacagactggcggcattttgcccctgtcctagagatttgtggaactttgaacttgagagagatgatttatggtatctgatggaagaaatttttaagcagcaaagcattcaagaggtgacttggatgccattaaaagcattcccttttaaaagggaaacagcatcaaagttcagaaaattttcagcctgacgatgcagtagaaaaaacccattttttgaggagaaattcaagctagctgcagaaatttgcctaagtaacaaggagctgaatgataatcctcaagacaatagggaaaatgtctccagggcatgtcataggtcttcatggcagtccctcccatcagacccagaagcctaggaggaataaatgatttcatgggcctggggacacacagggtccccaagctgtgtgcagcctacagacttggtgccctgcatcccagctgctccagccattgctaaaaggggccaaggtgcagctcagcccatggtttcagagggtgcaagccccaaaccttagcagcttccatgtggtgttgagcatgtgggcacacaagtcaagaattgaggtttgggaacctccacctaaatttcagaagaggtatggaaacccctggatgcccagataaaagtttgctgcaggggagggggccctcatggagaccctctgctagggcagtgtggaagggaaatgtggggtcagagcccccacacagagtccctactggggcactgcctagtggagctatgagacaaaggccaccatcttccagaccccagaatggtaggtccactgacagcttacactgtgtgccagcatgtgaaagcagccatgatgggggctataccctgcaaagccacaggggtggagctgccaaaggctatgggaacccacctcttgcatcagcgtgacccagatatgagacatggagtcaaaggagatcattttggaactttagaatttgactgccctgctggaattcagacttgcatgggtcctgtaacccctttgttttgaccaatttctcccatttggaatggctgtatttacccaatatctgtatccccattgtatctaggaagttactagcctgcttttgaccttacaggttcgtaggcagaagagacttgccttgtctcagatgaaaccttggactgtggacttttgggttaatgctagaatgagttaagactttaggggactgttgggaaggtgtgattggttttgaaatgtgagcacgtgagatttggaggggcaaggggcagaatgacatagtttggctctgtgtcctcacccaaatctcatcttgaattctactcccataattcccagatgttgtgggcgggacgcagtgggagataatatgaatcatgggggtggtttcccccatactgctgtcatggtagtgcataagtctcacaagctctgatggttttatcaggggtttctgcttttgcgtttctttttctcttgccacttccacgtaagaagtgccttttgcctcccaccatgattctgaggcctcctccagcctcagggaactgtggaactataagttcaattaaacctttttcttcccagtctcgggtatgtctttatcagcagcgtgaaaacagactaaaacagaaggggagaagaatgacccaagtggaaggagcagcaggcccaagtctctggatgtgaggtgacacaaaagtctggatgtgacattaaggacctgaaaagcaaatgatctgtgagttgtggcggcagcttaagtctcgaagggaaaggcagtgtggaagcaccatgtttacttgccttgtagtaaacattagaaataaaattgttgtcacactttcaagaacattagaaaagctcaagatataggtgccagacattgctacttgaataggactgaactgctaaacttagatcagtggtggacaggccatagccaaatttagttttaaatgtgttttgttgagcttatactgttcaaggttaactttcatggtgttaaacattcaaacatttcaatatttgaaatgcttttaaaaaaataaatttataaaaaacctggattttttgcttttctcaaagcttagaatgctctcaatcccacatggtaacaactagctgaacatgatgatgcctgactctggaaaaacacagtccctatcatttcttacagtttaaaaaacaaaa

SEQ ID NO: 137400 - DNA, 3039 bp, Homo sapiens
  Payload ID: 6901
  Gene Symbol: GLUD1
  Gene Name: glutamate dehydrogenase 1
  Uniprot ID: P00367
  ENST ID: ENST00000277865
  CDS Start-End: 98-1774
gggcaacccgcgcgggacccttcctccctagtcgcggggagtctgagaaagcgcgcctgtttcgcgaccatcacgcacctcccctccgcttgtggccatgtaccgctacctgggcgaagcgctgttgctgtcccgggccgggcccgctgccctgggctcggcgtccgccgactcggccgcgttgctgggctgggcccggggacagcccgccgccgccccgcagccggggctggcattggccgcccggcgccactacagcgaggcggtggccgaccgcgaggacgaccccaacttcttcaagatggtggagggcttcttcgatcgcggcgccagcatcgtggaggacaagctggtggaggacctgaggacccgggagagcgaggagcagaagcggaaccgggtgcgcggcatcctgcggatcatcaagccctgcaaccatgtgctgagtctctccttccccatccggcgcgacgacggctcctgggaggtcatcgaaggctaccgggcccagcacagccagcaccgcacgccctgcaagggaggtatccgttacagcactgatgtgagtgtagatgaagtaaaagctttggcttctctgatgacatacaagtgtgcagtggttgatgtgccgtttgggggtgctaaagctggtgttaagatcaatcccaagaactatactgataatgaattggaaaagatcacaaggaggttcaccatggagctagcaaaaaagggctttattggtcctggcattgatgtgcctgctccagacatgagcacaggtgagcgggagatgtcctggatcgctgatacctatgccagcaccatagggcactatgatattaatgcacacgcctgtgttactggtaaacccatcagccaagggggaatccatggacgcatctctgctactggccgtggtgtcttccatgggattgaaaatttcatcaatgaagcttcttacatgagcattttaggaatgacaccagggtttggagataaaacatttgttgttcagggatttggtaatgtgggcctacactctatgagatatttacatcgttttggtgctaaatgtattgctgttggtgagtctgatgggagtatatggaatccagatggtattgacccaaaggaactggaagacttcaaattgcaacatgggtccattctgggcttccccaaggcaaagccctatgaaggaagcatcttggaggccgactgtgacatactgatcccagctgccagtgagaagcagttgaccaaatccaacgcacccagagtcaaagccaagatcattgctgaaggtgccaatgggccaacaactccagaagctgacaagatcttcctggagagaaacattatggttattccagatctctacttgaatgctggaggagtgacagtatcttactttgagtggctgaagaatctaaatcatgtcagctatggccgtttgaccttcaaatatgaaagggattctaactaccacttgctcatgtctgttcaagagagtttagaaagaaaatttggaaagcatggtggaactattcccattgtacccacggcagagttccaagacaggatatcgggtgcatctgagaaagacatcgtgcactctggcttggcatacacaatggagcgttctgccaggcaaattatgcgcacagccatgaagtataacctgggattggacctgagaacagctgcctatgttaatgccattgagaaagtcttcaaagtgtacaatgaagctggtgtgaccttcacatagatggatcatggctgacttcctcactatcctcttcacatgtaacttctgcagacctatcacaagtttacatgtaaccacagaaatccctttctctcctgactcattaataatggataccattctcaacaagtcaatccaagtcagcccgttaaggagaaagaaattaaggttagcggatcatgtacaagctgagtgtgaaagtagaaatcacctacaccagagagccattttggtattttgcctttaaataaaaagcctcctttatctggctgtgcagccttgctctgtggcttttcccaacacaatcagtgctagtgctggggaggaacagtcaagagcagtcagttgcttgcttattttttctggatgagtctgggacacactgtaactttaacacatttaagaagtaggtgtgtggccttttcagaaggtggcatggtcctcaagtgagttcttagtattttatatcagcaaaataattcaattttgcaggttgcaaacaaatataaaacctgtttctgtttatgaatattattcttttagaatagaataagtacatgctgctgtaataaaattgcctttaatcacttaacaagcctaaccttgactcaaacagtgaatgcctatagaaataataaatgaaaaaaactagtatttttatatcataaaacaatgtcatttatagcttatcattcatgtattgtccagcagacattaaaagccctgtggataattaagttatcttcatacctgcaaaatggtggaggctattttcattaaaactgtcagaatttgcttactataattatgatacagtccaaagaatgcagtcactttttatcatgttaactaattgttctcttttgaagatctatggttgactaattaaacaataattcaagtagagtgtcccagaaaaaaaccacttgggctccctgtttggagtctggctggctctgagcattgccaatggcccctactcacctgactttgtatcctctccttttagaggctttgcattctgcacccagcttcactaacagtgggctgaaaacatccttgggttgagtgtttcatttgggagttatttggccagggccttttgaacagtagtgtccccatgaagtgctagataatatatgtgtaagagtcagctttttttttttttttaactctaacacccttcagaaatttctaactactttgtaactgcatggcttaacctggtgataaaagcagttattaaaagtctacgttttccaaaa

SEQ ID NO: 137401 - DNA, 2493 bp, Homo sapiens
  Payload ID: 6902
  Gene Symbol: GLUD2
  Gene Name: glutamate dehydrogenase 2
  Uniprot ID: P49448
  ENST ID: ENST00000328078
  CDS Start-End: 98-1774
gggcaacccgcgccggacccttccttcctagtcgcggggagtctgagaaagcgcacctgttccgcgaccgtcacgcacccctcctccgcctgccgcgatgtaccgctacctggccaaagcgctgctgccgtcccgggccgggcccgctgccctgggctccgcggccaaccactcggccgcgttgctgggccggggccgcggacagcccgccgccgcctcgcagccggggctcgcattggccgcccggcgccactacagcgagttggtggccgaccgcgaggacgaccccaacttcttcaagatggtggagggcttcttcgatcgcggcgccagcatcgtggaggacaagttggtgaaggacctgaggacccaggaaagcgaggagcagaagcggaaccgggtgcgcggcatcctgcggatcatcaagccctgcaaccatgtgctgagtctctccttccccatccggcgcgacgacggctcctgggaggtcatcgaaggctaccgggcccagcacagccagcaccgcacgccctgcaagggaggtatccgttacagcactgatgtgagtgtagatgaagtaaaagctttggcttctctgatgacatacaagtgtgcagtggttgatgtgccgtttgggggtgctaaagctggtgttaagatcaatcccaagaactataccgaaaatgaattggaaaagatcacaaggaggttcaccatggagctagcaaagaagggctttattggtcctggcgttgatgtgcctgctccagacatgaacacaggtgagcgggagatgtcctggattgctgatacctatgccagcaccatagggcactatgatattaatgcacacgcctgtgttactggtaaacccatcagccaagggggaatccatggacgcatctctgctactggccgtggtgtcttccatgggattgaaaacttcatcaatgaagcttcttacatgagcattttaggaatgacaccagggtttagagataaaacatttgttgttcagggatttggtaatgtgggcctacactctatgagatatttacatcgttttggtgctaaatgtattgctgttggtgagtctgatgggagtatatggaatccagatggtattgacccaaaggaactggaagacttcaaattgcaacatgggtccattctgggcttccccaaggcaaagccctatgaaggaagcatcttggaggtcgactgtgacatactgatcccagctgccactgagaagcagttgaccaaatccaacgcacccagagtcaaagccaagatcattgctgaaggtgccaatgggccaacaactccagaagctgataagatcttcctggagagaaacattttggttattccagatctctacttgaatgctggaggagtgacagtatcttactttgagtggctgaagaatctaaatcatgtcagctatggccgtttgaccttcaaatatgaaagggattctaactaccacttgctcctgtctgttcaagagagtttagaaagaaaatttggaaagcatggtggaactattcccattgtacccacggcagagttccaagacagtatatcgggtgcatctgagaaagacattgtgcactctgccttggcatacacaatggagcgttctgccaggcaaattatgcacacagccatgaagtataacctgggattggacctgagaacagctgcctatgtcaatgccattgaaaaagtcttcaaagtgtacagtgaagctggtgtgaccttcacatagatggatcatggctgacttcctcactaacctcttcacgtgtaacttctgcagacctaccacaagtttacatgtaaccacagaaatccctttctctcctgactcattactaatggataccattctcaacaagtcaatccaaatcagcccgttaaggagaaagaaattaatatacaagctgagtgtgaaagtagaaatcacctacaccagagagctattttggtattttgcctttaaataaaaagcctcctccatatggctgtgcagccttgctctgtggcttttcccagcacaatcagtgctagtgctggggaagggacagtcaagagcagtcagttgcttacttattttgctctggatgagtctgggacacgctgtaactttaacacatttaagaagaaggtgtgtggccttttcagaaggtggcatggtcctcaagtgagttcttagtattttatatcagcaaaataactcaattttgcagattgcaaacaaatataaaagctgtttctgtttatgaattttattcttttagaatagaataagtacatgctgctgtaataaaattgcctttaatcacttaacaagcctaaccttgactcagtgaatgcctataaaaataataaatgaaaaaaaacagtatttttatatcataaaagtttcatttgtagcttatcattcacgtattgttgtccagcaaacattaaaagccctgtggataa

SEQ ID NO: 137402 - DNA, 5216 bp, Homo sapiens
  Payload ID: 6903
  Gene Symbol: GRIP1
  Gene Name: glutamate receptor interacting protein 1
  Uniprot ID: Q9Y3R0
  ENST ID: ENST00000359742
  CDS Start-End: 242-3628
gtgattgtgaagggggaggaggctgtggcaggcaggggtggtagtagtagtgaatgacacagatttgccagatgacatgtagcggacctctgcatcagccaagaggaattaagctttgtcactccccactgggactacctttctcctggtatgtgcgcaaggaattcatatgctgctgctgctgcagccaccagagcagagagccttgagtacactttgccacagaaagcagtgagcaagaatgatagctgtctcttttaaatgccgttgtcaaattctgaggcgacttactaaagatgagagtccctacactaaatccgccagccagacaaagccgcctgatggagcgttggctgtgaggagacagagcatcccagaggaattcaagggctccacagtcgtcgagctgatgaagaaggaaggcactaccctgggtctgacggtatcgggaggaattgataaggatggcaagccaagagtatctaatctgcggcaaggaggaattgctgctagaagtgaccagctggatgtgggtgactacatcaaagcagtgaatggaatcaacctggccaaattccgccatgacgagatcatcagcttgctgaagaatgtgggagaaagagtggttcttgaagtagagtacgagcttccaccggtctctgtgcaaggatcaagtgttattttccgaacagtggaggtcacattacataaagaaggcaatacctttggttttgtaattcgagggggagcacatgatgatagaaataaatctcgtccagttgtgataacatgtgttcgtcctggagggcctgctgacagagagggcacgatcaaacccggtgacaggttgctcagtgtggatggaattcggcttcttggaactacgcatgctgaagccatgagtattcttaaacaatgtggacaagaagcagcactgctgatagaatatgatgtctcagtaatggactctgtggcaacagcatccgggccactactagtcgaagttgccaaaactcctggtgccagccttggggttgccctaactacctcgatgtgctgtaacaaacaagtcattgtcatagacaaaatcaaatctgcaagtattgcagacagatgtggcgcattgcatgtgggagatcacatcctctccatcgatggaaccagcatggagtactgtacacttgcagaagcaacccagttcctggccaacaccactgaccaggtcaagcttgagatccttccccatcatcagacccggctggccctaaaggggcccgaccatgtgaaaattcagaggagcgacaggcaacttacctgggattcctgggccagcaaccacagcagccttcacaccaaccatcactataacacgtaccaccctgaccattgcagagtaccagccctgacattcccgaaagcacctcctccaaacagccctccagctttggtgtcttcatccttctctcctacctccatgagtgcatacagcctgagttccctgaacatggggactctacctcgaagcctctactccaccagcccacgtggaaccatgatgaggaggagactgaaaaagaaagacttcaaaagctcattgtccttagcctccagcacagtaggattggctgggcaggttgttcacacagaaaccacagaggttgtgctgacggcagatcctgtcacaggatttgggatccaactgcagggcagtgtgtttgccacagaaactctctcttctccacctctgatttcctatatcgaagctgacagcccagcagagagatgtggggtgctacagattggagacagagtgatggccatcaatggaattccaacagaagacagcaccttcgaagaagccagtcagctcctccgagactcttcaatcacgagcaaggtcacactggaaatcgagtttgatgttgcagagtctgtcatcccaagtagtggaacatttcatgtaaagctgcctaagaagcacaatgtggaacttggaataaccataagttcaccatccagtagaaaaccaggagaccccctcgtcatttcagatatcaagaaagggagtgtggcacacagaactgggaccctggaacttggggataaattgctcgcaatagataatatccggctggacaactgttccatggaagatgcagttcagatcctccagcaatgtgaagacctggtgaagctcaaaatccgcaaagatgaagataattcagatgagcaagaaagttccggagcaattatttacaccgtggagcttaaacgctacggggggccccttggcatcacaatttcaggaactgaagagccgtttgatcctataatcatttcaagcctcactaaagggggattagctgaaagaactggcgcaatccacataggagaccgaatcctagccatcaatagcagcagcttgaaagggaagcctctgagtgaagccatccatttgttacagatggcaggagagactgtcaccttgaaaattaagaaacagacagatgcccagtcagcatcgagccccaagaagttccctatttctagccatttgagtgacctgggggatgtggaggaggactcctcaccagcacagaagccaggcaagctctccgacatgtacccctccacggtgcccagtgtggacagtgctgtggattcatgggatgggtctgcaatagacaccagctatggaactcaaggcactagttttcaggcctcaggatacaatttcaacacctatgactggaggagtccaaaacagagaggcagcttgtccccagtcactaagcctcgaagccagacttacccagatgtggggctgagttatgaagactgggaccggtccacagccagtggttttgcaggggctgccgatagtgcagagacagaacaagaggagaacttctggtctcaagcgctggaggatttggaaacctgcggacagtcaggaattctgagagaactggaggagaaagctgacaggcgtgtgtctttgagaaacatgactctcttggcaacaatcatgtcggggagcacgatgagtttgaatcatgaggctccaacacctcgcagtcagctggggcgacaggccagcttccaggagcgcagcagctcgcggccgcactacagccaaacaactcggagcaacaccctgccttcagatgtgggtaggaagtcagtaaccctgagaaaaatgaaacaagaaataaaggagatcatgtctccaactcctgtggagctgcacaaggtgaccttgtacaaggactctgacatggaggactttgggttcagtgtagcagatggcttactggagaaaggagtgtatgtcaaaaatattcgcccagctgggccaggagatcttggtggcttaaagccctatgacaggctcttacaggtgaatcatgtccgaaccagagactttgactgctgccttgttgtgcccctcatagcagaatccgggaataagctggacctggttattagtagaaacccactggcttcacagaagtctatagaccaacagagtctaccaggagattggagtgaacagaacagtgcttttttccagcagcctagccacggtggtaatttggagacacgagaacccactaatacattatagcaacgctttttataaagcaggacaaaagacaatatctacatggtgctaaaaatcctttaagatttctgtgacctttgaagcacagataatcaatcaacgtggcattaactgcaagcacaggggtcttttaaatctctctcatggctcatgttcacttcccttttcaagttgaagaggtttcttttttggtgaccactatggtatatggtgggcaatgccctgccagtcccaacggtagagaaaaataggccgtcccccacaactctacaattaacatcagaggaaattttttacaagttcatcttactatcactttttaaaaagagaaacatctgtttgaaaatattctctgtgatgatttccttaattcactttgaaatcagtttcttactatgaagtcattaatgtaagaacttggccaacaaagcttttcttctcataggctggctctactaggggaactagtgtttggtaaactgctgggactaccacaatgggaggggtacaggtataaaattaagttatcttaaaatgtttcagcaatgatgcacgtaggagaccataataggtggtggtaaatgttttgcccacgtataggaatgattttaactaagatgtatgctattccctatgcaacaaattatcaaacaggatatgtcttgtgacctgttttttttttaaggacacatttttaatagctgaaaatctctgataatgaattagagtgtgtagtaaacatgagaattagttatattatcttatttttaaaattcaagactaagaacttcagagaatgaagagtctattaaaatgaggttcatcttaatgataggcaaaccaaactcatactgcttgacatgttttgaaaactggtaatattgagggtgtacagcacatgtacttaaaaatgacactggactatcttttgctctgagccatgccacttaccgaaattgtaaatacatttttcacaaatgcattgccaattattaccatccctcaaagcaataaattgtgacagttgctttaaatgtttgtcagcaactgttttcatttgttcagatattttgaatagctacactaataactgttattatttggtgaacataaaaaaataaatagatctgtatattgatggtagactctccatattgaaatgattattttccaaacattttcattttggtcaataattcaaactaccacttaggcaaagtattcgaacactgtgtcctttgtttaaggaaatataaaaaaaaaatcacctttctttttgtgcaaaaaaaatattatttcaatcacatttcagaaccgccagggcaagaaagtataaagcaggatcatgttaagaaaaaagaaaaaaagatcatgagtcacttaaatatgtatttttatttgtaacaaacaagtattaaactgtaaagtatttttgtacaaatttaatactttaatagcatggtatttatcgtctatgtatggttttggggaattcaaaattgttcaaatatttgtatggaaaaaaataaaaccctctaccaaatggaataaacagtgattttaaaaagccaaataaagaggatatgcatta

SEQ ID NO: 137403 - DNA, 4888 bp, Homo sapiens
  Payload ID: 6903
  Gene Symbol: GRIP1
  Gene Name: glutamate receptor interacting protein 1
  Uniprot ID: Q9Y3R0
  ENST ID: ENST00000398016
  CDS Start-End: 70-3300
ctgctgctgctgcagccaccagagcagagagccttgagtacactttgccacagaaagcagtgagcaagaatgatagctgtctcttttaaatgccgttgtcaaattctgaggcgacttactaaagatgagagtccctacactaaatccgccagccagacaaagccgcctgatggagcgttggctgtgaggagacagagcatcccagaggaattcaagggctccacagtcgtcgagctgatgaagaaggaaggcactaccctgggtctgacggtatcgggaggaattgataaggatggcaagccaagagtatctaatctgcggcaaggaggaattgctgctagaagtgaccagctggatgtgggtgactacatcaaagcagtgaatggaatcaacctggccaaattccgccatgacgagatcatcagcttgctgaagaatgtgggagaaagagtggttcttgaagtagagtacgagcttccaccggtctctgtgcaaggatcaagtgttattttccgaacagtggaggtcacattacataaagaaggcaatacctttggttttgtaattcgagggggagcacatgatgatagaaataaatctcgtccagttgtgataacatgtgttcgtcctggagggcctgctgacagagagggcacgatcaaacccggtgacaggttgctcagtgtggatggaattcggcttcttggaactacgcatgctgaagccatgagtattcttaaacaatgtggacaagaagcagcactgctgatagaatatgatgtctcagtaatggactctgtggcaacagcatccgggccactactagtcgaagttgccaaaactcctggtgccagccttggggttgccctaactacctcgatgtgctgtaacaaacaagtcattgtcatagacaaaatcaaatctgcaagtattgcagacagatgtggcgcattgcatgtgggagatcacatcctctccatcgatggaaccagcatggagtactgtacacttgcagaagcaacccagttcctggccaacaccactgaccaggtcaagcttgagatccttccccatcatcagacccggctggccctaaaggggcccgaccatgcagctttggtgtcttcatccttctctcctacctccatgagtgcatacagcctgagttccctgaacatggggactctacctcgaagcctctactccaccagcccacgtggaaccatgatgaggaggagactgaaaaagaaagacttcaaaagctcattgtccttagcctccagcacagtaggattggctgggcaggttgttcacacagaaaccacagaggttgtgctgacggcagatcctgtcacaggatttgggatccaactgcagggcagtgtgtttgccacagaaactctctcttctccacctctgatttcctatatcgaagctgacagcccagcagagagatgtggggtgctacagattggagacagagtgatggccatcaatggaattccaacagaagacagcaccttcgaagaagccagtcagctcctccgagactcttcaatcacgagcaaggtcacactggaaatcgagtttgatgttgcagagtctgtcatcccaagtagtggaacatttcatgtaaagctgcctaagaagcacaatgtggaacttggaataaccataagttcaccatccagtagaaaaccaggagaccccctcgtcatttcagatatcaagaaagggagtgtggcacacagaactgggaccctggaacttggggataaattgctcgcaatagataatatccggctggacaactgttccatggaagatgcagttcagatcctccagcaatgtgaagacctggtgaagctcaaaatccgcaaagatgaagataattcagatgagcaagaaagttccggagcaattatttacaccgtggagcttaaacgctacggggggccccttggcatcacaatttcaggaactgaagagccgtttgatcctataatcatttcaagcctcactaaagggggattagctgaaagaactggcgcaatccacataggagaccgaatcctagccatcaatagcagcagcttgaaagggaagcctctgagtgaagccatccatttgttacagatggcaggagagactgtcaccttgaaaattaagaaacagacagatgcccagtcagcatcgagccccaagaagttccctatttctagccatttgagtgacctgggggatgtggaggaggactcctcaccagcacagaagccaggcaagctctccgacatgtacccctccacggtgcccagtgtggacagtgctgtggattcatgggatgggtctgcaatagacaccagctatggaactcaaggcactagttttcaggcctcaggatacaatttcaacacctatgactggaggagtccaaaacagagaggcagcttgtccccagtcactaagcctcgaagccagacttacccagatgtggggctgagttatgaagactgggaccggtccacagccagtggttttgcaggggctgccgatagtgcagagacagaacaagaggagaacttctggtctcaagcgctggaggatttggaaacctgcggacagtcaggaattctgagagaactggaggagaaagctgacaggcgtgtgtctttgagaaacatgactctcttggcaacaatcatgtcggggagcacgatgagtttgaatcatgaggctccaacacctcgcagtcagctggggcgacaggccagcttccaggagcgcagcagctcgcggccgcactacagccaaacaactcggagcaacaccctgccttcagatgtgggtaggaagtcagtaaccctgagaaaaatgaaacaagaaataaaggagatcatgtctccaactcctgtggagctgcacaaggtgaccttgtacaaggactctgacatggaggactttgggttcagtgtagcagatggcttactggagaaaggagtgtatgtcaaaaatattcgcccagctgggccaggagatcttggtggcttaaagccctatgacaggctcttacaggtgaatcatgtccgaaccagagactttgactgctgccttgttgtgcccctcatagcagaatccgggaataagctggacctggttattagtagaaacccactggcttcacagaagtctatagaccaacagagtctaccaggagattggagtgaacagaacagtgcttttttccagcagcctagccacggtggtaatttggagacacgagaacccactaatacattatagcaacgctttttataaagcaggacaaaagacaatatctacatggtgctaaaaatcctttaagatttctgtgacctttgaagcacagataatcaatcaacgtggcattaactgcaagcacaggggtcttttaaatctctctcatggctcatgttcacttcccttttcaagttgaagaggtttcttttttggtgaccactatggtatatggtgggcaatgccctgccagtcccaacggtagagaaaaataggccgtcccccacaactctacaattaacatcagaggaaattttttacaagttcatcttactatcactttttaaaaagagaaacatctgtttgaaaatattctctgtgatgatttccttaattcactttgaaatcagtttcttactatgaagtcattaatgtaagaacttggccaacaaagcttttcttctcataggctggctctactaggggaactagtgtttggtaaactgctgggactaccacaatgggaggggtacaggtataaaattaagttatcttaaaatgtttcagcaatgatgcacgtaggagaccataataggtggtggtaaatgttttgcccacgtataggaatgattttaactaagatgtatgctattccctatgcaacaaattatcaaacaggatatgtcttgtgacctgttttttttttaaggacacatttttaatagctgaaaatctctgataatgaattagagtgtgtagtaaacatgagaattagttatattatcttatttttaaaattcaagactaagaacttcagagaatgaagagtctattaaaatgaggttcatcttaatgataggcaaaccaaactcatactgcttgacatgttttgaaaactggtaatattgagggtgtacagcacatgtacttaaaaatgacactggactatcttttgctctgagccatgccacttaccgaaattgtaaatacatttttcacaaatgcattgccaattattaccatccctcaaagcaataaattgtgacagttgctttaaatgtttgtcagcaactgttttcatttgttcagatattttgaatagctacactaataactgttattatttggtgaacataaaaaaataaatagatctgtatattgatggtagactctccatattgaaatgattattttccaaacattttcattttggtcaataattcaaactaccacttaggcaaagtattcgaacactgtgtcctttgtttaaggaaatataaaaaaaaaatcacctttctttttgtgcaaaaaaaatattatttcaatcacatttcagaaccgccagggcaagaaagtataaagcaggatcatgttaagaaaaaagaaaaaaagatcatgagtcacttaaatatgtatttttatttgtaacaaacaagtattaaactgtaaagtatttttgtacaaatttaatactttaatagcatggtatttatcgtctatgtatggttttggggaattcaaaattgttcaaatatttgtatggaaaaaaataaaaccctctaccaaatggaataaacagtgattttaaaaagccaaataaagaggatatgcatta

SEQ ID NO: 137404 - DNA, 592 bp, Homo sapiens
  Payload ID: 6903
  Gene Symbol: GRIP1
  Gene Name: glutamate receptor interacting protein 1
  ENST ID: ENST00000542309
  CDS Start-End: 145-592
atgtccacctaaatttcaaagggctgaaaaaatgagagtccctacactaaatccgccagccagacaaagccgcctgatggagcgttggctgtgaggagacagagcatcccagaggaattcaagggctccacagtcgtcgagctgatgaagaaggaaggcactaccctgggtctgacggtatcgggaggaattgataaggatggcaagccaagagtatctaatctgcggcaaggaggaattgctgctagaagtgaccagctggatgtgggtgactacatcaaagcagtgaatggaatcaacctggccaaattccgccatgacgagatcatcagcttgctgaagaatgtgggagaaagagtggttcttgaagtagagtacgagcttccaccggtctctgtgcaaggatcaagtgttattttccgaacagtggaggtcacattacataaagaaggcaatacctttggttttgtaattcgagggggagcacatgatgatagaaataaatctcgtccagttgtgataacatgtgttcgtcctggagggcctgctgacagagagggcacgatcaaacccggtgacaggttgctcagtg

SEQ ID NO: 137405 - DNA, 567 bp, Homo sapiens
  Payload ID: 6903
  Gene Symbol: GRIP1
  Gene Name: glutamate receptor interacting protein 1
  ENST ID: ENST00000541947
  CDS Start-End: 2-567
gatggaccgcttcctgggttttgtcaaggcgataagaagatctaggagaagaaaggggaaaaagtaccgaccagaagaggattaccacgagggctatgaggatgtctattattacgcttcagagcattttcgaaatgagagtccctacactaaatccgccagccagacaaagccgcctgatggagcgttggctgtgaggagacagagcatcccagaggaattcaagggctccacagtcgtcgagctgatgaagaaggaaggcactaccctgggtctgacggtatcgggaggaattgataaggatggcaagccaagagtatctaatctgcggcaaggaggaattgctgctagaagtgaccagctggatgtgggtgactacatcaaagcagtgaatggaatcaacctggccaaattccgccatgacgagatcatcagcttgctgaagaatgtgggagaaagagtggttcttgaagtagagtacgagcttccaccggtctctgtgcaaggatcaagtgttattttccgaacagtggaggtcacattacataaagaaggcaatacctttgg

SEQ ID NO: 137406 - DNA, 2980 bp, Homo sapiens
  Payload ID: 6903
  Gene Symbol: GRIP1
  Gene Name: glutamate receptor interacting protein 1
  ENST ID: ENST00000538164
  CDS Start-End: 1-2786
gtcctggagggcctgctgacagagagggcacgatcaaacccggtgacaggttgctcagtgtggatggaattcggcttcttggaactacgcatgctgaagccatgagtattcttaaacaatgtggacaagaagcagcactgctgatagaatatgatgtctcagtaatggactctgtggcaacagcatccgggccactactagtcgaagttgccaaaactcctggtgccagccttggggttgccctaactacctcgatgtgctgtaacaaacaagtcattgtcatagacaaaatcaaatctgcaagtattgcagacagatgtggcgcattgcatgtgggagatcacatcctctccatcgatggaaccagcatggagtactgtacacttgcagaagcaacccagttcctggccaacaccactgaccaggtcaagcttgagatccttccccatcatcagacccggctggccctaaaggggcccgaccatgtgaaaattcagaggagcgacaggcaacttacctgggattcctgggccagcaaccacagcagccttcacaccaaccatcactataacacgtaccaccctgaccattgcagagtaccagccctgacattcccgaaagcacctcctccaaacagccctccagctttggtgtcttcatccttctctcctacctccatgagtgcatacagcctgagttccctgaacatggggactctacctcgaagcctctactccaccagcccacgtggaaccatgatgaggaggagactgaaaaagaaagacttcaaaagctcattgtccttagcctccagcacagtaggattggctgggcaggttgttcacacagaaaccacagaggttgtgctgacggcagatcctgtcacaggatttgggatccaactgcagggcagtgtgtttgccacagaaactctctcttctccacctctgatttcctatatcgaagctgacagcccagcagagagatgtggggtgctacagattggagacagagtgatggccatcaatggaattccaacagaagacagcaccttcgaagaagccagtcagctcctccgagactcttcaatcacgagcaaggtcacactggaaatcgagtttgatgttgcagagtctgtcatcccaagtagtggaacatttcatgtaaagctgcctaagaagcacaatgtggaacttggaataaccataagttcaccatccagtagaaaaccaggagaccccctcgtcatttcagatatcaagaaagggagtgtggcacacagaactgggaccctggaacttggggataaattgctcgcaatagataatatccggctggacaactgttccatggaagatgcagttcagatcctccagcaatgtgaagacctggtgaagctcaaaatccgcaaagatgaagataattcagatgagcaagaaagttccggagcaattatttacaccgtggagcttaaacgctacggggggccccttggcatcacaatttcaggaactgaagagccgtttgatcctataatcatttcaagcctcactaaagggggattagctgaaagaactggcgcaatccacataggagaccgaatcctagccatcaatagcagcagcttgaaagggaagcctctgagtgaagccatccatttgttacagatggcaggagagactgtcaccttgaaaattaagaaacagacagatgcccagtcagcatcgagccccaagaagttccctatttctagccatttgagtgacctgggggatgtggaggaggactcctcaccagcacagaagccaggcaagctctccgacatgtacccctccacggtgcccagtgtggacagtgctgtggattcatgggatgggtctgcaatagacaccagctatggaactcaaggcactagttttcaggcctcaggatacaatttcaacacctatgactggaggagtccaaaacagagaggcagcttgtccccagtcactaagcctcgaagccagacttacccagatgtggggctgagttatgaagactgggaccggtccacagccagtggttttgcaggggctgccgatagtgcagagacagaacaagaggagaacttctggtctcaagcgctggaggatttggaaacctgcggacagtcaggaattctgagagaactggaggcaacaatcatgtcggggagcacgatgagtttgaatcatgaggctccaacacctcgcagtcagctggggcgacaggccagcttccaggagcgcagcagctcgcggccgcactacagccaaacaactcggagcaacaccctgccttcagatgtgggtaggaagtcagtaaccctgagaaaaatgaaacaagaaataaaggagatcatgtctccaactcctgtggagctgcacaaggtgaccttgtacaaggactctgacatggaggactttgggttcagtgtagcagatggcttactggagaaaggagtgtatgtcaaaaatattcgcccagctgggccaggagatcttggtggcttaaagccctatgacaggctcttacaggtgaatcatgtccgaaccagagactttgactgctgccttgttgtgcccctcatagcagaatccgggaataagctggacctggttattagtagaaacccactggcttcacagaagtctatagaccaacagagtctaccaggagattggagtgaacagaacagtgcttttttccagcagcctagccacggtggtaatttggagacacgagaacccactaatacattatagcaacgctttttataaagcaggacaaaagacaatatctacatggtgctaaaaatcctttaagatttctgtgacctttgaagcacagataatcaatcaacgtggcattaactgcaagcacaggggtcttttaaatctctctcatggctcatgttcacttcccttttcaagttgaagaggtttcttttttggtgacc

SEQ ID NO: 137407 - DNA, 662 bp, Homo sapiens
  Payload ID: 6903
  Gene Symbol: GRIP1
  Gene Name: glutamate receptor interacting protein 1
  ENST ID: ENST00000545666
  CDS Start-End: 31-662
acactttgccacagaaagcagtgagcaagaatgatagctgtctcttttaaatgccgttgtcaaattctgaggcgacttactaaagaggaattcaagggctccacagtcgtcgagctgatgaagaaggaaggcactaccctgggtctgacggtatcgggaggaattgataaggatggcaagccaagagtatctaatctgcggcaaggaggaattgctgctagaagtgaccagctggatgtgggtgactacatcaaagcagtgaatggaatcaacctggccaaattccgccatgacgagatcatcagcttgctgaagaatgtgggagaaagagtggttcttgaagtagagtacgagcttccaccggtctctgtgcaaggatcaagtgttattttccgaacagtggaggtcacattacataaagaaggcaatacctttggttttgtaattcgagggggagcacatgatgatagaaataaatctcgtccagttgtgataacatgtgttcgtcctggagggcctgctgacagagagggcacgatcaaacccggtgacaggttgctcagtgtggatggaattcggcttcttggaactacgcatgctgaagccatgagtattcttaaacaatgtggacaagaagcagcactgctgatagaatatgatgt

SEQ ID NO: 137408 - DNA, 573 bp, Homo sapiens
  Payload ID: 6903
  Gene Symbol: GRIP1
  Gene Name: glutamate receptor interacting protein 1
  ENST ID: ENST00000535002
  CDS Start-End: 1-233
actctgtggcaacagcatccgggccactactagtcgaagttgccaaaactcctggtgccagccttggggttgccctaactacctcgatgtgctgtaacaaacaagtcattgtcatagacaaaatcaaatctgcaagtattgcagacagtgaaaattcagaggagcgacaggcaacttacctgggattcctgggccagcaaccacagcagccttcacaccaaccatcactataacacgtaccaccctgaccattgcagagtaccagccctgacattcccgaaagcacctcctccaaacagccctccagctttggtgtcttcatccttctctcctacctccatgagtgcatacagcctgagttccctgaacatggggactctacctcgaagcctctactccaccagcccacgtggaaccatgatgaggaggagactgaaaaagaaagacttcaaaagctcattgtccttagcctccagcacagtaggattggctgggcaggttgttcacacagaaaccacagaggttgtgctgacggcagatcctgtcacaggatttgggatccaactgcagggc

SEQ ID NO: 137409 - DNA, 757 bp, Homo sapiens
  Payload ID: 6903
  Gene Symbol: GRIP1
  Gene Name: glutamate receptor interacting protein 1
  ENST ID: ENST00000540854
  CDS Start-End: 1-366
cttgaagtagagtacgagcttccaccggtctctgtgcaaggatcaagtgttattttccgaacagtggaggtcacattacataaagaaggcaatacctttggttttgtaattcgagggggagcacatgatgatagaaataaatctcgtccagttgtgataacatgtgttcgtcctggagggcctgctgacagagagggcacgatcaaacccggtgacaggttgctcagtgtggatggaattcggcttcttggaactacgcatgctgaagccatgagtattcttaaacaatgtggacaagaagcagcactgctgatagaatatgatgtctcagtaatgggtgaatcatgtccgaaccagagactttgactgctgccttgttgtgcccctcatagcagaatccgggaataagctggacctggttattagtagaaacccactggcttcacagaagtctatagaccaacagagtctaccaggagattggagtgaacagaacagtgcttttttccagcagcctagccacggtggtaatttggagacacgagaacccactaatacattatagcaacgctttttataaagcaggacaaaagacaatatctacatggtgctaaaaatcctttaagatttctgtgacctttgaagcacagataatcaatcaacgtggcattaactgcaagcacaggggtcttttaaatctctctcatggctcatgttcacttcccttttcaagttgaagaggtttcttttttggtga

SEQ ID NO: 137410 - DNA, 524 bp, Homo sapiens
  Payload ID: 6903
  Gene Symbol: GRIP1
  Gene Name: glutamate receptor interacting protein 1
  ENST ID: ENST00000539540
  CDS Start-End: 163-524
aatcttaaatgcaaaaggtttctcagatggtgttctctgtgagcagtctatgagagtccctacactaaatccgccagccagacaaagccgcctgatggagcgttggctgtgaggagacagagcatcccagaggaattcaagggctccacagtcgtcgagctgatgaagaaggaaggcactaccctgggtctgacggtatcgggaggaattgataaggatggcaagccaagagtatctaatctgcggcaaggaggaattgctgctagaagtgaccagctggatgtgggtgactacatcaaagcagtgaatggaatcaacctggccaaattccgccatgacgagatcatcagcttgctgaagaatgtgggagaaagagtggttcttgaagtagagtacgagcttccaccggtctctgtgcaaggatcaagtgttattttccgaacagtggaggtcacattacataaagaaggcaatacctttggttttgtaattcgagggggagcacatgatgatagaaataaatc

SEQ ID NO: 137411 - DNA, 848 bp, Homo sapiens
  Payload ID: 6903
  Gene Symbol: GRIP1
  Gene Name: glutamate receptor interacting protein 1
  ENST ID: ENST00000543172
  CDS Start-End: 1-848
tgtgataacatgtgttcgtcctggagggcctgctgacagagagggcacgatcaaacccggtgacaggttgctcagtgtggatggaattcggcttcttggaactacgcatgctgaagccatgagtattcttaaacaatgtggacaagaagcagcactgctgatagaatatgatgtctcagtaatggactctgtggcaacagcatccgggccactactagtcgaagttgccaaaactcctggtgccagccttggggttgccctaactacctcgatgtgctgtaacaaacaagtcattgtcatagacaaaatcaaatctgcaagtattgcagacagatgtggcgcattgcatgtgggagatcacatcctctccatcgatggaaccagcatggagtactgtacacttgcagaagcaacccagttcctggccaacaccactgaccaggtcaagcttgagatccttccccatcatcagacccggctggccctaaaggggcccgaccatgctttggtgtcttcatccttctctcctacctccatgagtgcatacagcctgagttccctgaacatggggactctacctcgaagcctctactccaccagcccacgtggaaccatgatgaggaggagactgaaaaagaaagacttcaaaagctcattgtccttagcctccagcacagtaggattggctgggcaggttgttcacacagaaaccacagaggttgtgctgacggcagatcctgtcacaggatttgggatccaactgcagggcagtgtgtttgccacagaaactctctcttctccacctctgatttcctatatcgaagctgacagcccagcagagagatgtg

SEQ ID NO: 137412 - DNA, 2491 bp, Homo sapiens
  Payload ID: 6903
  Gene Symbol: GRIP1
  Gene Name: glutamate receptor interacting protein 1
  ENST ID: ENST00000536215
  CDS Start-End: 130-2491
taaagtgatagtgcagaaagaagactggatgtggaatgagaactgaagttagagttttaagtcctcacaaaaggatttgcctgatacctgtccttagaggaattcaagggctccacagtcgtcgagctgatgaagaaggaaggcactaccctgggtctgacggtatcgggaggaattgataaggatggcaagccaagagtatctaatctgcggcaaggaggaattgctgctagaagtgaccagctggatgtgggtgactacatcaaagcagtgaatggaatcaacctggccaaattccgccatgacgagatcatcagcttgctgaagaatgtgggagaaagagtggttcttgaagtagagtacgagcttccaccggtctctgtgcaaggatcaagtgttattttccgaacagtggaggtcacattacataaagaaggcaatacctttggttttgtaattcgagggggagcacatgatgatagaaataaatctcgtccagttgtgataacatgtgttcgtcctggagggcctgctgacagagagggcacgatcaaacccggtgacaggttgctcagtgtggatggaattcggcttcttggaactacgcatgctgaagccatgagtattcttaaacaatgtggacaagaagcagcactgctgatagaatatgatgtctcagtaatggactctgtggcaacagcatccgggccactactagtcgaagttgccaaaactcctggtgccagccttggggttgccctaactacctcgatgtgctgtaacaaacaagtcattgtcatagacaaaatcaaatctgcaagtattgcagacagatgtggcgcattgcatgtgggagatcacatcctctccatcgatggaaccagcatggagtactgtacacttgcagaagcaacccagttcctggccaacaccactgaccaggtcaagcttgagatccttccccatcatcagacccggctggccctaaaggggcccgaccatgtgtccttagcctccagcacagtaggattggctgggcaggttgttcacacagaaaccacagaggttgtgctgacggcagatcctgtcacaggatttgggatccaactgcagggcagtgtgtttgccacagaaactctctcttctccacctctgatttcctatatcgaagctgacagcccagcagagagatgtggggtgctacagattggagacagagtgatggccatcaatggaattccaacagaagacagcaccttcgaagaagccagtcagctcctccgagactcttcaatcacgagcaaggtcacactggaaatcgagtttgatgttgcagagtctgtcatcccaagtagtggaacatttcatgtaaagctgcctaagaagcacaatgtggaacttggaataaccataagttcaccatccagtagaaaaccaggagaccccctcgtcatttcagatatcaagaaagggagtgtggcacacagaactgggaccctggaacttggggataaattgctcgcaatagataatatccggctggacaactgttccatggaagatgcagttcagatcctccagcaatgtgaagacctggtgaagctcaaaatccgcaaagatgaagataattcagatgagcaagaaagttccggagcaattatttacaccgtggagcttaaacgctacggggggccccttggcatcacaatttcaggaactgaagagccgtttgatcctataatcatttcaagcctcactaaagggggattagctgaaagaactggcgcaatccacataggagaccgaatcctagccatcaatagcagcagcttgaaagggaagcctctgagtgaagccatccatttgttacagatggcaggagagactgtcaccttgaaaattaagaaacagacagatgcccagtcagcatcgagccccaagaagttccctatttctagccatttgagtgacctgggggatgtggaggaggactcctcaccagcacagaagccaggcaagctctccgacatgtacccctccacggtgcccagtgtggacagtgctgtggattcatgggatgggtctgcaatagacaccagctatggaactcaaggcactagttttcaggcctcaggatacaatttcaacacctatgactggaggagtccaaaacagagaggcagcttgtccccagtcactaagcctcgaagccagacttacccagatgtggggctgagttatgaagactgggaccggtccacagccagtggttttgcaggggctgccgatagtgcagagacagaacaagaggagaacttctggtctcaagcgctggaggatttggaaacctgcggacagtcaggaattctgagagaactggaggcaacaatcatgtcggggagcacgatgagtttgaatcatgaggctccaacacctcgcagtcagctggggcgacaggccagcttccaggagcgcagcagctcgcggccgc

SEQ ID NO: 137413 - DNA, 2843 bp, Homo sapiens
  Payload ID: 6903
  Gene Symbol: GRIP1
  Gene Name: glutamate receptor interacting protein 1
  ENST ID: ENST00000540433
  CDS Start-End: 216-2843
agaagaggattaccacgagggctatgaggatgtctattattacgcttcagagcattttcgaagtaagcgcttctctccatcctccggttccttctcgcatgctggggctaacaataaaccttgtgtggagccttaatcttaaatgcaaaaggtttctcagatggtgttctctgtgagcagtctaggaattcaagggctccacagtcgtcgagctgatgaagaaggaaggcactaccctgggtctgacggtatcgggaggaattgataaggatggcaagccaagagtatctaatctgcggcaaggaggaattgctgctagaagtgaccagctggatgtgggtgactacatcaaagcagtgaatggaatcaacctggccaaattccgccatgacgagatcatcagcttgctgaagaatgtgggagaaagagtggttcttgaagtagagtacgagcttccaccggtctctgtgcaaggatcaagtgttattttccgaacagtggaggtcacattacataaagaaggcaatacctttggttttgtaattcgagggggagcacatgatgatagaaataaatctcgtccagttgtgataacatgtgttcgtcctggagggcctgctgacagagagggcacgatcaaacccggtgacaggttgctcagtgtggatggaattcggcttcttggaactacgcatgctgaagccatgagtattcttaaacaatgtggacaagaagcagcactgctgatagaatatgatgtctcagtaatggactctgtggcaacagcatccgggccactactagtcgaagttgccaaaactcctggtgccagccttggggttgccctaactacctcgatgtgctgtaacaaacaagtcattgtcatagacaaaatcaaatctgcaagtattgcagacagatgtggcgcattgcatgtgggagatcacatcctctccatcgatggaaccagcatggagtactgtacacttgcagaagcaacccagttcctggccaacaccactgaccaggtcaagcttgagatccttccccatcatcagacccggctggccctaaaggggcccgaccatgcagctttggtgtcttcatccttctctcctacctccatgagtgcatacagcctgagttccctgaacatggggactctacctcgaagcctctactccaccagcccacgtggaaccatgatgaggaggagactgaaaaagaaagacttcaaaagctcattgtccttagcctccagcacagtaggattggctgggcaggttgttcacacagaaaccacagaggttgtgctgacggcagatcctgtcacaggatttgggatccaactgcagggcagtgtgtttgccacagaaactctctcttctccacctctgatttcctatatcgaagctgacagcccagcagagagatgtggggtgctacagattggagacagagtgatggccatcaatggaattccaacagaagacagcaccttcgaagaagccagtcagctcctccgagactcttcaatcacgagcaaggtcacactggaaatcgagtttgatgttgcagagtctgtcatcccaagtagtggaacatttcatgtaaagctgcctaagaagcacaatgtggaacttggaataaccataagttcaccatccagtagaaaaccaggagaccccctcgtcatttcagatatcaagaaagggagtgtggcacacagaactgggaccctggaacttggggataaattgctcgcaatagataatatccggctggacaactgttccatggaagatgcagttcagatcctccagcaatgtgaagacctggtgaagctcaaaatccgcaaagatgaagataattcagatgagcaagaaagttccggagcaattatttacaccgtggagcttaaacgctacggggggccccttggcatcacaatttcaggaactgaagagccgtttgatcctataatcatttcaagcctcactaaagggggattagctgaaagaactggcgcaatccacataggagaccgaatcctagccatcaatagcagcagcttgaaagggaagcctctgagtgaagccatccatttgttacagatggcaggagagactgtcaccttgaaaattaagaaacagacagatgcccagtcagcatcgagccccaagaagttccctatttctagccatttgagtgacctgggggatgtggaggaggactcctcaccagcacagaagccaggcaagctctccgacatgtacccctccacggtgcccagtgtggacagtgctgtggattcatgggatgggtctgcaatagacaccagctatggaactcaaggcactagttttcaggcctcaggatacaatttcaacacctatgactggaggagtccaaaacagagaggcagcttgtccccagtcactaagcctcgaagccagacttacccagatgtggggctgagttatgaagactgggaccggtccacagccagtggttttgcaggggctgccgatagtgcagagacagaacaagaggagaacttctggtctcaagcgctggaggatttggaaacctgcggacagtcaggaattctgagagaactggaggagaaagctgacaggcgtgtgtctttgagaaacatgactctcttggcaacaatcatgtcggggagcacgatgagtttgaatcatgaggctccaacacctcgcagtcagctggggcgacaggccagcttccaggagcgcagcagctcgcggccgcactacagccaaacaactcggagcaacaccctgccttcagatgtgggtaggaagtcagtaaccctg

SEQ ID NO: 137414 - DNA, 3410 bp, Homo sapiens
  Payload ID: 6903
  Gene Symbol: GRIP1
  Gene Name: glutamate receptor interacting protein 1
  ENST ID: ENST00000538211
  CDS Start-End: 242-3410
gtgattgtgaagggggaggaggctgtggcaggcaggggtggtagtagtagtgaatgacacagatttgccagatgacatgtagcggacctctgcatcagccaagaggaattaagctttgtcactccccactgggactacctttctcctggtatgtgcgcaaggaattcatatgctgctgctgctgcagccaccagagcagagagccttgagtacactttgccacagaaagcagtgagcaagaatgatagctgtctcttttaaatgccgttgtcaaattctgaggcgacttactaaagatgagagtccctacactaaatccgccagccagacaaagccgcctgatggagcgttggctgtgaggagacagagcatcccagaggaattcaagggctccacagtcgtcgagctgatgaagaaggaaggcactaccctgggtctgacggtatcgggaggaattgataaggatggcaagccaagagtatctaatctgcggcaaggaggaattgctgctagaagtgaccagctggatgtgggtgactacatcaaagcagtgaatggaatcaacctggccaaattccgccatgacgagatcatcagcttgctgaagaatgtgggagaaagagtggttcttgaagtagagtacgagcttccaccggtctctgtgcaaggatcaagtgttattttccgaacagtggaggtcacattacataaagaaggcaatacctttggttttgtaattcgagggggagcacatgatgatagaaataaatctcgtccagttgtgataacatgtgttcgtcctggagggcctgctgacagagagggcacgatcaaacccggtgacaggttgctcagtgtggatggaattcggcttcttggaactacgcatgctgaagccatgagtattcttaaacaatgtggacaagaagcagcactgctgatagaatatgatgtctcagtaatggactctgtggcaacagcatccgggccactactagtcgaagttgccaaaactcctggtgccagccttggggttgccctaactacctcgatgtgctgtaacaaacaagtcattgtcatagacaaaatcaaatctgcaagtattgcagacagatgtggcgcattgcatgtgggagatcacatcctctccatcgatggaaccagcatggagtactgtacacttgcagaagcaacccagttcctggccaacaccactgaccaggtcaagcttgagatccttccccatcatcagacccggctggccctaaaggggcccgaccatgcagctttggtgtcttcatccttctctcctacctccatgagtgcatacagcctgagttccctgaacatggggactctacctcgaagcctctactccaccagcccacgtggaaccatgatgaggaggagactgaaaaagaaagacttcaaaagctcattgtccttagcctccagcacagtaggattggctgggcaggttgttcacacagaaaccacagaggttgtgctgacggcagatcctgtcacaggatttgggatccaactgcagggcagtgtgtttgccacagaaactctctcttctccacctctgatttcctatatcgaagctgacagcccagcagagagatgtggggtgctacagattggagacagagtgatggccatcaatggaattccaacagaagacagcaccttcgaagaagccagtcagctcctccgagactcttcaatcacgagcaaggtcacactggaaatcgagtttgatgttgcagagtctgtcatcccaagtagtggaacatttcatgtaaagctgcctaagaagcacaatgtggaacttggaataaccataagttcaccatccagtagaaaaccaggagaccccctcgtcatttcagatatcaagaaagggagtgtggcacacagaactgggaccctggaacttggggataaattgctcgcaatagataatatccggctggacaactgttccatggaagatgcagttcagatcctccagcaatgtgaagacctggtgaagctcaaaatccgcaaagatgaagataattcagatgagcaagaaagttccggagcaattatttacaccgtggagcttaaacgctacggggggccccttggcatcacaatttcaggaactgaagagccgtttgatcctataatcatttcaagcctcactaaagggggattagctgaaagaactggcgcaatccacataggagaccgaatcctagccatcaatagcagcagcttgaaagggaagcctctgagtgaagccatccatttgttacagatggcaggagagactgtcaccttgaaaattaagaaacagacagatgcccagtcagcatcgagccccaagaagttccctatttctagccatttgagtgacctgggggatgtggaggaggactcctcaccagcacagaagccaggcaagctctccgacatgtacccctccacggtgcccagtgtggacagtgctgtggattcatgggatgggtctgcaatagacaccagctatggaactcaaggcactagttttcaggcctcaggatacaatttcaacacctatgactggaggagtccaaaacagagaggcagcttgtccccagtcactaagcctcgaagccagacttacccagatgtggggctgagttatgaagactgggaccggtccacagccagtggttttgcaggggctgccgatagtgcagagacagaacaagaggagaacttctggtctcaagcgctggaggatttggaaacctgcggacagtcaggaattctgagagaactggaggcaacaatcatgtcggggagcacgatgagtttgaatcatgaggctccaacacctcgcagtcagctggggcgacaggccagcttccaggagcgcagcagctcgcggccgcactacagccaaacaactcggagcaacaccctgccttcagatgtgggtaggaagtcagtaaccctgagaaaaatgaaacaagaaataaaggagatcatgtctccaactcctgtggagctgcacaaggtgaccttgtacaaggactctgacatggaggactttgggttcagtgtagcagatggcttactggagaaaggagtgtatgtcaaaaatattcgcccagctgggccaggagatcttggtggcttaaagccctatgacaggctcttacaggtgaatcatgtccgaaccagagactttgactgctgccttgttgtgcccctcatagcagaatccgggaataagctggacctggttattagtagaaacccactggcttcacagaagtctatagaccaacagagtctaccaggagattggagtgaacagaacagtgcttttttccagcagcctagccacggtggtaatttggagacacgagaac

SEQ ID NO: 137415 - DNA, 600 bp, Homo sapiens
  Payload ID: 6903
  Gene Symbol: GRIP1
  Gene Name: glutamate receptor interacting protein 1
  ENST ID: ENST00000538373
  CDS Start-End: 554-600
gatggaccgcttcctgggttttgtcaaggcgataagaagatctaggagaagaaaggggaaaaagtaccgaccagaagaggattaccacgagggctatgaggatgtctattattacgcttcagagcattttcgaaagtctcgctctgttgcccgggctggagtgtggtggcttgatcctggttcaacctctgcctcccaggttcaaggagtctcgtgcctcagcctcctaagtacctgggattacagagtcatttctacagaaagaagcaggactgtttctcatcaggattctatgctcgtgtccagaactgtgaaatgaggagtggtgacgctgactatacctccttttaattgagacagtaaggccttctcaccttccccagcttactggggatgggaacagaacataagacaccagcagaaagagaagccaagagaaaatgagagtccctacactaaatccgccagccagacaaagccgcctgatggagcgttggctgtgaggagacagagcatcccagaggaattcaagggctccacagtcgtcgagctgatgaagaaggaaggcactaccctgggtctgacggtatcgggaggaat

SEQ ID NO: 137416 - DNA, 7752 bp, Homo sapiens
  Payload ID: 6904
  Gene Symbol: GRIP2
  Gene Name: glutamate receptor interacting protein 2
  ENST ID: ENST00000621039
  CDS Start-End: 67-3198
ggagggagggccaagcagcgtggctcccgagggagttggtgggcagcaggggagacaatagcgaacatgctgtgtgggctcagccgggagacccctggagaggcggacgatgggccctactccaaaggaggcaaggacgcaggaggggccgacgtttccctggcgtgccgcagacagagcattccagaggagttccgagggatcactgtggtggagctgatcaagaaagaaggcagcacgctgggcctgactatctcaggtggcaccgacaaggatggaaagcccagggtctccaacctgagacctgggggacttgcagccaggagtgatctgctgaacattggtgactatattcggtctgtgaacgggatccacctgaccaggctccgccacgatgagatcatcaccctgctcaagaatgtgggcgagcgcgtggtgctggaggtggagtatgagctgcccccgcccgctcctgagaataaccccaggatcatttcaaagacagtggacgtctccctctacaaggagggcaatagctttggctttgtccttagaggaggtgcccatgaagatgggcacaagtcccgcccgcttgtcctgacctacgtgcggcccggtggccctgccgacagggagggctccctgaaggtgggcgacaggctgctcagtgtcgatggaatcccgctgcacggggccagccatgccaccgccctggccaccctgcggcagtgcagccacgaggcactctttcaggtggagtatgatgtggccacccctgacacggtggctaatgcttcgggacccttgatggtggaaatagtcaagacgccagggtctgccctggggatctcgctcaccaccacctccctccggaacaagtcagtcattaccatcgaccgcatcaagccagccagcgtggtggacaggagcggagccctgcaccctggagaccacatcctgtccatcgatggcaccagcatggaacactgctcgctgcttgaggccaccaagctcctggccagcatttcagagaaggtgcggctggagatcctgcctgtgccccagagtcagcggccactgaggccctcagaggcagtgaaagtgcagaggagtgagcagctgcaccgctgggacccctgcgtgccctcctgccacagcccccggcccggccactgcaggatgcccacctgggccacacctgctggccaggaccaaagccgatccttgtcttcaactcccttttcctcgccgaccttgaaccacgccttttcctgcaacaaccccagcacccttccccgtggatcccagcccatgagtcctcgaactacaatggggcggaggaggcagcgaagaagggaacacaagagctcgttgtcgctagcctccagcacggtggggccgggcgggcagattgtgcacacggagaccacggaggtcgtgctctgtggagaccccctcagcggctttggcctccagctccagggcggcatcttcgccaccgagaccctgtcctccccacccctcgtgtgcttcatcgagcctgacagtccggctgagaggtgtgggctgctgcaggtgggggaccgtgtcctgtccatcaatggcattgccaccgaggacgggactatggaggaagccaaccagctcctgcgggacgccgcactggcccacaaggtcgtgctggaggtggagttcgatgtggcggagtccgtcatcccaagcagtggcaccttccacgtgaagctgcccaagaagcgcagcgtggagctgggcatcaccatcagctcggccagcaggaaacgaggggagcccttgatcatctccgacatcaagaaaggcagcgtggcacacaggacgggcaccctggagccaggcgacaagctactggccattgacaatatccgcctggacaactgccccatggaggacgccgtgcaaatcctgcggcagtgcgaggacctggtgaagctgaagatccggaaggacgaggacaactctgatgagctggagaccacaggtgccgtcagttacacagtggagctgaagcgctacgggggtcccctgggcatcaccatttcgggcacggaggaaccttttgaccccattgtcatctcaggcctcaccaagcgtggcctggctgagaggactggtgccatccacgtgggggaccgcattctggccatcaacaacgttagcctcaagggccggccgctgagcgaggccatccacctcctgcaggtggctggagagaccgtcacactgaagatcaagaagcaactagaccgtcccctcctaccccgcaagtcgggcagcctcagtgagaccagtgatgctgatgaggacccagcagatgccctgaaaggaggcctgccagcagcccgcttctcgccggctgtgcccagtgtggacagtgctgtggagtcttgggacagctcggccaccgagggtggctttgggggcccagggtcctatacaccacaggcagcagcccggggcacgaccccccaggagcggaggcctggctggctgaggggcagccccccacccaccgagccccggaggacgagctataccccaaccccagctgacgagagctttccagaggaggaggaggaggatgattgggagccgccaacgagcccagcccctggccctgcccgagaggagggcttctggcgcatgtttggagaagctctcgaagacctggagtcatgtggtcagtcagagctgctgagggaactggaggcatccatcatgacgggcaccgtgcagagggtggccctcgagggcaggcctggccaccggccttggcagaggggccgggaggtacgagcctctcctgcagaaatggaggagctgttgctgcctacacccttggagatgcacaaggtgaccctgcacaaggaccccatgcggcatgactttggtttcagcgtctcagatggcctcctggaaaaaggtgtctatgtccacactgtgcgccctgatgggccagcccaccgtggaggcctccagcccttcgacagggtcctgcaggtcaaccacgtccgtacacgggacttcgactgctgcctggcggtgccactcctggccgaggcgggtgatgtcttggagctgatcatcagccgcaagccgcacacggcacacagcagccgggccccccgatcgccaggccccagcagtccccggatgctctgaagtcagcatgtgggccgaactcctaaggggccacccaggcagatcctggctcccagacacgtagctgggctggagaagcggccacccactcattcatctgttggtctggcagactctgagcctgggatgatgcttggtctctgttccccaggtctgtggtgactggggtgccaggcagggaggtcctgccctagttggagtgacagctggggtctctcgccaagttgggtctccaagatgcccagaggagcctcccttaagaagggttggcacaggctgctcagccgagaggagagaggcctgggggctgtcccaggtctctgtggggcctccttggagaggtcgaagatgtagggagcacttcctcccagcaaagccatggagctggaatgagctgcaaggaggagtgagttctcggtcacaggaggtgagcaggcaggagctggataccccagcgcagtcatgcattggggtatgaggcattcccatgatgcgtgcacacgcgcttgggggttggcttcctgatggggagccacttcatctagagactcggccaccaggaaggatgctgcttcggatgggagcccagctccttcgcttctccagaataggggtttggggcttgctagtcctgagattctgagattcccagaatctggtccccacttatgagactcttaagttggggcgtctgggatcccaggaagtgctggccctttgattctgaaagtgggtgattctttgatttcagcatctcagtctgaagcttctgggacttgagactgtggttctgggcccattgggcaggctctatgggccttgggctctcagccctcctgcttcttctgtaggccgtgtggccactgacccatctgcacgtccgctcagcccaagcccctccatgtgggaggggtcattttggggcaaaagaccctggagcttccattcacctgccatccagtgaaaattgaaaagcgatggacgcaggacctgtgaggcggtagcgctcctctttacagccagatcagtggaggaagaggagaaagagggagggagatgggagagaaatgggccagagaaaaagatgggacactcttgcccagtggagggtgtccaaagtgcttattcaaagaagtctattcccacttgaaatctggaagcaccagcatcccttaaaatcattgtcctcagtgtccacaaatcagagaccctcttcattttgagaagggtgtgggcctcccctggtggtctagtgagtggtgcctgggatggagtgggcgggcaggtgtagccagggctggggatgtgctttgcctggcccagttctcacaggggtctcaggaaaacggggcacccactcccacctccatctgtctccaacctggggtccctggaggccagaaaagtgctcttccatttgagggaacagatgaggagtcaagaggtctgttcttttcaccctgggtctgttacctgtttgctgtgtgaccctgtctgggttggacccccagcccctctggacgatcacgggtggacagtctgagcagacacaggcctcctggtcagggccggaaccatctctgccgacccaccaaggcccccttggggacctgcccacgctgtctcctggaggcctgcctcccttacccctcccctccacttcgctgggctctgccccttggtgccctccctgagggccctgcatgcttgtgcctggggtgctcagcgcctctgctatcttggattcccgtgtactcagcccagagtgaaagggcactgtctacctgtcacagggcaccaagtgaaagccaagagccctcacttttgagggtgagggacagcacagcagaggtgtggcttctggatgcaagcagccatagctgtgtgaccttggacaggtggctcagcctctctggacctctgctaagcaacagggctggacaggacacactctcagggcctctcggcttgggaaaactgcattgactccaggactccaggcgagggaagatgcacccgactctaactaatacccccctccctcctcgggctgaggcctctgccattctcccaaaagtatgcaatcaggcccgcggtgggcctcccagccatgccggcctcctcatatgcaatatttcttctggcttctcatggggatggttcatccccgacttgaaatttcctgacacctttccccagtgagcgccctgcctgcctatgcattttgggaacagcccctgtgacatgtccccttccacctgccctctcccccaaagctgtatttttctctggctgagattagaacacattccttgtaaagtatttttctacatcgggttttcttagggctctcgggaagcacaaggggctgtattgcaaaggccgcttatggtctgtttggggccctcgtctaagtctttgtcccaccaggggttgcagtggcttgggggtaggtgccatggggatgattttttaaaataaaattatttaaatccacctagagtagaagtttgctttttaaaaaaatcatggattggcaagagtcagcttctgtatgggtctggtgacatctcacctgcttttgatgattcattaattcaaaaagtttgccatttgcttccatcatccagcccctgggcaacatgaatcagacagatttaggtcatgtctgcacattctggtggcaggcagacaatcaacaagtaagcaaataaataattatttcaaaaggcatcaagtgcaacaaagaaaacaagggagtaacgggatagagggaccagggtgaggggctttagctcacaatattaggaggggtttctctcaagaggcgacatttgcaatgagacctgaagacaggagccagcctccatggagacctggaggaagagtgtctcaggcagcgggcacagctagtgcaaaggccctgagataggaacgagtttgacggtctcaaggaagagaaagaaggcctgggaggggaatggggctggagactaggttggaggtagcaggaatcagtcgtgaaggcttgggtagggggagcaaatttgattctctgcgcagcagaaagccagaggcaggcagtggtgcctgcatatggagtctctttagcccaggttgggaaggtagtggcaggagggcagcctcaggtctggctgctgccctggagtgtccagagagtgtctagggcaggtgagctacagggtctgggacccagaggccagggccaggccccactggggaggccacagttctgtgagcagaggaagagcttctttccaggaagcgagtactctgtcttgggagtggtgtaggcagggggaaggccaagggaggcagcaggccttgctctaagcgctttgcaagagcttgctggatcctcccaatagcctttggaggtgggctctattcctgtcccatcattacagatgaggaaacaggcacagagaggttacgtaatttgcccaagtccacacaggtagtaagggatggaaccagggcttgaacacaagccacatggcccagtacacatagagagaggcaggcaggtaggcataggctgtcagaaagagccagaaaatgggggtagggtggtcttctattctaacattgtctataaatgagttactgagaattttgtctggttagttgggcaaagggctcaactgactcccgagtttgtccatcccaaagggtggggggcgctgttggcaggaaggctgccccaaacatggacctgttgtgaccccagagagcccctaactgggtattaatgagcgcctgcacctgacggtgggggagtgggagaagggcaatcaggtttgctccccctctaccctttcccccactccgccacccgctttctgcccttctggcaggtcagcccaaggctaaagaggagggactgaaagccgcagcaggtgagcacctaaggccaagagcatcacctccaatcatcctggtggccttgatggggacaatggtttattccagatggggaaactgaggctcaggtgactgctgccagatctcccagctgtacagggctgggcatgtagcaggtagaatcagtagagccagtagagccaagagctcatgggcccgggtgcgaatccaggttctttcatggacttgctgtgtacccctgagtgagcaagctgcttcctctgtgagcctccatgtgggaacctctaacctgggaaaatacctacctttgaggagcgtcctgggattggacgggaagccctttataaaatgtaaagcgtttggcaaacgttgagggggaaatacctcaccagaacacaacccacacatgttggatgttaaaaaggaaatgtttattttcatgttataaggtgattacaaactcctctaaaaaaagcaaagatgaatttaaaatattgatatacatatttatctaaaaagcaaaagagaaaaaaacccctgcaaaatacagggaatcatatcataaaacatttatacacaaaagcttgtatactgcaagactgaactacacaccaaggatcttgttcaaatacaaatgttcctcctcag

SEQ ID NO: 137417 - DNA, 7977 bp, Homo sapiens
  Payload ID: 6904
  Gene Symbol: GRIP2
  Gene Name: glutamate receptor interacting protein 2
  ENST ID: ENST00000619221
  CDS Start-End: 1-3423
atgcgcctgtcctccctgactgaagaggctgtagatggagggaatggaggcgagtggggtgaggatctgttagagcagttcacatgcattccttcccgcgtggttgaagctaagactgctccagagtggcctctgtgccctggtgaaggccagggtcttcatggcgagcctctccctgaccactgccagggtaccggtggccaaattgacccctccctggggaggggagggagggccaagcagcgtggctcccgagggagttggtgggcagcaggggagacaatagcgaacatgctgtgtgggctcagccgggagacccctggagaggcggacgatgggccctactccaaaggaggcaaggacgcaggaggggccgacgtttccctggcgtgccgcagacagagcattccagaggagttccgagggatcactgtggtggagctgatcaagaaagaaggcagcacgctgggcctgactatctcaggtggcaccgacaaggatggaaagcccagggtctccaacctgagacctgggggacttgcagccaggagtgatctgctgaacattggtgactatattcggtctgtgaacgggatccacctgaccaggctccgccacgatgagatcatcaccctgctcaagaatgtgggcgagcgcgtggtgctggaggtggagtatgagctgcccccgcccgctcctgagaataaccccaggatcatttcaaagacagtggacgtctccctctacaaggagggcaatagctttggctttgtccttagaggaggtgcccatgaagatgggcacaagtcccgcccgcttgtcctgacctacgtgcggcccggtggccctgccgacagggagggctccctgaaggtgggcgacaggctgctcagtgtcgatggaatcccgctgcacggggccagccatgccaccgccctggccaccctgcggcagtgcagccacgaggcactctttcaggtggagtatgatgtggccacccctgacacggtggctaatgcttcgggacccttgatggtggaaatagtcaagacgccagggtctgccctggggatctcgctcaccaccacctccctccggaacaagtcagtcattaccatcgaccgcatcaagccagccagcgtggtggacaggagcggagccctgcaccctggagaccacatcctgtccatcgatggcaccagcatggaacactgctcgctgcttgaggccaccaagctcctggccagcatttcagagaaggtgcggctggagatcctgcctgtgccccagagtcagcggccactgaggccctcagaggcagtgaaagtgcagaggagtgagcagctgcaccgctgggacccctgcgtgccctcctgccacagcccccggcccggccactgcaggatgcccacctgggccacacctgctggccaggaccaaagccgatccttgtcttcaactcccttttcctcgccgaccttgaaccacgccttttcctgcaacaaccccagcacccttccccgtggatcccagcccatgagtcctcgaactacaatggggcggaggaggcagcgaagaagggaacacaagagctcgttgtcgctagcctccagcacggtggggccgggcgggcagattgtgcacacggagaccacggaggtcgtgctctgtggagaccccctcagcggctttggcctccagctccagggcggcatcttcgccaccgagaccctgtcctccccacccctcgtgtgcttcatcgagcctgacagtccggctgagaggtgtgggctgctgcaggtgggggaccgtgtcctgtccatcaatggcattgccaccgaggacgggactatggaggaagccaaccagctcctgcgggacgccgcactggcccacaaggtcgtgctggaggtggagttcgatgtggcggagtccgtcatcccaagcagtggcaccttccacgtgaagctgcccaagaagcgcagcgtggagctgggcatcaccatcagctcggccagcaggaaacgaggggagcccttgatcatctccgacatcaagaaaggcagcgtggcacacaggacgggcaccctggagccaggcgacaagctactggccattgacaatatccgcctggacaactgccccatggaggacgccgtgcaaatcctgcggcagtgcgaggacctggtgaagctgaagatccggaaggacgaggacaactctgatgagctggagaccacaggtgccgtcagttacacagtggagctgaagcgctacgggggtcccctgggcatcaccatttcgggcacggaggaaccttttgaccccattgtcatctcaggcctcaccaagcgtggcctggctgagaggactggtgccatccacgtgggggaccgcattctggccatcaacaacgttagcctcaagggccggccgctgagcgaggccatccacctcctgcaggtggctggagagaccgtcacactgaagatcaagaagcaactagaccgtcccctcctaccccgcaagtcgggcagcctcagtgagaccagtgatgctgatgaggacccagcagatgccctgaaaggaggcctgccagcagcccgcttctcgccggctgtgcccagtgtggacagtgctgtggagtcttgggacagctcggccaccgagggtggctttgggggcccagggtcctatacaccacaggcagcagcccggggcacgaccccccaggagcggaggcctggctggctgaggggcagccccccacccaccgagccccggaggacgagctataccccaaccccagctgacgagagctttccagaggaggaggaggaggatgattgggagccgccaacgagcccagcccctggccctgcccgagaggagggcttctggcgcatgtttggagaagctctcgaagacctggagtcatgtggtcagtcagagctgctgagggaactggaggcatccatcatgacgggcaccgtgcagagggtggccctcgagggcaggcctggccaccggccttggcagaggggccgggaggtacgagcctctcctgcagaaatggaggagctgttgctgcctacacccttggagatgcacaaggtgaccctgcacaaggaccccatgcggcatgactttggtttcagcgtctcagatggcctcctggaaaaaggtgtctatgtccacactgtgcgccctgatgggccagcccaccgtggaggcctccagcccttcgacagggtcctgcaggtcaaccacgtccgtacacgggacttcgactgctgcctggcggtgccactcctggccgaggcgggtgatgtcttggagctgatcatcagccgcaagccgcacacggcacacagcagccgggccccccgatcgccaggccccagcagtccccggatgctctgaagtcagcatgtgggccgaactcctaaggggccacccaggcagatcctggctcccagacacgtagctgggctggagaagcggccacccactcattcatctgttggtctggcagactctgagcctgggatgatgcttggtctctgttccccaggtctgtggtgactggggtgccaggcagggaggtcctgccctagttggagtgacagctggggtctctcgccaagttgggtctccaagatgcccagaggagcctcccttaagaagggttggcacaggctgctcagccgagaggagagaggcctgggggctgtcccaggtctctgtggggcctccttggagaggtcgaagatgtagggagcacttcctcccagcaaagccatggagctggaatgagctgcaaggaggagtgagttctcggtcacaggaggtgagcaggcaggagctggataccccagcgcagtcatgcattggggtatgaggcattcccatgatgcgtgcacacgcgcttgggggttggcttcctgatggggagccacttcatctagagactcggccaccaggaaggatgctgcttcggatgggagcccagctccttcgcttctccagaataggggtttggggcttgctagtcctgagattctgagattcccagaatctggtccccacttatgagactcttaagttggggcgtctgggatcccaggaagtgctggccctttgattctgaaagtgggtgattctttgatttcagcatctcagtctgaagcttctgggacttgagactgtggttctgggcccattgggcaggctctatgggccttgggctctcagccctcctgcttcttctgtaggccgtgtggccactgacccatctgcacgtccgctcagcccaagcccctccatgtgggaggggtcattttggggcaaaagaccctggagcttccattcacctgccatccagtgaaaattgaaaagcgatggacgcaggacctgtgaggcggtagcgctcctctttacagccagatcagtggaggaagaggagaaagagggagggagatgggagagaaatgggccagagaaaaagatgggacactcttgcccagtggagggtgtccaaagtgcttattcaaagaagtctattcccacttgaaatctggaagcaccagcatcccttaaaatcattgtcctcagtgtccacaaatcagagaccctcttcattttgagaagggtgtgggcctcccctggtggtctagtgagtggtgcctgggatggagtgggcgggcaggtgtagccagggctggggatgtgctttgcctggcccagttctcacaggggtctcaggaaaacggggcacccactcccacctccatctgtctccaacctggggtccctggaggccagaaaagtgctcttccatttgagggaacagatgaggagtcaagaggtctgttcttttcaccctgggtctgttacctgtttgctgtgtgaccctgtctgggttggacccccagcccctctggacgatcacgggtggacagtctgagcagacacaggcctcctggtcagggccggaaccatctctgccgacccaccaaggcccccttggggacctgcccacgctgtctcctggaggcctgcctcccttacccctcccctccacttcgctgggctctgccccttggtgccctccctgagggccctgcatgcttgtgcctggggtgctcagcgcctctgctatcttggattcccgtgtactcagcccagagtgaaagggcactgtctacctgtcacagggcaccaagtgaaagccaagagccctcacttttgagggtgagggacagcacagcagaggtgtggcttctggatgcaagcagccatagctgtgtgaccttggacaggtggctcagcctctctggacctctgctaagcaacagggctggacaggacacactctcagggcctctcggcttgggaaaactgcattgactccaggactccaggcgagggaagatgcacccgactctaactaatacccccctccctcctcgggctgaggcctctgccattctcccaaaagtatgcaatcaggcccgcggtgggcctcccagccatgccggcctcctcatatgcaatatttcttctggcttctcatggggatggttcatccccgacttgaaatttcctgacacctttccccagtgagcgccctgcctgcctatgcattttgggaacagcccctgtgacatgtccccttccacctgccctctcccccaaagctgtatttttctctggctgagattagaacacattccttgtaaagtatttttctacatcgggttttcttagggctctcgggaagcacaaggggctgtattgcaaaggccgcttatggtctgtttggggccctcgtctaagtctttgtcccaccaggggttgcagtggcttgggggtaggtgccatggggatgattttttaaaataaaattatttaaatccacctagagtagaagtttgctttttaaaaaaatcatggattggcaagagtcagcttctgtatgggtctggtgacatctcacctgcttttgatgattcattaattcaaaaagtttgccatttgcttccatcatccagcccctgggcaacatgaatcagacagatttaggtcatgtctgcacattctggtggcaggcagacaatcaacaagtaagcaaataaataattatttcaaaaggcatcaagtgcaacaaagaaaacaagggagtaacgggatagagggaccagggtgaggggctttagctcacaatattaggaggggtttctctcaagaggcgacatttgcaatgagacctgaagacaggagccagcctccatggagacctggaggaagagtgtctcaggcagcgggcacagctagtgcaaaggccctgagataggaacgagtttgacggtctcaaggaagagaaagaaggcctgggaggggaatggggctggagactaggttggaggtagcaggaatcagtcgtgaaggcttgggtagggggagcaaatttgattctctgcgcagcagaaagccagaggcaggcagtggtgcctgcatatggagtctctttagcccaggttgggaaggtagtggcaggagggcagcctcaggtctggctgctgccctggagtgtccagagagtgtctagggcaggtgagctacagggtctgggacccagaggccagggccaggccccactggggaggccacagttctgtgagcagaggaagagcttctttccaggaagcgagtactctgtcttgggagtggtgtaggcagggggaaggccaagggaggcagcaggccttgctctaagcgctttgcaagagcttgctggatcctcccaatagcctttggaggtgggctctattcctgtcccatcattacagatgaggaaacaggcacagagaggttacgtaatttgcccaagtccacacaggtagtaagggatggaaccagggcttgaacacaagccacatggcccagtacacatagagagaggcaggcaggtaggcataggctgtcagaaagagccagaaaatgggggtagggtggtcttctattctaacattgtctataaatgagttactgagaattttgtctggttagttgggcaaagggctcaactgactcccgagtttgtccatcccaaagggtggggggcgctgttggcaggaaggctgccccaaacatggacctgttgtgaccccagagagcccctaactgggtattaatgagcgcctgcacctgacggtgggggagtgggagaagggcaatcaggtttgctccccctctaccctttcccccactccgccacccgctttctgcccttctggcaggtcagcccaaggctaaagaggagggactgaaagccgcagcaggtgagcacctaaggccaagagcatcacctccaatcatcctggtggccttgatggggacaatggtttattccagatggggaaactgaggctcaggtgactgctgccagatctcccagctgtacagggctgggcatgtagcaggtagaatcagtagagccagtagagccaagagctcatgggcccgggtgcgaatccaggttctttcatggacttgctgtgtacccctgagtgagcaagctgcttcctctgtgagcctccatgtgggaacctctaacctgggaaaatacctacctttgaggagcgtcctgggattggacgggaagccctttataaaatgtaaagcgtttggcaaacgttgagggggaaatacctcaccagaacacaacccacacatgttggatgttaaaaaggaaatgtttattttcatgttataaggtgattacaaactcctctaaaaaaagcaaagatgaatttaaaatattgatatacatatttatctaaaaagcaaaagagaaaaaaacccctgcaaaatacagggaatcatatcataaaacatttatacacaaaagcttgtatactgcaagactgaactacacaccaaggatcttgttcaaatacaaatgttcctcctcag

SEQ ID NO: 137418 - DNA, 4271 bp, Homo sapiens
  Payload ID: 6904
  Gene Symbol: GRIP2
  Gene Name: glutamate receptor interacting protein 2
  ENST ID: ENST00000430219
  CDS Start-End: 1-984
gagtccgtcatcccaagcagtggcaccttccacgtgaagctgcccaagaagcgcagcgtggagctgggcatcaccatcagctcggccagcaggaaacgaggggagcccttgatcatctccgacatcaagaaaggcagcgtggcacacaggacgggcaccctggagccaggcgacaagctactggccattgacaatatccgcctggacaactgccccatggaggacgccgtgcaaatcctgcggcagtgcgaggacctggtgaagctgaagatccggaaggacgaggacaactctgatgagctggagaccacaggtgccgtcagttacacagtggagctgaagcgctacgggggtcccctgggcatcaccatttcgggcacggaggaaccttttgaccccattgtcatctcaggcctcaccaagcgtggcctggctgagaggactggtgccatccacgtgggggaccgcattctggccatcaacaacgttagcctcaagggccggccgctgagcgaggccatccacctcctgcaggtggctggagagaccgtcacactgaagatcaagaagcaactagaccgtcccctcctaccccgcaagtcgggcagcctcagtgagaccagtgatgctgatgaggacccagcagatgccctgaaaggaggcctgccagcagcccgcttctcgccggctgtgcccagtgtggacagtgctgtggagtcttgggacagctcggccaccgagggtggctttgggggcccagggtcctatacaccacaggcagcagcccggggcacgaccccccaggagcggaggcctggctggctgaggggcagccccccacccaccgagccccggaggacgagctataccccaaccccagctgacgagagctttccagaggaggaggaggaggatgattgggagccgccaacgaggcatcctgtgtcaccgctctccaccccgtctcatctgcccctgttctaactggccaccgacagtcctggtcgcccctaactgcgtctttcccctattccgtgtcaccaaccactgccccggggccccagaactgccaccgaggacgcccgcctgcctgcccgcccacccaccctatggcccctcgagcccaacgctgggccctggggccccgaagactcctcaggccccagcccgcccacccgcctgccaggagttgacgctctctggttcctacgttacagcccagcccctggccctgcccgagaggagggcttctggcgcatgtttggagaagctctcgaagacctggagtcatgtggtcagtcagagctgctgagggaactggaggcatccatcatgacgggcaccgtgcagagggtggccctcgagggcaggcctggccaccggccttggcagaggggccgggaggtacgagcctctcctgcagaaatggaggagctgttgctgcctacacccttggagatgcacaaggtgaccctgcacaaggaccccatgcggcatgactttggtttcagcgtctcagatggcctcctggaaaaaggtgtctatgtccacactgtgcgccctgatgggccagcccaccgtggaggcctccagcccttcgacagggtcctgcaggtcaaccacgtccgtacacgggacttcgactgctgcctggcggtgccactcctggccgaggcgggtgatgtcttggagctgatcatcagccgcaagccgcacacggcacacagcagccgggccccccgatcgccaggccccagcagtccccggatgctctgaagtcagcatgtgggccgaactcctaaggggccacccaggcagatcctggctcccagacacgtagctgggctggagaagcggccacccactcattcatctgttggtctggcagactctgagcctgggatgatgcttggtctctgttccccaggtctgtggtgactggggtgccaggcagggaggtcctgccctagttggagtgacagctggggtctctcgccaagttgggtctccaagatgcccagaggagcctcccttaagaagggttggcacaggctgctcagccgagaggagagaggcctgggggctgtcccaggtctctgtggggcctccttggagaggtcgaagatgtagggagcacttcctcccagcaaagccatggagctggaatgagctgcaaggaggagtgagttctcggtcacaggaggtgagcaggcaggagctggataccccagcgcagtcatgcattggggtatgaggcattcccatgatgcgtgcacacgcgcttgggggttggcttcctgatggggagccacttcatctagagactcggccaccaggaaggatgctgcttcggatgggagcccagctccttcgcttctccagaataggggtttggggcttgctagtcctgagattctgagattcccagaatctggtccccacttatgagactcttaagttggggcgtctgggatcccaggaagtgctggccctttgattctgaaagtgggtgattctttgatttcagcatctcagtctgaagcttctgggacttgagactgtggttctgggcccattgggcaggctctatgggccttgggctctcagccctcctgcttcttctgtaggccgtgtggccactgacccatctgcacgtccgctcagcccaagcccctccatgtgggaggggtcattttggggcaaaagaccctggagcttccattcacctgccatccagtgaaaattgaaaagcgatggacgcaggacctgtgaggcggtagcgctcctctttacagccagatcagtggaggaagaggagaaagagggagggagatgggagagaaatgggccagagaaaaagatgggacactcttgcccagtggagggtgtccaaagtgcttattcaaagaagtctattcccacttgaaatctggaagcaccagcatcccttaaaatcattgtcctcagtgtccacaaatcagagaccctcttcattttgagaagggtgtgggcctcccctggtggtctagtgagtggtgcctgggatggagtgggcgggcaggtgtagccagggctggggatgtgctttgcctggcccagttctcacaggggtctcaggaaaacggggcacccactcccacctccatctgtctccaacctggggtccctggaggccagaaaagtgctcttccatttgagggaacagatgaggagtcaagaggtctgttcttttcaccctgggtctgttacctgtttgctgtgtgaccctgtctgggttggacccccagcccctctggacgatcacgggtggacagtctgagcagacacaggcctcctggtcagggccggaaccatctctgccgacccaccaaggcccccttggggacctgcccacgctgtctcctggaggcctgcctcccttacccctcccctccacttcgctgggctctgccccttggtgccctccctgagggccctgcatgcttgtgcctggggtgctcagcgcctctgctatcttggattcccgtgtactcagcccagagtgaaagggcactgtctacctgtcacagggcaccaagtgaaagccaagagccctcacttttgagggtgagggacagcacagcagaggtgtggcttctggatgcaagcagccatagctgtgtgaccttggacaggtggctcagcctctctggacctctgctaagcaacagggctggacaggacacactctcagggcctctcggcttgggaaaactgcattgactccaggactccaggcgagggaagatgcacccgactctaactaatacccccctccctcctcgggctgaggcctctgccattctcccaaaagtatgcaatcaggcccgcggtgggcctcccagccatgccggcctcctcatatgcaatatttcttctggcttctcatggggatggttcatccccgacttgaaatttcctgacacctttccccagtgagcgccctgcctgcctatgcattttgggaacagcccctgtgacatgtccccttccacctgccctctcccccaaagctgtatttttctctggctgagattagaacacattccttgtaaagtatttttctacatcgggttttcttagggctctcgggaagcacaaggggctgtattgcaaaggccgcttatggtctgtttggggccctcgtctaagtctttgtcccaccaggggttgcagtggcttgggggtaggtgccatggggatgattttttaaaataaaattatttaaatcc

SEQ ID NO: 137419 - DNA, 5708 bp, Homo sapiens
  Payload ID: 6905
  Gene Symbol: GRIA1
  Gene Name: glutamate receptor, ionotropic, AMPA 1
  Uniprot ID: P42261
  ENST ID: ENST00000285900
  CDS Start-End: 344-3064
gtgtgagggggagagcgagagagagcaagggagggagagagaggcaggctgcgaggggagaggagagggagtgggggagccagcgctccagctagcatgaggacgggcttcttttcccgtgctcagttaatctggctgtcagttggtgttaacgctgcagtttaagtgttcggattccaagggaaacagacaaacctcacgaaaggaaggaagcaagcaagcaaggaaggaactgcaggaggaaaagaacaggcagaacagcgagaagaataaagggaaagggggggaaacaccaaatctatgattggacctgggcttctttttcgccaatgcaaaaaggaatatgcagcacatttttgccttcttctgcaccggtttcctaggcgcggtagtaggtgccaatttccccaacaatatccagatcgggggattatttccaaaccagcagtcacaggaacatgctgcttttagatttgctttgtcgcaactcacagagcccccgaagctgctcccccagattgatattgtgaacatcagcgacagctttgagatgacctatagattctgttcccagttctccaaaggagtctatgccatctttgggttttatgaacgtaggactgtcaacatgctgacctccttttgtggggccctccacgtctgcttcattacgccgagctttcccgttgatacatccaatcagtttgtccttcagctgcgccctgaactgcaggatgccctcatcagcatcattgaccattacaagtggcagaaatttgtctacatttatgatgccgaccggggcttatccgtcctgcagaaagtcctggatacagctgctgagaagaactggcaggtgacagcagtcaacattttgacaaccacagaggagggataccggatgctctttcaggacctggagaagaaaaaggagcggctggtggtggtggactgtgaatcagaacgcctcaatgctatcttgggccagattataaagctagagaagaatggcatcggctaccactacattcttgcaaatctgggcttcatggacattgacttaaacaaattcaaggagagtggcgccaatgtgacaggtttccagctggtgaactacacagacactattccggccaagatcatgcagcagtggaagaatagtgatgctcgagaccacacacgggtggactggaagagacccaagtacacctctgcgctcacctacgatggggtgaaggtgatggctgaggctttccagagcctgcggaggcagagaattgatatatctcgccgggggaatgctggggattgtctggctaacccagctgttccctggggccaagggatcgacatccagagagctctgcagcaggtgcgatttgaaggtttaacaggaaacgtgcagtttaatgagaaaggacgccggaccaactacacgctccacgtgattgaaatgaaacatgacggcatccgaaagattggttactggaatgaagatgataagtttgtccctgcagccaccgatgcccaagctgggggcgataattcaagtgttcagaacagaacatacatcgtcacaacaatcctagaagatccttatgtgatgctcaagaagaacgccaatcagtttgagggcaatgaccgttacgagggctactgtgtagagctggcggcagagattgccaagcacgtgggctactcctaccgtctggagattgtcagtgatggaaaatacggagcccgagaccctgacacgaaggcctggaatggcatggtgggagagctggtctatggaagagcagatgtggctgtggctcccttaactatcactttggtccgggaagaagttatagatttctccaaaccatttatgagtttggggatctccatcatgattaaaaaaccacagaaatccaagccgggtgtcttctccttccttgatcctttggcttatgagatttggatgtgcattgtttttgcctacattggagtgagtgttgtcctcttcctggtcagccgcttcagtccctatgaatggcacagtgaagagtttgaggaaggacgggaccagacaaccagtgaccagtccaatgagtttgggatattcaacagtttgtggttctccctgggagccttcatgcagcaaggatgtgacatttctcccaggtccctgtctggtcgcatcgttggtggcgtctggtggttcttcaccttaatcatcatctcctcatatacagccaatctggccgccttcctgaccgtggagaggatggtgtctcccattgagagtgcagaggacctagcgaagcagacagaaattgcctacgggacgctggaagcaggatctactaaggagttcttcaggaggtctaaaattgctgtgtttgagaagatgtggacatacatgaagtcagcagagccatcagtttttgtgcggaccacagaggaggggatgattcgagtgaggaaatccaaaggcaaatatgcctacctcctggagtccaccatgaatgagtacattgagcagcggaaaccctgtgacaccatgaaggtgggaggtaacttggattccaaaggctatggcattgcaacacccaaggggtctgccctgagaaatccagtaaacctggcagtgttaaaactgaacgagcaggggcttttggacaaattgaaaaacaaatggtggtacgacaagggcgagtgcggcagcgggggaggtgattccaaggacaagacaagcgctctgagcctcagcaatgtggcaggcgtgttctacatcctgatcggaggacttggactagccatgctggttgccttaatcgagttctgctacaaatcccgtagtgaatccaagcggatgaagggtttttgtttgatcccacagcaatccatcaacgaagccatacggacatcgaccctcccccgcaacagcggggcaggagccagcagcggcggcagtggagagaatggtcgggtggtcagccatgacttccccaagtccatgcaatcgattccttgcatgagccacagttcagggatgcccttgggagccacgggattgtaactggagcagatggagaccccttggggagcaggctcgggctccccagccccatcccaaacccttcagtgccaaaaacaacaacaaaatgaaacgcaaccaccaccaaccactgcgaccacaagaaggatgattcaacaggttttcctgaagaattgaaaaaccattttgctgtcccttttccttttttgatgttctttcacccttttctgtttgctaagtgaggatgaaaaaataacactgtactgcaataaggggagagtaaccctgtctaatgaaacctgtgtctctgagagtagagtcactggaacactaatgaggaaactgcactgttttattttaattcagttgttagtgtgtcttagtgtgtgcaattttttttcttactaatatccatggtttgcaggttctgttaggccctttccttctccttacttcttatccccaactccctacccacccctcttcagttttcagattggagattcaagatttgttccactttacaagcaagaggaaaaaaaagcaaccttcaaactaattctccatgggggctctccatgttaccctccactccttggcccaaacctctgatggagatagacattgttggagaagtgggctgccttccccaagtggggcactgcttaagcacttattcagtggagaacacaggtgaaaagcaactcaggatgagggtggtggagagggcaggggcagatgtgcagtcagagaaggactcctgaagttactgctgctcagaaaaacagttcctttaatgtggaagagccatttcataggtcataggtggtatggtatatttcttcagagtcaaccttggccctgagaagtatgtcctcctggtgtgctcaggctcaacggcagtctggtggctgaaggcacttggcctcctaaaccaagcagaattttgggaagagataacagccagggagatattgcccatgattctcactttttctttgcctggcatctaagcaggaacccattgtggagtagactctcttcttctatggagcctctgacatggggagcaatgctaagcaagctaagtgtaaaagaaaagtgacagaataattttggaagaggaagcctcatcaaaagctcacacaaaatagagcttcccatggtgtgccctatcctaggtttaagaaaacacgtatgaagtttatgctgatgcaaagaacttgggtttttatgttaatataaagtgttgttttagcatgtggccagatgatgctctgtcatctttagaaagtgagataaccaaggaaataattgaaggagtatagggagatggattaagttgataatgacatttagggcaacttaagacctttgatcccaggttctaactcaaagaggctgaccttcccccagctaagatagcatgaggacgttgtattccaatatacgtatgattggggctacaaagctgaactaaagcaagattggtgaagtggcagggtttatagagagaagcccaggctgagttcagcttttgttggaagtgagaatccctgacatatagctttcttggagatcccaactctcattcttggtgcaactggcttccagctctccagcagtcactctcctaggtgcatgattcagtgcgtgccatgtgtcattagcttttactgataaccatattctggcttgttcccttaccccctacttctatccaattttctctgctaggggttatcattagcaattgacatgctaaaggttttggagcccacctaggggtaggtgcagctttattggcttttctgtggattctctcagtggacccacaccatctctatgtctctccactctcctgccttcagccatagcaaagaatccttccaaaatcaaactcttcacttttttgactcaagtgttgttgttcagtctctcgcgtgtcaatgtggtcatggttcatgaaaccggaccctcaagatggatgattgcttttaactactgccagctgatgtctctcagcccctgccctcatacaagatttttctcagccttcagcctaccactgcagaatccgatgtgacccaccattagggagtctgcatcttggaagagttggaaataaccctttaacatcaacatgcttcaaagactttttgcctttggcctagtaagatgcctctccagctactgagcccacaagtaacatgagcggataaaaagagacttgtttgtgctagaaatgagggtctatgctatgagggggtccaagactctggcgaaatgtgctttttcatcaatggagaaatgaaaggaaaacacaagcaagaaaaaagttaacttgtattatgtatttttactacacttttcttaaaaatagagcattgggaaaactctgaaagagactgacatttttctcaacaggaatccatacttaacagttctggctttcattaaattttgctctttggtacctgggccttttatttaacatctatatttgttttaactctcttggcagatgtgtgaaaggattcttgcttgatcaaacactaagtatttttttggttcttgtttttctttcaaatagccaggtttttttcttttggtatttgcataaaatgaaaatatcaccgaatattaaatcactgtggatccatta

SEQ ID NO: 137420 - DNA, 3170 bp, Homo sapiens
  Payload ID: 6905
  Gene Symbol: GRIA1
  Gene Name: glutamate receptor, ionotropic, AMPA 1
  Uniprot ID: P42261
  ENST ID: ENST00000340592
  CDS Start-End: 74-2794
taaagggaaagggggggaaacaccaaatctatgattggacctgggcttctttttcgccaatgcaaaaaggaatatgcagcacatttttgccttcttctgcaccggtttcctaggcgcggtagtaggtgccaatttccccaacaatatccagatcgggggattatttccaaaccagcagtcacaggaacatgctgcttttagatttgctttgtcgcaactcacagagcccccgaagctgctcccccagattgatattgtgaacatcagcgacagctttgagatgacctatagattctgttcccagttctccaaaggagtctatgccatctttgggttttatgaacgtaggactgtcaacatgctgacctccttttgtggggccctccacgtctgcttcattacgccgagctttcccgttgatacatccaatcagtttgtccttcagctgcgccctgaactgcaggatgccctcatcagcatcattgaccattacaagtggcagaaatttgtctacatttatgatgccgaccggggcttatccgtcctgcagaaagtcctggatacagctgctgagaagaactggcaggtgacagcagtcaacattttgacaaccacagaggagggataccggatgctctttcaggacctggagaagaaaaaggagcggctggtggtggtggactgtgaatcagaacgcctcaatgctatcttgggccagattataaagctagagaagaatggcatcggctaccactacattcttgcaaatctgggcttcatggacattgacttaaacaaattcaaggagagtggcgccaatgtgacaggtttccagctggtgaactacacagacactattccggccaagatcatgcagcagtggaagaatagtgatgctcgagaccacacacgggtggactggaagagacccaagtacacctctgcgctcacctacgatggggtgaaggtgatggctgaggctttccagagcctgcggaggcagagaattgatatatctcgccgggggaatgctggggattgtctggctaacccagctgttccctggggccaagggatcgacatccagagagctctgcagcaggtgcgatttgaaggtttaacaggaaacgtgcagtttaatgagaaaggacgccggaccaactacacgctccacgtgattgaaatgaaacatgacggcatccgaaagattggttactggaatgaagatgataagtttgtccctgcagccaccgatgcccaagctgggggcgataattcaagtgttcagaacagaacatacatcgtcacaacaatcctagaagatccttatgtgatgctcaagaagaacgccaatcagtttgagggcaatgaccgttacgagggctactgtgtagagctggcggcagagattgccaagcacgtgggctactcctaccgtctggagattgtcagtgatggaaaatacggagcccgagaccctgacacgaaggcctggaatggcatggtgggagagctggtctatggaagagcagatgtggctgtggctcccttaactatcactttggtccgggaagaagttatagatttctccaaaccatttatgagtttggggatctccatcatgattaaaaaaccacagaaatccaagccgggtgtcttctccttccttgatcctttggcttatgagatttggatgtgcattgtttttgcctacattggagtgagtgttgtcctcttcctggtcagccgcttcagtccctatgaatggcacagtgaagagtttgaggaaggacgggaccagacaaccagtgaccagtccaatgagtttgggatattcaacagtttgtggttctccctgggagccttcatgcagcaaggatgtgacatttctcccaggtccctgtctggtcgcatcgttggtggcgtctggtggttcttcaccttaatcatcatctcctcatatacagccaatctggccgccttcctgaccgtggagaggatggtgtctcccattgagagtgcagaggacctagcgaagcagacagaaattgcctacgggacgctggaagcaggatctactaaggagttcttcaggaggtctaaaattgctgtgtttgagaagatgtggacatacatgaagtcagcagagccatcagtttttgtgcggaccacagaggaggggatgattcgagtgaggaaatccaaaggcaaatatgcctacctcctggagtccaccatgaatgagtacattgagcagcggaaaccctgtgacaccatgaaggtgggaggtaacttggattccaaaggctatggcattgcaacacccaaggggtctgccctgagaggtcccgtaaacctagcggttttgaaactcagtgagcaaggcgtcttagacaagctgaaaagcaaatggtggtacgataaaggggaatgtggaagcaaggactccggaagtaaggacaagacaagcgctctgagcctcagcaatgtggcaggcgtgttctacatcctgatcggaggacttggactagccatgctggttgccttaatcgagttctgctacaaatcccgtagtgaatccaagcggatgaagggtttttgtttgatcccacagcaatccatcaacgaagccatacggacatcgaccctcccccgcaacagcggggcaggagccagcagcggcggcagtggagagaatggtcgggtggtcagccatgacttccccaagtccatgcaatcgattccttgcatgagccacagttcagggatgcccttgggagccacgggattgtaactggagcagatggagaccccttggggagcaggctcgggctccccagccccatcccaaacccttcagtgccaaaaacaacaacaaaatgaaacgcaaccaccaccaaccactgcgaccacaagaaggatgattcaacaggttttcctgaagaattgaaaaaccattttgctgtcccttttccttttttgatgttctttcacccttttctgtttgctaagtgaggatgaaaaaataacactgtactgcaataaggggagagtaaccctgtctaatgaaacctgtgtctctgagagtagagtcactggaacactaatgaggaaactgcactgttttattttaattcagttgttagtgtgtcttagtgtgtgcaattttt

SEQ ID NO: 137421 - DNA, 2825 bp, Homo sapiens
  Payload ID: 6905
  Gene Symbol: GRIA1
  Gene Name: glutamate receptor, ionotropic, AMPA 1
  Uniprot ID: P42261
  ENST ID: ENST00000448073
  CDS Start-End: 28-2778
gtgcaattgatattttgtcgggcatacatgtgctgcagtacccatctctttcagcctctccagctagctggcggcttggagtggccatggagtaacttgctttgtttcctgacacctgttaagctacatcctgaagtgtggggattatttccaaaccagcagtcacaggaacatgctgcttttagatttgctttgtcgcaactcacagagcccccgaagctgctcccccagattgatattgtgaacatcagcgacagctttgagatgacctatagattctgttcccagttctccaaaggagtctatgccatctttgggttttatgaacgtaggactgtcaacatgctgacctccttttgtggggccctccacgtctgcttcattacgccgagctttcccgttgatacatccaatcagtttgtccttcagctgcgccctgaactgcaggatgccctcatcagcatcattgaccattacaagtggcagaaatttgtctacatttatgatgccgaccggggcttatccgtcctgcagaaagtcctggatacagctgctgagaagaactggcaggtgacagcagtcaacattttgacaaccacagaggagggataccggatgctctttcaggacctggagaagaaaaaggagcggctggtggtggtggactgtgaatcagaacgcctcaatgctatcttgggccagattataaagctagagaagaatggcatcggctaccactacattcttgcaaatctgggcttcatggacattgacttaaacaaattcaaggagagtggcgccaatgtgacaggtttccagctggtgaactacacagacactattccggccaagatcatgcagcagtggaagaatagtgatgctcgagaccacacacgggtggactggaagagacccaagtacacctctgcgctcacctacgatggggtgaaggtgatggctgaggctttccagagcctgcggaggcagagaattgatatatctcgccgggggaatgctggggattgtctggctaacccagctgttccctggggccaagggatcgacatccagagagctctgcagcaggtgcgatttgaaggtttaacaggaaacgtgcagtttaatgagaaaggacgccggaccaactacacgctccacgtgattgaaatgaaacatgacggcatccgaaagattggttactggaatgaagatgataagtttgtccctgcagccaccgatgcccaagctgggggcgataattcaagtgttcagaacagaacatacatcgtcacaacaatcctagaagatccttatgtgatgctcaagaagaacgccaatcagtttgagggcaatgaccgttacgagggctactgtgtagagctggcggcagagattgccaagcacgtgggctactcctaccgtctggagattgtcagtgatggaaaatacggagcccgagaccctgacacgaaggcctggaatggcatggtgggagagctggtctatggaagagcagatgtggctgtggctcccttaactatcactttggtccgggaagaagttatagatttctccaaaccatttatgagtttggggatctccatcatgattaaaaaaccacagaaatccaagccgggtgtcttctccttccttgatcctttggcttatgagatttggatgtgcattgtttttgcctacattggagtgagtgttgtcctcttcctggtcagccgcttcagtccctatgaatggcacagtgaagagtttgaggaaggacgggaccagacaaccagtgaccagtccaatgagtttgggatattcaacagtttgtggttctccctgggagccttcatgcagcaaggatgtgacatttctcccaggtccctgtctggtcgcatcgttggtggcgtctggtggttcttcaccttaatcatcatctcctcatatacagccaatctggccgccttcctgaccgtggagaggatggtgtctcccattgagagtgcagaggacctagcgaagcagacagaaattgcctacgggacgctggaagcaggatctactaaggagttcttcaggaggtctaaaattgctgtgtttgagaagatgtggacatacatgaagtcagcagagccatcagtttttgtgcggaccacagaggaggggatgattcgagtgaggaaatccaaaggcaaatatgcctacctcctggagtccaccatgaatgagtacattgagcagcggaaaccctgtgacaccatgaaggtgggaggtaacttggattccaaaggctatggcattgcaacacccaaggggtctgccctgagaggtcccgtaaacctagcggttttgaaactcagtgagcaaggcgtcttagacaagctgaaaagcaaatggtggtacgataaaggggaatgtggaagcaaggactccggaagtaaggacaagacaagcgctctgagcctcagcaatgtggcaggcgtgttctacatcctgatcggaggacttggactagccatgctggttgccttaatcgagttctgctacaaatcccgtagtgaatccaagcggatgaagggtttttgtttgatcccacagcaatccatcaacgaagccatacggacatcgaccctcccccgcaacagcggggcaggagccagcagcggcggcagtggagagaatggtcgggtggtcagccatgacttccccaagtccatgcaatcgattccttgcatgagccacagttcagggatgcccttgggagccacgggattgtaactggagcagatggagaccccttggggagcaggctcgggctccccagc

SEQ ID NO: 137422 - DNA, 3069 bp, Homo sapiens
  Payload ID: 6905
  Gene Symbol: GRIA1
  Gene Name: glutamate receptor, ionotropic, AMPA 1
  Uniprot ID: P42261
  ENST ID: ENST00000521843
  CDS Start-End: 162-2675
attgcttggtagatggtgcttgattccatttttaatggggattatttccaaaccagcagtcacaggaacatgctgcttttagatttgctttgtcgcaactcacagagcccccgaagctgctcccccagattgatattgtgaacatcagcgacagctttgagatgacctatagattctgttcccagttctccaaaggagtctatgccatctttgggttttatgaacgtaggactgtcaacatgctgacctccttttgtggggccctccacgtctgcttcattacgccgagctttcccgttgatacatccaatcagtttgtccttcagctgcgccctgaactgcaggatgccctcatcagcatcattgaccattacaagtggcagaaatttgtctacatttatgatgccgaccggggcttatccgtcctgcagaaagtcctggatacagctgctgagaagaactggcaggtgacagcagtcaacattttgacaaccacagaggagggataccggatgctctttcaggacctggagaagaaaaaggagcggctggtggtggtggactgtgaatcagaacgcctcaatgctatcttgggccagattataaagctagagaagaatggcatcggctaccactacattcttgcaaatctgggcttcatggacattgacttaaacaaattcaaggagagtggcgccaatgtgacaggtttccagctggtgaactacacagacactattccggccaagatcatgcagcagtggaagaatagtgatgctcgagaccacacacgggtggactggaagagacccaagtacacctctgcgctcacctacgatggggtgaaggtgatggctgaggctttccagagcctgcggaggcagagaattgatatatctcgccgggggaatgctggggattgtctggctaacccagctgttccctggggccaagggatcgacatccagagagctctgcagcaggtgcgatttgaaggtttaacaggaaacgtgcagtttaatgagaaaggacgccggaccaactacacgctccacgtgattgaaatgaaacatgacggcatccgaaagattggttactggaatgaagatgataagtttgtccctgcagccaccgatgcccaagctgggggcgataattcaagtgttcagaacagaacatacatcgtcacaacaatcctagaagatccttatgtgatgctcaagaagaacgccaatcagtttgagggcaatgaccgttacgagggctactgtgtagagctggcggcagagattgccaagcacgtgggctactcctaccgtctggagattgtcagtgatggaaaatacggagcccgagaccctgacacgaaggcctggaatggcatggtgggagagctggtctatggaagagcagatgtggctgtggctcccttaactatcactttggtccgggaagaagttatagatttctccaaaccatttatgagtttggggatctccatcatgattaaaaaaccacagaaatccaagccgggtgtcttctccttccttgatcctttggcttatgagatttggatgtgcattgtttttgcctacattggagtgagtgttgtcctcttcctggtcagccgcttcagtccctatgaatggcacagtgaagagtttgaggaaggacgggaccagacaaccagtgaccagtccaatgagtttgggatattcaacagtttgtggttctccctgggagccttcatgcagcaaggatgtgacatttctcccaggtccctgtctggtcgcatcgttggtggcgtctggtggttcttcaccttaatcatcatctcctcatatacagccaatctggccgccttcctgaccgtggagaggatggtgtctcccattgagagtgcagaggacctagcgaagcagacagaaattgcctacgggacgctggaagcaggatctactaaggagttcttcaggaggtctaaaattgctgtgtttgagaagatgtggacatacatgaagtcagcagagccatcagtttttgtgcggaccacagaggaggggatgattcgagtgaggaaatccaaaggcaaatatgcctacctcctggagtccaccatgaatgagtacattgagcagcggaaaccctgtgacaccatgaaggtgggaggtaacttggattccaaaggctatggcattgcaacacccaaggggtctgccctgagaaatccagtaaacctggcagtgttaaaactgaacgagcaggggcttttggacaaattgaaaaacaaatggtggtacgacaagggcgagtgcggcagcgggggaggtgattccaaggacaagacaagcgctctgagcctcagcaatgtggcaggcgtgttctacatcctgatcggaggacttggactagccatgctggttgccttaatcgagttctgctacaaatcccgtagtgaatccaagcggatgaagggtttttgtttgatcccacagcaatccatcaacgaagccatacggacatcgaccctcccccgcaacagcggggcaggagccagcagcggcggcagtggagagaatggtcgggtggtcagccatgacttccccaagtccatgcaatcgattccttgcatgagccacagttcagggatgcccttgggagccacgggattgtaactggagcagatggagaccccttggggagcaggctcgggctccccagccccatcccaaacccttcagtgccaaaaacaacaacaaaatgaaacgcaaccaccaccaaccactgcgaccacaagaaggatgattcaacaggttttcctgaagaattgaaaaaccattttgctgtcccttttccttttttgatgttctttcacccttttctgtttgctaagtgaggatgaaaaaataacactgtactgcaataaggggagagtaaccctgtctaatgaaacctgtgtctctgagagtagagtcactggaacactaatgaggaaactgcactgttttattttaattcagttgttagtgtgtcttagtgtgtgcaattttttttcttactaatatccat

SEQ ID NO: 137423 - DNA, 2761 bp, Homo sapiens
  Payload ID: 6905
  Gene Symbol: GRIA1
  Gene Name: glutamate receptor, ionotropic, AMPA 1
  Uniprot ID: P42261
  ENST ID: ENST00000518142
  CDS Start-End: 235-2715
tcttttcccgtgctcagttaatctggctgtcagttggtgttaacgctgcagtttaagtgttcggattccaagggaaacagacaaacctcacgaaaggaaggaagcaagcaagcaaggaaggaactgcaggaggaaaagaacaggcagaacagcgagaagaataaagggaaagggggggaaacaccaaatctatgattggacctgggcttctttttcgccaatgcaaaaaggaatatgcagcacatttttgccttcttctgcaccggtttcctaggcgcggtagtaggtgccaatttccccaacaatatccagatcgggggattatttccaaaccagcagtcacaggaacatgctgcttttagatttgctttgtcgcaactcacagagcccccgaagctgctcccccagattgatattgtgaacatcagcgacagctttgagatgacctatagatgcttatccgtcctgcagaaagtcctggatacagctgctgagaagaactggcaggtgacagcagtcaacattttgacaaccacagaggagggataccggatgctctttcaggacctggagaagaaaaaggagcggctggtggtggtggactgtgaatcagaacgcctcaatgctatcttgggccagattataaagctagagaagaatggcatcggctaccactacattcttgcaaatctgggcttcatggacattgacttaaacaaattcaaggagagtggcgccaatgtgacaggtttccagctggtgaactacacagacactattccggccaagatcatgcagcagtggaagaatagtgatgctcgagaccacacacgggtggactggaagagacccaagtacacctctgcgctcacctacgatggggtgaaggtgatggctgaggctttccagagcctgcggaggcagagaattgatatatctcgccgggggaatgctggggattgtctggctaacccagctgttccctggggccaagggatcgacatccagagagctctgcagcaggtgcgatttgaaggtttaacaggaaacgtgcagtttaatgagaaaggacgccggaccaactacacgctccacgtgattgaaatgaaacatgacggcatccgaaagattggttactggaatgaagatgataagtttgtccctgcagccaccgatgcccaagctgggggcgataattcaagtgttcagaacagaacatacatcgtcacaacaatcctagaagatccttatgtgatgctcaagaagaacgccaatcagtttgagggcaatgaccgttacgagggctactgtgtagagctggcggcagagattgccaagcacgtgggctactcctaccgtctggagattgtcagtgatggaaaatacggagcccgagaccctgacacgaaggcctggaatggcatggtgggagagctggtctatggaagagcagatgtggctgtggctcccttaactatcactttggtccgggaagaagttatagatttctccaaaccatttatgagtttggggatctccatcatgattaaaaaaccacagaaatccaagccgggtgtcttctccttccttgatcctttggcttatgagatttggatgtgcattgtttttgcctacattggagtgagtgttgtcctcttcctggtcagccgcttcagtccctatgaatggcacagtgaagagtttgaggaaggacgggaccagacaaccagtgaccagtccaatgagtttgggatattcaacagtttgtggttctccctgggagccttcatgcagcaaggatgtgacatttctcccaggtccctgtctggtcgcatcgttggtggcgtctggtggttcttcaccttaatcatcatctcctcatatacagccaatctggccgccttcctgaccgtggagaggatggtgtctcccattgagagtgcagaggacctagcgaagcagacagaaattgcctacgggacgctggaagcaggatctactaaggagttcttcaggaggtctaaaattgctgtgtttgagaagatgtggacatacatgaagtcagcagagccatcagtttttgtgcggaccacagaggaggggatgattcgagtgaggaaatccaaaggcaaatatgcctacctcctggagtccaccatgaatgagtacattgagcagcggaaaccctgtgacaccatgaaggtgggaggtaacttggattccaaaggctatggcattgcaacacccaaggggtctgccctgagaaatccagtaaacctggcagtgttaaaactgaacgagcaggggcttttggacaaattgaaaaacaaatggtggtacgacaagggcgagtgcggcagcgggggaggtgattccaaggacaagacaagcgctctgagcctcagcaatgtggcaggcgtgttctacatcctgatcggaggacttggactagccatgctggttgccttaatcgagttctgctacaaatcccgtagtgaatccaagcggatgaagggtttttgtttgatcccacagcaatccatcaacgaagccatacggacatcgaccctcccccgcaacagcggggcaggagccagcagcggcggcagtggagagaatggtcgggtggtcagccatgacttccccaagtccatgcaatcgattccttgcatgagccacagttcagggatgcccttgggagccacgggattgtaactggagcagatggagaccccttggggagcaggctcgggctccccag

SEQ ID NO: 137424 - DNA, 5233 bp, Homo sapiens
  Payload ID: 6905
  Gene Symbol: GRIA1
  Gene Name: glutamate receptor, ionotropic, AMPA 1
  Uniprot ID: P42261
  ENST ID: ENST00000518783
  CDS Start-End: 28-2778
gtgcaattgatattttgtcgggcatacatgtgctgcagtacccatctctttcagcctctccagctagctggcggcttggagtggccatggagtaacttgctttgtttcctgacacctgttaagctacatcctgaagtgtggggattatttccaaaccagcagtcacaggaacatgctgcttttagatttgctttgtcgcaactcacagagcccccgaagctgctcccccagattgatattgtgaacatcagcgacagctttgagatgacctatagattctgttcccagttctccaaaggagtctatgccatctttgggttttatgaacgtaggactgtcaacatgctgacctccttttgtggggccctccacgtctgcttcattacgccgagctttcccgttgatacatccaatcagtttgtccttcagctgcgccctgaactgcaggatgccctcatcagcatcattgaccattacaagtggcagaaatttgtctacatttatgatgccgaccggggcttatccgtcctgcagaaagtcctggatacagctgctgagaagaactggcaggtgacagcagtcaacattttgacaaccacagaggagggataccggatgctctttcaggacctggagaagaaaaaggagcggctggtggtggtggactgtgaatcagaacgcctcaatgctatcttgggccagattataaagctagagaagaatggcatcggctaccactacattcttgcaaatctgggcttcatggacattgacttaaacaaattcaaggagagtggcgccaatgtgacaggtttccagctggtgaactacacagacactattccggccaagatcatgcagcagtggaagaatagtgatgctcgagaccacacacgggtggactggaagagacccaagtacacctctgcgctcacctacgatggggtgaaggtgatggctgaggctttccagagcctgcggaggcagagaattgatatatctcgccgggggaatgctggggattgtctggctaacccagctgttccctggggccaagggatcgacatccagagagctctgcagcaggtgcgatttgaaggtttaacaggaaacgtgcagtttaatgagaaaggacgccggaccaactacacgctccacgtgattgaaatgaaacatgacggcatccgaaagattggttactggaatgaagatgataagtttgtccctgcagccaccgatgcccaagctgggggcgataattcaagtgttcagaacagaacatacatcgtcacaacaatcctagaagatccttatgtgatgctcaagaagaacgccaatcagtttgagggcaatgaccgttacgagggctactgtgtagagctggcggcagagattgccaagcacgtgggctactcctaccgtctggagattgtcagtgatggaaaatacggagcccgagaccctgacacgaaggcctggaatggcatggtgggagagctggtctatggaagagcagatgtggctgtggctcccttaactatcactttggtccgggaagaagttatagatttctccaaaccatttatgagtttggggatctccatcatgattaaaaaaccacagaaatccaagccgggtgtcttctccttccttgatcctttggcttatgagatttggatgtgcattgtttttgcctacattggagtgagtgttgtcctcttcctggtcagccgcttcagtccctatgaatggcacagtgaagagtttgaggaaggacgggaccagacaaccagtgaccagtccaatgagtttgggatattcaacagtttgtggttctccctgggagccttcatgcagcaaggatgtgacatttctcccaggtccctgtctggtcgcatcgttggtggcgtctggtggttcttcaccttaatcatcatctcctcatatacagccaatctggccgccttcctgaccgtggagaggatggtgtctcccattgagagtgcagaggacctagcgaagcagacagaaattgcctacgggacgctggaagcaggatctactaaggagttcttcaggaggtctaaaattgctgtgtttgagaagatgtggacatacatgaagtcagcagagccatcagtttttgtgcggaccacagaggaggggatgattcgagtgaggaaatccaaaggcaaatatgcctacctcctggagtccaccatgaatgagtacattgagcagcggaaaccctgtgacaccatgaaggtgggaggtaacttggattccaaaggctatggcattgcaacacccaaggggtctgccctgagaaatccagtaaacctggcagtgttaaaactgaacgagcaggggcttttggacaaattgaaaaacaaatggtggtacgacaagggcgagtgcggcagcgggggaggtgattccaaggacaagacaagcgctctgagcctcagcaatgtggcaggcgtgttctacatcctgatcggaggacttggactagccatgctggttgccttaatcgagttctgctacaaatcccgtagtgaatccaagcggatgaagggtttttgtttgatcccacagcaatccatcaacgaagccatacggacatcgaccctcccccgcaacagcggggcaggagccagcagcggcggcagtggagagaatggtcgggtggtcagccatgacttccccaagtccatgcaatcgattccttgcatgagccacagttcagggatgcccttgggagccacgggattgtaactggagcagatggagaccccttggggagcaggctcgggctccccagccccatcccaaacccttcagtgccaaaaacaacaacaaaatgaaacgcaaccaccaccaaccactgcgaccacaagaaggatgattcaacaggttttcctgaagaattgaaaaaccattttgctgtcccttttccttttttgatgttctttcacccttttctgtttgctaagtgaggatgaaaaaataacactgtactgcaataaggggagagtaaccctgtctaatgaaacctgtgtctctgagagtagagtcactggaacactaatgaggaaactgcactgttttattttaattcagttgttagtgtgtcttagtgtgtgcaattttttttcttactaatatccatggtttgcaggttctgttaggccctttccttctccttacttcttatccccaactccctacccacccctcttcagttttcagattggagattcaagatttgttccactttacaagcaagaggaaaaaaaagcaaccttcaaactaattctccatgggggctctccatgttaccctccactccttggcccaaacctctgatggagatagacattgttggagaagtgggctgccttccccaagtggggcactgcttaagcacttattcagtggagaacacaggtgaaaagcaactcaggatgagggtggtggagagggcaggggcagatgtgcagtcagagaaggactcctgaagttactgctgctcagaaaaacagttcctttaatgtggaagagccatttcataggtcataggtggtatggtatatttcttcagagtcaaccttggccctgagaagtatgtcctcctggtgtgctcaggctcaacggcagtctggtggctgaaggcacttggcctcctaaaccaagcagaattttgggaagagataacagccagggagatattgcccatgattctcactttttctttgcctggcatctaagcaggaacccattgtggagtagactctcttcttctatggagcctctgacatggggagcaatgctaagcaagctaagtgtaaaagaaaagtgacagaataattttggaagaggaagcctcatcaaaagctcacacaaaatagagcttcccatggtgtgccctatcctaggtttaagaaaacacgtatgaagtttatgctgatgcaaagaacttgggtttttatgttaatataaagtgttgttttagcatgtggccagatgatgctctgtcatctttagaaagtgagataaccaaggaaataattgaaggagtatagggagatggattaagttgataatgacatttagggcaacttaagacctttgatcccaggttctaactcaaagaggctgaccttcccccagctaagatagcatgaggacgttgtattccaatatacgtatgattggggctacaaagctgaactaaagcaagattggtgaagtggcagggtttatagagagaagcccaggctgagttcagcttttgttggaagtgagaatccctgacatatagctttcttggagatcccaactctcattcttggtgcaactggcttccagctctccagcagtcactctcctaggtgcatgattcagtgcgtgccatgtgtcattagcttttactgataaccatattctggcttgttcccttaccccctacttctatccaattttctctgctaggggttatcattagcaattgacatgctaaaggttttggagcccacctaggggtaggtgcagctttattggcttttctgtggattctctcagtggacccacaccatctctatgtctctccactctcctgccttcagccatagcaaagaatccttccaaaatcaaactcttcacttttttgactcaagtgttgttgttcagtctctcgcgtgtcaatgtggtcatggttcatgaaaccggaccctcaagatggatgattgcttttaactactgccagctgatgtctctcagcccctgccctcatacaagatttttctcagccttcagcctaccactgcagaatccgatgtgacccaccattagggagtctgcatcttggaagagttggaaataaccctttaacatcaacatgcttcaaagactttttgcctttggcctagtaagatgcctctccagctactgagcccacaagtaacatgagcggataaaaagagacttgtttgtgctagaaatgagggtctatgctatgagggggtccaagactctggcgaaatgtgctttttcatcaatggagaaatgaaaggaaaacacaagcaagaaaaaagttaacttgtattatgtatttttactacacttttcttaaaaatagagcattgggaaaactctgaaagagactgacatttttctcaacaggaatccatacttaacagttctggctttcattaaattttgctctttggta

SEQ ID NO: 137425 - DNA, 3445 bp, Homo sapiens
  Payload ID: 6906
  Gene Symbol: GRIA2
  Gene Name: glutamate receptor, ionotropic, AMPA 2
  Uniprot ID: P42262
  ENST ID: ENST00000264426
  CDS Start-End: 280-2931
ccgagacactgggaccacagcggcagctccgctgaaaactgcattcagccagtcctccggacttctggagcggggacagggcgcagggcatcagcagccaccagcaggacctgggaaatagggattcttctgcctccacttcaggttttagcagcttggtgctaaattgctgtctcaaaatgcagaggatctaatttgcagaggaaaacagccaaagaaggaagaggaggaaaaggaaaaaaaaaggggtatattgtggatgctctacttttcttggaaatgcaaaagattatgcatatttctgtcctcctttctcctgttttatggggactgatttttggtgtctcttctaacagcatacagataggggggctatttcctaggggcgccgatcaagaatacagtgcatttcgagtagggatggttcagttttccacttcggagttcagactgacaccccacatcgacaatttggaggtggcaaacagcttcgcagtcactaatgctttctgctcccagttttcgagaggagtctatgctatttttggattttatgacaagaagtctgtaaataccatcacatcattttgcggaacactccacgtctccttcatcactcccagcttcccaacagatggcacacatccatttgtcattcagatgagacccgacctcaaaggagctctccttagcttgattgaatactatcaatgggacaagtttgcatacctctatgacagtgacagaggcttatcaacactgcaagctgtgctggattctgctgctgaaaagaaatggcaagtgactgctatcaatgtgggaaacattaacaatgacaagaaagatgagatgtaccgatcactttttcaagatctggagttaaaaaaggaacggcgtgtaattctggactgtgaaagggataaagtaaacgacattgtagaccaggttattaccattggaaaacatgttaaagggtaccactacatcattgcaaatctgggatttactgatggagacctattaaaaatccagtttggaggtgcaaatgtctctggatttcagatagtggactatgatgattcgttggtatctaaatttatagaaagatggtcaacactggaagaaaaagaataccctggagctcacacaacaacaattaagtatacttctgctctgacctatgatgccgttcaagtgatgactgaagccttccgcaacctaaggaagcaaagaattgaaatctcccgaagggggaatgcaggagactgtctggcaaacccagcagtgccctggggacaaggtgtagaaatagaaagggccctcaaacaggttcaggttgaaggtctctcaggaaatataaagtttgaccagaatggaaaaagaataaactatacaattaacatcatggagctcaaaactaatgggccccggaagattggctactggagtgaagtggacaaaatggttgttacccttactgagctcccttctggaaatgacacctctgggcttgagaataagactgttgttgtcaccacaattttggaatctccgtatgttatgatgaagaaaaatcatgaaatgcttgaaggcaatgagcgctatgagggctactgtgttgacctggctgcagaaatcgccaaacattgtgggttcaagtacaagttgacaattgttggtgatggcaagtatggggccagggatgcagacacgaaaatttggaatgggatggttggagaacttgtatatgggaaagctgatattgcaattgctccattaactattacccttgtgagagaagaggtgattgacttctcaaagcccttcatgagcctcgggatatctatcatgatcaagaagcctcagaagtccaaaccaggagtgttttcctttcttgatcctttagcctatgagatctggatgtgcattgtttttgcctacattggggtcagtgtagttttattcctggtcagcagatttagcccctacgagtggcacactgaggagtttgaagatggaagagaaacacaaagtagtgaatcaactaatgaatttgggatttttaatagtctctggttttccttgggtgcctttatgcagcaaggatgcgatatttcgccaagatccctctctgggcgcattgttggaggtgtgtggtggttctttaccctgatcataatctcctcctacacggctaacttagctgccttcctgactgtagagaggatggtgtctcccatcgaaagtgctgaggatctttctaagcaaacagaaattgcttatggaacattagactctggctccactaaagagtttttcaggagatctaaaattgcagtgtttgataaaatgtggacctacatgcggagtgcggagccctctgtgtttgtgaggactacggccgaaggggtggctagagtgcggaagtccaaagggaaatatgcctacttgttggagtccacgatgaacgagtacattgagcaaaggaagccttgcgacaccatgaaagttggtggaaacctggattccaaaggctatggcatcgcaacacctaaaggatcctcattaagaaatgcggttaacctcgcagtactaaaactgaatgaacaaggcctgttggacaaattgaaaaacaaatggtggtacgacaaaggagagtgcggcagcgggggaggtgattccaaggaaaagaccagtgccctcagtctgagcaacgttgctggagtattctacatccttgtcgggggccttggtttggcaatgctggtggctttgattgagttctgttacaagtcaagggccgaggcgaaacgaatgaaggtggcaaagaatgcacagaatattaacccatcttcctcgcagaattcacagaattttgcaacttataaggaaggttacaacgtatatggcatcgaaagtgttaaaatttaggggatgaccttgaatgatgccatgaggaacaaggcaaggctgtcaattacaggaagtactggagaaaatggacgtgttatgactccagaatttcccaaagcagtgcatgctgtcccttacgtgagtcctggcatgggaatgaatgtcagtgtgactgatctctcgtgattgataagaaccttttgagtgccttacacaatggttttcttgtgtgtttattgtcaaagtggtgagaggcatccagtatcttgaagacttttctttcagccaagaattcttaaatatgtggagttcatcttgaattgtaaggaatgattaattaaaacacaacatctttttctactcgagttacagacaaagcgtggtggacatgcacagctaacatggaagtactataatttacctgaagtctttgtacagacaacaaacctgtttctgcagccactattgttagtctcttgattcataatgacttaagcacacttgacatcaactgcatcaagatgtgacatgt

SEQ ID NO: 137426 - DNA, 5621 bp, Homo sapiens
  Payload ID: 6906
  Gene Symbol: GRIA2
  Gene Name: glutamate receptor, ionotropic, AMPA 2
  Uniprot ID: P42262
  ENST ID: ENST00000296526
  CDS Start-End: 326-2977
gagagagggtgagtgtgtgtgagtgcatgggagggtgctgaatattccgagacactgggaccacagcggcagctccgctgaaaactgcattcagccagtcctccggacttctggagcggggacagggcgcagggcatcagcagccaccagcaggacctgggaaatagggattcttctgcctccacttcaggttttagcagcttggtgctaaattgctgtctcaaaatgcagaggatctaatttgcagaggaaaacagccaaagaaggaagaggaggaaaaggaaaaaaaaaggggtatattgtggatgctctacttttcttggaaatgcaaaagattatgcatatttctgtcctcctttctcctgttttatggggactgatttttggtgtctcttctaacagcatacagataggggggctatttcctaggggcgccgatcaagaatacagtgcatttcgagtagggatggttcagttttccacttcggagttcagactgacaccccacatcgacaatttggaggtggcaaacagcttcgcagtcactaatgctttctgctcccagttttcgagaggagtctatgctatttttggattttatgacaagaagtctgtaaataccatcacatcattttgcggaacactccacgtctccttcatcactcccagcttcccaacagatggcacacatccatttgtcattcagatgagacccgacctcaaaggagctctccttagcttgattgaatactatcaatgggacaagtttgcatacctctatgacagtgacagaggcttatcaacactgcaagctgtgctggattctgctgctgaaaagaaatggcaagtgactgctatcaatgtgggaaacattaacaatgacaagaaagatgagatgtaccgatcactttttcaagatctggagttaaaaaaggaacggcgtgtaattctggactgtgaaagggataaagtaaacgacattgtagaccaggttattaccattggaaaacatgttaaagggtaccactacatcattgcaaatctgggatttactgatggagacctattaaaaatccagtttggaggtgcaaatgtctctggatttcagatagtggactatgatgattcgttggtatctaaatttatagaaagatggtcaacactggaagaaaaagaataccctggagctcacacaacaacaattaagtatacttctgctctgacctatgatgccgttcaagtgatgactgaagccttccgcaacctaaggaagcaaagaattgaaatctcccgaagggggaatgcaggagactgtctggcaaacccagcagtgccctggggacaaggtgtagaaatagaaagggccctcaaacaggttcaggttgaaggtctctcaggaaatataaagtttgaccagaatggaaaaagaataaactatacaattaacatcatggagctcaaaactaatgggccccggaagattggctactggagtgaagtggacaaaatggttgttacccttactgagctcccttctggaaatgacacctctgggcttgagaataagactgttgttgtcaccacaattttggaatctccgtatgttatgatgaagaaaaatcatgaaatgcttgaaggcaatgagcgctatgagggctactgtgttgacctggctgcagaaatcgccaaacattgtgggttcaagtacaagttgacaattgttggtgatggcaagtatggggccagggatgcagacacgaaaatttggaatgggatggttggagaacttgtatatgggaaagctgatattgcaattgctccattaactattacccttgtgagagaagaggtgattgacttctcaaagcccttcatgagcctcgggatatctatcatgatcaagaagcctcagaagtccaaaccaggagtgttttcctttcttgatcctttagcctatgagatctggatgtgcattgtttttgcctacattggggtcagtgtagttttattcctggtcagcagatttagcccctacgagtggcacactgaggagtttgaagatggaagagaaacacaaagtagtgaatcaactaatgaatttgggatttttaatagtctctggttttccttgggtgcctttatgcagcaaggatgcgatatttcgccaagatccctctctgggcgcattgttggaggtgtgtggtggttctttaccctgatcataatctcctcctacacggctaacttagctgccttcctgactgtagagaggatggtgtctcccatcgaaagtgctgaggatctttctaagcaaacagaaattgcttatggaacattagactctggctccactaaagagtttttcaggagatctaaaattgcagtgtttgataaaatgtggacctacatgcggagtgcggagccctctgtgtttgtgaggactacggccgaaggggtggctagagtgcggaagtccaaagggaaatatgcctacttgttggagtccacgatgaacgagtacattgagcaaaggaagccttgcgacaccatgaaagttggtggaaacctggattccaaaggctatggcatcgcaacacctaaaggatcctcattaagaaccccagtaaatcttgcagtattgaaactcagtgagcaaggcgtcttagacaagctgaaaaacaaatggtggtacgataaaggtgaatgtggagccaaggactctggaagtaaggaaaagaccagtgccctcagtctgagcaacgttgctggagtattctacatccttgtcgggggccttggtttggcaatgctggtggctttgattgagttctgttacaagtcaagggccgaggcgaaacgaatgaaggtggcaaagaatgcacagaatattaacccatcttcctcgcagaattcacagaattttgcaacttataaggaaggttacaacgtatatggcatcgaaagtgttaaaatttaggggatgaccttgaatgatgccatgaggaacaaggcaaggctgtcaattacaggaagtactggagaaaatggacgtgttatgactccagaatttcccaaagcagtgcatgctgtcccttacgtgagtcctggcatgggaatgaatgtcagtgtgactgatctctcgtgattgataagaaccttttgagtgccttacacaatggttttcttgtgtgtttattgtcaaagtggtgagaggcatccagtatcttgaagacttttctttcagccaagaattcttaaatatgtggagttcatcttgaattgtaaggaatgattaattaaaacacaacatctttttctactcgagttacagacaaagcgtggtggacatgcacagctaacatggaagtactataatttacctgaagtctttgtacagacaacaaacctgtttctgcagccactattgttagtctcttgattcataatgacttaagcacacttgacatcaactgcatcaagatgtgacatgttttataaaaaaaggaaaaaaaacatttaaaactaaaaaatatttttaggtattttcacaaacaaactggcttttaaataaatttgcttccatattggttgaataagacaaaaacaattaaactgagtgggaagtgaataaaaaaaggctttaggtatcgattccatatttttcaaagccaaatatgtaaatgctaaggaaagtaaacaaagaggagattccaatcttgtaatttaatattgttattaaaactttaatgtatcctattctttaacatttggtgttaatataaaattacttggcaatgcttgacatttgaaataaacatttttctattgttttattgcaagtggtccaattaattttgcttagctacagtttggtcataaatcaagtgagtttaaagacactaccaagttgttaggtgcccagagaaaatttctcccttttaaaaaggccaggtgatttttcaaatgtaatcttgcccccaaagtaatatctgaatatctttttgacatgtctaaatatatatatatataaagaaatatttgttaacacaaaagcatttgatctatgtagataaatgctaatagatttaaaaagctaatattaacaaataccagaatacgtgaagttccatttttaaagtgtttgagcttacagaagagaaacattcattttaaatgaagtaaaaaatgccttgaaagtaattctttagatagttgcccattgattaaattccaaaaactaaatatgtttttagctttaaaattataaaagctgtcataaactttatatattatgaattttaaaatatgtttgagtctcctgcaatatagtttcatcccattgacatcaattaaaaataaccctaatatattatttttatatttattcctcaggtggaatggctattttaatatgcccagtgtggataaaatgtcacatttctgtaacttttgactaaagagcctatatttatctagttaatgaatttaaaggatctatctttcccttcataaaatacctcttatttccattaaagccccccaagtttaattaatttaggattttgaatgattattgacatccaatagttatttttaatatttgtattcttgttatttctggaagaaagcctttgtgtagcacttggtattttgcaaagtgcttttaaaacattcttacttaccgtatttcatagaagggaaggaaaaatgtaaggtttaacagtaagcacttgcattgaacatggaggcatgtggtatcatgatattcttcactaaatttagctgtccctaatcacagatcctaaggtaatataatataattttagtgcatttctcctcatcaggaatgctggaggtgcattttaagttttaataataagtgctagaatgaccaaattgcagactaattgtttccatattgtacttaaaatgagtttttaaaagtgaaaaagaaatgactatatacaatcaatgctatttattgtacctctgggcctactcttctaaaaattgtagcttatcgatttttctctgtcaagcttgaactaatgtaaataattgaaataatgtaaagttatattttcatgtttttatagatacaacatgacaagaatacataatgtaagagtatttcaactatggataatgttgattggataatgcacatctcagttacaagcagtactcatagtttaatatccatgtaacggtgcatcaatatattgctatataaatatgtctgtgtgcatataagtgaaaagtggtcaaacaagagtgatgacagctgtctaaaggtttttttattcattttatataaaaactgttatggaaagaccaaaatgtttatgaactattcttatgtaaatttacaattgtcctttactgtacttttttgtttacagtatagtaccttattttctgctgtgttaagtgggtgtcaaactccaagaagacatacactttctataacttctattgaagatattggaatttccaatttttcatgtgtactatgtcagaaaatgctttcgattttatttttaaatctaacatcggatggcttttccggagtgttgtaaaaacttcaatcatacataaaacatgttcttacaaaaggcaaa

SEQ ID NO: 137427 - DNA, 2798 bp, Homo sapiens
  Payload ID: 6906
  Gene Symbol: GRIA2
  Gene Name: glutamate receptor, ionotropic, AMPA 2
  ENST ID: ENST00000323661
  CDS Start-End: 355-2547
attccagatttaaactacctagaatatacatgtttttcttaggatgaagcaaaaggaaaagactatgcctttgatacaatagaagaaaaggtcctctcatttcggatccccaaattttattaattctgccttagcgacattttccagtttgctcagattttcttggggtctgaatgcaaagcttgtgattacatggaaaggtgaaggtttctggccgcctacctcgccttcagactctcatctgggtcttgaccccttggctagcttttggatattccacccccgctgtccgagtccgtaggggggctatttcctaggggcgccgatcaagaatacagtgcatttcgagtagggatggttcagttttccacttcggagttcagactgacaccccacatcgacaatttggaggtggcaaacagcttcgcagtcactaatgctttctgctcccagttttcgagaggagtctatgctatttttggattttatgacaagaagtctgtaaataccatcacatcattttgcggaacactccacgtctccttcatcactcccagcttcccaacagatggcacacatccatttgtcattcagatgagacccgacctcaaaggagctctccttagcttgattgaatactatcaatgggacaagtttgcatacctctatgacagtgacagaggcttatcaacactgcaagctgtgctggattctgctgctgaaaagaaatggcaagtgactgctatcaatgtgggaaacattaacaatgacaagaaagatgagatgtaccgatcactttttcaagatctggagttaaaaaaggaacggcgtgtaattctggactgtgaaagggataaagtaaacgacattgtagaccaggttattaccattggaaaacatgttaaagggtaccactacatcattgcaaatctgggatttactgatggagacctattaaaaatccagtttggaggtgcaaatgtctctggatttcagatagtggactatgatgattcgttggtatctaaatttatagaaagatggtcaacactggaagaaaaagaataccctggagctcacacaacaacaattaagtatacttctgctctgacctatgatgccgttcaagtgatgactgaagccttccgcaacctaaggaagcaaagaattgaaatctcccgaagggggaatgcaggagactgtctggcaaacccagcagtgccctggggacaaggtgtagaaatagaaagggccctcaaacaggttcaggttgaaggtctctcaggaaatataaagtttgaccagaatggaaaaagaataaactatacaattaacatcatggagctcaaaactaatgggccccggaagattggctactggagtgaagtggacaaaatggttgttacccttactgagctcccttctggaaatgacacctctgggcttgagaataagactgttgttgtcaccacaattttggaatctccgtatgttatgatgaagaaaaatcatgaaatgcttgaaggcaatgagcgctatgagggctactgtgttgacctggctgcagaaatcgccaaacattgtgggttcaagtacaagttgacaattgttggtgatggcaagtatggggccagggatgcagacacgaaaatttggaatgggatggttggagaacttgtatatgggaaagctgatattgcaattgctccattaactattacccttgtgagagaagaggtgattgacttctcaaagcccttcatgagcctcgggatatctatcatgatcaagaagcctcagaagtccaaaccaggagtgttttcctttcttgatcctttagcctatgagatctggatgtgcattgtttttgcctacattggggtcagtgtagttttattcctggtcagcagatttagcccctacgagtggcacactgaggagtttgaagatggaagagaaacacaaagtagtgaatcaactaatgaatttgggatttttaatagtctctggttttccttgggtgcctttatgcagcaaggatgcgatatttcgccaagatccctctctgggcgcattgttggaggtgtgtggtggttctttaccctgatcataatctcctcctacacggctaacttagctgccttcctgactgtagagaggatggtgtctcccatcgaaagtgctgaggatctttctaagcaaacagaaattgcttatggaacattagactctggctccactaaagagtttttcaggagatctaaaattgcagtgtttgataaaatgtggacctacatgcggagtgcggagccctctgtgtttgtgaggactacggccgaaggggtggctagagtgcggaagtccaaagggaaatatgcctacttgttggagtccacgatgaacgagtacattgagcaaaggaagccttgcgacaccatgaaagttggtggaaacctggattccaaaggctatggcatcgcaacacctaaaggatcctcattaagtggagtcacattcaagacactgttatttgtttgttgtggataaatgcggttaacctcgcagtactaaaactgaatgaacaaggcctgttggacaaattgaaaaacaaatggtggtacgacaaaggagagtgcggcagcgggggaggtgattccaagaaccccagtaaatcttgcagtattgaaactcagtgagcaaggcgtcttagacaagctgaaaaacaaatggtggtacgataaaggtgaatgtggagccaaggactctggaagtaaggaaaagaccagtgccctcagtct

SEQ ID NO: 137428 - DNA, 5260 bp, Homo sapiens
  Payload ID: 6906
  Gene Symbol: GRIA2
  Gene Name: glutamate receptor, ionotropic, AMPA 2
  Uniprot ID: P42262
  ENST ID: ENST00000393815
  CDS Start-End: 112-2622
gtgtgtgcgcgcgcgcgtgagtgagagaggagagagggagaagagagcgcgagagagggggggctatttcctaggggcgccgatcaagaatacagtgcatttcgagtagggatggttcagttttccacttcggagttcagactgacaccccacatcgacaatttggaggtggcaaacagcttcgcagtcactaatgctttctgctcccagttttcgagaggagtctatgctatttttggattttatgacaagaagtctgtaaataccatcacatcattttgcggaacactccacgtctccttcatcactcccagcttcccaacagatggcacacatccatttgtcattcagatgagacccgacctcaaaggagctctccttagcttgattgaatactatcaatgggacaagtttgcatacctctatgacagtgacagaggcttatcaacactgcaagctgtgctggattctgctgctgaaaagaaatggcaagtgactgctatcaatgtgggaaacattaacaatgacaagaaagatgagatgtaccgatcactttttcaagatctggagttaaaaaaggaacggcgtgtaattctggactgtgaaagggataaagtaaacgacattgtagaccaggttattaccattggaaaacatgttaaagggtaccactacatcattgcaaatctgggatttactgatggagacctattaaaaatccagtttggaggtgcaaatgtctctggatttcagatagtggactatgatgattcgttggtatctaaatttatagaaagatggtcaacactggaagaaaaagaataccctggagctcacacaacaacaattaagtatacttctgctctgacctatgatgccgttcaagtgatgactgaagccttccgcaacctaaggaagcaaagaattgaaatctcccgaagggggaatgcaggagactgtctggcaaacccagcagtgccctggggacaaggtgtagaaatagaaagggccctcaaacaggttcaggttgaaggtctctcaggaaatataaagtttgaccagaatggaaaaagaataaactatacaattaacatcatggagctcaaaactaatgggccccggaagattggctactggagtgaagtggacaaaatggttgttacccttactgagctcccttctggaaatgacacctctgggcttgagaataagactgttgttgtcaccacaattttggaatctccgtatgttatgatgaagaaaaatcatgaaatgcttgaaggcaatgagcgctatgagggctactgtgttgacctggctgcagaaatcgccaaacattgtgggttcaagtacaagttgacaattgttggtgatggcaagtatggggccagggatgcagacacgaaaatttggaatgggatggttggagaacttgtatatgggaaagctgatattgcaattgctccattaactattacccttgtgagagaagaggtgattgacttctcaaagcccttcatgagcctcgggatatctatcatgatcaagaagcctcagaagtccaaaccaggagtgttttcctttcttgatcctttagcctatgagatctggatgtgcattgtttttgcctacattggggtcagtgtagttttattcctggtcagcagatttagcccctacgagtggcacactgaggagtttgaagatggaagagaaacacaaagtagtgaatcaactaatgaatttgggatttttaatagtctctggttttccttgggtgcctttatgcagcaaggatgcgatatttcgccaagatccctctctgggcgcattgttggaggtgtgtggtggttctttaccctgatcataatctcctcctacacggctaacttagctgccttcctgactgtagagaggatggtgtctcccatcgaaagtgctgaggatctttctaagcaaacagaaattgcttatggaacattagactctggctccactaaagagtttttcaggagatctaaaattgcagtgtttgataaaatgtggacctacatgcggagtgcggagccctctgtgtttgtgaggactacggccgaaggggtggctagagtgcggaagtccaaagggaaatatgcctacttgttggagtccacgatgaacgagtacattgagcaaaggaagccttgcgacaccatgaaagttggtggaaacctggattccaaaggctatggcatcgcaacacctaaaggatcctcattaagaaccccagtaaatcttgcagtattgaaactcagtgagcaaggcgtcttagacaagctgaaaaacaaatggtggtacgataaaggtgaatgtggagccaaggactctggaagtaaggaaaagaccagtgccctcagtctgagcaacgttgctggagtattctacatccttgtcgggggccttggtttggcaatgctggtggctttgattgagttctgttacaagtcaagggccgaggcgaaacgaatgaaggtggcaaagaatgcacagaatattaacccatcttcctcgcagaattcacagaattttgcaacttataaggaaggttacaacgtatatggcatcgaaagtgttaaaatttaggggatgaccttgaatgatgccatgaggaacaaggcaaggctgtcaattacaggaagtactggagaaaatggacgtgttatgactccagaatttcccaaagcagtgcatgctgtcccttacgtgagtcctggcatgggaatgaatgtcagtgtgactgatctctcgtgattgataagaaccttttgagtgccttacacaatggttttcttgtgtgtttattgtcaaagtggtgagaggcatccagtatcttgaagacttttctttcagccaagaattcttaaatatgtggagttcatcttgaattgtaaggaatgattaattaaaacacaacatctttttctactcgagttacagacaaagcgtggtggacatgcacagctaacatggaagtactataatttacctgaagtctttgtacagacaacaaacctgtttctgcagccactattgttagtctcttgattcataatgacttaagcacacttgacatcaactgcatcaagatgtgacatgttttataaaaaaaggaaaaaaaacatttaaaactaaaaaatatttttaggtattttcacaaacaaactggcttttaaataaatttgcttccatattggttgaataagacaaaaacaattaaactgagtgggaagtgaataaaaaaaggctttaggtatcgattccatatttttcaaagccaaatatgtaaatgctaaggaaagtaaacaaagaggagattccaatcttgtaatttaatattgttattaaaactttaatgtatcctattctttaacatttggtgttaatataaaattacttggcaatgcttgacatttgaaataaacatttttctattgttttattgcaagtggtccaattaattttgcttagctacagtttggtcataaatcaagtgagtttaaagacactaccaagttgttaggtgcccagagaaaatttctcccttttaaaaaggccaggtgatttttcaaatgtaatcttgcccccaaagtaatatctgaatatctttttgacatgtctaaatatatatatatataaagaaatatttgttaacacaaaagcatttgatctatgtagataaatgctaatagatttaaaaagctaatattaacaaataccagaatacgtgaagttccatttttaaagtgtttgagcttacagaagagaaacattcattttaaatgaagtaaaaaatgccttgaaagtaattctttagatagttgcccattgattaaattccaaaaactaaatatgtttttagctttaaaattataaaagctgtcataaactttatatattatgaattttaaaatatgtttgagtctcctgcaatatagtttcatcccattgacatcaattaaaaataaccctaatatattatttttatatttattcctcaggtggaatggctattttaatatgcccagtgtggataaaatgtcacatttctgtaacttttgactaaagagcctatatttatctagttaatgaatttaaaggatctatctttcccttcataaaatacctcttatttccattaaagccccccaagtttaattaatttaggattttgaatgattattgacatccaatagttatttttaatatttgtattcttgttatttctggaagaaagcctttgtgtagcacttggtattttgcaaagtgcttttaaaacattcttacttaccgtatttcatagaagggaaggaaaaatgtaaggtttaacagtaagcacttgcattgaacatggaggcatgtggtatcatgatattcttcactaaatttagctgtccctaatcacagatcctaaggtaatataatataattttagtgcatttctcctcatcaggaatgctggaggtgcattttaagttttaataataagtgctagaatgaccaaattgcagactaattgtttccatattgtacttaaaatgagtttttaaaagtgaaaaagaaatgactatatacaatcaatgctatttattgtacctctgggcctactcttctaaaaattgtagcttatcgatttttctctgtcaagcttgaactaatgtaaataattgaaataatgtaaagttatattttcatgtttttatagatacaacatgacaagaatacataatgtaagagtatttcaactatggataatgttgattggataatgcacatctcagttacaagcagtactcatagtttaatatccatgtaacggtgcatcaatatattgctatataaatatgtctgtgtgcatataagtgaaaagtggtcaaacaagagtgatgacagctgtctaaaggtttttttattcattttatataaaaactgttatggaaagaccaaaatgtttatgaactattcttatgtaaatttacaattgtcctttactgtacttttttgtttacagtatagtaccttattttctgctgtgttaagtgggtgtcaaactccaagaagacatacactttctataacttctattgaagatattggaatttccaatttttcatgtgtactatgtcagaaaatgctttcgattttatttttaaatctaacatcggatggcttttccggagtgttgtaaaaacttcaatcatacataaaacatgttcttacaaaa

SEQ ID NO: 137429 - DNA, 558 bp, Homo sapiens
  Payload ID: 6906
  Gene Symbol: GRIA2
  Gene Name: glutamate receptor, ionotropic, AMPA 2
  ENST ID: ENST00000505888
  CDS Start-End: 123-558
agcgcgcgcccctcctttccctcccggggcactgacactgttctcttgcttgctgtttgttctttgcaggggggctatttcctaggggcgccgatcaagaatacagtgcatttcgagtagggatggttcagttttccacttcggagttcagactgacaccccacatcgacaatttggaggtggcaaacagcttcgcagtcactaatgctttctgctcccagttttcgagaggagtctatgctatttttggattttatgacaagaagtctgtaaataccatcacatcattttgcggaacactccacgtctccttcatcactcccagcttcccaacagatggcacacatccatttgtcattcagatgagacccgacctcaaaggagctctccttagcttgattgaatactatcaatgggacaagtttgcatacctctatgacagtgacagaggcttatcaacactgcaagctgtgctggattctgctgctgaaaagaaatggcaagtgactgctatcaatgtgggaaacattaacaatgacaagaaagatgagatgtacc

SEQ ID NO: 137430 - DNA, 763 bp, Homo sapiens
  Payload ID: 6906
  Gene Symbol: GRIA2
  Gene Name: glutamate receptor, ionotropic, AMPA 2
  ENST ID: ENST00000510854
  CDS Start-End: 1-643
attagactctggctccactaaagagtttttcaggagatctaaaattgcagtgtttgataaaatgtggacctacatgcggagtgcggagccctctgtgtttgtgaggactacggccgaaggggtggctagagtgcggaagtccaaagggaaatatgcctacttgttggagtccacgatgaacgagtacattgagcaaaggaagccttgcgacaccatgaaagttggtggaaacctggattccaaaggctatggcatcgcaacacctaaaggatcctcattaagaaccccagtaaatcttgcagtattgaaactcagtgagcaaggcgtcttagacaagctgaaaaacaaatggtggtacgataaaggtgaatgtggagccaaggactctggaagtaaggaaaagaccagtgccctcagtctgagcaacgttgctggagtattctacatccttgtcgggggccttggtttggcaatgctggtggctttgattgagttctgttacaagtcaagggccgaggcgaaacgaatgaaggtggcaaagaatgcacagaatattaacccatcttcctcgcagaattcacagaattttgcaacttataaggaaggttacaacgtatatggcatcgaaagtgttaaaatttagggggtaggaacgaggctctaatacaaactttttagtgcacgtttagctttcttgttgcgtccttaagctcttttaaataaggaaggtggccaatggatcatcctgtatgtattgttgacg

SEQ ID NO: 137431 - DNA, 522 bp, Homo sapiens
  Payload ID: 6906
  Gene Symbol: GRIA2
  Gene Name: glutamate receptor, ionotropic, AMPA 2
  ENST ID: ENST00000512774
  CDS Start-End: 378-522
cccgtgcgctctgtaactaggcgagtcagcatcacagcccaatggaatatactctaaagatgggattttcatgcaaaatatttaaaagattccatcttgatctcttgtgcggcttaagcatttaaagatataacttggggttctccctggatcctggctacatcccatgaagcccaagtgcacaattttggaatatttcctccacggtgctttgcttgcttgtttgctttcggctgggtcaggttttagcagcttggtgctaaattgctgtctcaaaatgcagaggatctaatttgcagaggaaaacagccaaagaaggaagaggaggaaaaggaaaaaaaaaggggtatattgtggatgctctacttttcttggaaatgcaaaagattatgcatatttctgtcctcctttctcctgttttatggggactgatttttggtgtctcttctaacagcatacagataggggggctatttcctaggggcgccgatcaagaatacagtgcatttcgagtagggatgg

SEQ ID NO: 137432 - DNA, 544 bp, Homo sapiens
  Payload ID: 6906
  Gene Symbol: GRIA2
  Gene Name: glutamate receptor, ionotropic, AMPA 2
  ENST ID: ENST00000509417
  CDS Start-End: 171-544
agagaggagagagggagaagagagcgcgagagagggttttagcagcttggtgctaaattgctgtctcaaaatgcagaggatctaatttgcagaggaaaacagccaaagaaggaagaggaggaaaaggaaaaaaaaaggggtatattgtggatgctctacttttcttggaaatgcaaaagattatgcatatttctgtcctcctttctcctgttttatggggactgatttttggtgtctcttctaacagcatacagataggggggctatttcctaggggcgccgatcaagaatacagtgcatttcgagtagggatggttcagttttccacttcggagttcagactgacaccccacatcgacaatttggaggtggcaaacagcttcgcagtcactaatgctttctgctcccagttttcgagaggagtctatgctatttttggattttatgacaagaagtctgtaaataccatcacatcattttgcggaacactccacgtctccttcatcactcccagcttcccaacagatggcacacatccatttgt

SEQ ID NO: 137433 - DNA, 429 bp, Homo sapiens
  Payload ID: 6906
  Gene Symbol: GRIA2
  Gene Name: glutamate receptor, ionotropic, AMPA 2
  ENST ID: ENST00000506284
  CDS Start-End: 259-429
ttcagccagtcctccggacttctggagcggggacagggcgcagggcatcagcagccaccagcaggacctgggaaatagggattcttctgcctccacttcaggttttagcagcttggtgctaaattgctgtctcaaaatgcagaggatctaatttgcagaggaaaacagccaaagaaggaagaggaggaaaaggaaaaaaaaaggggggggctatttcctaggggcgccgatcaagaatacagtgcatttcgagtagggatggttcagttttccacttcggagttcagactgacaccccacatcgacaatttggaggtggcaaacagcttcgcagtcactaatgctttctgctcccagttttcgagaggagtctatgctatttttggattttatgacaagaagtctgtaaataccatcacatcattttgc

SEQ ID NO: 137434 - DNA, 556 bp, Homo sapiens
  Payload ID: 6906
  Gene Symbol: GRIA2
  Gene Name: glutamate receptor, ionotropic, AMPA 2
  ENST ID: ENST00000503437
  CDS Start-End: 243-556
tatttattgaatgcttttgacatacggaggaattaattccagaaagaccagaggaactaaaaatcttgaaagagaaccaccattttagtgtctgctcccagttttcgagaggagtctatgctatttttggattttatgacaagaagtctgtaaataccatcacatcattttgcggaacactccacgtctccttcatcactcccagcttcccaacagatggcacacatccatttgtcattcagatgagacccgacctcaaaggagctctccttagcttgattgaatactatcaatgggacaagtttgcatacctctatgacagtgacagaggcttatcaacactgcaagctgtgctggattctgctgctgaaaagaaatggcaagtgactgctatcaatgtgggaaacattaacaatgacaagaaagatgagatgtaccgatcactttttcaagatctggagttaaaaaaggaacggcgtgtaattctggactgtgaaagggataaagtaaacgacattgtagaccaggttattaccattggaaaacatgttaaagg

SEQ ID NO: 137435 - DNA, 3041 bp, Homo sapiens
  Payload ID: 6906
  Gene Symbol: GRIA2
  Gene Name: glutamate receptor, ionotropic, AMPA 2
  Uniprot ID: P42262
  ENST ID: ENST00000507898
  CDS Start-End: 278-2788
aggtgaggaggatgacagggcttctgtattgctaaatgggttttcacaggagatggaagataaaaatcaaaattatttgtaacgtaagacagcagggcctggtgagaggacgcttcgccgccaacaattagcaattcggcttctacacagcagccggagatcagctttgctgcatttggtccaggttggagcatctccgcagcagctgcaacagccgcacgaaggggggctatttcctaggggcgccgatcaagaatacagtgcatttcgagtagggatggttcagttttccacttcggagttcagactgacaccccacatcgacaatttggaggtggcaaacagcttcgcagtcactaatgctttctgctcccagttttcgagaggagtctatgctatttttggattttatgacaagaagtctgtaaataccatcacatcattttgcggaacactccacgtctccttcatcactcccagcttcccaacagatggcacacatccatttgtcattcagatgagacccgacctcaaaggagctctccttagcttgattgaatactatcaatgggacaagtttgcatacctctatgacagtgacagaggcttatcaacactgcaagctgtgctggattctgctgctgaaaagaaatggcaagtgactgctatcaatgtgggaaacattaacaatgacaagaaagatgagatgtaccgatcactttttcaagatctggagttaaaaaaggaacggcgtgtaattctggactgtgaaagggataaagtaaacgacattgtagaccaggttattaccattggaaaacatgttaaagggtaccactacatcattgcaaatctgggatttactgatggagacctattaaaaatccagtttggaggtgcaaatgtctctggatttcagatagtggactatgatgattcgttggtatctaaatttatagaaagatggtcaacactggaagaaaaagaataccctggagctcacacaacaacaattaagtatacttctgctctgacctatgatgccgttcaagtgatgactgaagccttccgcaacctaaggaagcaaagaattgaaatctcccgaagggggaatgcaggagactgtctggcaaacccagcagtgccctggggacaaggtgtagaaatagaaagggccctcaaacaggttcaggttgaaggtctctcaggaaatataaagtttgaccagaatggaaaaagaataaactatacaattaacatcatggagctcaaaactaatgggccccggaagattggctactggagtgaagtggacaaaatggttgttacccttactgagctcccttctggaaatgacacctctgggcttgagaataagactgttgttgtcaccacaattttggaatctccgtatgttatgatgaagaaaaatcatgaaatgcttgaaggcaatgagcgctatgagggctactgtgttgacctggctgcagaaatcgccaaacattgtgggttcaagtacaagttgacaattgttggtgatggcaagtatggggccagggatgcagacacgaaaatttggaatgggatggttggagaacttgtatatgggaaagctgatattgcaattgctccattaactattacccttgtgagagaagaggtgattgacttctcaaagcccttcatgagcctcgggatatctatcatgatcaagaagcctcagaagtccaaaccaggagtgttttcctttcttgatcctttagcctatgagatctggatgtgcattgtttttgcctacattggggtcagtgtagttttattcctggtcagcagatttagcccctacgagtggcacactgaggagtttgaagatggaagagaaacacaaagtagtgaatcaactaatgaatttgggatttttaatagtctctggttttccttgggtgcctttatgcagcaaggatgcgatatttcgccaagatccctctctgggcgcattgttggaggtgtgtggtggttctttaccctgatcataatctcctcctacacggctaacttagctgccttcctgactgtagagaggatggtgtctcccatcgaaagtgctgaggatctttctaagcaaacagaaattgcttatggaacattagactctggctccactaaagagtttttcaggagatctaaaattgcagtgtttgataaaatgtggacctacatgcggagtgcggagccctctgtgtttgtgaggactacggccgaaggggtggctagagtgcggaagtccaaagggaaatatgcctacttgttggagtccacgatgaacgagtacattgagcaaaggaagccttgcgacaccatgaaagttggtggaaacctggattccaaaggctatggcatcgcaacacctaaaggatcctcattaagaaccccagtaaatcttgcagtattgaaactcagtgagcaaggcgtcttagacaagctgaaaaacaaatggtggtacgataaaggtgaatgtggagccaaggactctggaagtaaggaaaagaccagtgccctcagtctgagcaacgttgctggagtattctacatccttgtcgggggccttggtttggcaatgctggtggctttgattgagttctgttacaagtcaagggccgaggcgaaacgaatgaaggtggcaaagaatgcacagaatattaacccatcttcctcgcagaattcacagaattttgcaacttataaggaaggttacaacgtatatggcatcgaaagtgttaaaatttaggggatgaccttgaatgatgccatgaggaacaaggcaaggctgtcaattacaggaagtactggagaaaatggacgtgttatgactccagaatttcccaaagcagtgcatgctgtcccttacgtgagtcctggcatgggaatgaatgtcagtgtgactgatctctcgtgattgataagaaccttttgagtgccttacacaatggttttcttgtgtgtttattgtcaaagtggtgagaggcatccagtatcttgaa

SEQ ID NO: 137436 - DNA, 2740 bp, Homo sapiens
  Payload ID: 6907
  Gene Symbol: GRIA3
  Gene Name: glutamate receptor, ionotropic, AMPA 3
  Uniprot ID: P42263
  ENST ID: ENST00000541091
  CDS Start-End: 54-2738
tgacgactcctgagttgcgcccatgctcttgtcagcttcgttttaggcgtagcatggccaggcagaagaaaatggggcaaagcgtgctccgggcggtcttctttttagtcctggggcttttgggtcattctcacggaggattccccaacaccatcagcataggtggacttttcatgagaaacacagtgcaggagcacagcgctttccgctttgccgtgcagttatacaacaccaaccagaacaccaccgagaagcccttccatttgaattaccacgtagatcacttggattcctccaatagtttttccgtgacaaatgctttctgctcccagttctcgagaggggtgtatgccatctttggattctatgaccagatgtcaatgaacaccctgacctccttctgtggggccctgcacacatcctttgttacgcctagcttccccactgacgcagatgtgcagtttgtcatccagatgcgcccagccttgaagggcgctattctgagtcttctgggtcattacaagtgggagaagtttgtgtacctctatgacacagaacgaggattttccatcctccaagcgattatggaagcagcagtgcaaaacaactggcaagtaacagcaaggtctgtgggaaacataaaggacgtccaagaattcaggcgcatcattgaagaaatggacaggaggcaggaaaagcgatacttgattgactgcgaagtcgaaaggattaacacaattttggaacaggttgtgatcctagggaaacactcaagaggttatcactacatgctcgctaacctgggttttactgatattttactggaaagagtcatgcatgggggagccaacattacaggtttccagattgtcaacaatgaaaaccctatggttcagcagttcatacagcgctgggtgaggctggatgaaagggaattccctgaagccaagaatgcaccactaaagtatacatctgcattgacacacgacgcaatactggtcatagcagaagctttccgctacctgaggaggcagcgagtagatgtgtcccggagaggaagtgctggagactgcttagcaaatcctgctgtgccctggagtcaaggaattgatattgagagagctctgaaaatggtgcaagtacaaggaatgactggaaatattcaatttgacacttatggacgtaggacaaattataccatcgatgtgtatgaaatgaaagtcagtggctctcgaaaagctggctactggaatgagtatgaaaggtttgtgcctttctcagatcagcaaatcagcaatgacagtgcatcctcagagaatcggaccatagtagtgactaccattctggaatcaccatatgtaatgtacaagaagaaccatgagcaactggaaggaaatgaacgatatgaaggctattgtgtagacctagcctatgaaatagccaaacatgtaaggatcaaatacaaattgtccatcgttggtgacgggaaatatggtgcaagggatccagagactaaaatatggaacggcatggttggggaacttgtctatgggagagctgatatagctgttgctccactcactataacattggtccgtgaagaagtcatagatttttcaaagccattcatgagcctgggcatctccatcatgataaagaagcctcagaaatcaaaaccaggcgtattctcatttctggatcccctggcttatgaaatctggatgtgcattgtctttgcttacattggagtcagcgtagttcttttcctagtcagcaggttcagtccttatgaatggcacttggaagacaacaatgaagaacctcgtgacccacaaagtcctcctgatcctccaaatgaatttggaatatttaacagtctttggttttccttgggtgcctttatgcagcaaggatgtgatatttctccaagatcactctccgggcgcattgttggaggggtttggtggttcttcaccctgatcataatttcttcctatactgccaatctcgctgctttcctgactgtggagaggatggtttctcccatagagagtgctgaagacttagctaaacagactgaaattgcatatgggaccctggactccggttcaacaaaagaatttttcagaagatccaaaattgctgtgtacgagaaaatgtggtcttacatgaaatcagcggagccatctgtgtttaccaaaacaacagcagacggagtggcccgagtgcgaaagtccaagggaaagttcgccttcctgctggagtcaaccatgaatgagtacattgagcagagaaaaccatgtgatacgatgaaagttggtggaaatctggattccaaaggctatggtgtggcaacccctaaaggctcagcattaagaaatgctgttaacctggcagtattaaaactgaatgagcaaggcctcttggacaaattgaaaaacaaatggtggtacgacaaaggagagtgcggcagcgggggcggtgactccaaggacaagaccagcgctctgagcctgagcaatgtggcaggcgttttctatatacttgtcggaggtctggggctggccatgatggtggctttgatagaattctgttacaaatcacgggcagagtccaaacgcatgaaactcacaaagaacacccaaaactttaagcctgctcctgccaccaacactcagaattatgctacatacagagaaggctacaacgtgtatggaacagagagtgttaagatctaggg

SEQ ID NO: 137437 - DNA, 4943 bp, Homo sapiens
  Payload ID: 6907
  Gene Symbol: GRIA3
  Gene Name: glutamate receptor, ionotropic, AMPA 3
  Uniprot ID: P42263
  ENST ID: ENST00000620443
  CDS Start-End: 54-2738
tgacgactcctgagttgcgcccatgctcttgtcagcttcgttttaggcgtagcatggccaggcagaagaaaatggggcaaagcgtgctccgggcggtcttctttttagtcctggggcttttgggtcattctcacggaggattccccaacaccatcagcataggtggacttttcatgagaaacacagtgcaggagcacagcgctttccgctttgccgtgcagttatacaacaccaaccagaacaccaccgagaagcccttccatttgaattaccacgtagatcacttggattcctccaatagtttttccgtgacaaatgctttctgctcccagttctcgagaggggtgtatgccatctttggattctatgaccagatgtcaatgaacaccctgacctccttctgtggggccctgcacacatcctttgttacgcctagcttccccactgacgcagatgtgcagtttgtcatccagatgcgcccagccttgaagggcgctattctgagtcttctgggtcattacaagtgggagaagtttgtgtacctctatgacacagaacgaggattttccatcctccaagcgattatggaagcagcagtgcaaaacaactggcaagtaacagcaaggtctgtgggaaacataaaggacgtccaagaattcaggcgcatcattgaagaaatggacaggaggcaggaaaagcgatacttgattgactgcgaagtcgaaaggattaacacaattttggaacaggttgtgatcctagggaaacactcaagaggttatcactacatgctcgctaacctgggttttactgatattttactggaaagagtcatgcatgggggagccaacattacaggtttccagattgtcaacaatgaaaaccctatggttcagcagttcatacagcgctgggtgaggctggatgaaagggaattccctgaagccaagaatgcaccactaaagtatacatctgcattgacacacgacgcaatactggtcatagcagaagctttccgctacctgaggaggcagcgagtagatgtgtcccggagaggaagtgctggagactgcttagcaaatcctgctgtgccctggagtcaaggaattgatattgagagagctctgaaaatggtgcaagtacaaggaatgactggaaatattcaatttgacacttatggacgtaggacaaattataccatcgatgtgtatgaaatgaaagtcagtggctctcgaaaagctggctactggaatgagtatgaaaggtttgtgcctttctcagatcagcaaatcagcaatgacagtgcatcctcagagaatcggaccatagtagtgactaccattctggaatcaccatatgtaatgtacaagaagaaccatgagcaactggaaggaaatgaacgatatgaaggctattgtgtagacctagcctatgaaatagccaaacatgtaaggatcaaatacaaattgtccatcgttggtgacgggaaatatggtgcaagggatccagagactaaaatatggaacggcatggttggggaacttgtctatgggagagctgatatagctgttgctccactcactataacattggtccgtgaagaagtcatagatttttcaaagccattcatgagcctgggcatctccatcatgataaagaagcctcagaaatcaaaaccaggcgtattctcatttctggatcccctggcttatgaaatctggatgtgcattgtctttgcttacattggagtcagcgtagttcttttcctagtcagcaggttcagtccttatgaatggcacttggaagacaacaatgaagaacctcgtgacccacaaagtcctcctgatcctccaaatgaatttggaatatttaacagtctttggttttccttgggtgcctttatgcagcaaggatgtgatatttctccaagatcactctccgggcgcattgttggaggggtttggtggttcttcaccctgatcataatttcttcctatactgccaatctcgctgctttcctgactgtggagaggatggtttctcccatagagagtgctgaagacttagctaaacagactgaaattgcatatgggaccctggactccggttcaacaaaagaatttttcagaagatccaaaattgctgtgtacgagaaaatgtggtcttacatgaaatcagcggagccatctgtgtttaccaaaacaacagcagacggagtggcccgagtgcgaaagtccaagggaaagttcgccttcctgctggagtcaaccatgaatgagtacattgagcagagaaaaccatgtgatacgatgaaagttggtggaaatctggattccaaaggctatggtgtggcaacccctaaaggctcagcattaagaacgcctgtaaaccttgcagtattgaaactcagtgaacaaggcatcttagacaagctgaaaaacaaatggtggtacgataagggggaatgtggagccaaggactccgggagtaaggacaagaccagcgctctgagcctgagcaatgtggcaggcgttttctatatacttgtcggaggtctggggctggccatgatggtggctttgatagaattctgttacaaatcacgggcagagtccaaacgcatgaaactcacaaagaacacccaaaactttaagcctgctcctgccaccaacactcagaattatgctacatacagagaaggctacaacgtgtatggaacagagagtgttaagatctagggatcccttcccactggaggcatgtgatgagaggaaatcaccgaaaacgtggctgcttcaaggatcctgagccagatttcactctccttggtgtcgggcatgacacgaatattgctgatggtgcaatgacctttcaataggaaaaactgatttttttttccttcagtgccttatggaacactctgagactcgcgacaatgcaaaccatcattgaaatctttttgctttgcttgaaaaaaaataattaaaataaaaaccaacaaaaatggacatgcaagattccagtatgcgaaaaaaaatcttattaagtcaattcaacaaaagccattctttgataccactgcagagtatataaacaccatgttctttaatacacacacacacacacacacacacacacacacacatttaaattccaattcagcaaagaggcccatctaagctaaaaaaattaattcttcctgattaaaaagaaaaaatctgtctcccagtgtttgggaagacggactggcatttcttctaggatctgctgaccagatgtttttggtatttcctgttggtggtgatgttctgtgcactctatttcctttcaatgttgctgaaatgtgtatatctttagaatgtaaatgcaacacttaagaaaattcaaacactttggaaaagggactaaacagtgatttctctgtgttcttgaaatggttttgtgaaaatgctttgataacttcccactcaaagaagagatttacagagctttcgaaattgactttgtgtgtagcaagggacggggcactatcaggatacctcttggtgctttcctaaaatggatcccggggctttccaaggagcctggaatttcagctcacagatctgtttttcttgcttcagtgtgcattttaagtcaatagagctgagtatctagcattgaggtgagggaaatgctgcctatactcccagatgtgtttagaatatctcagaaacaacactgtgtttagctcggctttctctgctaagtatgcctttcaagtgtacaccacggagacaggaccgcgttgcaaggcgggacagcaggttcagaccacagttctcagtctgactttactcttgctaggtctgtcctactagctgttgcctgctaccgcccatggctctccatcggactgcatgtgtccttttctagtttgcaaagactaaaatgcattcccaaacctactgctaatctgagggcctcagcatcacttccagatccttgcttggagcagtctctctattgactctctcagatcgctccactgctccatgggctatcaagtaactaactgcatacctgccgttggcatcatcagaacagtccgaagaaatagtctccactcactaattacctcctatataacgacgtatgcttcctgtagttcagtagtttgctctcatcgataacgtgcattgggaagtttccagactgcaaaaactaggagctcgcattcatttcccaagtgtgacccttagatgcttagttgactcgctgcatatttgctcttgtcttcagaaaagaaaggaagaagtatcgttccaacgaaatgtttccagaaaagtgtactataaactttcattccaaaaatggtgtcataagcaaacaactcacttgtcaaatttcaaatggtattgaacaaaaaaagaaagctgttgtgtttttgttttgttttgttttcatgaaactgtgattttcaacttatgaatgctataatgtcccagcgcgggaagctcacgctgtgtgaacatgaagttgtataaaacaaaccaaccaacctacacacaaatgttttcataggcactgtataaagaaaaatgtatgtttattaactcaaatcagtttttcagagaggaaacgtcactgagatgaagaggcgggtaaattggtttgttattttttaaaaaaaacttgcatgtttaaaaaaaagttgattgcttcaaatttctgctactaacttcaagctatgggagtttggcagtagtcacttgaggattttttttccaattcttttctttttgttgttaaagctgtacttcagtgaacagaaaaattgccaagcaaactaatggctataaaagcgtaatttgcatgtgtgggcataaactacagagcctcattgccatgaggtattgtacaaagttttaatacattttgtaaataaaattgtaaagaaagaa

SEQ ID NO: 137438 - DNA, 936 bp, Homo sapiens
  Payload ID: 6907
  Gene Symbol: GRIA3
  Gene Name: glutamate receptor, ionotropic, AMPA 3
  ENST ID: ENST00000611689
  CDS Start-End: 238-672
cgagagagagcgagcgaataagagagagagtaagagggagagagaagaagaggaagaagaggaggcggcggcagcggaggaggaggaggactagtgtggggtggaaaggaagagtgagcgagagcaagttaaggggagggggtgtaagagccagcgaattctttttctttttctattattattttgacgactcctgagttgcgcccatgctcttgtcagcttcgttttaggcgtagcatggccaggcagaagaaaatggggcaaagcgtgctccgggcggtcttctttttagtcctggggcttttgggtcattctcacggaggattccccaacaccatcagcataggtggacttttcatgagaaacacagtgcaggagcacagcgctttccgctttgccgtgcagttatacaacaccaaccagaacaccaccgagaagcccttccatttgaattaccacgtagatcacttggattcctccaatagtttttccgtgacaaatgcttgtcctgctgaaagggactacctgccttggccaggaagcatcagggaaaacaattggacagctctgccgtgctgcaaagatcatgggctgctgcacctaaaatgttcaccaggtggggcccgccaaaactgggcctattgtatctggggcgttacaggtgaactgtaagatgagaacaagatcacaagtcagcactacctcctcccttcttgagttctcaactgagtgagcatcatggagggagaagaaagaaagaagttcagcctgggtgtgtgaagctgtaaagttgcaggttgaacccaaacccattttagagacagaagaaactaccctctggagataaaataaaaagatgaagctgagatgggacaggatcaaagttgatgaaatatcaagagaggttaataaaggaacattaatttattcctcaaa

SEQ ID NO: 137439 - DNA, 784 bp, Homo sapiens
  Payload ID: 6907
  Gene Symbol: GRIA3
  Gene Name: glutamate receptor, ionotropic, AMPA 3
  ENST ID: ENST00000616590
  CDS Start-End: 86-520
cgctttggcaaacccagcttgcagccaatgaacccgccttccagattggtgtgaagacagaagtgagcttcgttttaggcgtagcatggccaggcagaagaaaatggggcaaagcgtgctccgggcggtcttctttttagtcctggggcttttgggtcattctcacggaggattccccaacaccatcagcataggtggacttttcatgagaaacacagtgcaggagcacagcgctttccgctttgccgtgcagttatacaacaccaaccagaacaccaccgagaagcccttccatttgaattaccacgtagatcacttggattcctccaatagtttttccgtgacaaatgcttgtcctgctgaaagggactacctgccttggccaggaagcatcagggaaaacaattggacagctctgccgtgctgcaaagatcatgggctgctgcacctaaaatgttcaccaggtggggcccgccaaaactgggcctattgtatctggggcgttacaggtgaactgtaagatgagaacaagatcacaagtcagcactacctcctcccttcttgagttctcaactgagtgagcatcatggagggagaagaaagaaagaagttcagcctgggtgtgtgaagctgtaaagttgcaggttgaacccaaacccattttagagacagaagaaactaccctctggagataaaataaaaagatgaagctgagatgggacaggatcaaagttgatgaaatatcaagagaggttaataaaggaacattaatttattcctcaaa

SEQ ID NO: 137440 - DNA, 5173 bp, Homo sapiens
  Payload ID: 6907
  Gene Symbol: GRIA3
  Gene Name: glutamate receptor, ionotropic, AMPA 3
  Uniprot ID: P42263
  ENST ID: ENST00000622768
  CDS Start-End: 294-2978
agagatcctgggagcgagagggagagagagggagcaagaaaggaagagagagcgagcgagagagagcgagcgaataagagagagagtaagagggagagagaagaagaggaagaagaggaggcggcggcagcggaggaggaggaggactagtgtggggtggaaaggaagagtgagcgagagcaagttaaggggagggggtgtaagagccagcgaattctttttctttttctattattattttgacgactcctgagttgcgcccatgctcttgtcagcttcgttttaggcgtagcatggccaggcagaagaaaatggggcaaagcgtgctccgggcggtcttctttttagtcctggggcttttgggtcattctcacggaggattccccaacaccatcagcataggtggacttttcatgagaaacacagtgcaggagcacagcgctttccgctttgccgtgcagttatacaacaccaaccagaacaccaccgagaagcccttccatttgaattaccacgtagatcacttggattcctccaatagtttttccgtgacaaatgctttctgctcccagttctcgagaggggtgtatgccatctttggattctatgaccagatgtcaatgaacaccctgacctccttctgtggggccctgcacacatcctttgttacgcctagcttccccactgacgcagatgtgcagtttgtcatccagatgcgcccagccttgaagggcgctattctgagtcttctgggtcattacaagtgggagaagtttgtgtacctctatgacacagaacgaggattttccatcctccaagcgattatggaagcagcagtgcaaaacaactggcaagtaacagcaaggtctgtgggaaacataaaggacgtccaagaattcaggcgcatcattgaagaaatggacaggaggcaggaaaagcgatacttgattgactgcgaagtcgaaaggattaacacaattttggaacaggttgtgatcctagggaaacactcaagaggttatcactacatgctcgctaacctgggttttactgatattttactggaaagagtcatgcatgggggagccaacattacaggtttccagattgtcaacaatgaaaaccctatggttcagcagttcatacagcgctgggtgaggctggatgaaagggaattccctgaagccaagaatgcaccactaaagtatacatctgcattgacacacgacgcaatactggtcatagcagaagctttccgctacctgaggaggcagcgagtagatgtgtcccggagaggaagtgctggagactgcttagcaaatcctgctgtgccctggagtcaaggaattgatattgagagagctctgaaaatggtgcaagtacaaggaatgactggaaatattcaatttgacacttatggacgtaggacaaattataccatcgatgtgtatgaaatgaaagtcagtggctctcgaaaagctggctactggaatgagtatgaaaggtttgtgcctttctcagatcagcaaatcagcaatgacagtgcatcctcagagaatcggaccatagtagtgactaccattctggaatcaccatatgtaatgtacaagaagaaccatgagcaactggaaggaaatgaacgatatgaaggctattgtgtagacctagcctatgaaatagccaaacatgtaaggatcaaatacaaattgtccatcgttggtgacgggaaatatggtgcaagggatccagagactaaaatatggaacggcatggttggggaacttgtctatgggagagctgatatagctgttgctccactcactataacattggtccgtgaagaagtcatagatttttcaaagccattcatgagcctgggcatctccatcatgataaagaagcctcagaaatcaaaaccaggcgtattctcatttctggatcccctggcttatgaaatctggatgtgcattgtctttgcttacattggagtcagcgtagttcttttcctagtcagcaggttcagtccttatgaatggcacttggaagacaacaatgaagaacctcgtgacccacaaagtcctcctgatcctccaaatgaatttggaatatttaacagtctttggttttccttgggtgcctttatgcagcaaggatgtgatatttctccaagatcactctccgggcgcattgttggaggggtttggtggttcttcaccctgatcataatttcttcctatactgccaatctcgctgctttcctgactgtggagaggatggtttctcccatagagagtgctgaagacttagctaaacagactgaaattgcatatgggaccctggactccggttcaacaaaagaatttttcagaagatccaaaattgctgtgtacgagaaaatgtggtcttacatgaaatcagcggagccatctgtgtttaccaaaacaacagcagacggagtggcccgagtgcgaaagtccaagggaaagttcgccttcctgctggagtcaaccatgaatgagtacattgagcagagaaaaccatgtgatacgatgaaagttggtggaaatctggattccaaaggctatggtgtggcaacccctaaaggctcagcattaagaaatgctgttaacctggcagtattaaaactgaatgagcaaggcctcttggacaaattgaaaaacaaatggtggtacgacaaaggagagtgcggcagcgggggcggtgactccaaggacaagaccagcgctctgagcctgagcaatgtggcaggcgttttctatatacttgtcggaggtctggggctggccatgatggtggctttgatagaattctgttacaaatcacgggcagagtccaaacgcatgaaactcacaaagaacacccaaaactttaagcctgctcctgccaccaacactcagaattatgctacatacagagaaggctacaacgtgtatggaacagagagtgttaagatctagggatcccttcccactggaggcatgtgatgagaggaaatcaccgaaaacgtggctgcttcaaggatcctgagccagatttcactctccttggtgtcgggcatgacacgaatattgctgatggtgcaatgacctttcaataggaaaaactgatttttttttccttcagtgccttatggaacactctgagactcgcgacaatgcaaaccatcattgaaatctttttgctttgcttgaaaaaaaataattaaaataaaaaccaacaaaaatggacatgcaagattccagtatgcgaaaaaaaatcttattaagtcaattcaacaaaagccattctttgataccactgcagagtatataaacaccatgttctttaatacacacacacacacacacacacacacacacacacatttaaattccaattcagcaaagaggcccatctaagctaaaaaaattaattcttcctgattaaaaagaaaaaatctgtctcccagtgtttgggaagacggactggcatttcttctaggatctgctgaccagatgtttttggtatttcctgttggtggtgatgttctgtgcactctatttcctttcaatgttgctgaaatgtgtatatctttagaatgtaaatgcaacacttaagaaaattcaaacactttggaaaagggactaaacagtgatttctctgtgttcttgaaatggttttgtgaaaatgctttgataacttcccactcaaagaagagatttacagagctttcgaaattgactttgtgtgtagcaagggacggggcactatcaggatacctcttggtgctttcctaaaatggatcccggggctttccaaggagcctggaatttcagctcacagatctgtttttcttgcttcagtgtgcattttaagtcaatagagctgagtatctagcattgaggtgagggaaatgctgcctatactcccagatgtgtttagaatatctcagaaacaacactgtgtttagctcggctttctctgctaagtatgcctttcaagtgtacaccacggagacaggaccgcgttgcaaggcgggacagcaggttcagaccacagttctcagtctgactttactcttgctaggtctgtcctactagctgttgcctgctaccgcccatggctctccatcggactgcatgtgtccttttctagtttgcaaagactaaaatgcattcccaaacctactgctaatctgagggcctcagcatcacttccagatccttgcttggagcagtctctctattgactctctcagatcgctccactgctccatgggctatcaagtaactaactgcatacctgccgttggcatcatcagaacagtccgaagaaatagtctccactcactaattacctcctatataacgacgtatgcttcctgtagttcagtagtttgctctcatcgataacgtgcattgggaagtttccagactgcaaaaactaggagctcgcattcatttcccaagtgtgacccttagatgcttagttgactcgctgcatatttgctcttgtcttcagaaaagaaaggaagaagtatcgttccaacgaaatgtttccagaaaagtgtactataaactttcattccaaaaatggtgtcataagcaaacaactcacttgtcaaatttcaaatggtattgaacaaaaaaagaaagctgttgtgtttttgttttgttttgttttcatgaaactgtgattttcaacttatgaatgctataatgtcccagcgcgggaagctcacgctgtgtgaacatgaagttgtataaaacaaaccaaccaacctacacacaaatgttttcataggcactgtataaagaaaaatgtatgtttattaactcaaatcagtttttcagagaggaaacgtcactgagatgaagaggcgggtaaattggtttgttattttttaaaaaaaacttgcatgtttaaaaaaaagttgattgcttcaaatttctgctactaacttcaagctatgggagtttggcagtagtcacttgaggattttttttccaattcttttctttttgttgttaaagctgtacttcagtgaacagaaaaattgccaagcaaactaatggctataaaagcgtaatttgcatgtgtgggcataaactacagagcctcattgccatgaggtattgtacaaagttttaatacattttgtaaataaaattgt

SEQ ID NO: 137441 - DNA, 2991 bp, Homo sapiens
  Payload ID: 6907
  Gene Symbol: GRIA3
  Gene Name: glutamate receptor, ionotropic, AMPA 3
  ENST ID: ENST00000620581
  CDS Start-End: 166-2640
agcggaggaggaggaggactagtgtggggtggaaaggaagagtgagcgagagcaagttaaggggagggggtgtaagagccagcgaattctttttctttttctattattattttgacgactcctgagttgcgcccatgctcttgtcagcttcgttttaggcgtagcatggccaggcagaagaaaatggggcaaagcgtgctccgggcggtcttctttttagtcctggggcttttgggtcattctcacggaggattccccaacaccatcagcataggtggacttttcatgagaaacacagtgcaggagcacagcgctttccgctttgccgtgcagttatacaacaccaaccagaacaccaccgagaagcccttccatttgaattaccacgtagatcacttggattcctccaatagtttttccgtgacaaatgctttctgctcccagttctcgagaggggtgtatgccatctttggattctatgaccagatgtcaatgaacaccctgacctccttctgtggggccctgcacacatcctttgttacgcctagcttccccactgacgcagatgtgcagtttgtcatccagatgcgcccagccttgaagggcgctattctgagtcttctgggtcattacaagtgggagaagtttgtgtacctctatgacacagaacgaggattttccatcctccaagcgattatggaagcagcagtgcaaaacaactggcaagtaacagcaaggtctgtgggaaacataaaggacgtccaagaattcaggcgcatcattgaagaaatggacaggaggcaggaaaagcgatacttgattgactgcgaagtcgaaaggattaacacaattttggaacaggttgtgatcctagggaaacactcaagaggttatcactacatgctcgctaacctgggttttactgatattttactggaaagagtcatgcatgggggagccaacattacaggtttccagattgtcaacaatgaaaaccctatggttcagcagttcatacagcgctgggtgaggctggatgaaagggaattccctgaagccaagaatgcaccactaaagtatacatctgcattgacacacgacgcaatactggtcatagcagaagctttccgctacctgaggaggcagcgagtagatgtgtcccggagaggaagtgctggagactgcttagcaaatcctgctgtgccctggagtcaaggaattgatattgagagagctctgaaaatggtgcaagtacaaggaatgactggaaatattcaatttgacacttatggacgtaggacaaattataccatcgatgtgtatgaaatgaaagtcagtggctctcgaaaagctggctactggaatgagtatgaaaggtttgtgcctttctcagatcagcaaatcagcaatgacagtgcatcctcagagaatcggaccatagtagtgactaccattctggaatcaccatatgtaatgtacaagaagaaccatgagcaactggaaggaaatgaacgatatgaaggctattgtgtagacctagcctatgaaatagccaaacatgtaaggatcaaatacaaattgtccatcgttggtgacgggaaatatggtgcaagggatccagagactaaaatatggaacggcatggttggggaacttgtctatgggagagctgatatagctgttgctccactcactataacattggtccgtgaagaagtcatagatttttcaaagccattcatgagcctgggcatctccatcatgataaagaagcctcagaaatcaaaaccaggcgtattctcatttctggatcccctggcttatgaaatctggatgtgcattgtctttgcttacattggagtcagcgtagttcttttcctagtcagcaggttcagtccttatgaatggcacttggaagacaacaatgaagaacctcgtgacccacaaagtcctcctgatcctccaaatgaatttggaatatttaacagtctttggttttccttgggtgcctttatgcagcaaggatgtgatatttctccaagatcactctccgggcgcattgttggaggggtttggtggttcttcaccctgatcataatttcttcctatactgccaatctcgctgctttcctgactgtggagaggatggtttctcccatagagagtgctgaagacttagctaaacagactgaaattgcatatgggaccctggactccggttcaacaaaagaatttttcagaagatccaaaattgctgtgtacgagaaaatgtggtcttacatgaaatcagcggagccatctgtgtttaccaaaacaacagcagacggagtggcccgagtgcgaaagtccaagggaaagttcgccttcctgctggagtcaaccatgaatgagtacattgagcagagaaaaccatgtgatacgatgaaagttggtggaaatctggattccaaaggctatggtgtggcaacccctaaaggctcagcattaagaaatgctgttaacctggcagtattaaaactgaatgagcaaggcctcttggacaaattgaaaaacaaatggtggtacgacaaaggagagtgcggcagcgggggcggtgactccaagaacgcctgtaaaccttgcagtattgaaactcagtgaacaaggcatcttagacaagctgaaaaacaaatggtggtacgataagggggaatgtggagccaaggactccgggagtaaggacaagaccagcgctctgagcctgagcaatgtggcaggcgttttctatatacttgtcggaggtctggggctggccatgatggtggctttgatagaattctgttacaaatcacgggcagagtccaaacgcatgaaactcacaaagaacacccaaaactttaagcctgctcctgccaccaacactcagaattatgctacatacagagaaggctacaacgtgtatggaacagagagtgttaagatctagggatcccttcccactggaggcatgtg

SEQ ID NO: 137442 - DNA, 5508 bp, Homo sapiens
  Payload ID: 6908
  Gene Symbol: GRIA4
  Gene Name: glutamate receptor, ionotropic, AMPA 4
  Uniprot ID: P48058
  ENST ID: ENST00000282499
  CDS Start-End: 447-3155
agtggcagaagagggctaggctgagagggaagccaggactgtaggagagggaggcagcccgtcctcctcacgaacctgcaaggatgcggcaggggcctgggggcatggggaggtactaaccccccggagcccccgattggggcttgcagacctggcccgtgggcggattttctgcctagcgcagccgagaagcagaggtgccaggaaaaccaagagaggggcgctgggggtgcccatccccagagtcggtccctctgcgaaccgaggaagaaaagaggagggagtcagcgagtggtcagaagggaaaacctgacaccagactggctccggagcgtccgggagactggggcgctccgcgccatcgtcttcaatgcttctctgaacagcctttaggaagagtgcgagagaaagagagagagcgcgcgccagggagaggagaaaagaagatgaggattatttccagacagattgtcttgttattttctggattttggggactcgccatgggagcctttccgagcagcgtgcaaataggtggtctcttcatccgaaacacagatcaggaatacactgcttttcgattagcaatttttcttcataacaccagccccaatgcgtcggaagctccttttaatttggtacctcatgtggacaacattgagacagccaacagttttgctgtaacaaacgccttctgttcccagtattctagaggagtatttgccatttttggactctatgataagaggtcggtacataccttgacctcattctgcagcgccttacatatctccctcatcacaccaagtttccctactgagggggagagccagtttgtgctgcaactaagaccttcgttacgaggagcactcttgagtttgctggatcactacgaatggaactgttttgtcttcctgtatgacacagacaggggatactcgatactccaagctattatggaaaaagcaggacaaaatggttggcatgtcagcgctatatgtgtggaaaattttaatgatgtcagctataggcaacttctagaagaacttgacagaagacaagagaagaagtttgtaatagactgtgagatagagagacttcaaaacatattagaacagattgtaagtgttggaaagcatgttaaaggctaccattatatcattgcaaacttgggattcaaggatatttctcttgagaggtttatacatggtggagccaatgttactggattccagttggtggattttaatacacctatggtaatcaaactaatggatcgctggaagaaactagatcagagagagtatccaggatctgagactcctccaaagtacacctctgctctgacttatgatggagtccttgtgatggctgaaactttccgaagtcttaggaggcagaaaattgatatctcaaggagaggaaatgctggggattgtctggcaaatcctgctgctccatggggccagggaattgacatggagaggacactcaaacaggttcgaattcaagggctgacagggaatgttcagtttgaccactatggacgtagagtcaattacacaatggatgtgtttgagctgaaaagcacaggacctagaaaggttggttactggaatgatatggataagttagtcttgattcaagatgtaccaactcttggcaatgacacagctgctattgagaacagaacagtggttgtaaccacaattatggaatccccatatgttatgtacaagaaaaatcatgaaatgtttgaaggaaatgacaagtatgaaggatactgtgtagatttggcatctgaaattgcaaaacatattggtatcaagtataaaattgccattgtccctgatggaaaatatggagcaagggatgcagacacaaaaatctggaatgggatggtaggagaacttgtttatgggaaagcagagattgctattgcccctctgacaatcactttggtacgagaggaggtcattgacttttctaagcccttcatgagtttgggcatatctatcatgatcaaaaagcctcagaaatccaaaccaggagtgttttccttcttggatcctctggcctatgagatttggatgtgcatagtctttgcctacattggtgtcagcgtggtcttattcctagttagtagatttagtccatatgagtggcacacagaagagccagaggacggaaaggaaggacccagcgaccagcctcccaatgagtttggcatctttaacagcctctggttttccctgggtgcttttatgcagcaaggatgtgacatttcacccagatccctctcaggtcgaattgttggaggtgtttggtggttctttacactcatcattatatcatcttatactgctaacctcgctgctttcctgacggttgagcgaatggtctctcccatagaaagtgcagaagacctggccaaacaaacagaaattgcctatggaacactggattcaggatcaacaaaagaattcttcagaagatcaaaaatagcagtgtatgaaaagatgtggacctacatgcgatcagcagagccatcagtattcactaggactacagctgagggagtagctcgtgtccgcaaatccaagggcaaatttgcctttctcctggagtccactatgaatgaatacattgagcagcgaaagccatgtgacacgatgaaagtgggaggaaatctggattccaaaggctatggagtagcaacgcccaagggttcctcattaagaactcctgtaaaccttgccgttttgaaactcagtgaggcaggcgtcttagacaagctgaaaaacaaatggtggtacgataaaggtgaatgtggacccaaggactctggaagcaaggacaagacgagtgccttgagcctgagcaatgtagcaggcgtcttctacattctggttggcggcttgggcttggcaatgctggtggctttgatagagttctgttacaagtccagggcagaagcgaagagaatgaagctgaccttttctgaagccataagaaacaaagccagattatccatcactgggagtgtgggagagaatggccgcgtcttgacgcctgactgcccaaaggctgtacacactggaactgcaatcagacaaagttcaggattggctgtcattgcatcggacctaccataaaaaccaaaaaaataattgagtgccttaattaaactgttggtgactggtggaaacgcagccctgagggacacgccacgcgcgggtctttgctaaaccaatcctttggctgagagcgggaagtccgtcctaacgcgctggccggacatcagcagcagcaacgtgtgcatgagctcagctcggaaacccaaactcagattttatatcaggaaaactcacaattgaggtttttttcggggagtgggtgggggagggatctgggatgggtgtattaacagcaacaaatttcattcgagtggactcaaaaactaatcagacttatgagttagcgcattaaactgtgaagttcttgctcagaaaggcctttgtcttcaccggaaaggataaaatagttgtagaagtccgtgaacatgctaacctgtgtctccagaacatccatatagtccatggaagaaaatccagctgagaaaacaaatcactaaactgtgataagaaaataatgaacaaacatgtaaaacctgtgggaaaaaaaaataaaggaagtatgtacacttactttggagaaaacaaatactgaaacatgcttgctttttaactgacgtaaattcagtagaggacaacacaattcttttttctaaccatcttagggaacaatacattgcaataattgatataaatgccatcactgtaataaactttagagacttttttttataaaagttgttggtcatcttcttgtttgctgtaaccttcactatgtcacatgagtcgattcaccgattgcatttgtctcacaaccaggaagaaaagcaaaaggaagaaaacgtttaggttcaatcatcagtctgcggtgtagactcgaaagagatgacaggtcactcatgttaatggtattatttataatctcattctgtgtacaacattgtggtttttgtacccaccaaaaagaataaaacagcagatgttcttacaatatctacagagcttaaaagttttttcttatcgttataaaagttatttgagaaattataagactataagagagattgtattagtggtgggccatagtggaaaatgtagctagccctcattattttttgcatactaagctacccctccttttcagatctttgactcattaacagattaaactgtcaaagatggagtctttgagttggggaatgaatcactgtcctaacaacaacataccttgtaattgtgtgttgaaattttacttgactgtattttgctgcataaaattatgtgtctcttgggcttcttcccttattcctattgttccctttaaatcatatgaaggcattcataatagcttggggtagataacaaatgaagaattagtctttgttttcaactggaaattgtaaagaaaattatactcatgtttatttataaaaatcaccttatgtatgaattaaactaacatggttcaaaagaaggtttggttcatttgaaataataaataagtactctaatacagataaaaatcatgtacttagggtattggcagaaagcacaagttaggatgatttcagaagtctggccttgaaggatgagttgagttttaacaggaggagaaggtgttaagagccatatgagtgagcagtggcccaaagccatgcacatcagtggctcatttaaggaatgaatgccattagatgggctactgagagtacagggatattatggaagataaagttggaaaagctgaaggattgattttcttccatcaactctcaagatcccattcgccattcaatctctgtgctgcagtaagagcaatcttaaacagtataaatcacacacacacacacacacacacacacacacacacacaagtccctcaggaaaaattccaagctcttgagaagatcacatgagccccttcatgacctggcgcttgcttatttcttccaggacttctctcacttctatccagctattcccgtcagcaaatgaacctccaaagcagcacatggagcactgcatagactatttcctcagtgcgtaactcctccctgtctcctctttacctgagtaacttgtactcatccttcaatactccaactgaattttacttaccctgaaaagatttccatggctatccaccacccccctgcctgtgagactgagttaggtgccctttttcatgtctttcccccatcacggcacttaccatactgcgttgtaattgcctgtgtactcgtctgtataactactagactgtaagctccttgagggcagggactgtgtctatcttgttcacagttgtatccccagcacccagcacagtgcctggcatattgtaggtgcttaataaatatttgttgaatgaatg

SEQ ID NO: 137443 - DNA, 2994 bp, Homo sapiens
  Payload ID: 6908
  Gene Symbol: GRIA4
  Gene Name: glutamate receptor, ionotropic, AMPA 4
  Uniprot ID: P48058
  ENST ID: ENST00000393125
  CDS Start-End: 491-1792
aaatctttgctgcagcgaggaccggagtcccccgcgcgcagcccagtggcagaagagggctaggctgagagggaagccaggactgtaggagagggaggcagcccgtcctcctcacgaacctgcaaggatgcggcaggggcctgggggcatggggaggtactaaccccccggagcccccgattggggcttgcagacctggcccgtgggcggattttctgcctagcgcagccgagaagcagaggtgccaggaaaaccaagagaggggcgctgggggtgcccatccccagagtcggtccctctgcgaaccgaggaagaaaagaggagggagtcagcgagtggtcagaagggaaaacctgacaccagactggctccggagcgtccgggagactggggcgctccgcgccatcgtcttcaatgcttctctgaacagcctttaggaagagtgcgagagaaagagagagagcgcgcgccagggagaggagaaaagaagatgaggattatttccagacagattgtcttgttattttctggattttggggactcgccatgggagcctttccgagcagcgtgcaaataggtggtctcttcatccgaaacacagatcaggaatacactgcttttcgattagcaatttttcttcataacaccagccccaatgcgtcggaagctccttttaatttggtacctcatgtggacaacattgagacagccaacagttttgctgtaacaaacgccttctgttcccagtattctagaggagtatttgccatttttggactctatgataagaggtcggtacataccttgacctcattctgcagcgccttacatatctccctcatcacaccaagtttccctactgagggggagagccagtttgtgctgcaactaagaccttcgttacgaggagcactcttgagtttgctggatcactacgaatggaactgttttgtcttcctgtatgacacagacaggggatactcgatactccaagctattatggaaaaagcaggacaaaatggttggcatgtcagcgctatatgtgtggaaaattttaatgatgtcagctataggcaacttctagaagaacttgacagaagacaagagaagaagtttgtaatagactgtgagatagagagacttcaaaacatattagaacagattgtaagtgttggaaagcatgttaaaggctaccattatatcattgcaaacttgggattcaaggatatttctcttgagaggtttatacatggtggagccaatgttactggattccagttggtggattttaatacacctatggtaatcaaactaatggatcgctggaagaaactagatcagagagagtatccaggatctgagactcctccaaagtacacctctgctctgacttatgatggagtccttgtgatggctgaaactttccgaagtcttaggaggcagaaaattgatatctcaaggagaggaaatgctggggattgtctggcaaatcctgctgctccatggggccagggaattgacatggagaggacactcaaacaggttcgaattcaagggctgacagggaatgttcagtttgaccactatggacgtagagtcaattacacaatggatgtgtttgagctgaaaagcacaggacctagaaaggttggttactggaatgatatggataagttagtcttgattcaagatgtaccaactcttggcaatgacacagctgctattgagaacagaacagtggttgtaaccacaattatgcctctgatgaagaatcctattttaagaaattgatcaagaaagaaaagagttccgcgctgttcgaccattcctaactaaggctcaagtcttgttctccagtgtagtaaatttaagcttatttttcatgtgggattcttcttggatgaccaactctggactaccagaaaaaaaaaattttaagttctgtgacttttctgagatactagaacaaaagaagaattaatcttcatctttctcaagaaatagatgttgacaaagaatcacttagcgattctgacatatcaattcccctatcttgaaatgaggtcactgtatgtaaatgatggaattatatcactccatttccaagggtagattttctataagtaaatatctcggaatttgtgtgcttgttttctgaatatatacagttgttttctttaaagatctcttggaattttgcctgttctgtgtgaaataaagtgttttaatgtgcattataggtatgatatagagaatctcctttccatccttgttactaaagggactggacaaataaatcttaaaaccaaaatactgaattaattttgcaagcatggctagtttttaggaagcatgctatcaaaaaaaaaaagactaaaaatgactgaaaaaatccaactgttttatatatatataaatatatatatatttatatatatatataaaggatattctgtaaagttatatgttgtttgacagtaaagccatcaatatttttgctatcaaaatagtataatactagtatctttttgtatgaaaatgtaatctttatataaataatacctctgatatttgcaactgcataatcgttcagtaattcaaaaagacatactagaatcctttttctgaaagtgttccttcaatttgcttttgttgaaaacggtagtccaggacctatgatatccctccacttcattcattatgaaagaaatcccttgtagataaacaagatattggcatctgcatgtaattatccccagattcagctgaaaactcccaacacagatggaattggctagacattttaatatatgtgatacctatatctagatatagaaggctgagagtgagcactggatataattcattttgattgaaattgatatggtgttattgttcttccagttgtctgtcctttgtgtatgttcttatttatatgttgatacactgtaacactatatgctattgctaaataaaattgattgagaaattca

SEQ ID NO: 137444 - DNA, 5621 bp, Homo sapiens
  Payload ID: 6908
  Gene Symbol: GRIA4
  Gene Name: glutamate receptor, ionotropic, AMPA 4
  ENST ID: ENST00000393127
  CDS Start-End: 447-3101
agtggcagaagagggctaggctgagagggaagccaggactgtaggagagggaggcagcccgtcctcctcacgaacctgcaaggatgcggcaggggcctgggggcatggggaggtactaaccccccggagcccccgattggggcttgcagacctggcccgtgggcggattttctgcctagcgcagccgagaagcagaggtgccaggaaaaccaagagaggggcgctgggggtgcccatccccagagtcggtccctctgcgaaccgaggaagaaaagaggagggagtcagcgagtggtcagaagggaaaacctgacaccagactggctccggagcgtccgggagactggggcgctccgcgccatcgtcttcaatgcttctctgaacagcctttaggaagagtgcgagagaaagagagagagcgcgcgccagggagaggagaaaagaagatgaggattatttccagacagattgtcttgttattttctggattttggggactcgccatgggagcctttccgagcagcgtgcaaataggtggtctcttcatccgaaacacagatcaggaatacactgcttttcgattagcaatttttcttcataacaccagccccaatgcgtcggaagctccttttaatttggtacctcatgtggacaacattgagacagccaacagttttgctgtaacaaacgccttctgttcccagtattctagaggagtatttgccatttttggactctatgataagaggtcggtacataccttgacctcattctgcagcgccttacatatctccctcatcacaccaagtttccctactgagggggagagccagtttgtgctgcaactaagaccttcgttacgaggagcactcttgagtttgctggatcactacgaatggaactgttttgtcttcctgtatgacacagacaggggatactcgatactccaagctattatggaaaaagcaggacaaaatggttggcatgtcagcgctatatgtgtggaaaattttaatgatgtcagctataggcaacttctagaagaacttgacagaagacaagagaagaagtttgtaatagactgtgagatagagagacttcaaaacatattagaacagattgtaagtgttggaaagcatgttaaaggctaccattatatcattgcaaacttgggattcaaggatatttctcttgagaggtttatacatggtggagccaatgttactggattccagttggtggattttaatacacctatggtaatcaaactaatggatcgctggaagaaactagatcagagagagtatccaggatctgagactcctccaaagtacacctctgctctgacttatgatggagtccttgtgatggctgaaactttccgaagtcttaggaggcagaaaattgatatctcaaggagaggaaatgctggggattgtctggcaaatcctgctgctccatggggccagggaattgacatggagaggacactcaaacaggttcgaattcaagggctgacagggaatgttcagtttgaccactatggacgtagagtcaattacacaatggatgtgtttgagctgaaaagcacaggacctagaaaggttggttactggaatgatatggataagttagtcttgattcaagatgtaccaactcttggcaatgacacagctgctattgagaacagaacagtggttgtaaccacaattatggaatccccatatgttatgtacaagaaaaatcatgaaatgtttgaaggaaatgacaagtatgaaggatactgtgtagatttggcatctgaaattgcaaaacatattggtatcaagtataaaattgccattgtccctgatggaaaatatggagcaagggatgcagacacaaaaatctggaatgggatggtaggagaacttgtttatgggaaagcagagattgctattgcccctctgacaatcactttggtacgagaggaggtcattgacttttctaagcccttcatgagtttgggcatatctatcatgatcaaaaagcctcagaaatccaaaccaggagtgttttccttcttggatcctctggcctatgagatttggatgtgcatagtctttgcctacattggtgtcagcgtggtcttattcctagttagtagatttagtccatatgagtggcacacagaagagccagaggacggaaaggaaggacccagcgaccagcctcccaatgagtttggcatctttaacagcctctggttttccctgggtgcttttatgcagcaaggatgtgacatttcacccagatccctctcaggtcgaattgttggaggtgtttggtggttctttacactcatcattatatcatcttatactgctaacctcgctgctttcctgacggttgagcgaatggtctctcccatagaaagtgcagaagacctggccaaacaaacagaaattgcctatggaacactggattcaggatcaacaaaagaattcttcagaagatcaaaaatagcagtgtatgaaaagatgtggacctacatgcgatcagcagagccatcagtattcactaggactacagctgagggagtagctcgtgtccgcaaatccaagggcaaatttgcctttctcctggagtccactatgaatgaatacattgagcagcgaaagccatgtgacacgatgaaagtgggaggaaatctggattccaaaggctatggagtagcaacgcccaagggttcctcattaagaaatgctgttaacctcgcagttttaaaactgaatgaacaaggcctcttggacaaattgaaaaacaaatggtggtacgacaaaggagaatgtggcagcgggggaggtgactccaaggacaagacgagtgccttgagcctgagcaatgtagcaggcgtcttctacattctggttggcggcttgggcttggcaatgctggtggctttgatagagttctgttacaagtccagggcagaagcgaagagaatgaaggtggcaaagagtgcacagacttttaacccaacttcctcgcagaatacccagaatttagcaacctatagagaaggttacaacgtatatggaaccgaaagtattaaaatttagggctgaccttttctgaagccataagaaacaaagccagattatccatcactgggagtgtgggagagaatggccgcgtcttgacgcctgactgcccaaaggctgtacacactggaactgcaatcagacaaagttcaggattggctgtcattgcatcggacctaccataaaaaccaaaaaaataattgagtgccttaattaaactgttggtgactggtggaaacgcagccctgagggacacgccacgcgcgggtctttgctaaaccaatcctttggctgagagcgggaagtccgtcctaacgcgctggccggacatcagcagcagcaacgtgtgcatgagctcagctcggaaacccaaactcagattttatatcaggaaaactcacaattgaggtttttttcggggagtgggtgggggagggatctgggatgggtgtattaacagcaacaaatttcattcgagtggactcaaaaactaatcagacttatgagttagcgcattaaactgtgaagttcttgctcagaaaggcctttgtcttcaccggaaaggataaaatagttgtagaagtccgtgaacatgctaacctgtgtctccagaacatccatatagtccatggaagaaaatccagctgagaaaacaaatcactaaactgtgataagaaaataatgaacaaacatgtaaaacctgtgggaaaaaaaaataaaggaagtatgtacacttactttggagaaaacaaatactgaaacatgcttgctttttaactgacgtaaattcagtagaggacaacacaattcttttttctaaccatcttagggaacaatacattgcaataattgatataaatgccatcactgtaataaactttagagacttttttttataaaagttgttggtcatcttcttgtttgctgtaaccttcactatgtcacatgagtcgattcaccgattgcatttgtctcacaaccaggaagaaaagcaaaaggaagaaaacgtttaggttcaatcatcagtctgcggtgtagactcgaaagagatgacaggtcactcatgttaatggtattatttataatctcattctgtgtacaacattgtggtttttgtacccaccaaaaagaataaaacagcagatgttcttacaatatctacagagcttaaaagttttttcttatcgttataaaagttatttgagaaattataagactataagagagattgtattagtggtgggccatagtggaaaatgtagctagccctcattattttttgcatactaagctacccctccttttcagatctttgactcattaacagattaaactgtcaaagatggagtctttgagttggggaatgaatcactgtcctaacaacaacataccttgtaattgtgtgttgaaattttacttgactgtattttgctgcataaaattatgtgtctcttgggcttcttcccttattcctattgttccctttaaatcatatgaaggcattcataatagcttggggtagataacaaatgaagaattagtctttgttttcaactggaaattgtaaagaaaattatactcatgtttatttataaaaatcaccttatgtatgaattaaactaacatggttcaaaagaaggtttggttcatttgaaataataaataagtactctaatacagataaaaatcatgtacttagggtattggcagaaagcacaagttaggatgatttcagaagtctggccttgaaggatgagttgagttttaacaggaggagaaggtgttaagagccatatgagtgagcagtggcccaaagccatgcacatcagtggctcatttaaggaatgaatgccattagatgggctactgagagtacagggatattatggaagataaagttggaaaagctgaaggattgattttcttccatcaactctcaagatcccattcgccattcaatctctgtgctgcagtaagagcaatcttaaacagtataaatcacacacacacacacacacacacacacacacacacacaagtccctcaggaaaaattccaagctcttgagaagatcacatgagccccttcatgacctggcgcttgcttatttcttccaggacttctctcacttctatccagctattcccgtcagcaaatgaacctccaaagcagcacatggagcactgcatagactatttcctcagtgcgtaactcctccctgtctcctctttacctgagtaacttgtactcatccttcaatactccaactgaattttacttaccctgaaaagatttccatggctatccaccacccccctgcctgtgagactgagttaggtgccctttttcatgtctttcccccatcacggcacttaccatactgcgttgtaattgcctgtgtactcgtctgtataactactagactgtaagctccttgagggcagggactgtgtctatcttgttcacagttgtatccccagcacccagcacagtgcctggcatattgtaggtgcttaataaatatttgttgaatgaatg

SEQ ID NO: 137445 - DNA, 2778 bp, Homo sapiens
  Payload ID: 6908
  Gene Symbol: GRIA4
  Gene Name: glutamate receptor, ionotropic, AMPA 4
  Uniprot ID: P48058
  ENST ID: ENST00000428631
  CDS Start-End: 275-1576
atttgcagccggacagaaaacctctcccagggctatggagactgcgggaaaaatctggcggctcgcgatggattgctaaggagaactagtcataatcttaaaccaccgaaacctctttccttttttttctttcttttctttcttttctttttttttttttttttttggttgattttaattttagcgccatcgtcttcaatgcttctctgaacagcctttaggaagagtgcgagagaaagagagagagcgcgcgccagggagaggagaaaagaagatgaggattatttccagacagattgtcttgttattttctggattttggggactcgccatgggagcctttccgagcagcgtgcaaataggtggtctcttcatccgaaacacagatcaggaatacactgcttttcgattagcaatttttcttcataacaccagccccaatgcgtcggaagctccttttaatttggtacctcatgtggacaacattgagacagccaacagttttgctgtaacaaacgccttctgttcccagtattctagaggagtatttgccatttttggactctatgataagaggtcggtacataccttgacctcattctgcagcgccttacatatctccctcatcacaccaagtttccctactgagggggagagccagtttgtgctgcaactaagaccttcgttacgaggagcactcttgagtttgctggatcactacgaatggaactgttttgtcttcctgtatgacacagacaggggatactcgatactccaagctattatggaaaaagcaggacaaaatggttggcatgtcagcgctatatgtgtggaaaattttaatgatgtcagctataggcaacttctagaagaacttgacagaagacaagagaagaagtttgtaatagactgtgagatagagagacttcaaaacatattagaacagattgtaagtgttggaaagcatgttaaaggctaccattatatcattgcaaacttgggattcaaggatatttctcttgagaggtttatacatggtggagccaatgttactggattccagttggtggattttaatacacctatggtaatcaaactaatggatcgctggaagaaactagatcagagagagtatccaggatctgagactcctccaaagtacacctctgctctgacttatgatggagtccttgtgatggctgaaactttccgaagtcttaggaggcagaaaattgatatctcaaggagaggaaatgctggggattgtctggcaaatcctgctgctccatggggccagggaattgacatggagaggacactcaaacaggttcgaattcaagggctgacagggaatgttcagtttgaccactatggacgtagagtcaattacacaatggatgtgtttgagctgaaaagcacaggacctagaaaggttggttactggaatgatatggataagttagtcttgattcaagatgtaccaactcttggcaatgacacagctgctattgagaacagaacagtggttgtaaccacaattatgcctctgatgaagaatcctattttaagaaattgatcaagaaagaaaagagttccgcgctgttcgaccattcctaactaaggctcaagtcttgttctccagtgtagtaaatttaagcttatttttcatgtgggattcttcttggatgaccaactctggactaccagaaaaaaaaaattttaagttctgtgacttttctgagatactagaacaaaagaagaattaatcttcatctttctcaagaaatagatgttgacaaagaatcacttagcgattctgacatatcaattcccctatcttgaaatgaggtcactgtatgtaaatgatggaattatatcactccatttccaagggtagattttctataagtaaatatctcggaatttgtgtgcttgttttctgaatatatacagttgttttctttaaagatctcttggaattttgcctgttctgtgtgaaataaagtgttttaatgtgcattataggtatgatatagagaatctcctttccatccttgttactaaagggactggacaaataaatcttaaaaccaaaatactgaattaattttgcaagcatggctagtttttaggaagcatgctatcaaaaaaaaaaagactaaaaatgactgaaaaaatccaactgttttatatatatataaatatatatatatttatatatatatataaaggatattctgtaaagttatatgttgtttgacagtaaagccatcaatatttttgctatcaaaatagtataatactagtatctttttgtatgaaaatgtaatctttatataaataatacctctgatatttgcaactgcataatcgttcagtaattcaaaaagacatactagaatcctttttctgaaagtgttccttcaatttgcttttgttgaaaacggtagtccaggacctatgatatccctccacttcattcattatgaaagaaatcccttgtagataaacaagatattggcatctgcatgtaattatccccagattcagctgaaaactcccaacacagatggaattggctagacattttaatatatgtgatacctatatctagatatagaaggctgagagtgagcactggatataattcattttgattgaaattgatatggtgttattgttcttccagttgtctgtcctttgtgtatgttcttatttatatgttgatacactgtaacactatatgctattgctaaataaaattgattgagaaattca

SEQ ID NO: 137446 - DNA, 2822 bp, Homo sapiens
  Payload ID: 6908
  Gene Symbol: GRIA4
  Gene Name: glutamate receptor, ionotropic, AMPA 4
  ENST ID: ENST00000525187
  CDS Start-End: 1-2655
atgaggattatttccagacagattgtcttgttattttctggattttggggactcgccatgggagcctttccgagcagcgtgcaaataggtggtctcttcatccgaaacacagatcaggaatacactgcttttcgattagcaatttttcttcataacaccagccccaatgcgtcggaagctccttttaatttggtacctcatgtggacaacattgagacagccaacagttttgctgtaacaaacgccttctgttcccagtattctagaggagtatttgccatttttggactctatgataagaggtcggtacataccttgacctcattctgcagcgccttacatatctccctcatcacaccaagtttccctactgagggggagagccagtttgtgctgcaactaagaccttcgttacgaggagcactcttgagtttgctggatcactacgaatggaactgttttgtcttcctgtatgacacagacaggggatactcgatactccaagctattatggaaaaagcaggacaaaatggttggcatgtcagcgctatatgtgtggaaaattttaatgatgtcagctataggcaacttctagaagaacttgacagaagacaagagaagaagtttgtaatagactgtgagatagagagacttcaaaacatattagaacagattgtaagtgttggaaagcatgttaaaggctaccattatatcattgcaaacttgggattcaaggatatttctcttgagaggtttatacatggtggagccaatgttactggattccagttggtggattttaatacacctatggtaatcaaactaatggatcgctggaagaaactagatcagagagagtatccaggatctgagactcctccaaagtacacctctgctctgacttatgatggagtccttgtgatggctgaaactttccgaagtcttaggaggcagaaaattgatatctcaaggagaggaaatgctggggattgtctggcaaatcctgctgctccatggggccagggaattgacatggagaggacactcaaacaggttcgaattcaagggctgacagggaatgttcagtttgaccactatggacgtagagtcaattacacaatggatgtgtttgagctgaaaagcacaggacctagaaaggttggttactggaatgatatggataagttagtcttgattcaagatgtaccaactcttggcaatgacacagctgctattgagaacagaacagtggttgtaaccacaattatggaatccccatatgttatgtacaagaaaaatcatgaaatgtttgaaggaaatgacaagtatgaaggatactgtgtagatttggcatctgaaattgcaaaacatattggtatcaagtataaaattgccattgtccctgatggaaaatatggagcaagggatgcagacacaaaaatctggaatgggatggtaggagaacttgtttatgggaaagcagagattgctattgcccctctgacaatcactttggtacgagaggaggtcattgacttttctaagcccttcatgagtttgggcatatctatcatgatcaaaaagcctcagaaatccaaaccaggagtgttttccttcttggatcctctggcctatgagatttggatgtgcatagtctttgcctacattggtgtcagcgtggtcttattcctagttagtagatttagtccatatgagtggcacacagaagagccagaggacggaaaggaaggacccagcgaccagcctcccaatgagtttggcatctttaacagcctctggttttccctgggtgcttttatgcagcaaggatgtgacatttcacccagatccctctcaggtcgaattgttggaggtgtttggtggttctttacactcatcattatatcatcttatactgctaacctcgctgctttcctgacggttgagcgaatggtctctcccatagaaagtgcagaagacctggccaaacaaacagaaattgcctatggaacactggattcaggatcaacaaaagaattcttcagaagatcaaaaatagcagtgtatgaaaagatgtggacctacatgcgatcagcagagccatcagtattcactaggactacagctgagggagtagctcgtgtccgcaaatccaagggcaaatttgcctttctcctggagtccactatgaatgaatacattgagcagcgaaagccatgtgacacgatgaaagtgggaggaaatctggattccaaaggctatggagtagcaacgcccaagggttcctcattaagaaatgctgttaacctcgcagttttaaaactgaatgaacaaggcctcttggacaaattgaaaaacaaatggtggtacgacaaaggagaatgtggcagcgggggaggtgactccaaggacaagacgagtgccttgagcctgagcaatgtagcaggcgtcttctacattctggttggcggcttgggcttggcaatgctggtggctttgatagagttctgttacaagtccagggcagaagcgaagagaatgaaggtggcaaagagtgcacagacttttaacccaacttcctcgcagaatacccagaatttagcaacctatagagaaggttacaacgtatatggaaccgaaagtattaaaatttagggctgaccttttctgaagccataagaaacaaagccagattatccatcactgggagtgtgggagagaatggccgcgtcttgacgcctgactgcccaaaggctgtacacactggaactgcaatcagacaaagttcaggattggctgtcattgcatcggacctaccataa

SEQ ID NO: 137447 - DNA, 2647 bp, Homo sapiens
  Payload ID: 6908
  Gene Symbol: GRIA4
  Gene Name: glutamate receptor, ionotropic, AMPA 4
  ENST ID: ENST00000527669
  CDS Start-End: 399-653
gggaggcagcccgtcctcctcacgaacctgcaaggatgcggcaggggcctgggggcatggggaggtactaaccccccggagcccccgattggggcttgcagacctggcccgtgggcggattttctgcctagcgcagccgagaagcagaggtgccaggaaaaccaagagaggggcgctgggggtgcccatccccagagtcggtccctctgcgaaccgaggaagaaaagaggagggagtcagcgagtggtcagaagggaaaacctgacaccagactggctccggagcgtccgggagactggggcgctccgcgccatcgtcttcaatgcttctctgaacagcctttaggaagagtgcgagagaaagagagagagcgcgcgccagggagaggagaaaagaagatgaggattatttccagacagattgtcttgttattttctggattttggggactcgccatgggagcctttccgagcagcgtgcaaataggtggtctcttcatccgaaacacagatcaggaatacactgcttttcgattagcaatttttcttcataacaccagccccaatgcgtcggaagctccttttaatttggtacctcatgtggacaacattgagacagccaacagttttgctgtaacaaacgcctgtaagtaaaacataagctatgaaaaattagaagagaactgaaaccaagcaatggagtcctcttcctctttgttatttaatttttttagaaagaatttcaagattcccacagttgcctggtttcaggacaaatcagagttaaaaacaagacttcgtttcagggatatttagttgttttttttttcttttccttaatttatttttcttttctttcttctcctccctctctttgcttcttcctgactttctcttttattcattatctgtctagatcattcaagttaaattttcctttaacattttagtgttattcctatcatccgaatgtcaatttagtgaaaattgtactcaagctagttttttattcttttcctttggtttttcttatttgcttttcacttgagtaagcataggtcttgcttttaaagaagaaacatgaagactatggaaggcttgctaatagtgagaaaaagaggggagtggtggtgtggaggatatatatttgagtcggttggttgacgctgcagatgatctggtgatgtcacttgaggctgccctgcccttatattctggggtgtaaatgtctcttactatcacataatgcatatatcctgtggatataactccatgaatccttacctcgatgccaaatcacattaggctcccatccacctgaattcaccaaccaacccagctttatctattattccacacaatgaaactaaacgggtgacctcacctaatgccgtaagaaagcagttgtacaattcctcccactctcaccaggacactgtataacttaatgtaaaaaaaaaatacaatcaactgtgcatgttagtttaaaacacattgaaacatgatcagtcaatagcagttgtattgctttttccttctggaaggaagtgcatgtttcaaatacctcctcacatttatatgctaatttaccactgttttaaattcataaattcagataatgactatagattatttaagaagtaggaatagtttctacatacaattttgcatgttttcacagttaataaaatgttcaagctgaattgtaaagcctttttgtcatatcaagctgggaacatttttatttaaaattctttcagtacaagaaagtgtgctgaacaaagaaacaagtgaaattgaaaacagagtttttaaatttgtctggaggacatctgtttcatcaacttaaattatttaatttgtatgtgttggctgttaattcatatagcagataacatgataaaattttcttaatttttggtgtctctttaaccgttaattctttttagaacttagtttcatgaggagcttgaagcatatgtcacttttgcaaagtgaataattatattatttttcaggaaggctataggttctatgagttactacttaatttttaaaaatctcttgacatatttggtgataaaatcaatattgcattaaagcaaaagggtgttatttttattcagaagtgcacataaattagaacaaggtttgtgggtagtcctttttgtaaaatttctcagttaatagttttatgttccaagttttaaaagggatgtcagcattctaagtagttctaaggaaagcattctttttaatacgtaaatattatttgtttatttaaatatttttctcatgtctctcctaagattctgtcaatcttactacttttaaaaataatctatgatccaaatacatgtgaaggtactttatcaatagtaattattttaacatattaattattattattaaattttgaaagatttccttacaagtggcagatatatgttttattttgtttcatttttacaaagtaagatcttaaatattctaaagtttgtattgtgacttccagtaatgtaaactatatgaggctaatcctcttttcctcctttttgtttgttaacctcatttgggataactgtaactagtattattttatttatgtaataaaaatatatgtgaaataaagtgttactggtaaagta

SEQ ID NO: 137448 - DNA, 766 bp, Homo sapiens
  Payload ID: 6908
  Gene Symbol: GRIA4
  Gene Name: glutamate receptor, ionotropic, AMPA 4
  ENST ID: ENST00000531011
  CDS Start-End: 92-766
gcgccatcgtcttcaatgcttctctgaacagcctttaggaagagtgcgagagaaagagagagagcgcgcgccagggagaggagaaaagaagatgaggattatttccagacagattgtcttgttattttctggattttggggactcgccatgggagcctttccgagcagcgtgcaaataggtggtctcttcatccgaaacacagatcaggaatacactgcttttcgattagcaatttttcttcataacaccagccccaatgcgtcggaagctccttttaatttggtacctcatgtggacaacattgagacagccaacagttttgctgtaacaaacgccttctgttcccagtattctagaggagtatttgccatttttggactctatgataagaggtcggtacataccttgacctcattctgcagcgccttacatatctccctcatcacaccaagtttccctactgagggggagagccagtttgtgctgcaactaagaccttcgttacgaggagcactcttgagtttgctggatcactacgaatggaactgttttgtcttcctgtatgacacagacaggggacttgtaatcagtaccacaccattggcaagtaattgtatgccaagttctgttgttcactcttggctttatgtgctctacaacaagagcataaactccataactgcttgccttttagggcctagcacagagctcaatgtatttaattacttgattgctgattcaaatttaaacaatggaaattacata

SEQ ID NO: 137449 - DNA, 470 bp, Homo sapiens
  Payload ID: 6908
  Gene Symbol: GRIA4
  Gene Name: glutamate receptor, ionotropic, AMPA 4
  ENST ID: ENST00000525921
  CDS Start-End: 224-470
agaggtgccaggaaaaccaagagaggggcgctgggggtgcccatccccagagtcggtccctctgcgaaccgaggaagaaaagaggagggagtcagcgagtggtcagaagggaaaacctgacaccagactggctccggagcgtccgggagactggggcgctccgcctttaggaagagtgcgagagaaagagagagagcgcgcgccagggagaggagaaaagaagatgaggattatttccagacagattgtcttgttattttctggattttggggactcgccatgggagcctttccgagcagcgtgcaaataggtggtctcttcatccgaaacacagatcaggaatacactgcttttcgattagcaatttttcttcataacaccagccccaatgcgtcggaagctccttttaatttggtacctcatgtggacaacattgagacagccaacagttttgctgtaacaaacgcct

SEQ ID NO: 137450 - DNA, 513 bp, Homo sapiens
  Payload ID: 6908
  Gene Symbol: GRIA4
  Gene Name: glutamate receptor, ionotropic, AMPA 4
  ENST ID: ENST00000525942
  CDS Start-End: 1-313
agtagctcgtgtccgcaaatccaagggcaaatttgcctttctcctggagtccactatgaatgaatacattgagcagcgaaagccatgtgacacgatgaaagtgggaggaaatctggattccaaaggctatggagtagcaacgcccaagggttcctcattaagaaatgctgttaacctcgcagttttaaaactgaatgaacaaggcctcttggacaaattgaaaaacaaatggtggtacgacaaaggagaatgtggcagcgggggaggtgactccaagaactcctgtaaaccttgccgttttgaaactcagtgaggcaggcgtcttagacaagctgaaaaacaaatggtggtacgataaaggtgaatgtggacccaaggactctggaagcaaggacaagacgagtgccttgagcctgagcaatgtagcaggcgtcttctacattctggttggcggcttgggcttggcaatgctggtggctttgatagagttctgttacaagtccagggcagaag

SEQ ID NO: 137451 - DNA, 5059 bp, Homo sapiens
  Payload ID: 6908
  Gene Symbol: GRIA4
  Gene Name: glutamate receptor, ionotropic, AMPA 4
  Uniprot ID: P48058
  ENST ID: ENST00000530497
  CDS Start-End: 1-2709
atgaggattatttccagacagattgtcttgttattttctggattttggggactcgccatgggagcctttccgagcagcgtgcaaataggtggtctcttcatccgaaacacagatcaggaatacactgcttttcgattagcaatttttcttcataacaccagccccaatgcgtcggaagctccttttaatttggtacctcatgtggacaacattgagacagccaacagttttgctgtaacaaacgccttctgttcccagtattctagaggagtatttgccatttttggactctatgataagaggtcggtacataccttgacctcattctgcagcgccttacatatctccctcatcacaccaagtttccctactgagggggagagccagtttgtgctgcaactaagaccttcgttacgaggagcactcttgagtttgctggatcactacgaatggaactgttttgtcttcctgtatgacacagacaggggatactcgatactccaagctattatggaaaaagcaggacaaaatggttggcatgtcagcgctatatgtgtggaaaattttaatgatgtcagctataggcaacttctagaagaacttgacagaagacaagagaagaagtttgtaatagactgtgagatagagagacttcaaaacatattagaacagattgtaagtgttggaaagcatgttaaaggctaccattatatcattgcaaacttgggattcaaggatatttctcttgagaggtttatacatggtggagccaatgttactggattccagttggtggattttaatacacctatggtaatcaaactaatggatcgctggaagaaactagatcagagagagtatccaggatctgagactcctccaaagtacacctctgctctgacttatgatggagtccttgtgatggctgaaactttccgaagtcttaggaggcagaaaattgatatctcaaggagaggaaatgctggggattgtctggcaaatcctgctgctccatggggccagggaattgacatggagaggacactcaaacaggttcgaattcaagggctgacagggaatgttcagtttgaccactatggacgtagagtcaattacacaatggatgtgtttgagctgaaaagcacaggacctagaaaggttggttactggaatgatatggataagttagtcttgattcaagatgtaccaactcttggcaatgacacagctgctattgagaacagaacagtggttgtaaccacaattatggaatccccatatgttatgtacaagaaaaatcatgaaatgtttgaaggaaatgacaagtatgaaggatactgtgtagatttggcatctgaaattgcaaaacatattggtatcaagtataaaattgccattgtccctgatggaaaatatggagcaagggatgcagacacaaaaatctggaatgggatggtaggagaacttgtttatgggaaagcagagattgctattgcccctctgacaatcactttggtacgagaggaggtcattgacttttctaagcccttcatgagtttgggcatatctatcatgatcaaaaagcctcagaaatccaaaccaggagtgttttccttcttggatcctctggcctatgagatttggatgtgcatagtctttgcctacattggtgtcagcgtggtcttattcctagttagtagatttagtccatatgagtggcacacagaagagccagaggacggaaaggaaggacccagcgaccagcctcccaatgagtttggcatctttaacagcctctggttttccctgggtgcttttatgcagcaaggatgtgacatttcacccagatccctctcaggtcgaattgttggaggtgtttggtggttctttacactcatcattatatcatcttatactgctaacctcgctgctttcctgacggttgagcgaatggtctctcccatagaaagtgcagaagacctggccaaacaaacagaaattgcctatggaacactggattcaggatcaacaaaagaattcttcagaagatcaaaaatagcagtgtatgaaaagatgtggacctacatgcgatcagcagagccatcagtattcactaggactacagctgagggagtagctcgtgtccgcaaatccaagggcaaatttgcctttctcctggagtccactatgaatgaatacattgagcagcgaaagccatgtgacacgatgaaagtgggaggaaatctggattccaaaggctatggagtagcaacgcccaagggttcctcattaagaactcctgtaaaccttgccgttttgaaactcagtgaggcaggcgtcttagacaagctgaaaaacaaatggtggtacgataaaggtgaatgtggacccaaggactctggaagcaaggacaagacgagtgccttgagcctgagcaatgtagcaggcgtcttctacattctggttggcggcttgggcttggcaatgctggtggctttgatagagttctgttacaagtccagggcagaagcgaagagaatgaagctgaccttttctgaagccataagaaacaaagccagattatccatcactgggagtgtgggagagaatggccgcgtcttgacgcctgactgcccaaaggctgtacacactggaactgcaatcagacaaagttcaggattggctgtcattgcatcggacctaccataaaaaccaaaaaaataattgagtgccttaattaaactgttggtgactggtggaaacgcagccctgagggacacgccacgcgcgggtctttgctaaaccaatcctttggctgagagcgggaagtccgtcctaacgcgctggccggacatcagcagcagcaacgtgtgcatgagctcagctcggaaacccaaactcagattttatatcaggaaaactcacaattgaggtttttttcggggagtgggtgggggagggatctgggatgggtgtattaacagcaacaaatttcattcgagtggactcaaaaactaatcagacttatgagttagcgcattaaactgtgaagttcttgctcagaaaggcctttgtcttcaccggaaaggataaaatagttgtagaagtccgtgaacatgctaacctgtgtctccagaacatccatatagtccatggaagaaaatccagctgagaaaacaaatcactaaactgtgataagaaaataatgaacaaacatgtaaaacctgtgggaaaaaaaaataaaggaagtatgtacacttactttggagaaaacaaatactgaaacatgcttgctttttaactgacgtaaattcagtagaggacaacacaattcttttttctaaccatcttagggaacaatacattgcaataattgatataaatgccatcactgtaataaactttagagacttttttttataaaagttgttggtcatcttcttgtttgctgtaaccttcactatgtcacatgagtcgattcaccgattgcatttgtctcacaaccaggaagaaaagcaaaaggaagaaaacgtttaggttcaatcatcagtctgcggtgtagactcgaaagagatgacaggtcactcatgttaatggtattatttataatctcattctgtgtacaacattgtggtttttgtacccaccaaaaagaataaaacagcagatgttcttacaatatctacagagcttaaaagttttttcttatcgttataaaagttatttgagaaattataagactataagagagattgtattagtggtgggccatagtggaaaatgtagctagccctcattattttttgcatactaagctacccctccttttcagatctttgactcattaacagattaaactgtcaaagatggagtctttgagttggggaatgaatcactgtcctaacaacaacataccttgtaattgtgtgttgaaattttacttgactgtattttgctgcataaaattatgtgtctcttgggcttcttcccttattcctattgttccctttaaatcatatgaaggcattcataatagcttggggtagataacaaatgaagaattagtctttgttttcaactggaaattgtaaagaaaattatactcatgtttatttataaaaatcaccttatgtatgaattaaactaacatggttcaaaagaaggtttggttcatttgaaataataaataagtactctaatacagataaaaatcatgtacttagggtattggcagaaagcacaagttaggatgatttcagaagtctggccttgaaggatgagttgagttttaacaggaggagaaggtgttaagagccatatgagtgagcagtggcccaaagccatgcacatcagtggctcatttaaggaatgaatgccattagatgggctactgagagtacagggatattatggaagataaagttggaaaagctgaaggattgattttcttccatcaactctcaagatcccattcgccattcaatctctgtgctgcagtaagagcaatcttaaacagtataaatcacacacacacacacacacacacacacacacacacacaagtccctcaggaaaaattccaagctcttgagaagatcacatgagccccttcatgacctggcgcttgcttatttcttccaggacttctctcacttctatccagctattcccgtcagcaaatgaacctccaaagcagcacatggagcactgcatagactatttcctcagtgcgtaactcctccctgtctcctctttacctgagtaacttgtactcatccttcaatactccaactgaattttacttaccctgaaaagatttccatggctatccaccacccccctgcctgtgagactgagttaggtgccctttttcatgtctttcccccatcacggcacttaccatactgcgttgtaattgcctgtgtactcgtctgtataactactagactgtaagctccttgagggcagggactgtgtctatcttgttcacagttgtatccccagcacccagcacagtgcctggcatattgtaggtgcttaataaatatttgttgaatga

SEQ ID NO: 137452 - DNA, 674 bp, Homo sapiens
  Payload ID: 6908
  Gene Symbol: GRIA4
  Gene Name: glutamate receptor, ionotropic, AMPA 4
  ENST ID: ENST00000531986
  CDS Start-End: 428-674
gcgcgcagcccagtggcagaagagggctaggctgagagggaagccaggactgtaggagagggaggcagcccgtcctcctcacgaacctgcaaggatgcggcaggggcctgggggcatggggaggtactaaccccccggagcccccgattggggcttgcagacctggcccgtgggcggattttctgcctagcgcagccgagaagcagaggtgccaggaaaaccaagagaggggcgctgggggtgcccatccccagagtcggtccctctgcgaaccgaggaagaaaagaggagggagtcagcgagtggtcagaagggaaaacctgacaccagactggctccggagcgtccgggagactggggcgctccgcctttaggaagagtgcgagagaaagagagagagcgcgcgccagggagaggagaaaagaagatgaggattatttccagacagattgtcttgttattttctggattttggggactcgccatgggagcctttccgagcagcgtgcaaataggtggtctcttcatccgaaacacagatcaggaatacactgcttttcgattagcaatttttcttcataacaccagccccaatgcgtcggaagctccttttaatttggtacctcatgtggacaacattgagacagccaacagttttgctgtaacaaacgcct

SEQ ID NO: 137453 - DNA, 367 bp, Homo sapiens
  Payload ID: 6908
  Gene Symbol: GRIA4
  Gene Name: glutamate receptor, ionotropic, AMPA 4
  ENST ID: ENST00000527177
  CDS Start-End: 121-367
aggctctccagattcccgggctgtttgctgcgccatcgtcttcaatgcttctctgaacagcctttaggaagagtgcgagagaaagagagagagcgcgcgccagggagaggagaaaagaagatgaggattatttccagacagattgtcttgttattttctggattttggggactcgccatgggagcctttccgagcagcgtgcaaataggtggtctcttcatccgaaacacagatcaggaatacactgcttttcgattagcaatttttcttcataacaccagccccaatgcgtcggaagctccttttaatttggtacctcatgtggacaacattgagacagccaacagttttgctgtaacaaacgcct

SEQ ID NO: 137454 - DNA, 5834 bp, Homo sapiens
  Payload ID: 6909
  Gene Symbol: GRID1
  Gene Name: glutamate receptor, ionotropic, delta 1
  Uniprot ID: Q9ULK0
  ENST ID: ENST00000327946
  CDS Start-End: 87-3116
actgcaccgggaccagcgcctccccgcttcgcgctgccctcggcctcgccccgggcccgggtggatgagccgcgcgcccgggggacatggaagcgctgacgctgtggcttctcccctggatatgccagtgcgtgtcggtgcgggccgactccatcatccacatcggtgccatcttcgaggagaacgcggccaaggacgacagggtgttccagttggcggtatccgacctgagcctcaacgatgacatcctgcagagcgagaagatcacctactccatcaaggtcatcgaggccaacaacccattccaggctgtgcaggaagcctgtgacctcatgacccaggggattttggccttggtcacgtccactggctgtgcatctgccaatgccctgcagtccctcacggatgccatgcacatcccacacctctttgtccagcgcaacccgggagggtcgccacgcaccgcatgccacctgaaccccagccccgatggtgaggcctacacactggcttcgagaccacccgtccgcctcaatgatgtcatgctcaggctggtgacggagctgcgctggcagaagttcgtcatgttctacgacagcgagtatgatatccgtgggcttcaaagctttctggaccaggcctcgcggctgggccttgacgtctctttacaaaaggtggacaagaacattagccacgtattcaccagcctcttcaccacgatgaagacagaggagctgaatcgctaccgggacacgcttcgccgcgccatcctgctgctcagcccacagggagcccactccttcatcaacgaggccgtggagaccaacctggcttccaaggacagccactgggtctttgtgaatgaggaaatcagtgacccggagatcctggatctggtccatagtgcccttggaaggatgaccgtggtccggcaaatctttccgtctgcaaaggacaatcagaaatgcacgaggaacaaccaccgcatctcctccctgctctgcgacccccaggaaggctacctccagatgctgcagatctccaacctctatctgtatgacagtgttctgatgctggccaacgcctttcacaggaagctggaggaccggaagtggcatagcatggcgagcctcaactgcatacggaaatccactaagccatggaatggtgggaggtccatgctggataccatcaaaaagggccacatcactggcctcactggggtgatggagtttcgggaggacagttcgaatccctatgtccagtttgaaatccttggcactacctatagtgagacttttggcaaagacatgcgcaagttggcgacatgggactcagagaagggcttgaatggcagcttgcaagagaggcccatgggcagccgcctccaaggattgactcttaaagtggtgactgtcttggaagagcctttcgtgatggtggctgagaacatcctaggacagcccaagcgctacaaagggttctccatagatgtcctggatgcactggccaaggctctgggctttaaatatgagatttaccaagcccctgatggcaggtacggtcaccagctccataacacctcctggaacgggatgatcggggagctcatcagcaagagagcagacttggccatctctgccatcaccatcaccccagagagggagagcgttgtggacttcagcaagcggtacatggactattcagtggggattctaattaagaagcccgaggagaaaatcagcatcttctccctctttgctccatttgatttcgctgtgtgggcctgcattgcagcagccatccctgtggttggtgtgctgatatttgtgttgaacaggatacaggctgtgagggctcagagtgctgcccagcccaggccgtcagcttctgccactctgcacagcgccatctggattgtctatggagccttcgtacagcaaggtggcgaatcttccgtgaactccatggccatgcgcatcgtgatgggcagctggtggctcttcacgctcattgtgtgctcctcctacacagccaaccttgctgccttcctcacagtgtccaggatggacaaccccataaggactttccaggacctgtccaaacaagtggaaatgtcttatggcactgtccgggattctgctgtatatgagtacttccgagccaagggcaccaaccccctggagcaggacagcacgtttgctgaactctggcggaccatcagcaagaacggaggggctgacaactgcgtgtccagtccttcagaaggcatcaggaaggcaaagaaggggaactacgccttcctgtgggatgtggccgtggtggaatacgcagccctgacggatgacgactgctcggtgactgtcatcggcaacagcatcagcagcaagggttacgggattgccctgcagcatggcagcccctacagggacctcttctcccagaggatcctggagctgcaggacacaggggacctggatgtgctgaagcagaagtggtggccgcacatgggccgctgtgacctcaccagccatgccagcgcccaggccgacggcaaatccctcaagctgcacagcttcgccggggtcttctgcatcctggccattggcctgctcctggcctgcctggtggctgccctggagttgtggtggaacagcaaccggtgccaccaggagacccccaaggaggacaaagaagtgaacttggagcaggtccaccggcgcatgaacagcctcatggatgaagacattgctcacaagcagatttccccagcgtcgattgagctctcggccctggagatggggggcctggctcccacccagaccttggagccgacacgggagtaccagaacacccagctctcggtcagcacctttctgccagagcagagcagccatggcaccagccggacactctcatcagggcccagcagcaacctgccgctgccgctgagcagctcggcgaccatgccctccatgcagtgcaaacacaggtcacccaacggggggctgttccggcagagcccggtgaagacccccatccccatgtccttccagcccgtgcctggaggcgtccttccagaggctctggacacctcccacgggacctccatctgactgcgccgcctgccctcctgcccaccctcccacccacccgaccagcagagctttttaatacaagaaaacaacaacacaaaccacacacactcgcacacacacacatacacagagactctttcatttttcttgtacatatgtgtaaataatgacagaatggagtggggtaaaagtgtattttgaatattcccaattttcgaagtcagtaaaaaaacacaaaaactgtatgaatgactttgtaaattttgttctatatgaataaaaaggcaaattacttgtgatcattctgaagtgccaaaggagcccccccattcctgggcctttctgagggcaggaggggcgaccagataaggagcccctctctgctgggggagaagggaagacgaggaaccccacatgccactcgctgccttgtcccacagcttgctgccccatttctttgctcctggcacctcgtcccttttagtccctcagcttgataaagagtgagtttggagcccgcattgggctggcccactgggttgctgtgctgtagggtgatcggctgttctgggtagcctggggctgaggaggtgccctggactcagggctatcctgtcctgtcttggatcttgcgggacgagttagtcaccgctgtgtgtgttgcagtgtgcctctgccccatgggcccgagagaagctgacaattacccatagtgaggtaattgagggctttgatactgagctgttctcatatcatactgttggccttgtttttcattttcttttcaaaattagaagaatcaaaaagtgatagaatattgggggaaggagggcagactccatcgtttcctcagggagactgggcggaggtggggttggtctggaagaaggtccatgggggcagggagttgcgaggtggggttagttgcatggaccaggtgaggtggtggaacaaaaggccaggtagaggaagaatattcccttgggtttggacccatggtcccaggtgagagaaggaagtgaggccatagatgcagggagtagaagctttgtggtgtcaggcaaacggactctgttagtaagagttgggggaggtgcccaggtgggtggaccagtactccaggtgatggggcatgctgagaaatagagaaaagagaccatgtttatttgggtaggaggaagccttgccttgcgccttaggtgagaagcataagtgtaactcccatccaccagggaagttgcttgtagccccaaaagtaaaggcctatctctgggtcataaatcctgcaggcagtccaacaaacagggctggctccagcacaaactctcccttccacctttacgaccctctccagaccagacctggagtcctcttcaagcagcaatccaacccagagcaggggccctccccactcaggcatctgataacctctgagatttccaggcctatccctgtgcaggtacagctgcagggaagcccagttttctaagcctaggaccacctaacagcgccccctccttcagttgccctttctgaggcaactaaactacagaatcagggaaagaaccattaggagtggaactgggggaatctgagttgtgtcacttcagttcctctcctaaagacaaaggttagtctgatctccagacccgtcagaatggaatacacagcccacatctgtcactgaaggaggtggagctcccacagccagcagtaatcagggagctgagagcctggttctgtgatcatggagaaatacaaagtcctattgattgcttcttctatagccttgtagagtttctagagagatgtatttatgagggtgataactagcccaggattgatttctttcctaaagtccctagtgacatgattgagcagtaaagaacggccaaatcacacagtcagctaaaagcactgtggggaagagagtgtttataattatgttatttattgctggatgctgagaatggtctgatattcgtgctacctaggcaatccattgacatttctccaatcagagcatgtggaccttggagccaggcatgctcagagaagcctaggtgggctaccatgaccccgaggaagagcaggctttgttttccatcagcacgttgggggccctgccctgaatggtcaatttttcacatatatatctctctatttttttaatcaaactctggtctcactgccttatctcacaccaactctgtttcctcattgccccctgagatggcctgtcttctggggtatagcttggatgtcttcttggatggttctgcttagaatgagtgtcaaggaggaaagagagggagatggaggatgtgtttgtgcgcctgtgtgtgtgtgtttgtgtgtgtgtgtgtgtgtgagagagagagagagagagagagagaccagcatcttcaagagaagtattctgcttatacaaaatccttaacacctcatggtgttattcttcaccatgtttatatatatatatatatatttttttttttttttagaattttctacccttggcatgaggggaaatgattgatattcaagcaagttctctaggaaaaaaaaaaacttcccaactcagatttctgtgtcagctcagaatgtatctttttttcatgctttgctctttggatttataactctgtttagactattccatacattttaggtatattttgtgccttcagacactgcaaataataatcagcatttggattaaagttgtttaataat

SEQ ID NO: 137455 - DNA, 3243 bp, Homo sapiens
  Payload ID: 6909
  Gene Symbol: GRID1
  Gene Name: glutamate receptor, ionotropic, delta 1
  ENST ID: ENST00000464741
  CDS Start-End: 102-2369
ggggagcggcccgggactgcaccgggaccagcgcctccccgcttcgcgctgccctcggcctcgccccgggcccgggtggatgagccgcgcgcccgggggacatggaagcgctgacgctgtggcttctcccctggatatgccagtgcgtgtcggtgcgggccgactccatcatccacatcggtgccatcttcgaggagaacgcggccaaggacgacagggtgttccagttggcggtatccgacctgagcctcaacgatgacatcctgcagagcgagaagatcacctactccatcaaggtcatcgaggccaacaacccattccaggctgtgcaggaagcctgtgacctcatgacccaggggattttggccttggtcacgtccactggctgtgcatctgccaatgccctgcagtccctcacggatgccatgcacatcccacacctctttgtccagcgcaacccgggagggtcgccacgcaccgcatgccacctgaaccccagccccgatggtgaggcctacacactggcttcgagaccacccgtccgcctcaatgatgtcatgctcaggctggtgacggagctgcgctggcagaagttcgtcatgttctacgacagcgagtatgatatccgtgggcttcaaagctttctggaccaggcctcgcggctgggccttgacgtctctttacaaaaggtggacaagaacattagccacgtattcaccagcctcttcaccacgatgaagacagaggagctgaatcgctaccgggacacgcttcgccgcgccatcctgctgctcagcccacagggagcccactccttcatcaacgaggccgtggagaccaacctggcttccaaggacagccactgggtctttgtgaatgaggaaatcagtgacccggagatcctggatctggtccatagtgcccttggaaggatgaccgtggtccggcaaatctttccgtctgcaaaggacaatcagaaatgcacgaggaacaaccaccgcatctcctccctgctctgcgacccccaggaaggctacctccagatgctgcagatctccaacctctatctgtatgacagtgttctgatgctggccaacgcctttcacaggaagctggaggaccggaagtggcatagcatggcgagcctcaactgcatacggaaatccactaagccatggaatggtgggaggtccatgctggataccatcaaaaagggccacatcactggcctcactggggtgatggagtttcgggaggacagttcgaatccctatgtccagtttgaaatccttggcactacctatagtgagacttttggcaaagacatgcgcaagttggcgacatgggactcagagaagggcttgaatggcagcttgcaagagaggcccatgggcagccgcctccaaggattgactcttaaagtggtgactgtcttggaagagcctttcgtgatggtggctgagaacatcctaggacagcccaagcgctacaaagggttctccatagatgtcctggatgcactggccaaggctctgggctttaaatatgagatttaccaagcccctgatggcaggtacggtcaccagctccataacacctcctggaacgggatgatcggggagctcatcagcaagagagcagacttggccatctctgccatcaccatcaccccagagagggagagcgttgtggacttcagcaagcggtacatggactattcagtggggattctaattaagaagcccgaggagaaaatcagcatcttctccctctttgctccatttgatttcgctgtgtgggcctgcattgcagcagccatccctgtggttggtgtgctgatatttgtgttgaacaggatacaggctgtgagggctcagagtgctgcccagcccaggccgtcagcttctgccactctgcacagcgccatctggattgtctatggagccttcgtacagcaaggtggcgaatcttccgtgaactccatggccatgcgcatcgtgatgggcagctggtggctcttcacgctcattgtgtgctcctcctacacagccaaccttgctgccttcctcacagtgtccaggatggacaaccccataaggactttccaggacctgtccaaacaagtggaaatgtcttatggcactgtccgggattctgctgtatatgagtacttccgagccaagggcaccaaccccctggagcaggacagcacgtttgctgaactctggcggaccatcagcaagaacggaggggctgacaactgcgtgtccagtccttcagaaggcatcaggaaggatcctggagctgcaggacacaggggacctggatgtgctgaagcagaagtggtggccgcacatgggccgctgtgacctcaccagccatgccagcgcccaggccgacggcaaatccctcaagctgcacagcttcgccggggtcttctgcatcctggccattggcctgctcctggcctgcctggtggctgccctggagttgtggtggaacagcaaccggtgccaccaggagacccccaaggaggacaaagaagtgaacttggagcaggtccaccggcgcatgaacagcctcatggatgaagacattgctcacaagcagatttccccagcgtcgattgagctctcggccctggagatggggggcctggctcccacccagaccttggagccgacacgggagtaccagaacacccagctctcggtcagcacctttctgccagagcagagcagccatggcaccagccggacactctcatcagggcccagcagcaacctgccgctgccgctgagcagctcggcgaccatgccctccatgcagtgcaaacacaggtcacccaacggggggctgttccggcagagcccggtgaagacccccatccccatgtccttccagcccgtgcctggaggcgtccttccagaggctctggacacctcccacgggacctccatctgactgcgccgcctgccctcctgcccaccctcccacccacccgaccagcagagctttttaatacaagaaaacaacaacacaaaccacacacactcgcacacacacacatacacagagactctttcatttttcttgtacatatgtgtaaataatgacagaatggagtggggtaaaagtgtattttgaatattcccaattttcgaagtcagtaaaaaaacacaaaaactgtatgaatgactttgtaaattttgttctatatgaataaaaaggcaaattacttgt

SEQ ID NO: 137456 - DNA, 5024 bp, Homo sapiens
  Payload ID: 6909
  Gene Symbol: GRID1
  Gene Name: glutamate receptor, ionotropic, delta 1
  ENST ID: ENST00000536331
  CDS Start-End: 57-2306
aggccgtggagaccaacctggcttccaaggacagccactgggtctttgtgaatgaggaaatcagtgacccggagatcctggatctggtccatagtgcccttggaaggatgaccgtggtccggcaaatctttccgtctgcaaaggacaatcagaaatgcacgaggaacaaccaccgcatctcctccctgctctgcgacccccaggaaggctacctccagatgctgcagatctccaacctctatctgtatgacagtgttctgatgctggccaacgcctttcacaggaagctggaggaccggaagtggcatagcatggcgagcctcaactgcatacggaaatccactaagccatggaatggtgggaggtccatgctggataccatcaaaaagggccacatcactggcctcactggggtgatggagtttcgggaggacagttcgaatccctatgtccagtttgaaatccttggcactacctatagtgagacttttggcaaagacatgcgcaagttggcgacatgggactcagagaagggcttgaatggcagcttgcaagagaggcccatgggcagccgcctccaaggattgactcttaaagtggtgactgtcttggaagagcctttcgtgatggtggctgagaacatcctaggacagcccaagcgctacaaagggttctccatagatgtcctggatgcactggccaaggctctgggctttaaatatgagatttaccaagcccctgatggcaggtacggtcaccagctccataacacctcctggaacgggatgatcggggagctcatcagcaagagagcagacttggccatctctgccatcaccatcaccccagagagggagagcgttgtggacttcagcaagcggtacatggactattcagtggggattctaattaagaagcccgaggagaaaatcagcatcttctccctctttgctccatttgatttcgctgtgtgggcctgcattgcagcagccatccctgtggttggtgtgctgatatttgtgttgaacaggatacaggctgtgagggctcagagtgctgcccagcccaggccgtcagcttctgccactctgcacagcgccatctggattgtctatggagccttcgtacagcaaggtggcgaatcttccgtgaactccatggccatgcgcatcgtgatgggcagctggtggctcttcacgctcattgtgtgctcctcctacacagccaaccttgctgccttcctcacagtgtccaggatggacaaccccataaggactttccaggacctgtccaaacaagtggaaatgtcttatggcactgtccgggattctgctgtatatgagtacttccgagccaagggcaccaaccccctggagcaggacagcacgtttgctgaactctggcggaccatcagcaagaacggaggggctgacaactgcgtgtccagtccttcagaaggcatcaggaaggcaaagaaggggaactacgccttcctgtgggatgtggccgtggtggaatacgcagccctgacggatgacgactgctcggtgactgtcatcggcaacagcatcagcagcaagggttacgggattgccctgcagcatggcagcccctacagggacctcttctcccagaggatcctggagctgcaggacacaggggacctggatgtgctgaagcagaagtggtggccgcacatgggccgctgtgacctcaccagccatgccagcgcccaggccgacggcaaatccctcaagctgcacagcttcgccggggtcttctgcatcctggccattggcctgctcctggcctgcctggtggctgccctggagttgtggtggaacagcaaccggtgccaccaggagacccccaaggaggacaaagaagtgaacttggagcaggtccaccggcgcatgaacagcctcatggatgaagacattgctcacaagcagatttccccagcgtcgattgagctctcggccctggagatggggggcctggctcccacccagaccttggagccgacacgggagtaccagaacacccagctctcggtcagcacctttctgccagagcagagcagccatggcaccagccggacactctcatcagggcccagcagcaacctgccgctgccgctgagcagctcggcgaccatgccctccatgcagtgcaaacacaggtcacccaacggggggctgttccggcagagcccggtgaagacccccatccccatgtccttccagcccgtgcctggaggcgtccttccagaggctctggacacctcccacgggacctccatctgactgcgccgcctgccctcctgcccaccctcccacccacccgaccagcagagctttttaatacaagaaaacaacaacacaaaccacacacactcgcacacacacacatacacagagactctttcatttttcttgtacatatgtgtaaataatgacagaatggagtggggtaaaagtgtattttgaatattcccaattttcgaagtcagtaaaaaaacacaaaaactgtatgaatgactttgtaaattttgttctatatgaataaaaaggcaaattacttgtgatcattctgaagtgccaaaggagcccccccattcctgggcctttctgagggcaggaggggcgaccagataaggagcccctctctgctgggggagaagggaagacgaggaaccccacatgccactcgctgccttgtcccacagcttgctgccccatttctttgctcctggcacctcgtcccttttagtccctcagcttgataaagagtgagtttggagcccgcattgggctggcccactgggttgctgtgctgtagggtgatcggctgttctgggtagcctggggctgaggaggtgccctggactcagggctatcctgtcctgtcttggatcttgcgggacgagttagtcaccgctgtgtgtgttgcagtgtgcctctgccccatgggcccgagagaagctgacaattacccatagtgaggtaattgagggctttgatactgagctgttctcatatcatactgttggccttgtttttcattttcttttcaaaattagaagaatcaaaaagtgatagaatattgggggaaggagggcagactccatcgtttcctcagggagactgggcggaggtggggttggtctggaagaaggtccatgggggcagggagttgcgaggtggggttagttgcatggaccaggtgaggtggtggaacaaaaggccaggtagaggaagaatattcccttgggtttggacccatggtcccaggtgagagaaggaagtgaggccatagatgcagggagtagaagctttgtggtgtcaggcaaacggactctgttagtaagagttgggggaggtgcccaggtgggtggaccagtactccaggtgatggggcatgctgagaaatagagaaaagagaccatgtttatttgggtaggaggaagccttgccttgcgccttaggtgagaagcataagtgtaactcccatccaccagggaagttgcttgtagccccaaaagtaaaggcctatctctgggtcataaatcctgcaggcagtccaacaaacagggctggctccagcacaaactctcccttccacctttacgaccctctccagaccagacctggagtcctcttcaagcagcaatccaacccagagcaggggccctccccactcaggcatctgataacctctgagatttccaggcctatccctgtgcaggtacagctgcagggaagcccagttttctaagcctaggaccacctaacagcgccccctccttcagttgccctttctgaggcaactaaactacagaatcagggaaagaaccattaggagtggaactgggggaatctgagttgtgtcacttcagttcctctcctaaagacaaaggttagtctgatctccagacccgtcagaatggaatacacagcccacatctgtcactgaaggaggtggagctcccacagccagcagtaatcagggagctgagagcctggttctgtgatcatggagaaatacaaagtcctattgattgcttcttctatagccttgtagagtttctagagagatgtatttatgagggtgataactagcccaggattgatttctttcctaaagtccctagtgacatgattgagcagtaaagaacggccaaatcacacagtcagctaaaagcactgtggggaagagagtgtttataattatgttatttattgctggatgctgagaatggtctgatattcgtgctacctaggcaatccattgacatttctccaatcagagcatgtggaccttggagccaggcatgctcagagaagcctaggtgggctaccatgaccccgaggaagagcaggctttgttttccatcagcacgttgggggccctgccctgaatggtcaatttttcacatatatatctctctatttttttaatcaaactctggtctcactgccttatctcacaccaactctgtttcctcattgccccctgagatggcctgtcttctggggtatagcttggatgtcttcttggatggttctgcttagaatgagtgtcaaggaggaaagagagggagatggaggatgtgtttgtgcgcctgtgtgtgtgtgtttgtgtgtgtgtgtgtgtgtgagagagagagagagagagagagagaccagcatcttcaagagaagtattctgcttatacaaaatccttaacacctcatggtgttattcttcaccatgtttatatatatatatatatatttttttttttttttagaattttctacccttggcatgaggggaaatgattgatattcaagcaagttctctaggaaaaaaaaaaacttcccaactcagatttctgtgtcagctcagaatgtatctttttttcatgctttgctctttggatttataactctgtttagactattccatacattttaggtatattttgtgccttcagacactgcaaataataatcagcatttggattaaagttgtttaataat

SEQ ID NO: 137457 - DNA, 6117 bp, Homo sapiens
  Payload ID: 6910
  Gene Symbol: GRID2
  Gene Name: glutamate receptor, ionotropic, delta 2
  Uniprot ID: O43424
  ENST ID: ENST00000282020
  CDS Start-End: 1036-4059
agtcccggttgaagattccatgggaaatgagagcactattttgtttctcccttgtattgcagatagggggaggaggtggttattagagagaagctcttcctctcttggtttccccctctctccgcctgacagcaccgctctctcgcaggctcgctccttctcctaggtgatccatttctaggcaacgtggggctggtgctgaagctgccaggctcgctccttgcttcctgcatcccgccaggcgaaacgctccaaaagcatcctgcagcctgcggcggcttccctcctctggcccggccccgctgctcgcgcccggcgcaacccccccgccaccgcgccccagcaaaccggctccccgggcccgcctcgccaagctgcgttccgcgcctcacgcagaaagggaattttctctgcattactatctgcattaccttgaagttcactttttctacccctcttggagagggcttttttcccccctccctggtggaatctggctgctccgtttggaatctcctaatctttcctttccacttagattctggcagcgaagaccagtgattctctgcgggctgtaggggcgggggcgggggtcttttttggtccgagagggtgcggggaagggggcacatccggcgtgaggggggtgttggaagttgcagcggagctgggaccggagacccgcggcccccgcgcagcgatgggtctgatctgagccccagcctctccccctgcccaagagcagtagaggctggatatatttttcaaaagccaaactgcaaacaactctggcgatgccaaaattcccctccaagtgacacggctttgcgaaggaggtttcctcaggctgggctctttctgtcattcccttctgcctttctcggcgacgataaaaggctttgctctggcaataggaatttagaaaaaaagaaaaagctgcgctaaactccaccgtgacctcaaactctttggactgtttgaaaaaaaaaaaattggaagaaaatccatcctccaagagaatcggcataggaggagatggaagttttcccctttctcttggttttgtccgtctggtggtctcgaacctgggactcggcgaatgcggattcgatcattcacatcggagcaatttttgatgaatctgccaaaaaggatgatgaggtatttcgcactgcggttggtgaccttaaccagaatgaggagatcttacagactgagaaaatcacattttcagtgacgtttgttgatggcaacaaccctttccaagcagttcaagaagcctgtgaacttatgaatcaaggcatcttggccctggtcagctccattggctgcacgtcagcaggatccctccagtctttggcagacgccatgcatatcccccacctcttcattcagcgctcaacagctgggaccccaaggagtggctgtggactcacccggagcaacaggaatgatgactacactctctcagttcgcccacctgtctacttgcatgatgttatcctaagagtggtcacagagtatgcctggcagaaattcattatattctatgatagtgaatacgatatccgtggaatacaggagttcttggacaaagtctctcagcagggaatggatgttgcacttcagaaggtagaaaacaacatcaataaaatgattaccactctctttgacaccatgagaatagaagaactgaatcgctatcgagacactcttaggcgagcgatccttgttatgaatcctgctacagccaaatccttcattactgaggttgtggagactaatttggttgcttttgactgtcactggatcattataaatgaggaaataaacgatgtggacgtacaggaacttgtaagaaggtcaattggaaggttaacgattattcggcagacatttccagttccccagaacataagtcagcggtgtttccgtggcaaccatcgaatatcttcaacattgtgtgatccaaaggatccatttgctcagaatatggagatttccaacctttacatatatgacacggtgcttctgcttgctaatgcttttcataagaagctggaggaccgaaagtggcacagcatggcaagtctgtcatgtatcagaaagaactcaaagccctggcagggtgggcgctccatgttggagaccatcaagaagggtggagttagtgggttgactggagagctagaatttggagaaaatggaggcaatcccaatgtccactttgaaatccttggaaccaactatggagaagagcttggcagaggtgttcgaaaacttggttgctggaatcctgtcacaggtctgaatgggtcactgactgacaagaaattggagaataacatgcgtggagtggttctacgtgtagtaactgttctggaagaaccttttgtgatggtctctgaaaatgtcttgggtaagccgaagaaataccagggcttctccattgatgttttggatgccttatctaactacctgggttttaactacgaaatttacgtagcaccggatcacaaatacggaagcccacaagaagatgggacatggaatggcttggtaggagaacttgtctttaagagagccgacatagggatttctgctttaaccatcactccagatcgtgaaaatgtggtggactttacgacacgttacatggactactcagtgggggtactacttcgaagggctgaaaagacagtggatatgtttgcctgtcttgcaccatttgatctctctctatgggcttgcattgctggcacagtccttctggtgggtctactggtctacctcttgaactggcttaatcccccacgattacaaatgggatcaatgacgtctactactctctacaactccatgtggtttgtgtatggatcttttgtacaacaaggcggggaagtcccgtacacgactctggctacccgaatgatgatgggggcttggtggctatttgctttgattgttatctcatcttacacggcaaacctcgctgctttcctcactattacacgcattgaaagttccatccagtctctccaggacctttccaagcaaacagaaatcccttatggcacagtcctagactctgcggtatatgagcatgtccgcatgaaaggactgaatccttttgagagggacagcatgtattcccaaatgtggcggatgatcaaccgaagcaatggatcggagaacaatgttctggagtcccaggcaggcattcaaaaggtaaaatatggaaattatgctttcgtatgggatgcagctgtattggaatatgtggctatcaatgacccagattgttccttttacaccattggaaatactgttgctgatcggggatatggaattgcattacaacatggcagtccttaccgagatgttttttcacaaaggatcctggagcttcagcagaatggtgacatggacatcctgaagcacaaatggtggcctaagaatggccagtgtgacctgtactcgtcagtggacacaaagcagaaaggaggcgccctggacataaagagctttgcaggggtcttttgtatcctggctgctggaattgtcctctcctgcttcatagccatgctggagacgtggtggaacaagaggaaaggctcccgggttccatcaaaagaggatgacaaggaaattgacctggagcacctccatagacgtgtaaatagcttgtgcacagatgacgacagcccccataaacagttttccacctcgtcaattgatttgacccctctggacattgacactttgccaacacgacaagcactggagcaaatcagtgatttcaggaacactcatattaccacaacaacctttatcccagagcagatccagactcttagccgcacactgtcagctaaagctgcttctggtttcacttttggcaacgtgcctgagcaccgaactggcccttttaggcacagggcacctaatgggggctttttcaggagtcctataaaaacaatgtcatctattccttatcaaccaactcctaccctggggctcaatctgggtaatgatccagaccgaggcacctccatatgagcatcaaacaaatctcttcactgtttcttttttaggactccctttgcaaggagcaactgtaatattgtgggactaacatggatgtaacgtttaaaaaaaagatcaggattattagtaacaattctagttttttcctcccaccttctccctctcctctctcctctatgattttctctctttccccctcccttcctgtacattttcctccactttttttcattactcaacttgttccccaagaaggtagtgtactaggatcctattagtctgcttttcatatactgtacatcaagtataggaaatgtgcactgagtatactaaaagtatatgcaggattaattttacataaaggcctcttctgtaacatttctctattttttgaaatacaattgcaataacttcagtctttttacattcttctgctgcatccatacaatgctccactgctgttgagtgtcctttaactgtggaccaaaggcaacccctgcagtgtttataaaacaattttaagaccattcaggccacataagatgagaatgcaattttgtaggattacaaaaaagccattaatatgccagtcaagactacagttaaaactactcttgcactgcaacagtgcatatgacctttatgtgattgtacagtattaaaagttttttcttatgtacagtaaactttatcatatggcagaagcctctattgtgttaaataaattagtatttcatatatatacatatatatgcacctatataatgtgtatatatataaaaaggcagccattgctattgcaattcatttaataaagctttagtttaaacaaaagtattgtatacaggaactatgtatagtgcaggggttcttttcagttagaaaaggcaggttgctttaatgttattctgactcgcattgtttgccaacagaaaatattttatacttttgttattaaagcatccagggcaatttaatatttgttcctagatgtaactcatttgaataggttttgcatttgttattcagcagtgtataaagctaaccttgataattttacttttaattaattatctaaatgaaaaatgctattagctgaaccacatccacaacagcacatagagctctagaagagttgaaacatagatcattgaaggttaaaaatcctcttccaaagcagcaagtcaatcaatacaataatgatatttggggaggggtgggagcccttaagaactattgatgtggccttaaattactgtcatttattatcctaaagaagaaaacataataaccataatgggctctcaactcaactcccttttttatttagttctatttggaggagttatgtattttttacattagtgccaagtatatagaaggatgacagcaaaaacagtgcctctttgtgcacaatccttttaaagtagcattcttacttgttagaaatgtagaatgaactttgtttgtaatccttaaattaaaatgtggtaagtaggaagcaagaacttattctgtgtttttacgcagccatacacttactttaatctaactcattctgtggctaggattgatataggaatcaacctatgtgatttgctttaggagaaattaaaaggtatattcttaagatatattatattttgatgctaattctgttctggggagcatcttgtattgtcactgttttgtactaaatcttcaaatattgtctactgtgtaaggcagaaaaatttcttatcatgcaaaaaccattttgtttccagggtaacaagtaactaagtgcatgcacaacttgttttcccttgtaacattcatgatctcatttacaactctgattttaaaacaaaaaaatctttacaacaagctatatagggacataccagatgttgcagtgattttagctatcaacaaactgttaaccatgtacaatatttaaaataggcttattttgatgtatcgcctattatacaaacacacaaaacatttttggaggcctcagttatgagtgacagagctttctgtgtataatttgtctaaataatttgtctaataaaaatgttttctaaa

SEQ ID NO: 137458 - DNA, 2739 bp, Homo sapiens
  Payload ID: 6910
  Gene Symbol: GRID2
  Gene Name: glutamate receptor, ionotropic, delta 2
  Uniprot ID: O43424
  ENST ID: ENST00000510992
  CDS Start-End: 1-2739
atggaagttttcccctttctcttggttttgtccgtctggtggtctcgaacctgggactcggcgaatgcggattcgatcattcacatcggagcaatttttgatgaatctgccaaaaaggatgatgaggtatttcgcactgcggttggtgaccttaaccagaatgaggagatcttacagactgagaaaatcacattttcagtgacgtttgttgatggcaacaaccctttccaagcagttcaagaagatatccgtggaatacaggagttcttggacaaagtctctcagcagggaatggatgttgcacttcagaaggtagaaaacaacatcaataaaatgattaccactctctttgacaccatgagaatagaagaactgaatcgctatcgagacactcttaggcgagcgatccttgttatgaatcctgctacagccaaatccttcattactgaggttgtggagactaatttggttgcttttgactgtcactggatcattataaatgaggaaataaacgatgtggacgtacaggaacttgtaagaaggtcaattggaaggttaacgattattcggcagacatttccagttccccagaacataagtcagcggtgtttccgtggcaaccatcgaatatcttcaacattgtgtgatccaaaggatccatttgctcagaatatggagatttccaacctttacatatatgacacggtgcttctgcttgctaatgcttttcataagaagctggaggaccgaaagtggcacagcatggcaagtctgtcatgtatcagaaagaactcaaagccctggcagggtgggcgctccatgttggagaccatcaagaagggtggagttagtgggttgactggagagctagaatttggagaaaatggaggcaatcccaatgtccactttgaaatccttggaaccaactatggagaagagcttggcagaggtgttcgaaaacttggttgctggaatcctgtcacaggtctgaatgggtcactgactgacaagaaattggagaataacatgcgtggagtggttctacgtgtagtaactgttctggaagaaccttttgtgatggtctctgaaaatgtcttgggtaagccgaagaaataccagggcttctccattgatgttttggatgccttatctaactacctgggttttaactacgaaatttacgtagcaccggatcacaaatacggaagcccacaagaagatgggacatggaatggcttggtaggagaacttgtctttaagagagccgacatagggatttctgctttaaccatcactccagatcgtgaaaatgtggtggactttacgacacgttacatggactactcagtgggggtactacttcgaagggctgaaaagacagtggatatgtttgcctgtcttgcaccatttgatctctctctatgggcttgcattgctggcacagtccttctggtgggtctactggtctacctcttgaactggcttaatcccccacgattacaaatgggatcaatgacgtctactactctctacaactccatgtggtttgtgtatggatcttttgtacaacaaggcggggaagtcccgtacacgactctggctacccgaatgatgatgggggcttggtggctatttgctttgattgttatctcatcttacacggcaaacctcgctgctttcctcactattacacgcattgaaagttccatccagtctctccaggacctttccaagcaaacagaaatcccttatggcacagtcctagactctgcggtatatgagcatgtccgcatgaaaggactgaatccttttgagagggacagcatgtattcccaaatgtggcggatgatcaaccgaagcaatggatcggagaacaatgttctggagtcccaggcaggcattcaaaaggtaaaatatggaaattatgctttcgtatgggatgcagctgtattggaatatgtggctatcaatgacccagattgttccttttacaccattggaaatactgttgctgatcggggatatggaattgcattacaacatggcagtccttaccgagatgttttttcacaaaggatcctggagcttcagcagaatggtgacatggacatcctgaagcacaaatggtggcctaagaatggccagtgtgacctgtactcgtcagtggacacaaagcagaaaggaggcgccctggacataaagagctttgcaggggtcttttgtatcctggctgctggaattgtcctctcctgcttcatagccatgctggagacgtggtggaacaagaggaaaggctcccgggttccatcaaaagaggatgacaaggaaattgacctggagcacctccatagacgtgtaaatagcttgtgcacagatgacgacagcccccataaacagttttccacctcgtcaattgatttgacccctctggacattgacactttgccaacacgacaagcactggagcaaatcagtgatttcaggaacactcatattaccacaacaacctttatcccagagcagatccagactcttagccgcacactgtcagctaaagctgcttctggtttcacttttggcaacgtgcctgagcaccgaactggcccttttaggcacagggcacctaatgggggctttttcaggagtcctataaaaacaatgtcatctattccttatcaaccaactcctaccctggggctcaatctgggtaatgatccagaccgaggcacctccatatga

SEQ ID NO: 137459 - DNA, 768 bp, Homo sapiens
  Payload ID: 6910
  Gene Symbol: GRID2
  Gene Name: glutamate receptor, ionotropic, delta 2
  ENST ID: ENST00000502699
  CDS Start-End: 86-577
aacgaggatgccactcagagagaccagagggacaaacaccacagccagtcctgccacagccctgccacaaaaaacctgtgaacttatgaatcaaggcatcttggccctggtcagctccattggctgcacgtcagcaggatccctccagtctttggcagacgccatgcatatcccccacctcttcattcagcgctcaacagctgggaccccaaggagtggctgtggactcacccggagcaacaggaatgatgactacactctctcagttcgcccacctgtctacttgcatgatgttatcctaagagtggtcacagagtatgcctggcagaaattcattatattctatgatagtgaatacgatatccgtggaatacaggagttcttggacaaagtctctcagcagggaatggatgttgcacttcagaaggtagaaaacaacatcaataaaatgattaccactctctttgacaccatgagaatagaagaactgaatcgctatcgagacactcttaggcgagcgatccttgttatgaatcctgctacagccaaatccttcattactgagatgtcgttttagaaaaacacttagggaggaaagaatgtgagtgatttttgttttcatgccagagcacagacacttacgtgacaattggagtaaataaagtaaaaggagcaaatgaaagttgagtgggattcacatagcctgcagtcttcatgatttccacatggaaagagagaattggagctagcatttaaacactaacatac

SEQ ID NO: 137460 - DNA, 579 bp, Homo sapiens
  Payload ID: 6910
  Gene Symbol: GRID2
  Gene Name: glutamate receptor, ionotropic, delta 2
  ENST ID: ENST00000512631
  CDS Start-End: 361-579
acatggccttgtaataccctgcagtggaggatgggaaatgtagtctagctgagtgtcccagcagaaggagagaatggattttgatgatcatctagcagtttctaccacatgaacccttgactttgcttaaaaattgaggttgtggagactaatttggttgcttttgactgtcactggatcattataaatgaggaaataaacgatgtggacgtacaggaacttgtaagaaggtcaattggaaggttaacgattattcggcagacatttccagttccccagaacataagtcagcggtgtttccgtggcaaccatcgaatatcttcaacattgtgtgatccaaaggatccatttgctcagaatatggagatttccaacctttacatatatgacacggtgcttctgcttgctaatgcttttcataagaagctggaggaccgaaagtggcacagcatggcaagtctgtcatgtatcagaaagaactcaaagccctggcagggtgggcgctccatgttggagaccatcaagaagggtggagttagtgggttgactggagagctagaatttggagaaaatggaggc

SEQ ID NO: 137461 - DNA, 443 bp, Homo sapiens
  Payload ID: 6910
  Gene Symbol: GRID2
  Gene Name: glutamate receptor, ionotropic, delta 2
  ENST ID: ENST00000513976
  CDS Start-End: 1-189
ggtggagttagtgggttgactggagagctagaatttggagaaaatggaggcaatcccaatgtccactttgaaatccttggaaccaactatggagaagagcttggcagaggtgttcgaaaaaatgaaagaatcagaccacagggctctactgggaaaatctggccccaggtaaacttcattttcaagtaatttgaccattcatatacattcatcttctgtacacttgcaaagtttgccaaactaaagcacagcagaacaacaacaaaatgttctttccctgaaacagagagagcccaggctaagccagagataacaaggagttgagactaccaaaagaatgctgacttctaaaggttgggctaagagaagagcttttatgtttaggtagaaacaggatgctgattttaaaaaaacttcttcattcattaaacattttccagatg

SEQ ID NO: 137462 - DNA, 4844 bp, Homo sapiens
  Payload ID: 6910
  Gene Symbol: GRID2
  Gene Name: glutamate receptor, ionotropic, delta 2
  ENST ID: ENST00000611049
  CDS Start-End: 9-2789
ttcttgcagcctgtgaacttatgaatcaaggcatcttggccctggtcagctccattggctgcacgtcagcaggatccctccagtctttggcagacgccatgcatatcccccacctcttcattcagcgctcaacagctgggaccccaaggagtggctgtggactcacccggagcaacaggaatgatgactacactctctcagttcgcccacctgtctacttgcatgatgttatcctaagagtggtcacagagtatgcctggcagaaattcattatattctatgatagtgaatacgatatccgtggaatacaggagttcttggacaaagtctctcagcagggaatggatgttgcacttcagaaggtagaaaacaacatcaataaaatgattaccactctctttgacaccatgagaatagaagaactgaatcgctatcgagacactcttaggcgagcgatccttgttatgaatcctgctacagccaaatccttcattactgaggttgtggagactaatttggttgcttttgactgtcactggatcattataaatgaggaaataaacgatgtggacgtacaggaacttgtaagaaggtcaattggaaggttaacgattattcggcagacatttccagttccccagaacataagtcagcggtgtttccgtggcaaccatcgaatatcttcaacattgtgtgatccaaaggatccatttgctcagaatatggagatttccaacctttacatatatgacacggtgcttctgcttgctaatgcttttcataagaagctggaggaccgaaagtggcacagcatggcaagtctgtcatgtatcagaaagaactcaaagccctggcagggtgggcgctccatgttggagaccatcaagaagggtggagttagtgggttgactggagagctagaatttggagaaaatggaggcaatcccaatgtccactttgaaatccttggaaccaactatggagaagagcttggcagaggtgttcgaaaacttggttgctggaatcctgtcacaggtctgaatgggtcactgactgacaagaaattggagaataacatgcgtggagtggttctacgtgtagtaactgttctggaagaaccttttgtgatggtctctgaaaatgtcttgggtaagccgaagaaataccagggcttctccattgatgttttggatgccttatctaactacctgggttttaactacgaaatttacgtagcaccggatcacaaatacggaagcccacaagaagatgggacatggaatggcttggtaggagaacttgtctttaagagagccgacatagggatttctgctttaaccatcactccagatcgtgaaaatgtggtggactttacgacacgttacatggactactcagtgggggtactacttcgaagggctgaaaagacagtggatatgtttgcctgtcttgcaccatttgatctctctctatgggcttgcattgctggcacagtccttctggtgggtctactggtctacctcttgaactggcttaatcccccacgattacaaatgggatcaatgacgtctactactctctacaactccatgtggtttgtgtatggatcttttgtacaacaaggcggggaagtcccgtacacgactctggctacccgaatgatgatgggggcttggtggctatttgctttgattgttatctcatcttacacggcaaacctcgctgctttcctcactattacacgcattgaaagttccatccagtctctccaggacctttccaagcaaacagaaatcccttatggcacagtcctagactctgcggtatatgagcatgtccgcatgaaaggactgaatccttttgagagggacagcatgtattcccaaatgtggcggatgatcaaccgaagcaatggatcggagaacaatgttctggagtcccaggcaggcattcaaaaggtaaaatatggaaattatgctttcgtatgggatgcagctgtattggaatatgtggctatcaatgacccagattgttccttttacaccattggaaatactgttgctgatcggggatatggaattgcattacaacatggcagtccttaccgagatgttttttcacaaaggatcctggagcttcagcagaatggtgacatggacatcctgaagcacaaatggtggcctaagaatggccagtgtgacctgtactcgtcagtggacacaaagcagaaaggaggcgccctggacataaagagctttgcaggggtcttttgtatcctggctgctggaattgtcctctcctgcttcatagccatgctggagacgtggtggaacaagaggaaaggctcccgggttccatcaaaagaggatgacaaggaaattgacctggagcacctccatagacgtgtaaatagcttgtgcacagatgacgacagcccccataaacagttttccacctcgtcaattgatttgacccctctggacattgacactttgccaacacgacaagcactggagcaaatcagtgatttcaggaacactcatattaccacaacaacctttatcccagagcagatccagactcttagccgcacactgtcagctaaagctgcttctggtttcacttttggcaacgtgcctgagcaccgaactggcccttttaggcacagggcacctaatgggggctttttcaggagtcctataaaaacaatgtcatctattccttatcaaccaactcctaccctggggctcaatctgggtaatgatccagaccgaggcacctccatatgagcatcaaacaaatctcttcactgtttcttttttaggactccctttgcaaggagcaactgtaatattgtgggactaacatggatgtaacgtttaaaaaaaagatcaggattattagtaacaattctagttttttcctcccaccttctccctctcctctctcctctatgattttctctctttccccctcccttcctgtacattttcctccactttttttcattactcaacttgttccccaagaaggtagtgtactaggatcctattagtctgcttttcatatactgtacatcaagtataggaaatgtgcactgagtatactaaaagtatatgcaggattaattttacataaaggcctcttctgtaacatttctctattttttgaaatacaattgcaataacttcagtctttttacattcttctgctgcatccatacaatgctccactgctgttgagtgtcctttaactgtggaccaaaggcaacccctgcagtgtttataaaacaattttaagaccattcaggccacataagatgagaatgcaattttgtaggattacaaaaaagccattaatatgccagtcaagactacagttaaaactactcttgcactgcaacagtgcatatgacctttatgtgattgtacagtattaaaagttttttcttatgtacagtaaactttatcatatggcagaagcctctattgtgttaaataaattagtatttcatatatatacatatatatgcacctatataatgtgtatatatataaaaaggcagccattgctattgcaattcatttaataaagctttagtttaaacaaaagtattgtatacaggaactatgtatagtgcaggggttcttttcagttagaaaaggcaggttgctttaatgttattctgactcgcattgtttgccaacagaaaatattttatacttttgttattaaagcatccagggcaatttaatatttgttcctagatgtaactcatttgaataggttttgcatttgttattcagcagtgtataaagctaaccttgataattttacttttaattaattatctaaatgaaaaatgctattagctgaaccacatccacaacagcacatagagctctagaagagttgaaacatagatcattgaaggttaaaaatcctcttccaaagcagcaagtcaatcaatacaataatgatatttggggaggggtgggagcccttaagaactattgatgtggccttaaattactgtcatttattatcctaaagaagaaaacataataaccataatgggctctcaactcaactcccttttttatttagttctatttggaggagttatgtattttttacattagtgccaagtatatagaaggatgacagcaaaaacagtgcctctttgtgcacaatccttttaaagtagcattcttacttgttagaaatgtagaatgaactttgtttgtaatccttaaattaaaatgtggtaagtaggaagcaagaacttattctgtgtttttacgcagccatacacttactttaatctaactcattctgtggctaggattgatataggaatcaacctatgtgatttgctttaggagaaattaaaaggtatattcttaagatatattatattttgatgctaattctgttctggggagcatcttgtattgtcactgttttgtactaaatcttcaaatattgtctactgtgtaaggcagaaaaatttcttatcatgcaaaaaccattttgtttccagggtaacaagtaactaagtgcatgcacaacttgttttcccttgtaacattcatgatctcatttacaactctgattttaaaacaaaaaaatctttacaacaagctatatagggacataccagatgttgcagtgattttagctatcaacaaactgttaaccatgtacaatatttaaaataggcttattttgatgtatcgcctattatacaaacacacaaaacatttttggaggcctcagttatgagtgacagagctttctgtgtataatttgtctaaataatttgtctaataaaaatgttttct

SEQ ID NO: 137463 - DNA, 3636 bp, Homo sapiens
  Payload ID: 6911
  Gene Symbol: GRID2IP
  Gene Name: glutamate receptor, ionotropic, delta 2 (Grid2) interacting protein
  Uniprot ID: A4D2P6
  ENST ID: ENST00000457091
  CDS Start-End: 1-3636
atggccaccactgccacgccggccacgaaccagggctggccagaggactttggcttccggctaggtggctctggcccctgcttcgtcctggaggtggccaaggggagcagcgcgcatgccggaggactgcggccaggagaccagatcctggaggtggaggggctggcggtgggcggtctgagccgcgagcgcctcgtgcgcctggcacggcgctgcccacgtgtgccgcccagtctgggcgtgctcccggctcccgacggtggccccggcccaggatccggccccgcggccccgaccacagtcttgcgggccccgcggtgcggccgcggcctagctctgggccgtgagctgcttcgcctggccggccgcaagcgcccggacgcggtgcaccgagagcgcaggcgcaaggcccaagagttcagccgcaaggtggatgaaatcttgggggaccagccaactgccaaggagcaggtgttcgctgcactgaagcagtttgcagctgagcagcgggtggatgatctggtgtggactctcaccctggcgctgccccgagaggcctgcgggccactcctggacaacctcaggatcttcatccccaagaagcaccgggcgcgcttcgacgaggtggtgtctcagggcctcctgggcaagctgtgccgcgcacgccgggcccagggcgcgcagcgactgcgccggagccgcagcgaggagcggccggagcgcctcctggtgtccacgcgcgccagcgccccgccgcgccgccccgatgagccgcccccgcgcagggcctccttgctggtgggcggcctcgccggccccgggggcgcgcgcaggactgtccgagtctacaaaggcaacaagagcttcggcttcacacttcgcggccacgggcctgtctggatcgagtctgtcctgcctgggagcccagctgacaatgctgccctcaagtcaggtgaccggatcctcttcctcaatggactggacatgaggaactgctcccacgacaaggtggtgtccatgctgcagggcagtggtgccatgcccacgctggtggtggaggaagggctcgtcccatttgccagtgactccgattctctggactcacccaacccgtcgtcggcgctcacctccctgcagtgggtggcggagatcctgccgtccagcatccgggtccaagggaggaccttcagccagcagctggagcacctactcacacctcctgagcgctatggggtctgccgggccctcgagagcttcttccagcacaggaacatcgacaccctcatcgttgacgtctaccctgtgctggacacccctgccaagcaggtcctgtggcagttcatctaccagctgctgacctatgaggagcaggagctctgtcaggagaaaatcgcatgcttcctgggctacacggccatgacagcagagccggagcctgagctggacctggagtccgagcccacgcctgagccccagccgcggagctccctgcgggcttcctccatgtgccgccgcagcctccggtcccagggcctggaggccggcctcagctgcggtcccagcgagtgccctgagatgcctcttcccctgatcccaggcgagcgccaggcaggcgacggcacgtccctccctgagacccccaaccccaagatgatgtcagccgtctatgcagagcttgagtctcgactgaacagcagcttcaaagggaagatggggaccgtgtccaaatcccgggcttcccctccaggccccagcccagcagtcaccacagggcccaggaccctgtccggcgtctcatggcccagcgagcgactcttgccctccccctgctaccacccgctgtgttcggggggtctggcctcccccagcagctctgagtcccacccctacgccagcctggacagcagcagggcaccctccccacagccaggccccgggcccatctgccccgacagccccccaagcccggaccccacccgcccgcccagccgcaggaagctcttcaccttctcccaccctgtgcgaagccgcgatactgaccgcttcctggacgtgctgagcgagcagctgggcccccgggtcaccatcgtggatgatttcctgaccccggagaacgactacgaggagatgagcttccatgatgaccagggcagcttcgtaaccaatgagcggagcagcgccagcgactgcatcagcagcagtgaagaaggcagctccctgacctactcctccatctctgaccacatccccccacccccgctcagccccccaccaccgccacccctgcctttccatgacgctaagcccagctcccgcagctctgatggttcccggggccctgctcaggcgctggccaagcccctcacccaactcagccacccagtccctccaccacccccaccgcccctgcccccacccgtgccctgtgcaccccccatgctgtcccggggcctgggccaccggcgcagtgagaccagccacatgagcgtcaagcgcttgcggtgggaacaggtggagaactcagaaggcaccatctggggtcagctcggggaagactctgactacgataagctgagtgacatggtgaaatacctcgacctggagctccacttcggcacccagaaacctgctaaaccggtgccggggccggagcccttccggaagaaggaggtggtggagatcctgtcccataagaaggcctacaacacctccatcctcttggcacacctgaagctgagccccgcggagctgcgccaggtgctgatgagcatggagccccggcgcctggagcccgcacatctcgcgcagctgctgctcttcgcgcccgacgccgacgaggagcagcgctaccaggccttccgcgaggcgcccggccgcctcagcgagccggaccagttcgtcctgcagatgctgtcagttcccgaatacaagacacgcctgcgcagcctccacttccaggccaccctccaggagaagacagaggagatccgaggcagccttgaatgcttgcgccaggcctccctggagctcaaaaacagtcggaagctcgccaagatcctggagtttgtgttggccatgggcaactatctcaacgatggacagcccaaaaccaacaagactacgggcttcaagatcaactttctgacagagctgaactccaccaagacagtggatgggaagtccaccttcctgcacatccttgccaaatcgctgagccagcacttccctgaactcctgggctttgctcaggacctgcccaccgtgcccctggctgccaaagtgaaccaacgggccctgaccagtgacctggctgacctccatggcactatcagcgagatacaggatgcctgccagagcatttccccctctagcgaggacaagtttgcaatggtcatgtcgtccttcctggagacggcccagccagcacttcgggcgctcgacgggctgcagcgcgaggccatggaggagctgggcaaggcgctggccttctttggggaggattccaaggccaccacctctgaggctttcttcggcatctttgcagagttcatgagcaaattcgagcgagcgctgagtgacctgcaggccggggagggcctgcgcagctccgggatggtttcacccctggcctggtga

SEQ ID NO: 137464 - DNA, 3428 bp, Homo sapiens
  Payload ID: 6911
  Gene Symbol: GRID2IP
  Gene Name: glutamate receptor, ionotropic, delta 2 (Grid2) interacting protein
  ENST ID: ENST00000452113
  CDS Start-End: 54-3116
cagctctcggctctgcagcggagcataggcgaccaccaccgaaagaggccaccatgagctgcctggggatcttcatccccaagaagcaccgggcgcgcttcgacgaggtggtgtctcagggcctcctgggcaagctgtgccgcgcacgccgggcccagggcgcgcagcgactgcgccggagccgcagcgaggagcggccggagcgcctcctggtgtccacgcgcgccagcgccccgccgcgccgccccgatgagccgcccccgcgcagggcctccttgctggtgggcggcctcgccggccccgggggcgcgcgcaggactgtccgagtctacaaaggcaacaagagcttcggcttcacacttcgcggccacgggcctgtctggatcgagtctgtcctgcctgggagcccagctgacaatgctgccctcaagtcaggtgaccggatcctcttcctcaatggactggacatgaggaactgctcccacgacaaggtggtgtccatgctgcagggcagtggtgccatgcccacgctggtggtggaggaagggctcgtcccatttgccagtgactccgattctctggactcacccaacccgtcgtcggcgctcacctccctgcagtgggtggcggagatcctgccgtccagcatccgggtccaagggaggaccttcagccagcagctggagcacctactcacacctcctgagcgctatggggtctgccgggccctcgagagcttcttccagcacaggaacatcgacaccctcatcgttgacgtctaccctgtgctggacacccctgccaagcaggtcctgtggcagttcatctaccagctgctgacctatgaggagcaggagctctgtcaggagaaaatcgcatgcttcctgggctacacggccatgacagagccggagcctgagctggacctggagtccgagcccacgcctgagccccagccgcggagctccctgcgggcttcctccatgtgccgccgcagcctccggtcccagggcctggaggccggcctcagctgcggtcccagcgagtgccctgagatgcctcttcccctgatcccaggcgagcgccaggcaggcgacggcacgtccctccctgagacccccaaccccaagatgatgtcagccgtctatgcagagcttgagtctcgactgaacagcagcttcaaagggaagatggggaccgtgtccaaatcccgggcttcccctccaggccccagcccagcagtcaccacagggcccaggaccctgtccggcgtctcatggcccagcgagcgactcttgccctccccctgctaccacccgctgtgttcggggggtctggcctcccccagcagctctgagtcccacccctacgccagcctggacagcagcagggcaccctccccacagccaggccccgggcccatctgccccgacagccccccaagcccggaccccacccgcccgcccagccgcaggaagctcttcaccttctcccaccctgtgcgaagccgcgatactgaccgcttcctggacgtgctgagcgagcagctgggcccccgggtcaccatcgtggatgatttcctgaccccggagaacgactacgaggagatgagcttccatgatgaccagggcagcttcgtaaccaatgagcggagcagcgccagcgactgcatcagcagcagtgaagaaggcagctccctgacctactcctccatctctgaccacatccccccacccccgctcagccccccaccaccgccacccctgcctttccatgacgctaagcccagctcccgcagctctgatggttcccggggccctgctcaggcgctggccaagcccctcacccaactcagccacccagtccctccaccacccccaccgcccctgcccccacccgtgccctgtgcaccccccatgctgtcccggggcctgggccaccggcgcagtgagaccagccacatgagcgtcaagcgcttgcggtgggaacaggtggagaactcagaaggcaccatctggggtcagctcggggaagactctgactacgataagctgagtgacatggtgaaatacctcgacctggagctccacttcggcacccagaaacctgctaaaccggtgccggggccggagcccttccggaagaaggaggtggtggagatcctgtcccataagaaggcctacaacacctccatcctcttggcacacctgaagctgagccccgcggagctgcgccaggtgctgatgagcatggagccccggcgcctggagcccgcacatctcgcgcagctgctgctcttcgcgcccgacgccgacgaggagcagcgctaccaggccttccgcgaggcgcccggccgcctcagcgagccggaccagttcgtcctgcagatgctgtcagttcccgaatacaagacacgcctgcgcagcctccacttccaggccaccctccaggagaagacagaggagatccgaggcagccttgaatgcttgcgccaggcctccctggagctcaaaaacagtcggaagctcgccaagatcctggagtttgtgttggccatgggcaactatctcaacgatggacagcccaaaaccaacaagactacgggcttcaagatcaactttctgacagagctgaactccaccaagacagtggatgggaagtccaccttcctgcacatccttgccaaatcgctgagccagcacttccctgaactcctgggctttgctcaggacctgcccaccgtgcccctggctgccaaagtgaaccaacgggccctgaccagtgacctggctgacctccatggcactatcagcgagatacaggatgcctgccagagcatttccccctctagcgaggacaagtttgcaatggtcatgtcgtccttcctggagacggcccagccagcacttcgggcgctcgacgggctgcagcgcgaggccatggaggagctgggcaaggcgctggccttctttggggaggattccaaggccaccacctctgaggctttcttcggcatctttgcagagttcatgagcaaattcgagcgagcgctgagtgacctgcaggccggggagggcctgcgcagctccgggatggtttcacccctggcctggtgacagtggccacaccgcgtcctctgcggcctgagcagggagatggaggccgagagggcagcccagacactgccgaggtccggggccactgtgccccgggctctgagcacaccgccagcctctcctgcagctacctcagccgccgagctgtggtcgggccctcctctgccagcccttgttcctacccccaggcccagagccagatgctgtaggagcaggtgctgagtgtgcctgcacatggaggaccgtgctctgtcggcttcttgggcccacttcccacttcgctcccaggctgtcaggggggcctggagggtg

SEQ ID NO: 137465 - DNA, 3215 bp, Homo sapiens
  Payload ID: 6911
  Gene Symbol: GRID2IP
  Gene Name: glutamate receptor, ionotropic, delta 2 (Grid2) interacting protein
  ENST ID: ENST00000435185
  CDS Start-End: 85-3168
ggagtcgcggcgcgctcgctccattcctgggctcggctaccccctgcccttcggcacctgccgcgccgcggtccccggctccagatggggaaggaccagggcttctctcggcactttcggatcttcatccccaagaagcaccgggcgcgcttcgacgaggtggtgtctcagggcctcctgggcaagctgtgccgcgcacgccgggcccagggcgcgcagcgactgcgccggagccgcagcgaggagcggccggagcgcctcctggtgtccacgcgcgccagcgccccgccgcgccgccccgatgagccgcccccgcgcagggcctccttgctggtgggcggcctcgccggccccgggggcgcgcgcaggactgtccgagtctacaaaggcaacaagagcttcggcttcacacttcgcggccacgggcctgtctggatcgagtctgtcctgcctgggagcccagctgacaatgctgccctcaagtcaggtgaccggatcctcttcctcaatggactggacatgaggaactgctcccacgacaaggtggtgtccatgctgcagggcagtggtgccatgcccacgctggtggtggaggaagggctcgtcccatttgccagtgactccgattctctggactcacccaacccgtcgtcggcgctcacctccctgcagtgggtggcggagatcctgccgtccagcatccgggtccaagggaggaccttcagccagcagctggagcacctactcacacctcctgagcgctatggggtctgccgggccctcgagagcttcttccagcacaggaacatcgacaccctcatcgttgacgtctaccctgtgctggacacccctgccaagcaggtcctgtggcagttcatctaccagctgctgacctatgaggagcaggagctctgtcaggagaaaatcgcatgcttcctgggctacacggccatgacagagccggagcctgagctggacctggagtccgagcccacgcctgagccccagccgcggagctccctgcgggcttcctccatgtgccgccgcagcctccggtcccagggcctggaggccggcctcagctgcggtcccagcgagtgccctgagatgcctcttcccctgatcccaggcgagcgccaggcaggcgacggcacgtccctccctgagacccccaaccccaagatgatgtcagccgtctatgcagagcttgagtctcgactgaacagcagcttcaaagggaagatggggaccgtgtccaaatcccgggcttcccctccaggccccagcccagcagtcaccacagggcccaggaccctgtccggcgtctcatggcccagcgagcgactcttgccctccccctgctaccacccgctgtgttcggggggtctggcctcccccagcagctctgagtcccacccctacgccagcctggacagcagcagggcaccctccccacagccaggccccgggcccatctgccccgacagccccccaagcccggaccccacccgcccgcccagccgcaggaagctcttcaccttctcccaccctgtgcgaagccgcgatactgaccgcttcctggacgtgctgagcgagcagctgggcccccgggtcaccatcgtggatgatttcctgaccccggagaacgactacgaggagatgagcttccatgatgaccagggcagcttcgtaaccaatgagcggagcagcgccagcgactgcatcagcagcagtgaagaaggcagctccctgacctactcctccatctctgaccacatccccccacccccgctcagccccccaccaccgccacccctgcctttccatgacgctaagcccagctcccgcagctctgatggttcccggggccctgctcaggcgctggccaagcccctcacccaactcagccacccagtccctccaccacccccaccgcccctgcccccacccgtgccctgtgcaccccccatgctgtcccggggcctgggccaccggcgcagtgagaccagccacatgagcgtcaagcgcttgcggtgggaacaggtggagaactcagaaggcaccatctggggtcagctcggggaagactctgactacgataagctgagtgacatggtgaaatacctcgacctggagctccacttcggcacccagaaacctgctaaaccggtgccggggccggagcccttccggaagaaggaggtggtggagatcctgtcccataagaaggcctacaacacctccatcctcttggcacacctgaagctgagccccgcggagctgcgccaggtgctgatgagcatggagccccggcgcctggagcccgcacatctcgcgcagctgctgctcttcgcgcccgacgccgacgaggagcagcgctaccaggccttccgcgaggcgcccggccgcctcagcgagccggaccagttcgtcctgcagatgctgtcagttcccgaatacaagacacgcctgcgcagcctccacttccaggccaccctccaggagaagacagaggagatccgaggcagccttgaatgcttgcgccaggcctccctggagctcaaaaacagtcggaagctcgccaagatcctggagtttgtgttggccatgggcaactatctcaacgatggacagcccaaaaccaacaagactacgggcttcaagatcaactttctgacagagctgaactccaccaagacagtggatgggaagtccaccttcctgcacatccttgccaaatcgctgagccagcacttccctgaactcctgggctttgctcaggacctgcccaccgtgcccctggctgccaaagtgaaccaacgggccctgaccagtgacctggctgacctccatggcactatcagcgagatacaggatgcctgccagagcatttccccctctagcgaggacaagtttgcaatggtcatgtcgtccttcctggagacggcccagccagcacttcgggcgctcgacgggctgcagcgcgaggccatggaggagctgggcaaggcgctggccttctttggggaggattccaaggccaccacctctgaggctttcttcggcatctttgcagagttcatgagcaaattcgagcgagcgctgagtgacctgcaggccggggagggcctgcgcagctccgggatggtttcacccctggcctggtgacagtggccacaccgcgtcctctgcggcctgagcagggagatggaggc

SEQ ID NO: 137466 - DNA, 2637 bp, Homo sapiens
  Payload ID: 6912
  Gene Symbol: GRIK1
  Gene Name: glutamate receptor, ionotropic, kainate 1
  ENST ID: ENST00000309434
  CDS Start-End: 1-2637
ggagggatttttgaaacagtggaaaatgagcctgttaatgttgaagaattagctttcaagtttgcagtcaccagcattaacagaaaccgaaccctgatgcctaacaccacattaacctatgacatccagagaattaacctttttgatagttttgaagcctcgcggagagcatgtgaccagctggctcttggtgtggctgctctctttggcccttcccatagctcctccgtcagtgctgtgcagtctatttgcaatgctctcgaagttccacacatacagacccgctggaaacacccctcggtggacaacaaagatttgttttacatcaacctttacccagattatgcagctatcagcagggcgatcctggatctggtcctctattacaactggaaaacagtgacagtggtgtatgaagacagcacaggtctaattcgtctacaagagctcatcaaagctccctccagatataatattaaaatcaaaatccgccagctgccctctgggaataaagatgccaagcctttactcaaggagatgaagaaaggcaaggagttctatgtgatatttgattgttcacatgaaacagccgctgaaatccttaagcagattctgttcatgggcatgatgaccgagtactatcactactttttcacaaccctggacttatttgctttggatctggaactctataggtacagtggcgtaaacatgaccgggtttcggctgcttaacattgacaaccctcacgtgtcatccatcattgagaagtggtccatggagagactgcaggccccacccaggcccgagactggccttttggatggcatgatgacaactgaagcggctctgatgtacgatgctgtgtacatggtggccattgcctcgcaccgggcatcccagctgaccgtcagctccctgcagtgccatagacataagccatggcgcctcggacccagatttatgaacctgatcaaagaggcccggtgggatggcttgactgggcatatcacctttaataaaaccaatggcttgaggaaggattttgatctggacattattagtctcaaagaggaaggaactgaaaaggctgctggcgaagtgtctaaacacttgtataaagtgtggaagaagattgggatttggaattccaacagtgggcttaacatgacggacagcaacaaagacaagtccagcaatatcactgattcattggccaacagaacactcattgtcaccaccattctggaagaaccctatgttatgtacaggaaatctgataagcctctatatggaaatgacagatttgaaggatattgcctagacctgttgaaagaattgtcaaacatcctgggtttcatttatgatgttaaactagttcccgatggcaaatatggggcccagaatgacaaaggggagtggaacgggatggttaaagaactcatagatcacagggctgacctggcagtggctcctcttaccatcacctacgtgcgggagaaagtcattgacttctccaaacccttcatgaccctaggcatcagcattctctaccggaagcccaatggtaccaatccaggcgttttctccttcctcaaccccctgtctccagatatttggatgtatgtgctcttagcctgcttgggagtcagctgtgtactctttgtgattgcaaggtttacaccctacgagtggtataacccccacccatgcaaccctgactcagacgtggtggaaaacaattttactttactaaatagtttctggtttggagttggagctctcatgcagcaaggatcagagctgatgcccaaagctctatcgaccagaatagttggagggatatggtggtttttcaccctaatcatcatttcatcctacacggccaatctggctgccttcttgacagtagagagaatggaatcccccatagattcggcagatgatctggcaaagcaaaccaagatagaatatggggcggttagagatggatcaacaatgaccttcttcaagaaatcaaaaatctccacctatgagaagatgtgggctttcatgagcagcaggcagcagaccgccctggtaagaaacagtgatgaggggatccagagagtgctcaccacagactacgcgctgctgatggagtccaccagcattgagtatgtgacgcagagaaactgcaacctcactcagatcgggggcctcattgactccaaaggttacggagtgggaacacctattggttctccttaccgggataaaattactattgctattcttcaactccaagaagaagggaagctgcatatgatgaaagagaagtggtggcgtgggaatggctgccccgaggaagacaacaaagaagccagtgccctgggagtggaaaatattggaggcatcttcattgttctggctgccggactggtcctttctgtatttgtagctattggagaattcatatacaaatcacggaagaataatgatattgaacaggctttttgtttcttttatggactgcaatgtaagcaaacccatccaaccaactccacttctggaactactttatctacggatttagaatgtggtaaattaattcgagaggagagagggattcgaaaacagtcctcagttcatactgtg

SEQ ID NO: 137467 - DNA, 3179 bp, Homo sapiens
  Payload ID: 6912
  Gene Symbol: GRIK1
  Gene Name: glutamate receptor, ionotropic, kainate 1
  ENST ID: ENST00000327783
  CDS Start-End: 33-2882
tgtatctcggcatgaattaagaagctaggaagatggagcacggcacactcctcgcccagcccgggctctggaccagggacaccagctgggcactcctctatttcctctgctatatcctccctcagaccgccccgcaagtactcaggatcggagggatttttgaaacagtggaaaatgagcctgttaatgttgaagaattagctttcaagtttgcagtcaccagcattaacagaaaccgaaccctgatgcctaacaccacattaacctatgacatccagagaattaacctttttgatagttttgaagcctcgcggagagcatgtgaccagctggctcttggtgtggctgctctctttggcccttcccatagctcctccgtcagtgctgtgcagtctatttgcaatgctctcgaagttccacacatacagacccgctggaaacacccctcggtggacaacaaagatttgttttacatcaacctttacccagattatgcagctatcagcagggcgatcctggatctggtcctctattacaactggaaaacagtgacagtggtgtatgaagacagcacaggtctaattcgtctacaagagctcatcaaagctccctccagatataatattaaaatcaaaatccgccagctgccctctgggaataaagatgccaagcctttactcaaggagatgaagaaaggcaaggagttctatgtgatatttgattgttcacatgaaacagccgctgaaatccttaagcagattctgttcatgggcatgatgaccgagtactatcactactttttcacaaccctggacttatttgctttggatctggaactctataggtacagtggcgtaaacatgaccgggtttcggctgcttaacattgacaaccctcacgtgtcatccatcattgagaagtggtccatggagagactgcaggccccacccaggcccgagactggccttttggatggcatgatgacaactgaagcggctctgatgtacgatgctgtgtacatggtggccattgcctcgcaccgggcatcccagctgaccgtcagctccctgcagtgccatagacataagccatggcgcctcggacccagatttatgaacctgatcaaagaggcccggtgggatggcttgactgggcatatcacctttaataaaaccaatggcttgaggaaggattttgatctggacattattagtctcaaagaggaaggaactgaaaaggctgctggcgaagtgtctaaacacttgtataaagtgtggaagaagattgggatttggaattccaacagtgggcttaacatgacggacagcaacaaagacaagtccagcaatatcactgattcattggccaacagaacactcattgtcaccaccattctggaagaaccctatgttatgtacaggaaatctgataagcctctatatggaaatgacagatttgaaggatattgcctagacctgttgaaagaattgtcaaacatcctgggtttcatttatgatgttaaactagttcccgatggcaaatatggggcccagaatgacaaaggggagtggaacgggatggttaaagaactcatagatcacagggctgacctggcagtggctcctcttaccatcacctacgtgcgggagaaagtcattgacttctccaaacccttcatgaccctaggcatcagcattctctaccggaagcccaatggtaccaatccaggcgttttctccttcctcaaccccctgtctccagatatttggatgtatgtgctcttagcctgcttgggagtcagctgtgtactctttgtgattgcaaggtttacaccctacgagtggtataacccccacccatgcaaccctgactcagacgtggtggaaaacaattttactttactaaatagtttctggtttggagttggagctctcatgcagcaaggatcagagctgatgcccaaagctctatcgaccagaatagttggagggatatggtggtttttcaccctaatcatcatttcatcctacacggccaatctggctgccttcttgacagtagagagaatggaatcccccatagattcggcagatgatctggcaaagcaaaccaagatagaatatggggcggttagagatggatcaacaatgaccttcttcaagaaatcaaaaatctccacctatgagaagatgtgggctttcatgagcagcaggcagcagaccgccctggtaagaaacagtgatgaggggatccagagagtgctcaccacagactacgcgctgctgatggagtccaccagcattgagtatgtgacgcagagaaactgcaacctcactcagatcgggggcctcattgactccaaaggttacggagtgggaacacctattggttctccttaccgggataaaattactattgctattcttcaactccaagaagaagggaagctgcatatgatgaaagagaagtggtggcgtgggaatggctgccccgaggaagacaacaaagaagccagtgccctgggagtggaaaatattggaggcatcttcattgttctggctgccggactggtcctttctgtatttgtagctattggagaattcatatacaaatcacggaagaataatgatattgaacagaaaggaaagtcatcaagaattagattttattttaggaacaaagtaaggtttcatgggagaaaaaaacaaagccttggtgtagagaagtgtctctctttcaacgctatcatggaagaactgggaatctcactgaagaatcagaaaaaaataaagaaaaagtcaagaactaaggggaaatcttccttcacaagtatccttacttgtcatcagagacgaactcagagaaaagagactgtggcgtgatccaaggaaacgcctgtaggaagaaaaaggatgcattccctacagatttttggagaaaggatttctgaggagtgtgtgatgtgtttccatatatctatatccataactctgattatgaatacagatataagaaatacaaaagtttaaaaagctcacatagatatgacttgggaagtgacaccagttcttttaaaataaatttgtatgctcaattattttgcattttttctttttccccaataaattgttgtgtgtgctttctaaataataataaaacaacagggtttttttccagaa

SEQ ID NO: 137468 - DNA, 2712 bp, Homo sapiens
  Payload ID: 6912
  Gene Symbol: GRIK1
  Gene Name: glutamate receptor, ionotropic, kainate 1
  ENST ID: ENST00000389124
  CDS Start-End: 33-2648
tgtatctcggcatgaattaagaagctaggaagatggagcacggcacactcctcgcccagcccgggctctggaccagggacaccagctgggcactcctctatttcctctgctatatcctccctcagaccgccccgcaagtactcaggatcggagggatttttgaaacagtggaaaatgagcctgttaatgttgaagaattagctttcaagtttgcagtcaccagcattaacagaaaccgaaccctgatgcctaacaccacattaacctatgacatccagagaattaacctttttgatagttttgaagcctcgcggagagcatgtgaccagctggctcttggtgtggctgctctctttggcccttcccatagctcctccgtcagtgctgtgcagtctatttgcaatgctctcgaagttccacacatacagacccgctggaaacacccctcggtggacaacaaagatttgttttacatcaacctttacccagattatgcagctatcagcagggcgatcctggatctggtcctctattacaactggaaaacagtgacagtggtgtatgaagacagcacaggtctaattcgtctacaagagctcatcaaagctccctccagatataatattaaaatcaaaatccgccagctgccctctgggaataaagatgccaagcctttactcaaggagatgaagaaaggcaaggagttctatgtgatatttgattgttcacatgaaacagccgctgaaatccttaagcagattctgttcatgggcatgatgaccgagtactatcactactttttcacaaccctggacttatttgctttggatctggaactctataggtacagtggcgtaaacatgaccgggtttcggctgcttaacattgacaaccctcacgtgtcatccatcattgagaagtggtccatggagagactgcaggccccacccaggcccgagactggccttttggatggcatgatgacaactgaagcggctctgatgtacgatgctgtgtacatggtggccattgcctcgcaccgggcatcccagctgaccgtcagctccctgcagtgccatagacataagccatggcgcctcggacccagatttatgaacctgatcaaagaggcccggtgggatggcttgactgggcatatcacctttaataaaaccaatggcttgaggaaggattttgatctggacattattagtctcaaagaggaaggaactgaaaaggctgctggcgaagtgtctaaacacttgtataaagtgtggaagaagattgggatttggaattccaacagtgggcttaacatgacggacagcaacaaagacaagtccagcaatatcactgattcattggccaacagaacactcattgtcaccaccattctggaagaaccctatgttatgtacaggaaatctgataagcctctatatggaaatgacagatttgaaggatattgcctagacctgttgaaagaattgtcaaacatcctgggtttcatttatgatgttaaactagttcccgatggcaaatatggggcccagaatgacaaaggggagtggaacgggatggttaaagaactcatagatcacagggctgacctggcagtggctcctcttaccatcacctacgtgcgggagaaagtcattgacttctccaaacccttcatgaccctaggcatcagcattctctaccggaagcccaatggtaccaatccaggcgttttctccttcctcaaccccctgtctccagatatttggatgtatgtgctcttagcctgcttgggagtcagctgtgtactctttgtgattgcaaggtttacaccctacgagtggtataacccccacccatgcaaccctgactcagacgtggtggaaaacaattttactttactaaatagtttctggtttggagttggagctctcatgcagcaaggatcagagctgatgcccaaagctctatcgaccagaatagttggagggatatggtggtttttcaccctaatcatcatttcatcctacacggccaatctggctgccttcttgacagtagagagaatggaatcccccatagattcggcagatgatctggcaaagcaaaccaagatagaatatggggcggttagagatggatcaacaatgaccttcttcaagaaatcaaaaatctccacctatgagaagatgtgggctttcatgagcagcaggcagcagaccgccctggtaagaaacagtgatgaggggatccagagagtgctcaccacagactacgcgctgctgatggagtccaccagcattgagtatgtgacgcagagaaactgcaacctcactcagatcgggggcctcattgactccaaaggttacggagtgggaacacctattggttctccttaccgggataaaattactattgctattcttcaactccaagaagaagggaagctgcatatgatgaaagagaagtggtggcgtgggaatggctgccccgaggaagacaacaaagaagccagtgccctgggagtggaaaatattggaggcatcttcattgttctggctgccggactggtcctttctgtatttgtagctattggagaattcatatacaaatcacggaagaataatgatattgaacagcattactgaagtgtccgtatgccttgataatcctatcaatgtttggatcatctcagtgggggaaatgacttaa

SEQ ID NO: 137469 - DNA, 3140 bp, Homo sapiens
  Payload ID: 6912
  Gene Symbol: GRIK1
  Gene Name: glutamate receptor, ionotropic, kainate 1
  Uniprot ID: P39086
  ENST ID: ENST00000389125
  CDS Start-End: 126-2843
agcgcgcagcgtgcttggaaccggagcatccagagaggatgaggcggggacccggcccaagttgggtgcatctctcgggcgtccggcagcggctgtatctcggcatgaattaagaagctaggaagatggagcacggcacactcctcgcccagcccgggctctggaccagggacaccagctgggcactcctctatttcctctgctatatcctccctcagaccgccccgcaagtactcaggatcggagggatttttgaaacagtggaaaatgagcctgttaatgttgaagaattagctttcaagtttgcagtcaccagcattaacagaaaccgaaccctgatgcctaacaccacattaacctatgacatccagagaattaacctttttgatagttttgaagcctcgcggagagcatgtgaccagctggctcttggtgtggctgctctctttggcccttcccatagctcctccgtcagtgctgtgcagtctatttgcaatgctctcgaagttccacacatacagacccgctggaaacacccctcggtggacaacaaagatttgttttacatcaacctttacccagattatgcagctatcagcagggcgatcctggatctggtcctctattacaactggaaaacagtgacagtggtgtatgaagacagcacaggtctaattcgtctacaagagctcatcaaagctccctccagatataatattaaaatcaaaatccgccagctgccctctgggaataaagatgccaagcctttactcaaggagatgaagaaaggcaaggagttctatgtgatatttgattgttcacatgaaacagccgctgaaatccttaagcagattctgttcatgggcatgatgaccgagtactatcactactttttcacaaccctggacttatttgctttggatctggaactctataggtacagtggcgtaaacatgaccgggtttcggctgcttaacattgacaaccctcacgtgtcatccatcattgagaagtggtccatggagagactgcaggccccacccaggcccgagactggccttttggatggcatgatgacaactgaagcggctctgatgtacgatgctgtgtacatggtggccattgcctcgcaccgggcatcccagctgaccgtcagctccctgcagtgccatagacataagccatggcgcctcggacccagatttatgaacctgatcaaagaggcccggtgggatggcttgactgggcatatcacctttaataaaaccaatggcttgaggaaggattttgatctggacattattagtctcaaagaggaaggaactgaaaagattgggatttggaattccaacagtgggcttaacatgacggacagcaacaaagacaagtccagcaatatcactgattcattggccaacagaacactcattgtcaccaccattctggaagaaccctatgttatgtacaggaaatctgataagcctctatatggaaatgacagatttgaaggatattgcctagacctgttgaaagaattgtcaaacatcctgggtttcatttatgatgttaaactagttcccgatggcaaatatggggcccagaatgacaaaggggagtggaacgggatggttaaagaactcatagatcacagggctgacctggcagtggctcctcttaccatcacctacgtgcgggagaaagtcattgacttctccaaacccttcatgaccctaggcatcagcattctctaccggaagcccaatggtaccaatccaggcgttttctccttcctcaaccccctgtctccagatatttggatgtatgtgctcttagcctgcttgggagtcagctgtgtactctttgtgattgcaaggtttacaccctacgagtggtataacccccacccatgcaaccctgactcagacgtggtggaaaacaattttactttactaaatagtttctggtttggagttggagctctcatgcagcaaggatcagagctgatgcccaaagctctatcgaccagaatagttggagggatatggtggtttttcaccctaatcatcatttcatcctacacggccaatctggctgccttcttgacagtagagagaatggaatcccccatagattcggcagatgatctggcaaagcaaaccaagatagaatatggggcggttagagatggatcaacaatgaccttcttcaagaaatcaaaaatctccacctatgagaagatgtgggctttcatgagcagcaggcagcagaccgccctggtaagaaacagtgatgaggggatccagagagtgctcaccacagactacgcgctgctgatggagtccaccagcattgagtatgtgacgcagagaaactgcaacctcactcagatcgggggcctcattgactccaaaggttacggagtgggaacacctattggttctccttaccgggataaaattactattgctattcttcaactccaagaagaagggaagctgcatatgatgaaagagaagtggtggcgtgggaatggctgccccgaggaagacaacaaagaagccagtgccctgggagtggaaaatattggaggcatcttcattgttctggctgccggactggtcctttctgtatttgtagctattggagaattcatatacaaatcacggaagaataatgatattgaacagtgtctctctttcaacgctatcatggaagaactgggaatctcactgaagaatcagaaaaaaataaagaaaaagtcaagaactaaggggaaatcttccttcacaagtatccttacttgtcatcagagacgaactcagagaaaagagactgtggcgtgatccaaggaaacgcctgtaggaagaaaaaggatgcattccctacagatttttggagaaaggatttctgaggagtgtgtgatgtgtttccatatatctatatccataactctgattatgaatacagatataagaaatacaaaagtttaaaaagctcacatagatatgacttgggaagtgacaccagttcttttaaaataaatttgtatgctcaattattttgcattttttctttttccccaataaattgttgtgtgtgctttctaaataataataaaacaacagggtttttttccagaa

SEQ ID NO: 137470 - DNA, 3472 bp, Homo sapiens
  Payload ID: 6912
  Gene Symbol: GRIK1
  Gene Name: glutamate receptor, ionotropic, kainate 1
  Uniprot ID: P39086
  ENST ID: ENST00000399907
  CDS Start-End: 413-3169
ctttcccccttttccctcctctgtctgtgcctatcccccgacttttgcatctgaccaaaggacgaatgagggagacgttcctgcagatcggggcagcaactttcctcagctggtctctgggctccgggagccagagagcgctgatcctccgcggtctgcggcccatggaagaggaggaggaggagccgtgatgggctagcgacagcactgaggagccccgagagagctcagccttgccagccagctccgcggtcccacgcgggttccctcgagctcgctccgtggggagcgcgcagcgtgcttggaaccggagcatccagagaggatgaggcggggacccggcccaagttgggtgcatctctcgggcgtccggcagcggctgtatctcggcatgaattaagaagctaggaagatggagcacggcacactcctcgcccagcccgggctctggaccagggacaccagctgggcactcctctatttcctctgctatatcctccctcagaccgccccgcaagtactcaggatcggagggatttttgaaacagtggaaaatgagcctgttaatgttgaagaattagctttcaagtttgcagtcaccagcattaacagaaaccgaaccctgatgcctaacaccacattaacctatgacatccagagaattaacctttttgatagttttgaagcctcgcggagagcatgtgaccagctggctcttggtgtggctgctctctttggcccttcccatagctcctccgtcagtgctgtgcagtctatttgcaatgctctcgaagttccacacatacagacccgctggaaacacccctcggtggacaacaaagatttgttttacatcaacctttacccagattatgcagctatcagcagggcgatcctggatctggtcctctattacaactggaaaacagtgacagtggtgtatgaagacagcacaggtctaattcgtctacaagagctcatcaaagctccctccagatataatattaaaatcaaaatccgccagctgccctctgggaataaagatgccaagcctttactcaaggagatgaagaaaggcaaggagttctatgtgatatttgattgttcacatgaaacagccgctgaaatccttaagcagattctgttcatgggcatgatgaccgagtactatcactactttttcacaaccctggacttatttgctttggatctggaactctataggtacagtggcgtaaacatgaccgggtttcggctgcttaacattgacaaccctcacgtgtcatccatcattgagaagtggtccatggagagactgcaggccccacccaggcccgagactggccttttggatggcatgatgacaactgaagcggctctgatgtacgatgctgtgtacatggtggccattgcctcgcaccgggcatcccagctgaccgtcagctccctgcagtgccatagacataagccatggcgcctcggacccagatttatgaacctgatcaaagaggcccggtgggatggcttgactgggcatatcacctttaataaaaccaatggcttgaggaaggattttgatctggacattattagtctcaaagaggaaggaactgaaaaggctgctggcgaagtgtctaaacacttgtataaagtgtggaagaagattgggatttggaattccaacagtgggcttaacatgacggacagcaacaaagacaagtccagcaatatcactgattcattggccaacagaacactcattgtcaccaccattctggaagaaccctatgttatgtacaggaaatctgataagcctctatatggaaatgacagatttgaaggatattgcctagacctgttgaaagaattgtcaaacatcctgggtttcatttatgatgttaaactagttcccgatggcaaatatggggcccagaatgacaaaggggagtggaacgggatggttaaagaactcatagatcacagggctgacctggcagtggctcctcttaccatcacctacgtgcgggagaaagtcattgacttctccaaacccttcatgaccctaggcatcagcattctctaccggaagcccaatggtaccaatccaggcgttttctccttcctcaaccccctgtctccagatatttggatgtatgtgctcttagcctgcttgggagtcagctgtgtactctttgtgattgcaaggtttacaccctacgagtggtataacccccacccatgcaaccctgactcagacgtggtggaaaacaattttactttactaaatagtttctggtttggagttggagctctcatgcagcaaggatcagagctgatgcccaaagctctatcgaccagaatagttggagggatatggtggtttttcaccctaatcatcatttcatcctacacggccaatctggctgccttcttgacagtagagagaatggaatcccccatagattcggcagatgatctggcaaagcaaaccaagatagaatatggggcggttagagatggatcaacaatgaccttcttcaagaaatcaaaaatctccacctatgagaagatgtgggctttcatgagcagcaggcagcagaccgccctggtaagaaacagtgatgaggggatccagagagtgctcaccacagactacgcgctgctgatggagtccaccagcattgagtatgtgacgcagagaaactgcaacctcactcagatcgggggcctcattgactccaaaggttacggagtgggaacacctattggttctccttaccgggataaaattactattgctattcttcaactccaagaagaagggaagctgcatatgatgaaagagaagtggtggcgtgggaatggctgccccgaggaagacaacaaagaagccagtgccctgggagtggaaaatattggaggcatcttcattgttctggctgccggactggtcctttctgtatttgtagctattggagaattcatatacaaatcacggaagaataatgatattgaacaggctttttgtttcttttatggactgcaatgtaagcaaacccatccaaccaactccacttctggaactactttatctacggatttagaatgtggtaaattaattcgagaggagagagggattcgaaaacagtcctcagttcatactgtgtaatcagtttaaaaaaaaaaaaaaagatgtgcccagtagaaaatgtttttgctaattggtgttgttgatatttgtatttgctaagcataaatagccacaattctctattcctttaggatagcaaaactcatgtattctagacattgaaatgaatacactggaaagatacttgcactgtatgttgaagcaggggcatattaggggtataaagacttctagaaatgtgtatttacaggaatcttctctgtcccactcatcatcttagttctatcttcatgcattaaaaataagtaactcttccttcat

SEQ ID NO: 137471 - DNA, 3427 bp, Homo sapiens
  Payload ID: 6912
  Gene Symbol: GRIK1
  Gene Name: glutamate receptor, ionotropic, kainate 1
  ENST ID: ENST00000399909
  CDS Start-End: 413-3124
ctttcccccttttccctcctctgtctgtgcctatcccccgacttttgcatctgaccaaaggacgaatgagggagacgttcctgcagatcggggcagcaactttcctcagctggtctctgggctccgggagccagagagcgctgatcctccgcggtctgcggcccatggaagaggaggaggaggagccgtgatgggctagcgacagcactgaggagccccgagagagctcagccttgccagccagctccgcggtcccacgcgggttccctcgagctcgctccgtggggagcgcgcagcgtgcttggaaccggagcatccagagaggatgaggcggggacccggcccaagttgggtgcatctctcgggcgtccggcagcggctgtatctcggcatgaattaagaagctaggaagatggagcacggcacactcctcgcccagcccgggctctggaccagggacaccagctgggcactcctctatttcctctgctatatcctccctcagaccgccccgcaagtactcaggatcggagggatttttgaaacagtggaaaatgagcctgttaatgttgaagaattagctttcaagtttgcagtcaccagcattaacagaaaccgaaccctgatgcctaacaccacattaacctatgacatccagagaattaacctttttgatagttttgaagcctcgcggagagcatgtgaccagctggctcttggtgtggctgctctctttggcccttcccatagctcctccgtcagtgctgtgcagtctatttgcaatgctctcgaagttccacacatacagacccgctggaaacacccctcggtggacaacaaagatttgttttacatcaacctttacccagattatgcagctatcagcagggcgatcctggatctggtcctctattacaactggaaaacagtgacagtggtgtatgaagacagcacaggtctaattcgtctacaagagctcatcaaagctccctccagatataatattaaaatcaaaatccgccagctgccctctgggaataaagatgccaagcctttactcaaggagatgaagaaaggcaaggagttctatgtgatatttgattgttcacatgaaacagccgctgaaatccttaagcagattctgttcatgggcatgatgaccgagtactatcactactttttcacaaccctggacttatttgctttggatctggaactctataggtacagtggcgtaaacatgaccgggtttcggctgcttaacattgacaaccctcacgtgtcatccatcattgagaagtggtccatggagagactgcaggccccacccaggcccgagactggccttttggatggcatgatgacaactgaagcggctctgatgtacgatgctgtgtacatggtggccattgcctcgcaccgggcatcccagctgaccgtcagctccctgcagtgccatagacataagccatggcgcctcggacccagatttatgaacctgatcaaagaggcccggtgggatggcttgactgggcatatcacctttaataaaaccaatggcttgaggaaggattttgatctggacattattagtctcaaagaggaaggaactgaaaagattgggatttggaattccaacagtgggcttaacatgacggacagcaacaaagacaagtccagcaatatcactgattcattggccaacagaacactcattgtcaccaccattctggaagaaccctatgttatgtacaggaaatctgataagcctctatatggaaatgacagatttgaaggatattgcctagacctgttgaaagaattgtcaaacatcctgggtttcatttatgatgttaaactagttcccgatggcaaatatggggcccagaatgacaaaggggagtggaacgggatggttaaagaactcatagatcacagggctgacctggcagtggctcctcttaccatcacctacgtgcgggagaaagtcattgacttctccaaacccttcatgaccctaggcatcagcattctctaccggaagcccaatggtaccaatccaggcgttttctccttcctcaaccccctgtctccagatatttggatgtatgtgctcttagcctgcttgggagtcagctgtgtactctttgtgattgcaaggtttacaccctacgagtggtataacccccacccatgcaaccctgactcagacgtggtggaaaacaattttactttactaaatagtttctggtttggagttggagctctcatgcagcaaggatcagagctgatgcccaaagctctatcgaccagaatagttggagggatatggtggtttttcaccctaatcatcatttcatcctacacggccaatctggctgccttcttgacagtagagagaatggaatcccccatagattcggcagatgatctggcaaagcaaaccaagatagaatatggggcggttagagatggatcaacaatgaccttcttcaagaaatcaaaaatctccacctatgagaagatgtgggctttcatgagcagcaggcagcagaccgccctggtaagaaacagtgatgaggggatccagagagtgctcaccacagactacgcgctgctgatggagtccaccagcattgagtatgtgacgcagagaaactgcaacctcactcagatcgggggcctcattgactccaaaggttacggagtgggaacacctattggttctccttaccgggataaaattactattgctattcttcaactccaagaagaagggaagctgcatatgatgaaagagaagtggtggcgtgggaatggctgccccgaggaagacaacaaagaagccagtgccctgggagtggaaaatattggaggcatcttcattgttctggctgccggactggtcctttctgtatttgtagctattggagaattcatatacaaatcacggaagaataatgatattgaacaggctttttgtttcttttatggactgcaatgtaagcaaacccatccaaccaactccacttctggaactactttatctacggatttagaatgtggtaaattaattcgagaggagagagggattcgaaaacagtcctcagttcatactgtgtaatcagtttaaaaaaaaaaaaaaagatgtgcccagtagaaaatgtttttgctaattggtgttgttgatatttgtatttgctaagcataaatagccacaattctctattcctttaggatagcaaaactcatgtattctagacattgaaatgaatacactggaaagatacttgcactgtatgttgaagcaggggcatattaggggtataaagacttctagaaatgtgtatttacaggaatcttctctgtcccactcatcatcttagttctatcttcatgcattaaaaataagtaactcttccttcat

SEQ ID NO: 137472 - DNA, 3234 bp, Homo sapiens
  Payload ID: 6912
  Gene Symbol: GRIK1
  Gene Name: glutamate receptor, ionotropic, kainate 1
  ENST ID: ENST00000399913
  CDS Start-End: 175-2937
agccagctccgcggtcccacgcgggttccctcgagctcgctccgtggggagcgcgcagcgtgcttggaaccggagcatccagagaggatgaggcggggacccggcccaagttgggtgcatctctcgggcgtccggcagcggctgtatctcggcatgaattaagaagctaggaagatggagcacggcacactcctcgcccagcccgggctctggaccagggacaccagctgggcactcctctatttcctctgctatatcctccctcagaccgccccgcaagtactcaggatcggagggatttttgaaacagtggaaaatgagcctgttaatgttgaagaattagctttcaagtttgcagtcaccagcattaacagaaaccgaaccctgatgcctaacaccacattaacctatgacatccagagaattaacctttttgatagttttgaagcctcgcggagagcatgtgaccagctggctcttggtgtggctgctctctttggcccttcccatagctcctccgtcagtgctgtgcagtctatttgcaatgctctcgaagttccacacatacagacccgctggaaacacccctcggtggacaacaaagatttgttttacatcaacctttacccagattatgcagctatcagcagggcgatcctggatctggtcctctattacaactggaaaacagtgacagtggtgtatgaagacagcacaggtctaattcgtctacaagagctcatcaaagctccctccagatataatattaaaatcaaaatccgccagctgccctctgggaataaagatgccaagcctttactcaaggagatgaagaaaggcaaggagttctatgtgatatttgattgttcacatgaaacagccgctgaaatccttaagcagattctgttcatgggcatgatgaccgagtactatcactactttttcacaaccctggacttatttgctttggatctggaactctataggtacagtggcgtaaacatgaccgggtttcggctgcttaacattgacaaccctcacgtgtcatccatcattgagaagtggtccatggagagactgcaggccccacccaggcccgagactggccttttggatggcatgatgacaactgaagcggctctgatgtacgatgctgtgtacatggtggccattgcctcgcaccgggcatcccagctgaccgtcagctccctgcagtgccatagacataagccatggcgcctcggacccagatttatgaacctgatcaaagaggcccggtgggatggcttgactgggcatatcacctttaataaaaccaatggcttgaggaaggattttgatctggacattattagtctcaaagaggaaggaactgaaaaggctgctggcgaagtgtctaaacacttgtataaagtgtggaagaagattgggatttggaattccaacagtgggcttaacatgacggacagcaacaaagacaagtccagcaatatcactgattcattggccaacagaacactcattgtcaccaccattctggaagaaccctatgttatgtacaggaaatctgataagcctctatatggaaatgacagatttgaaggatattgcctagacctgttgaaagaattgtcaaacatcctgggtttcatttatgatgttaaactagttcccgatggcaaatatggggcccagaatgacaaaggggagtggaacgggatggttaaagaactcatagatcacagggctgacctggcagtggctcctcttaccatcacctacgtgcgggagaaagtcattgacttctccaaacccttcatgaccctaggcatcagcattctctaccggaagcccaatggtaccaatccaggcgttttctccttcctcaaccccctgtctccagatatttggatgtatgtgctcttagcctgcttgggagtcagctgtgtactctttgtgattgcaaggtttacaccctacgagtggtataacccccacccatgcaaccctgactcagacgtggtggaaaacaattttactttactaaatagtttctggtttggagttggagctctcatgcagcaaggatcagagctgatgcccaaagctctatcgaccagaatagttggagggatatggtggtttttcaccctaatcatcatttcatcctacacggccaatctggctgccttcttgacagtagagagaatggaatcccccatagattcggcagatgatctggcaaagcaaaccaagatagaatatggggcggttagagatggatcaacaatgaccttcttcaagaaatcaaaaatctccacctatgagaagatgtgggctttcatgagcagcaggcagcagaccgccctggtaagaaacagtgatgaggggatccagagagtgctcaccacagactacgcgctgctgatggagtccaccagcattgagtatgtgacgcagagaaactgcaacctcactcagatcgggggcctcattgactccaaaggttacggagtgggaacacctattggttctccttaccgggataaaattactattgctattcttcaactccaagaagaagggaagctgcatatgatgaaagagaagtggtggcgtgggaatggctgccccgaggaagacaacaaagaagccagtgccctgggagtggaaaatattggaggcatcttcattgttctggctgccggactggtcctttctgtatttgtagctattggagaattcatatacaaatcacggaagaataatgatattgaacagtgtctctctttcaacgctatcatggaagaactgggaatctcactgaagaatcagaaaaaaataaagaaaaagtcaagaactaaggggaaatcttccttcacaagtatccttacttgtcatcagagacgaactcagagaaaagagactgtggcgtgatccaaggaaacgcctgtaggaagaaaaaggatgcattccctacagatttttggagaaaggatttctgaggagtgtgtgatgtgtttccatatatctatatccataactctgattatgaatacagatataagaaatacaaaagtttaaaaagctcacatagatatgacttgggaagtgacaccagttcttttaaaataaatttgtatgctcaattattttgcattttttctttttccccaataaattgttgtgtgtgctttctaaataataataaaacaacagggtttttttccagaa

SEQ ID NO: 137473 - DNA, 3624 bp, Homo sapiens
  Payload ID: 6912
  Gene Symbol: GRIK1
  Gene Name: glutamate receptor, ionotropic, kainate 1
  ENST ID: ENST00000399914
  CDS Start-End: 523-3327
agaagccggaacgtggctccgctcccagttaacctgctggagctcatcaggcttgctcagagcccctgcaccaactcaccctgtaccctctctccttcttcgttagtcttctttcccccttttccctcctctgtctgtgcctatcccccgacttttgcatctgaccaaaggacgaatgagggagacgttcctgcagatcggggcagcaactttcctcagctggtctctgggctccgggagccagagagcgctgatcctccgcggtctgcggcccatggaagaggaggaggaggagccgtgatgggctagcgacagcactgaggagccccgagagagctcagccttgccagccagctccgcggtcccacgcgggttccctcgagctcgctccgtggggagcgcgcagcgtgcttggaaccggagcatccagagaggatgaggcggggacccggcccaagttgggtgcatctctcgggcgtccggcagcggctgtatctcggcatgaattaagaagctaggaagatggagcacggcacactcctcgcccagcccgggctctggaccagggacaccagctgggcactcctctatttcctctgctatatcctccctcagaccgccccgcaagtactcaggatcggagggatttttgaaacagtggaaaatgagcctgttaatgttgaagaattagctttcaagtttgcagtcaccagcattaacagaaaccgaaccctgatgcctaacaccacattaacctatgacatccagagaattaacctttttgatagttttgaagcctcgcggagagcatgtgaccagctggctcttggtgtggctgctctctttggcccttcccatagctcctccgtcagtgctgtgcagtctatttgcaatgctctcgaagttccacacatacagacccgctggaaacacccctcggtggacaacaaagatttgttttacatcaacctttacccagattatgcagctatcagcagggcgatcctggatctggtcctctattacaactggaaaacagtgacagtggtgtatgaagacagcacaggtctaattcgtctacaagagctcatcaaagctccctccagatataatattaaaatcaaaatccgccagctgccctctgggaataaagatgccaagcctttactcaaggagatgaagaaaggcaaggagttctatgtgatatttgattgttcacatgaaacagccgctgaaatccttaagcagattctgttcatgggcatgatgaccgagtactatcactactttttcacaaccctggacttatttgctttggatctggaactctataggtacagtggcgtaaacatgaccgggtttcggctgcttaacattgacaaccctcacgtgtcatccatcattgagaagtggtccatggagagactgcaggccccacccaggcccgagactggccttttggatggcatgatgacaactgaagcggctctgatgtacgatgctgtgtacatggtggccattgcctcgcaccgggcatcccagctgaccgtcagctccctgcagtgccatagacataagccatggcgcctcggacccagatttatgaacctgatcaaagaggcccggtgggatggcttgactgggcatatcacctttaataaaaccaatggcttgaggaaggattttgatctggacattattagtctcaaagaggaaggaactgaaaagattgggatttggaattccaacagtgggcttaacatgacggacagcaacaaagacaagtccagcaatatcactgattcattggccaacagaacactcattgtcaccaccattctggaagaaccctatgttatgtacaggaaatctgataagcctctatatggaaatgacagatttgaaggatattgcctagacctgttgaaagaattgtcaaacatcctgggtttcatttatgatgttaaactagttcccgatggcaaatatggggcccagaatgacaaaggggagtggaacgggatggttaaagaactcatagatcacagggctgacctggcagtggctcctcttaccatcacctacgtgcgggagaaagtcattgacttctccaaacccttcatgaccctaggcatcagcattctctaccggaagcccaatggtaccaatccaggcgttttctccttcctcaaccccctgtctccagatatttggatgtatgtgctcttagcctgcttgggagtcagctgtgtactctttgtgattgcaaggtttacaccctacgagtggtataacccccacccatgcaaccctgactcagacgtggtggaaaacaattttactttactaaatagtttctggtttggagttggagctctcatgcagcaaggatcagagctgatgcccaaagctctatcgaccagaatagttggagggatatggtggtttttcaccctaatcatcatttcatcctacacggccaatctggctgccttcttgacagtagagagaatggaatcccccatagattcggcagatgatctggcaaagcaaaccaagatagaatatggggcggttagagatggatcaacaatgaccttcttcaagaaatcaaaaatctccacctatgagaagatgtgggctttcatgagcagcaggcagcagaccgccctggtaagaaacagtgatgaggggatccagagagtgctcaccacagactacgcgctgctgatggagtccaccagcattgagtatgtgacgcagagaaactgcaacctcactcagatcgggggcctcattgactccaaaggttacggagtgggaacacctattggttctccttaccgggataaaattactattgctattcttcaactccaagaagaagggaagctgcatatgatgaaagagaagtggtggcgtgggaatggctgccccgaggaagacaacaaagaagccagtgccctgggagtggaaaatattggaggcatcttcattgttctggctgccggactggtcctttctgtatttgtagctattggagaattcatatacaaatcacggaagaataatgatattgaacagaaaggaaagtcatcaagaattagattttattttaggaacaaagtaaggtttcatgggagaaaaaaacaaagccttggtgtagagaagtgtctctctttcaacgctatcatggaagaactgggaatctcactgaagaatcagaaaaaaataaagaaaaagtcaagaactaaggggaaatcttccttcacaagtatccttacttgtcatcagagacgaactcagagaaaagagactgtggcgtgatccaaggaaacgcctgtaggaagaaaaaggatgcattccctacagatttttggagaaaggatttctgaggagtgtgtgatgtgtttccatatatctatatccataactctgattatgaatacagatataagaaatacaaaagtttaaaaagctcacatagatatgacttgggaagtgacaccagttcttttaaaataaatttgtatgctcaattattttgcattttttctttttccccaataaattgttgtgtgtgctttctaaataataataaaacaacagggtttttttccagaa

SEQ ID NO: 137474 - DNA, 2896 bp, Homo sapiens
  Payload ID: 6912
  Gene Symbol: GRIK1
  Gene Name: glutamate receptor, ionotropic, kainate 1
  ENST ID: ENST00000535441
  CDS Start-End: 1-2601
ggagggatttttgaaacagtggaaaatgagcctgttaatgttgaagaattagctttcaagtttgcagtcaccagcattaacagaaaccgaaccctgatgcctaacaccacattaacctatgacatccagagaattaacctttttgatagttttgaagcctcgcggagagcatgtgaccagctggctcttggtgtggctgctctctttggcccttcccatagctcctccgtcagtgctgtgcagtctatttgcaatgctctcgaagttccacacatacagacccgctggaaacacccctcggtggacaacaaagatttgttttacatcaacctttacccagattatgcagctatcagcagggcgatcctggatctggtcctctattacaactggaaaacagtgacagtggtgtatgaagacagcacaggtctaattcgtctacaagagctcatcaaagctccctccagatataatattaaaatcaaaatccgccagctgccctctgggaataaagatgccaagcctttactcaaggagatgaagaaaggcaaggagttctatgtgatatttgattgttcacatgaaacagccgctgaaatccttaagcagattctgttcatgggcatgatgaccgagtactatcactactttttcacaaccctggacttatttgctttggatctggaactctataggtacagtggcgtaaacatgaccgggtttcggctgcttaacattgacaaccctcacgtgtcatccatcattgagaagtggtccatggagagactgcaggccccacccaggcccgagactggccttttggatggcatgatgacaactgaagcggctctgatgtacgatgctgtgtacatggtggccattgcctcgcaccgggcatcccagctgaccgtcagctccctgcagtgccatagacataagccatggcgcctcggacccagatttatgaacctgatcaaagaggcccggtgggatggcttgactgggcatatcacctttaataaaaccaatggcttgaggaaggattttgatctggacattattagtctcaaagaggaaggaactgaaaagattgggatttggaattccaacagtgggcttaacatgacggacagcaacaaagacaagtccagcaatatcactgattcattggccaacagaacactcattgtcaccaccattctggaagaaccctatgttatgtacaggaaatctgataagcctctatatggaaatgacagatttgaaggatattgcctagacctgttgaaagaattgtcaaacatcctgggtttcatttatgatgttaaactagttcccgatggcaaatatggggcccagaatgacaaaggggagtggaacgggatggttaaagaactcatagatcacagggctgacctggcagtggctcctcttaccatcacctacgtgcgggagaaagtcattgacttctccaaacccttcatgaccctaggcatcagcattctctaccggaagcccaatggtaccaatccaggcgttttctccttcctcaaccccctgtctccagatatttggatgtatgtgctcttagcctgcttgggagtcagctgtgtactctttgtgattgcaaggtttacaccctacgagtggtataacccccacccatgcaaccctgactcagacgtggtggaaaacaattttactttactaaatagtttctggtttggagttggagctctcatgcagcaaggatcagagctgatgcccaaagctctatcgaccagaatagttggagggatatggtggtttttcaccctaatcatcatttcatcctacacggccaatctggctgccttcttgacagtagagagaatggaatcccccatagattcggcagatgatctggcaaagcaaaccaagatagaatatggggcggttagagatggatcaacaatgaccttcttcaagaaatcaaaaatctccacctatgagaagatgtgggctttcatgagcagcaggcagcagaccgccctggtaagaaacagtgatgaggggatccagagagtgctcaccacagactacgcgctgctgatggagtccaccagcattgagtatgtgacgcagagaaactgcaacctcactcagatcgggggcctcattgactccaaaggttacggagtgggaacacctattggttctccttaccgggataaaattactattgctattcttcaactccaagaagaagggaagctgcatatgatgaaagagaagtggtggcgtgggaatggctgccccgaggaagacaacaaagaagccagtgccctgggagtggaaaatattggaggcatcttcattgttctggctgccggactggtcctttctgtatttgtagctattggagaattcatatacaaatcacggaagaataatgatattgaacagtgtctctctttcaacgctatcatggaagaactgggaatctcactgaagaatcagaaaaaaataaagaaaaagtcaagaactaaggggaaatcttccttcacaagtatccttacttgtcatcagagacgaactcagagaaaagagactgtggcgtgatccaaggaaacgcctgtaggaagaaaaaggatgcattccctacagatttttggagaaaggatttctgaggagtgtgtgatgtgtttccatatatctatatccataactctgattatgaatacagatataagaaatacaaaagtttaaaaagctcacatagatatgacttgggaagtgacaccagttcttttaaaataaatttgtatgctcaattattttgcattttttctttttccccaataaattgttgtgtgtgctttctaaataataataaaacaacagggtttttttccag

SEQ ID NO: 137475 - DNA, 4317 bp, Homo sapiens
  Payload ID: 6913
  Gene Symbol: GRIK2
  Gene Name: glutamate receptor, ionotropic, kainate 2
  ENST ID: ENST00000318991
  CDS Start-End: 1-2565
ggtggtatttttgaatatgtggaatctggcccaatgggagctgaggaacttgcattcagatttgctgtgaacacaattaacagaaacagaacattgctacccaatactacccttacctatgatacccagaagataaacctttatgatagttttgaagcatccaagaaagcctgtgatcagctgtctcttggggtggctgccatcttcgggccttcacacagctcatcagcaaacgcagtgcagtccatctgcaatgctctgggagttccccacatacagacccgctggaagcaccaggtgtcagacaacaaagattccttctatgtcagtctctacccagacttctcttcactcagccgtgccattttagacctggtgcagtttttcaagtggaaaaccgtcacggttgtgtatgatgacagcactggtctcattcgtttgcaagagctcatcaaagctccatcaaggtataatcttcgactcaaaattcgtcagttacctgctgatacaaaggatgcaaaacccttactaaaagaaatgaaaagaggcaaggagtttcatgtaatctttgattgtagccatgaaatggcagcaggcattttaaaacaggcattagctatgggaatgatgacagaatactatcattatatctttaccactctggacctctttgctcttgatgttgagccctaccgatacagtggtgttaacatgacagggttcagaatattaaatacagaaaatacccaagtctcctccatcattgaaaagtggtcgatggaacgattgcaggcacctccgaaacccgattcaggtttgctggatggatttatgacgactgatgctgctctaatgtatgatgctgtgcatgtggtgtctgtggccgttcaacagtttccccagatgacagtcagttccttgcagtgtaatcgacataaaccctggcgcttcgggacccgctttatgagtctaattaaagaggcacattgggaaggcctcacaggcagaataactttcaacaaaaccaatggcttgagaacagattttgatttggatgtgatcagtctgaaggaagaaggtctagaaaagattggaacgtgggatccagccagtggcctgaatatgacagaaagtcaaaagggaaagccagcgaacatcacagattccttatccaatcgttctttgattgttaccaccattttggaagagccttatgtcctttttaagaagtctgacaaacctctctatggtaatgatcgatttgaaggctattgcattgatctcctcagagagttatctacaatccttggctttacatatgaaattagacttgtggaagatgggaaatatggagcccaggatgatgccaatggacaatggaatggaatggttcgtgaactaattgatcataaagctgaccttgcagttgctccactggctattacctatgttcgagagaaggtcatcgacttttccaagccctttatgacacttggaataagtattttgtaccgcaagcccaatggtacaaacccaggcgtcttctccttcctgaatcctctctcccctgatatctggatgtatattctgctggcttacttgggtgtcagttgtgtgctctttgtcatagccaggtttagtccttatgagtggtataatccacacccttgcaaccctgactcagacgtggtggaaaacaattttaccttgctaaatagtttctggtttggagttggagctctcatgcagcaaggttctgagctcatgcccaaagcactgtccaccaggatagtgggaggcatttggtggtttttcacacttatcatcatttcttcgtatactgctaacttagccgcctttctgacagtggaacgcatggaatcccctattgactctgctgatgatttagctaaacaaaccaagatagaatatggagcagtagaggatggtgcaaccatgacttttttcaagaaatcaaaaatctccacgtatgacaaaatgtgggcctttatgagtagcagaaggcagtcagtgctggtcaaaagtaatgaagaaggaatccagcgagtcctcacctctgattatgctttcctaatggagtcaacaaccatcgagtttgttacccagcggaactgtaacctgacacagattggcggccttatagactctaaaggttatggcgttggcactcccatgggttctccatatcgagacaaaattaccatagcaattcttcagctgcaagaggaaggcaaactgcatatgatgaaggagaaatggtggaggggcaatggttgcccagaagaggagagcaaagaggccagtgccctgggggttcagaatattggtggcatcttcattgttctggcagccggcttggtgctttcagtttttgtggcagtgggagaatttttatacaaatccaaaaaaaacgctcaattggaaaagagagccaagactaagttacctcaagactatgtattcctccctattttggagtcagtttccatttctacagtgttgtcatcatcaccatcttcatcatcattatcatcatgttcttaataagtacatctaataaggtccttctgtagtgccatggtagaagaattgaggatgtccctgaagtgccagcgtcggttaaaacataagccacaggccccagttattgtgaaaacagaagaagttatcaacatgcacacatttaacgacagaaggttgccaggtaaagaaaccatggcataaagctgggaggccaaacacccaagcacaaactgtcgtctttttccaaacaatttagccagaatgtttcctgtggaaatatgcaacctgtgcaaaataaaatgagttacctcatgccgctgtgtctatgaactagagactctgtgatctaagcagttgcaatgatcagacttgatttacaagcatcatggatcaaccaagttacacggggttacactgttaatcatgggttcctcccttcttctgagtgaatgttaacatgcgcattttgtggctgatttcaaatgcagtccagtgagaaattacaggttccttttgaagctcaactgttgccaggagatggaatatcaatgcccaacagggcaaccaataaaagtgtcactaagaatataaatatttggaatcagcaaaaactgtagtgttacaggaaacagtacagtcttctgaacacccagatcatagaggtgatgatgttactagcccccaactactcagtataattattgtctgaatgcaaagtatgtgtttataggatgtgaaaaaatgtaatgcaaaacaaatttgaatcccatggcagttggaatataaagcagatgttcatcacttattttccttttttcttttcttatttttttttttgacagtctgtgtcactgattgagatagaaatgccaattatcaaggaaataatgttttcttaagttccctaaggcagaagatttaacatgcaattctaccagatcccttcctattcccccaacaccttttctctaacccccatatcccaaataataataataataataataataataataataataataataaaagcagttggttcagtgattctgaattaaaaggataatgttttgcaatgttcaagttgtaaaaactggccgagtattggctgtgtggaagactaaagctttcattctaacattcagacatagcaatccaaacccttgttcctgctgtaaatgaacttgatggagcatgggcagatttcagtgatacgagaaaggggactggtcatctatagaaaaatctgtgagagaacttggaagtggactgcgtttatcaatacagtcacaatgttaaatgaacaaaattcttgaacagttttttttcaaaaaatgttcaggtttatttgtggaaatgcaagatttctatgaaaatagtttttgtatggaaatttttgtaatactttttatcaacaaaacaagaacatgtgttcctgtcaggggtgtgatgtcaagcatgaatggtagtgcgtgtgcaccaccaacgtttggtgaaaactatttttatcaagaaaaaaggaatcatagaagagaaatattttcaagttagataatataaaagctaggtgcactaccaccactgcttaccatgccacacccctggtttccacgaggctgacaacatactgtaatgaacaattgtgtgtaaaatggtaaaagacacagacctcttgacaacattgtgataacagttgagtgcacacagtttgctgtttgaatccaatgcacaaaattaaaaaaaatcattaaaactatgttcattttactttca

SEQ ID NO: 137476 - DNA, 1981 bp, Homo sapiens
  Payload ID: 6913
  Gene Symbol: GRIK2
  Gene Name: glutamate receptor, ionotropic, kainate 2
  ENST ID: ENST00000358361
  CDS Start-End: 486-1547
gcagctatctcagtctttctcacttaatcttggcttcacgtcagaagctgtgcagcagtgcagtagaatagggcctggcaaaacctttgctagcaaagcgccttttgtgccgggctgtggctcgctatcgacatctcgtccgttaccaaggctgggtttcctactgatttccctcctcctctgctttcacaggctcgcgcggccggacattgtgggtgtgcgtgctggatttctcccggatgctctccgactaacatggatgtcccaccattccttgcagtggaaggttgttccttggcgcagtgagtgaagaacatgcagcgattgctaatgggtttgggaagcggagactccttcctctctctatgaccatgccgtgatcgtgtctgcggtcaccactcgacgcatcctcatttctacccgaacccaggagccgaacgctagatcggggaagtgggtgccgtgcgtgtgggcacagaaacaccatgaagattattttcccgattctaagtaatccagtcttcaggcgcaccgttaaactcctgctctgtttactgtggattggatattctcaaggaaccacacatgtattaagatttggtggtatttttgaatatgtggaatctggcccaatgggagctgaggaacttgcattcagatttgctgtgaacacaattaacagaaacagaacattgctacccaatactacccttacctatgatacccagaagataaacctttatgatagttttgaagcatccaagaaagcctgtgatcagctgtctcttggggtggctgccatcttcgggccttcacacagctcatcagcaaacgcagtgcagtccatctgcaatgctctgggagttccccacatacagacccgctggaagcaccaggtgtcagacaacaaagattccttctatgtcagtctctacccagacttctcttcactcagccgtgccattttagacctggtgcagtttttcaagtggaaaaccgtcacggttgtgtatgatgacagcactggtctcattcgtttgcaagagctcatcaaagctccatcaaggtataatcttcgactcaaaattcgtcagttacctgctgatacaaaggatgcaaaacccttactaaaagaaatgaaaagaggcaaggagtttcatgtaatctttgattgtagccatgaaatggcagcaggcattttaaaacaggcattagctatgggaatgatgacagaatactatcattatatctttaccactctggacctctttgctcttgatgttgagccctaccgatacagtggtgttaacatgacagggttcagaatattaaatacagaaaatacccaagtctcctccatcattgaaaagtggtcgatggaacgattgcaggcacctccgaaacccgattcaggtttgctggatggatttatgacgatggagtttcactcttgttgcccaggctggagtgcaatggcacgatctcagctcactgcaacctctgcctcctgggttcaagcgattcttctgcctcagcctcccgagtagctgagattacaggcacacaccactatgcctggctaatttttttgtatttttagtagagatggggtttctctatgttggtcaggatggtctcgaactcctgacctcaggtaatccgcccaccttggcctcccaaagtgctgggattacaggcaagagccactgcacctggcccacagtttcttaatccatttgttgattgatgggcatatgggctggttccatatgtttgcaactgcaaattgtgagcactgtttaattctaagcttccttgtaggtaaggcaaaaagcaagcaaagtattttaggcaattcccataactaaagggaaattatttattatatttgtccatttgaaaagatattttttcatgttgtaaaaaatttattaaatgaatgctaacataaggattaataaacaacatgatcttaacattc

SEQ ID NO: 137477 - DNA, 4185 bp, Homo sapiens
  Payload ID: 6913
  Gene Symbol: GRIK2
  Gene Name: glutamate receptor, ionotropic, kainate 2
  ENST ID: ENST00000369134
  CDS Start-End: 1-2613
ggtggtatttttgaatatgtggaatctggcccaatgggagctgaggaacttgcattcagatttgctgtgaacacaattaacagaaacagaacattgctacccaatactacccttacctatgatacccagaagataaacctttatgatagttttgaagcatccaagaaagcctgtgatcagctgtctcttggggtggctgccatcttcgggccttcacacagctcatcagcaaacgcagtgcagtccatctgcaatgctctgggagttccccacatacagacccgctggaagcaccaggtgtcagacaacaaagattccttctatgtcagtctctacccagacttctcttcactcagccgtgccattttagacctggtgcagtttttcaagtggaaaaccgtcacggttgtgtatgatgacagcactggtctcattcgtttgcaagagctcatcaaagctccatcaaggtataatcttcgactcaaaattcgtcagttacctgctgatacaaaggatgcaaaacccttactaaaagaaatgaaaagaggcaaggagtttcatgtaatctttgattgtagccatgaaatggcagcaggcattttaaaacaggcattagctatgggaatgatgacagaatactatcattatatctttaccactctggacctctttgctcttgatgttgagccctaccgatacagtggtgttaacatgacagggttcagaatattaaatacagaaaatacccaagtctcctccatcattgaaaagtggtcgatggaacgattgcaggcacctccgaaacccgattcaggtttgctggatggatttatgacgactgatgctgctctaatgtatgatgctgtgcatgtggtgtctgtggccgttcaacagtttccccagatgacagtcagttccttgcagtgtaatcgacataaaccctggcgcttcgggacccgctttatgagtctaattaaagaggcacattgggaaggcctcacaggcagaataactttcaacaaaaccaatggcttgagaacagattttgatttggatgtgatcagtctgaaggaagaaggtctagaaaagattggaacgtgggatccagccagtggcctgaatatgacagaaagtcaaaagggaaagccagcgaacatcacagattccttatccaatcgttctttgattgttaccaccattttggaagagccttatgtcctttttaagaagtctgacaaacctctctatggtaatgatcgatttgaaggctattgcattgatctcctcagagagttatctacaatccttggctttacatatgaaattagacttgtggaagatgggaaatatggagcccaggatgatgccaatggacaatggaatggaatggttcgtgaactaattgatcataaagctgaccttgcagttgctccactggctattacctatgttcgagagaaggtcatcgacttttccaagccctttatgacacttggaataagtattttgtaccgcaagcccaatggtacaaacccaggcgtcttctccttcctgaatcctctctcccctgatatctggatgtatattctgctggcttacttgggtgtcagttgtgtgctctttgtcatagccaggtttagtccttatgagtggtataatccacacccttgcaaccctgactcagacgtggtggaaaacaattttaccttgctaaatagtttctggtttggagttggagctctcatgcagcaaggttctgagctcatgcccaaagcactgtccaccaggatagtgggaggcatttggtggtttttcacacttatcatcatttcttcgtatactgctaacttagccgcctttctgacagtggaacgcatggaatcccctattgactctgctgatgatttagctaaacaaaccaagatagaatatggagcagtagaggatggtgcaaccatgacttttttcaagaaatcaaaaatctccacgtatgacaaaatgtgggcctttatgagtagcagaaggcagtcagtgctggtcaaaagtaatgaagaaggaatccagcgagtcctcacctctgattatgctttcctaatggagtcaacaaccatcgagtttgttacccagcggaactgtaacctgacacagattggcggccttatagactctaaaggttatggcgttggcactcccatgggttctccatatcgagacaaaattaccatagcaattcttcagctgcaagaggaaggcaaactgcatatgatgaaggagaaatggtggaggggcaatggttgcccagaagaggagagcaaagaggccagtgccctgggggttcagaatattggtggcatcttcattgttctggcagccggcttggtgctttcagtttttgtggcagtgggagaatttttatacaaatccaaaaaaaacgctcaattggaaaagaggtccttctgtagtgccatggtagaagaattgaggatgtccctgaagtgccagcgtcggttaaaacataagccacaggccccagttattgtgaaaacagaagaagttatcaacatgcacacatttaacgacagaaggttgccaggtaaagaaaccatggcataaagctgggaggccaaacacccaagcacaaactgtcgtctttttccaaacaatttagccagaatgtttcctgtggaaatatgcaacctgtgcaaaataaaatgagttacctcatgccgctgtgtctatgaactagagactctgtgatctaagcagttgcaatgatcagacttgatttacaagcatcatggatcaaccaagttacacggggttacactgttaatcatgggttcctcccttcttctgagtgaatgttaacatgcgcattttgtggctgatttcaaatgcagtccagtgagaaattacaggttccttttgaagctcaactgttgccaggagatggaatatcaatgcccaacagggcaaccaataaaagtgtcactaagaatataaatatttggaatcagcaaaaactgtagtgttacaggaaacagtacagtcttctgaacacccagatcatagaggtgatgatgttactagcccccaactactcagtataattattgtctgaatgcaaagtatgtgtttataggatgtgaaaaaatgtaatgcaaaacaaatttgaatcccatggcagttggaatataaagcagatgttcatcacttattttccttttttcttttcttatttttttttttgacagtctgtgtcactgattgagatagaaatgccaattatcaaggaaataatgttttcttaagttccctaaggcagaagatttaacatgcaattctaccagatcccttcctattcccccaacaccttttctctaacccccatatcccaaataataataataataataataataataataataataataataaaagcagttggttcagtgattctgaattaaaaggataatgttttgcaatgttcaagttgtaaaaactggccgagtattggctgtgtggaagactaaagctttcattctaacattcagacatagcaatccaaacccttgttcctgctgtaaatgaacttgatggagcatgggcagatttcagtgatacgagaaaggggactggtcatctatagaaaaatctgtgagagaacttggaagtggactgcgtttatcaatacagtcacaatgttaaatgaacaaaattcttgaacagttttttttcaaaaaatgttcaggtttatttgtggaaatgcaagatttctatgaaaatagtttttgtatggaaatttttgtaatactttttatcaacaaaacaagaacatgtgttcctgtcaggggtgtgatgtcaagcatgaatggtagtgcgtgtgcaccaccaacgtttggtgaaaactatttttatcaagaaaaaaggaatcatagaagagaaatattttcaagttagataatataaaagctaggtgcactaccaccactgcttaccatgccacacccctggtttccacgaggctgacaacatactgtaatgaacaattgtgtgtaaaatggtaaaagacacagacctcttgacaacattgtgataacagttgagtgcacacagtttgctgtttgaatccaatgcacaaaattaaaaaaaatcattaaaactatgttcattttactttca

SEQ ID NO: 137478 - DNA, 4272 bp, Homo sapiens
  Payload ID: 6913
  Gene Symbol: GRIK2
  Gene Name: glutamate receptor, ionotropic, kainate 2
  ENST ID: ENST00000369137
  CDS Start-End: 1-2496
ggtggtatttttgaatatgtggaatctggcccaatgggagctgaggaacttgcattcagatttgctgtgaacacaattaacagaaacagaacattgctacccaatactacccttacctatgatacccagaagataaacctttatgatagttttgaagcatccaagaaagcctgtgatcagctgtctcttggggtggctgccatcttcgggccttcacacagctcatcagcaaacgcagtgcagtccatctgcaatgctctgggagttccccacatacagacccgctggaagcaccaggtgtcagacaacaaagattccttctatgtcagtctctacccagacttctcttcactcagccgtgccattttagacctggtgcagtttttcaagtggaaaaccgtcacggttgtgtatgatgacagcactggtctcattcgtttgcaagagctcatcaaagctccatcaaggtataatcttcgactcaaaattcgtcagttacctgctgatacaaaggatgcaaaacccttactaaaagaaatgaaaagaggcaaggagtttcatgtaatctttgattgtagccatgaaatggcagcaggcattttaaaacaggcattagctatgggaatgatgacagaatactatcattatatctttaccactctggacctctttgctcttgatgttgagccctaccgatacagtggtgttaacatgacagggttcagaatattaaatacagaaaatacccaagtctcctccatcattgaaaagtggtcgatggaacgattgcaggcacctccgaaacccgattcaggtttgctggatggatttatgacgactgatgctgctctaatgtatgatgctgtgcatgtggtgtctgtggccgttcaacagtttccccagatgacagtcagttccttgcagtgtaatcgacataaaccctggcgcttcgggacccgctttatgagtctaattaaagaggcacattgggaaggcctcacaggcagaataactttcaacaaaaccaatggcttgagaacagattttgatttggatgtgatcagtctgaaggaagaaggtctagaaaagattggaacgtgggatccagccagtggcctgaatatgacagaaagtcaaaagggaaagccagcgaacatcacagattccttatccaatcgttctttgattgttaccaccattttggaagagccttatgtcctttttaagaagtctgacaaacctctctatggtaatgatcgatttgaaggctattgcattgatctcctcagagagttatctacaatccttggctttacatatgaaattagacttgtggaagatgggaaatatggagcccaggatgatgccaatggacaatggaatggaatggttcgtgaactaattgatcataaagctgaccttgcagttgctccactggctattacctatgttcgagagaaggtcatcgacttttccaagccctttatgacacttggaataagtattttgtaccgcaagcccaatggtacaaacccaggcgtcttctccttcctgaatcctctctcccctgatatctggatgtatattctgctggcttacttgggtgtcagttgtgtgctctttgtcatagccaggtttagtccttatgagtggtataatccacacccttgcaaccctgactcagacgtggtggaaaacaattttaccttgctaaatagtttctggtttggagttggagctctcatgcagcaaggttctgagctcatgcccaaagcactgtccaccaggatagtgggaggcatttggtggtttttcacacttatcatcatttcttcgtatactgctaacttagccgcctttctgacagtggaacgcatggaatcccctattgactctgctgatgatttagctaaacaaaccaagatagaatatggagcagtagaggatggtgcaaccatgacttttttcaagaaatcaaaaatctccacgtatgacaaaatgtgggcctttatgagtagcagaaggcagtcagtgctggtcaaaagtaatgaagaaggaatccagcgagtcctcacctctgattatgctttcctaatggagtcaacaaccatcgagtttgttacccagcggaactgtaacctgacacagattggcggccttatagactctaaaggttatggcgttggcactcccatgggttctccatatcgagacaaaattaccatagcaattcttcagctgcaagaggaaggcaaactgcatatgatgaaggagaaatggtggaggggcaatggttgcccagaagaggagagcaaagaggccagtgccctgggggttcagaatattggtggcatcttcattgttctggcagccggcttggtgctttcagtttttgtggcagtgggagaatttttatacaaatccaaaaaaaacgctcaattggaaaaggaatcttctatttggttagtgccaccataccatccagacactgtttagtaatcttttgaaacttactaaaagaggtttttaataatgaggtccttctgtagtgccatggtagaagaattgaggatgtccctgaagtgccagcgtcggttaaaacataagccacaggccccagttattgtgaaaacagaagaagttatcaacatgcacacatttaacgacagaaggttgccaggtaaagaaaccatggcataaagctgggaggccaaacacccaagcacaaactgtcgtctttttccaaacaatttagccagaatgtttcctgtggaaatatgcaacctgtgcaaaataaaatgagttacctcatgccgctgtgtctatgaactagagactctgtgatctaagcagttgcaatgatcagacttgatttacaagcatcatggatcaaccaagttacacggggttacactgttaatcatgggttcctcccttcttctgagtgaatgttaacatgcgcattttgtggctgatttcaaatgcagtccagtgagaaattacaggttccttttgaagctcaactgttgccaggagatggaatatcaatgcccaacagggcaaccaataaaagtgtcactaagaatataaatatttggaatcagcaaaaactgtagtgttacaggaaacagtacagtcttctgaacacccagatcatagaggtgatgatgttactagcccccaactactcagtataattattgtctgaatgcaaagtatgtgtttataggatgtgaaaaaatgtaatgcaaaacaaatttgaatcccatggcagttggaatataaagcagatgttcatcacttattttccttttttcttttcttatttttttttttgacagtctgtgtcactgattgagatagaaatgccaattatcaaggaaataatgttttcttaagttccctaaggcagaagatttaacatgcaattctaccagatcccttcctattcccccaacaccttttctctaacccccatatcccaaataataataataataataataataataataataataataataaaagcagttggttcagtgattctgaattaaaaggataatgttttgcaatgttcaagttgtaaaaactggccgagtattggctgtgtggaagactaaagctttcattctaacattcagacatagcaatccaaacccttgttcctgctgtaaatgaacttgatggagcatgggcagatttcagtgatacgagaaaggggactggtcatctatagaaaaatctgtgagagaacttggaagtggactgcgtttatcaatacagtcacaatgttaaatgaacaaaattcttgaacagttttttttcaaaaaatgttcaggtttatttgtggaaatgcaagatttctatgaaaatagtttttgtatggaaatttttgtaatactttttatcaacaaaacaagaacatgtgttcctgtcaggggtgtgatgtcaagcatgaatggtagtgcgtgtgcaccaccaacgtttggtgaaaactatttttatcaagaaaaaaggaatcatagaagagaaatattttcaagttagataatataaaagctaggtgcactaccaccactgcttaccatgccacacccctggtttccacgaggctgacaacatactgtaatgaacaattgtgtgtaaaatggtaaaagacacagacctcttgacaacattgtgataacagttgagtgcacacagtttgctgtttgaatccaatgcacaaaattaaaaaaaatcattaaaactatgttcattttactttca

SEQ ID NO: 137479 - DNA, 4921 bp, Homo sapiens
  Payload ID: 6913
  Gene Symbol: GRIK2
  Gene Name: glutamate receptor, ionotropic, kainate 2
  Uniprot ID: Q13002
  ENST ID: ENST00000369138
  CDS Start-End: 491-3169
ggagagcagctatctcagtctttctcacttaatcttggcttcacgtcagaagctgtgcagcagtgcagtagaatagggcctggcaaaacctttgctagcaaagcgccttttgtgccgggctgtggctcgctatcgacatctcgtccgttaccaaggctgggtttcctactgatttccctcctcctctgctttcacaggctcgcgcggccggacattgtgggtgtgcgtgctggatttctcccggatgctctccgactaacatggatgtcccaccattccttgcagtggaaggttgttccttggcgcagtgagtgaagaacatgcagcgattgctaatgggtttgggaagcggagactccttcctctctctatgaccatgccgtgatcgtgtctgcggtcaccactcgacgcatcctcatttctacccgaacccaggagccgaacgctagatcggggaagtgggtgccgtgcgtgtgggcacagaaacaccatgaagattattttcccgattctaagtaatccagtcttcaggcgcaccgttaaactcctgctctgtttactgtggattggatattctcaaggaaccacacatgtattaagatttggtggtatttttgaatatgtggaatctggcccaatgggagctgaggaacttgcattcagatttgctgtgaacacaattaacagaaacagaacattgctacccaatactacccttacctatgatacccagaagataaacctttatgatagttttgaagcatccaagaaagcctgtgatcagctgtctcttggggtggctgccatcttcgggccttcacacagctcatcagcaaacgcagtgcagtccatctgcaatgctctgggagttccccacatacagacccgctggaagcaccaggtgtcagacaacaaagattccttctatgtcagtctctacccagacttctcttcactcagccgtgccattttagacctggtgcagtttttcaagtggaaaaccgtcacggttgtgtatgatgacagcactggtctcattcgtttgcaagagctcatcaaagctccatcaaggtataatcttcgactcaaaattcgtcagttacctgctgatacaaaggatgcaaaacccttactaaaagaaatgaaaagaggcaaggagtttcatgtaatctttgattgtagccatgaaatggcagcaggcattttaaaacaggcattagctatgggaatgatgacagaatactatcattatatctttaccactctggacctctttgctcttgatgttgagccctaccgatacagtggtgttaacatgacagggttcagaatattaaatacagaaaatacccaagtctcctccatcattgaaaagtggtcgatggaacgattgcaggcacctccgaaacccgattcaggtttgctggatggatttatgacgactgatgctgctctaatgtatgatgctgtgcatgtggtgtctgtggccgttcaacagtttccccagatgacagtcagttccttgcagtgtaatcgacataaaccctggcgcttcgggacccgctttatgagtctaattaaagaggcacattgggaaggcctcacaggcagaataactttcaacaaaaccaatggcttgagaacagattttgatttggatgtgatcagtctgaaggaagaaggtctagaaaagattggaacgtgggatccagccagtggcctgaatatgacagaaagtcaaaagggaaagccagcgaacatcacagattccttatccaatcgttctttgattgttaccaccattttggaagagccttatgtcctttttaagaagtctgacaaacctctctatggtaatgatcgatttgaaggctattgcattgatctcctcagagagttatctacaatccttggctttacatatgaaattagacttgtggaagatgggaaatatggagcccaggatgatgccaatggacaatggaatggaatggttcgtgaactaattgatcataaagctgaccttgcagttgctccactggctattacctatgttcgagagaaggtcatcgacttttccaagccctttatgacacttggaataagtattttgtaccgcaagcccaatggtacaaacccaggcgtcttctccttcctgaatcctctctcccctgatatctggatgtatattctgctggcttacttgggtgtcagttgtgtgctctttgtcatagccaggtttagtccttatgagtggtataatccacacccttgcaaccctgactcagacgtggtggaaaacaattttaccttgctaaatagtttctggtttggagttggagctctcatgcagcaaggttctgagctcatgcccaaagcactgtccaccaggatagtgggaggcatttggtggtttttcacacttatcatcatttcttcgtatactgctaacttagccgcctttctgacagtggaacgcatggaatcccctattgactctgctgatgatttagctaaacaaaccaagatagaatatggagcagtagaggatggtgcaaccatgacttttttcaagaaatcaaaaatctccacgtatgacaaaatgtgggcctttatgagtagcagaaggcagtcagtgctggtcaaaagtaatgaagaaggaatccagcgagtcctcacctctgattatgctttcctaatggagtcaacaaccatcgagtttgttacccagcggaactgtaacctgacacagattggcggccttatagactctaaaggttatggcgttggcactcccatgggttctccatatcgagacaaaattaccatagcaattcttcagctgcaagaggaaggcaaactgcatatgatgaaggagaaatggtggaggggcaatggttgcccagaagaggagagcaaagaggccagtgccctgggggttcagaatattggtggcatcttcattgttctggcagccggcttggtgctttcagtttttgtggcagtgggagaatttttatacaaatccaaaaaaaacgctcaattggaaaagagagccaagactaagttacctcaagactatgtattcctccctattttggagtcagtttccatttctacagtgttgtcatcatcaccatcttcatcatcattatcatcatgttcttaataagtacatctaataaggtccttctgtagtgccatggtagaagaattgaggatgtccctgaagtgccagcgtcggttaaaacataagccacaggccccagttattgtgaaaacagaagaagttatcaacatgcacacatttaacgacagaaggttgccaggtaaagaaaccatggcataaagctgggaggccaaacacccaagcacaaactgtcgtctttttccaaacaatttagccagaatgtttcctgtggaaatatgcaacctgtgcaaaataaaatgagttacctcatgccgctgtgtctatgaactagagactctgtgatctaagcagttgcaatgatcagacttgatttacaagcatcatggatcaaccaagttacacggggttacactgttaatcatgggttcctcccttcttctgagtgaatgttaacatgcgcattttgtggctgatttcaaatgcagtccagtgagaaattacaggttccttttgaagctcaactgttgccaggagatggaatatcaatgcccaacagggcaaccaataaaagtgtcactaagaatataaatatttggaatcagcaaaaactgtagtgttacaggaaacagtacagtcttctgaacacccagatcatagaggtgatgatgttactagcccccaactactcagtataattattgtctgaatgcaaagtatgtgtttataggatgtgaaaaaatgtaatgcaaaacaaatttgaatcccatggcagttggaatataaagcagatgttcatcacttattttccttttttcttttcttatttttttttttgacagtctgtgtcactgattgagatagaaatgccaattatcaaggaaataatgttttcttaagttccctaaggcagaagatttaacatgcaattctaccagatcccttcctattcccccaacaccttttctctaacccccatatcccaaataataataataataataataataataataataataataataaaagcagttggttcagtgattctgaattaaaaggataatgttttgcaatgttcaagttgtaaaaactggccgagtattggctgtgtggaagactaaagctttcattctaacattcagacatagcaatccaaacccttgttcctgctgtaaatgaacttgatggagcatgggcagatttcagtgatacgagaaaggggactggtcatctatagaaaaatctgtgagagaacttggaagtggactgcgtttatcaatacagtcacaatgttaaatgaacaaaattcttgaacagttttttttcaaaaaatgttcaggtttatttgtggaaatgcaagatttctatgaaaatagtttttgtatggaaatttttgtaatactttttatcaacaaaacaagaacatgtgttcctgtcaggggtgtgatgtcaagcatgaatggtagtgcgtgtgcaccaccaacgtttggtgaaaactatttttatcaagaaaaaaggaatcatagaagagaaatattttcaagttagataatataaaagctaggtgcactaccaccactgcttaccatgccacacccctggtttccacgaggctgacaacatactgtaatgaacaattgtgtgtaaaatggtaaaagacacagacctcttgacaacattgtgataacagttgagtgcacacagtttgctgtttgaatccaatgcacaaaattaaaaaaaatcattaaaactatgttcattttactttca

SEQ ID NO: 137480 - DNA, 540 bp, Homo sapiens
  Payload ID: 6913
  Gene Symbol: GRIK2
  Gene Name: glutamate receptor, ionotropic, kainate 2
  ENST ID: ENST00000455610
  CDS Start-End: 1-540
tgtagccatgaaatggcagcaggcattttaaaacaggcattagctatgggaatgatgacagaatactatcattatatctttaccactctgactgatgctgctctaatgtatgatgctgtgcatgtggtgtctgtggccgttcaacagtttccccagatgacagtcagttccttgcagtgtaatcgacataaaccctggcgcttcgggacccgctttatgagtctaattaaagaggcacattgggaaggcctcacaggcagaataactttcaacaaaaccaatggcttgagaacagattttgatttggatgtgatcagtctgaaggaagaaggtctagaaaagattggaacgtgggatccagccagtggcctgaatatgacagaaagtcaaaagggaaagccagcgaacatcacagattccttatccaatcgttctttgattgttaccaccattttggaagagccttatgtcctttttaagaagtctgacaaacctctctatggtaatgatcgatttgaaggctattgcattgatctcctc

SEQ ID NO: 137481 - DNA, 4789 bp, Homo sapiens
  Payload ID: 6913
  Gene Symbol: GRIK2
  Gene Name: glutamate receptor, ionotropic, kainate 2
  Uniprot ID: Q13002
  ENST ID: ENST00000421544
  CDS Start-End: 491-3217
ggagagcagctatctcagtctttctcacttaatcttggcttcacgtcagaagctgtgcagcagtgcagtagaatagggcctggcaaaacctttgctagcaaagcgccttttgtgccgggctgtggctcgctatcgacatctcgtccgttaccaaggctgggtttcctactgatttccctcctcctctgctttcacaggctcgcgcggccggacattgtgggtgtgcgtgctggatttctcccggatgctctccgactaacatggatgtcccaccattccttgcagtggaaggttgttccttggcgcagtgagtgaagaacatgcagcgattgctaatgggtttgggaagcggagactccttcctctctctatgaccatgccgtgatcgtgtctgcggtcaccactcgacgcatcctcatttctacccgaacccaggagccgaacgctagatcggggaagtgggtgccgtgcgtgtgggcacagaaacaccatgaagattattttcccgattctaagtaatccagtcttcaggcgcaccgttaaactcctgctctgtttactgtggattggatattctcaaggaaccacacatgtattaagatttggtggtatttttgaatatgtggaatctggcccaatgggagctgaggaacttgcattcagatttgctgtgaacacaattaacagaaacagaacattgctacccaatactacccttacctatgatacccagaagataaacctttatgatagttttgaagcatccaagaaagcctgtgatcagctgtctcttggggtggctgccatcttcgggccttcacacagctcatcagcaaacgcagtgcagtccatctgcaatgctctgggagttccccacatacagacccgctggaagcaccaggtgtcagacaacaaagattccttctatgtcagtctctacccagacttctcttcactcagccgtgccattttagacctggtgcagtttttcaagtggaaaaccgtcacggttgtgtatgatgacagcactggtctcattcgtttgcaagagctcatcaaagctccatcaaggtataatcttcgactcaaaattcgtcagttacctgctgatacaaaggatgcaaaacccttactaaaagaaatgaaaagaggcaaggagtttcatgtaatctttgattgtagccatgaaatggcagcaggcattttaaaacaggcattagctatgggaatgatgacagaatactatcattatatctttaccactctggacctctttgctcttgatgttgagccctaccgatacagtggtgttaacatgacagggttcagaatattaaatacagaaaatacccaagtctcctccatcattgaaaagtggtcgatggaacgattgcaggcacctccgaaacccgattcaggtttgctggatggatttatgacgactgatgctgctctaatgtatgatgctgtgcatgtggtgtctgtggccgttcaacagtttccccagatgacagtcagttccttgcagtgtaatcgacataaaccctggcgcttcgggacccgctttatgagtctaattaaagaggcacattgggaaggcctcacaggcagaataactttcaacaaaaccaatggcttgagaacagattttgatttggatgtgatcagtctgaaggaagaaggtctagaaaagattggaacgtgggatccagccagtggcctgaatatgacagaaagtcaaaagggaaagccagcgaacatcacagattccttatccaatcgttctttgattgttaccaccattttggaagagccttatgtcctttttaagaagtctgacaaacctctctatggtaatgatcgatttgaaggctattgcattgatctcctcagagagttatctacaatccttggctttacatatgaaattagacttgtggaagatgggaaatatggagcccaggatgatgccaatggacaatggaatggaatggttcgtgaactaattgatcataaagctgaccttgcagttgctccactggctattacctatgttcgagagaaggtcatcgacttttccaagccctttatgacacttggaataagtattttgtaccgcaagcccaatggtacaaacccaggcgtcttctccttcctgaatcctctctcccctgatatctggatgtatattctgctggcttacttgggtgtcagttgtgtgctctttgtcatagccaggtttagtccttatgagtggtataatccacacccttgcaaccctgactcagacgtggtggaaaacaattttaccttgctaaatagtttctggtttggagttggagctctcatgcagcaaggttctgagctcatgcccaaagcactgtccaccaggatagtgggaggcatttggtggtttttcacacttatcatcatttcttcgtatactgctaacttagccgcctttctgacagtggaacgcatggaatcccctattgactctgctgatgatttagctaaacaaaccaagatagaatatggagcagtagaggatggtgcaaccatgacttttttcaagaaatcaaaaatctccacgtatgacaaaatgtgggcctttatgagtagcagaaggcagtcagtgctggtcaaaagtaatgaagaaggaatccagcgagtcctcacctctgattatgctttcctaatggagtcaacaaccatcgagtttgttacccagcggaactgtaacctgacacagattggcggccttatagactctaaaggttatggcgttggcactcccatgggttctccatatcgagacaaaattaccatagcaattcttcagctgcaagaggaaggcaaactgcatatgatgaaggagaaatggtggaggggcaatggttgcccagaagaggagagcaaagaggccagtgccctgggggttcagaatattggtggcatcttcattgttctggcagccggcttggtgctttcagtttttgtggcagtgggagaatttttatacaaatccaaaaaaaacgctcaattggaaaagaggtccttctgtagtgccatggtagaagaattgaggatgtccctgaagtgccagcgtcggttaaaacataagccacaggccccagttattgtgaaaacagaagaagttatcaacatgcacacatttaacgacagaaggttgccaggtaaagaaaccatggcataaagctgggaggccaaacacccaagcacaaactgtcgtctttttccaaacaatttagccagaatgtttcctgtggaaatatgcaacctgtgcaaaataaaatgagttacctcatgccgctgtgtctatgaactagagactctgtgatctaagcagttgcaatgatcagacttgatttacaagcatcatggatcaaccaagttacacggggttacactgttaatcatgggttcctcccttcttctgagtgaatgttaacatgcgcattttgtggctgatttcaaatgcagtccagtgagaaattacaggttccttttgaagctcaactgttgccaggagatggaatatcaatgcccaacagggcaaccaataaaagtgtcactaagaatataaatatttggaatcagcaaaaactgtagtgttacaggaaacagtacagtcttctgaacacccagatcatagaggtgatgatgttactagcccccaactactcagtataattattgtctgaatgcaaagtatgtgtttataggatgtgaaaaaatgtaatgcaaaacaaatttgaatcccatggcagttggaatataaagcagatgttcatcacttattttccttttttcttttcttatttttttttttgacagtctgtgtcactgattgagatagaaatgccaattatcaaggaaataatgttttcttaagttccctaaggcagaagatttaacatgcaattctaccagatcccttcctattcccccaacaccttttctctaacccccatatcccaaataataataataataataataataataataataataataataaaagcagttggttcagtgattctgaattaaaaggataatgttttgcaatgttcaagttgtaaaaactggccgagtattggctgtgtggaagactaaagctttcattctaacattcagacatagcaatccaaacccttgttcctgctgtaaatgaacttgatggagcatgggcagatttcagtgatacgagaaaggggactggtcatctatagaaaaatctgtgagagaacttggaagtggactgcgtttatcaatacagtcacaatgttaaatgaacaaaattcttgaacagttttttttcaaaaaatgttcaggtttatttgtggaaatgcaagatttctatgaaaatagtttttgtatggaaatttttgtaatactttttatcaacaaaacaagaacatgtgttcctgtcaggggtgtgatgtcaagcatgaatggtagtgcgtgtgcaccaccaacgtttggtgaaaactatttttatcaagaaaaaaggaatcatagaagagaaatattttcaagttagataatataaaagctaggtgcactaccaccactgcttaccatgccacacccctggtttccacgaggctgacaacatactgtaatgaacaattgtgtgtaaaatggtaaaagacacagacctcttgacaacattgtgataacagttgagtgcacacagtttgctgtttgaatccaatgcacaaaattaaaaaaaatcattaaaactatgttcattttactttca

SEQ ID NO: 137482 - DNA, 4876 bp, Homo sapiens
  Payload ID: 6913
  Gene Symbol: GRIK2
  Gene Name: glutamate receptor, ionotropic, kainate 2
  Uniprot ID: Q13002
  ENST ID: ENST00000413795
  CDS Start-End: 491-3100
ggagagcagctatctcagtctttctcacttaatcttggcttcacgtcagaagctgtgcagcagtgcagtagaatagggcctggcaaaacctttgctagcaaagcgccttttgtgccgggctgtggctcgctatcgacatctcgtccgttaccaaggctgggtttcctactgatttccctcctcctctgctttcacaggctcgcgcggccggacattgtgggtgtgcgtgctggatttctcccggatgctctccgactaacatggatgtcccaccattccttgcagtggaaggttgttccttggcgcagtgagtgaagaacatgcagcgattgctaatgggtttgggaagcggagactccttcctctctctatgaccatgccgtgatcgtgtctgcggtcaccactcgacgcatcctcatttctacccgaacccaggagccgaacgctagatcggggaagtgggtgccgtgcgtgtgggcacagaaacaccatgaagattattttcccgattctaagtaatccagtcttcaggcgcaccgttaaactcctgctctgtttactgtggattggatattctcaaggaaccacacatgtattaagatttggtggtatttttgaatatgtggaatctggcccaatgggagctgaggaacttgcattcagatttgctgtgaacacaattaacagaaacagaacattgctacccaatactacccttacctatgatacccagaagataaacctttatgatagttttgaagcatccaagaaagcctgtgatcagctgtctcttggggtggctgccatcttcgggccttcacacagctcatcagcaaacgcagtgcagtccatctgcaatgctctgggagttccccacatacagacccgctggaagcaccaggtgtcagacaacaaagattccttctatgtcagtctctacccagacttctcttcactcagccgtgccattttagacctggtgcagtttttcaagtggaaaaccgtcacggttgtgtatgatgacagcactggtctcattcgtttgcaagagctcatcaaagctccatcaaggtataatcttcgactcaaaattcgtcagttacctgctgatacaaaggatgcaaaacccttactaaaagaaatgaaaagaggcaaggagtttcatgtaatctttgattgtagccatgaaatggcagcaggcattttaaaacaggcattagctatgggaatgatgacagaatactatcattatatctttaccactctggacctctttgctcttgatgttgagccctaccgatacagtggtgttaacatgacagggttcagaatattaaatacagaaaatacccaagtctcctccatcattgaaaagtggtcgatggaacgattgcaggcacctccgaaacccgattcaggtttgctggatggatttatgacgactgatgctgctctaatgtatgatgctgtgcatgtggtgtctgtggccgttcaacagtttccccagatgacagtcagttccttgcagtgtaatcgacataaaccctggcgcttcgggacccgctttatgagtctaattaaagaggcacattgggaaggcctcacaggcagaataactttcaacaaaaccaatggcttgagaacagattttgatttggatgtgatcagtctgaaggaagaaggtctagaaaagattggaacgtgggatccagccagtggcctgaatatgacagaaagtcaaaagggaaagccagcgaacatcacagattccttatccaatcgttctttgattgttaccaccattttggaagagccttatgtcctttttaagaagtctgacaaacctctctatggtaatgatcgatttgaaggctattgcattgatctcctcagagagttatctacaatccttggctttacatatgaaattagacttgtggaagatgggaaatatggagcccaggatgatgccaatggacaatggaatggaatggttcgtgaactaattgatcataaagctgaccttgcagttgctccactggctattacctatgttcgagagaaggtcatcgacttttccaagccctttatgacacttggaataagtattttgtaccgcaagcccaatggtacaaacccaggcgtcttctccttcctgaatcctctctcccctgatatctggatgtatattctgctggcttacttgggtgtcagttgtgtgctctttgtcatagccaggtttagtccttatgagtggtataatccacacccttgcaaccctgactcagacgtggtggaaaacaattttaccttgctaaatagtttctggtttggagttggagctctcatgcagcaaggttctgagctcatgcccaaagcactgtccaccaggatagtgggaggcatttggtggtttttcacacttatcatcatttcttcgtatactgctaacttagccgcctttctgacagtggaacgcatggaatcccctattgactctgctgatgatttagctaaacaaaccaagatagaatatggagcagtagaggatggtgcaaccatgacttttttcaagaaatcaaaaatctccacgtatgacaaaatgtgggcctttatgagtagcagaaggcagtcagtgctggtcaaaagtaatgaagaaggaatccagcgagtcctcacctctgattatgctttcctaatggagtcaacaaccatcgagtttgttacccagcggaactgtaacctgacacagattggcggccttatagactctaaaggttatggcgttggcactcccatgggttctccatatcgagacaaaattaccatagcaattcttcagctgcaagaggaaggcaaactgcatatgatgaaggagaaatggtggaggggcaatggttgcccagaagaggagagcaaagaggccagtgccctgggggttcagaatattggtggcatcttcattgttctggcagccggcttggtgctttcagtttttgtggcagtgggagaatttttatacaaatccaaaaaaaacgctcaattggaaaaggaatcttctatttggttagtgccaccataccatccagacactgtttagtaatcttttgaaacttactaaaagaggtttttaataatgaggtccttctgtagtgccatggtagaagaattgaggatgtccctgaagtgccagcgtcggttaaaacataagccacaggccccagttattgtgaaaacagaagaagttatcaacatgcacacatttaacgacagaaggttgccaggtaaagaaaccatggcataaagctgggaggccaaacacccaagcacaaactgtcgtctttttccaaacaatttagccagaatgtttcctgtggaaatatgcaacctgtgcaaaataaaatgagttacctcatgccgctgtgtctatgaactagagactctgtgatctaagcagttgcaatgatcagacttgatttacaagcatcatggatcaaccaagttacacggggttacactgttaatcatgggttcctcccttcttctgagtgaatgttaacatgcgcattttgtggctgatttcaaatgcagtccagtgagaaattacaggttccttttgaagctcaactgttgccaggagatggaatatcaatgcccaacagggcaaccaataaaagtgtcactaagaatataaatatttggaatcagcaaaaactgtagtgttacaggaaacagtacagtcttctgaacacccagatcatagaggtgatgatgttactagcccccaactactcagtataattattgtctgaatgcaaagtatgtgtttataggatgtgaaaaaatgtaatgcaaaacaaatttgaatcccatggcagttggaatataaagcagatgttcatcacttattttccttttttcttttcttatttttttttttgacagtctgtgtcactgattgagatagaaatgccaattatcaaggaaataatgttttcttaagttccctaaggcagaagatttaacatgcaattctaccagatcccttcctattcccccaacaccttttctctaacccccatatcccaaataataataataataataataataataataataataataataaaagcagttggttcagtgattctgaattaaaaggataatgttttgcaatgttcaagttgtaaaaactggccgagtattggctgtgtggaagactaaagctttcattctaacattcagacatagcaatccaaacccttgttcctgctgtaaatgaacttgatggagcatgggcagatttcagtgatacgagaaaggggactggtcatctatagaaaaatctgtgagagaacttggaagtggactgcgtttatcaatacagtcacaatgttaaatgaacaaaattcttgaacagttttttttcaaaaaatgttcaggtttatttgtggaaatgcaagatttctatgaaaatagtttttgtatggaaatttttgtaatactttttatcaacaaaacaagaacatgtgttcctgtcaggggtgtgatgtcaagcatgaatggtagtgcgtgtgcaccaccaacgtttggtgaaaactatttttatcaagaaaaaaggaatcatagaagagaaatattttcaagttagataatataaaagctaggtgcactaccaccactgcttaccatgccacacccctggtttccacgaggctgacaacatactgtaatgaacaattgtgtgtaaaatggtaaaagacacagacctcttgacaacattgtgataacagttgagtgcacacagtttgctgtttgaatccaatgcacaaaattaaaaaaaatcattaaaactatgttcattttactttca

SEQ ID NO: 137483 - DNA, 1066 bp, Homo sapiens
  Payload ID: 6913
  Gene Symbol: GRIK2
  Gene Name: glutamate receptor, ionotropic, kainate 2
  ENST ID: ENST00000436862
  CDS Start-End: 1-549
attggaacgtgggatccagccagtggcctgaatatgacagaaagtcaaaagggaaagccagcgaacatcacagattccttatccaatcgttctttgattgttaccaccattttggaagagccttatgtcctttttaagaagtctgacaaacctctctatggtaatgatcgatttgaaggctattgcattgatctcctcagagagttatctacaatccttggctttacatatgaaattagacttgtggaagatgggaaatatggagcccaggatgatgccaatggacaatggaatggaatggttcgtgaactaattgatcataaagctgaccttgcagttgctccactggctattacctatgttcgagagaaggtcatcgacttttccaagccctttatgacacttggaataagtattttgtaccgcaagcccaatggtacaaacccaggcgtcttctccttcctgaatcctctctcccctgatatctggatgtatattctgctggcttacttgggtgtcagttgtgtgctctttgtcatagccaggtaacatgctcacttttgtgatttttttggcaattgttacctcctttatctaactaataattgtcaaaagtcacaatcaattttactttttctgttctttattttccatggggtgctgagaaataatgaaattttaagaatcacattcatttattaaaatgtactgtcctgtctttgtgggcagagagcatgctggttgtgtcagtaagctataagtgttatagggattactgttttcttaaccagaatataaaagctttttaaatcaatatgataaatgaatcattgcctcacttcgaagatttctgaagaaccaaaactaaaataacatgttttactaacttgagttaataattcagttataagaaaaaccaaagtactaaaatttaaaaggaggccttttttaaggaaccaagacatttataataaacattctaactataaaaggactaccttagtattctacataatatttgtggtttttttcttgttttttcacagaataaatgtcattaccaaaa

SEQ ID NO: 137484 - DNA, 9101 bp, Homo sapiens
  Payload ID: 6914
  Gene Symbol: GRIK3
  Gene Name: glutamate receptor, ionotropic, kainate 3
  Uniprot ID: Q13003
  ENST ID: ENST00000373091
  CDS Start-End: 18-2777
ctcggcggcgcccaacgatgaccgctccctggcggcgcctccggagtctggtttgggaatactgggccgggctcctcgtgtgcgccttctggatcccggactcgcgcgggatgccccacgtcatccggatcggaggaatcttcgagtatgcggacggccccaacgcccaggtcatgaatgccgaggagcatgcctttcgattttctgccaacatcatcaacaggaacaggactctgctgcccaacacaaccttgacctatgacatacagaggattcacttccatgacagcttcgaggcgaccaaaaaggcctgtgaccagctggcactgggcgtggtggcgatcttcggcccatcacagggctcctgcaccaatgccgtccagtccatctgcaatgccctggaggtgccccacatccagctgcgttggaagcaccacccgctggacaacaaggacaccttctacgtgaacctctaccccgactacgcctcgctcagccatgccatcctcgacctggtccagtacctcaagtggcggtcagccaccgtggtctatgacgacagtacagggctcatccgactgcaggagctcatcatggccccatcaagatacaacatccgcctgaagatccgtcagctccccatcgactctgacgactcgcgccccttgctcaaggagatgaagcgaggccgggaattccgcattatcttcgactgcagccacactatggcggcccagatcctcaagcaggccatggccatgggcatgatgactgagtactaccacttcatcttcaccactctggatctctacgctttagacctggagccctaccgctactcaggcgtgaacctgacaggattccggattctcaatgtggacaacccacacgtctcggccattgtggagaagtggtccatggagcggctgcaggcagctccccggtccgagtctggcctgctggatggagtgatgatgactgatgcagccttactgtacgacgccgtccatatcgtgtccgtgtgctaccagcgggcaccacagatgaccgtgaactccctgcagtgccatcggcacaaggcctggcgctttggcggccgcttcatgaacttcatcaaggaggctcaatgggaaggattaactggacgaattgttttcaacaaaactagtggcttgcggacggattttgatctggacatcatcagcctgaaagaggatggcctggagaaggttggggtgtggagtcctgccgacgggctcaacatcactgaggttgccaaaggccgaggccctaatgtcaccgactctctgacaaacagatcactcattgtcaccacagtgctggaggagcccttcgtcatgtttcggaaatcagacaggacgctatacgggaatgaccggttcgagggctactgcatcgacctgctaaaggagctggcccacatccttggtttctcctatgagatccggctggtggaggacggcaagtacggggcacaggatgacaagggccagtggaacggcatggtcaaggagctcatcgaccacaaggcagatctggccgtggcccccctgaccatcacccatgttcgagagaaggccatcgacttctccaagcccttcatgacacttggtgtgagcatcctgtatcgaaagcccaatggcaccaaccccagcgtcttctccttcctcaatcccctgtccccagacatctggatgtatgttctcctcgcctacctgggggtcagctgtgtcctcttcgtcatcgccaggttcagcccttatgagtggtacgatgctcacccctgcaaccctggctccgaggtggtggaaaataacttcactctgcttaacagcttctggtttggaatgggatccctgatgcagcaagggtctgagctgatgcccaaagccctgtccacacgcatcattggtggcatctggtggttcttcacgctcatcatcatctcttcctacacggccaacctggctgcctttctgaccgtggagcgcatggaatcacccattgactctgctgatgacctggccaagcaaaccaaaatcgagtatggggctgtcaaggatggggccaccatgaccttcttcaagaaatccaagatctccaccttcgagaagatgtgggccttcatgagcagcaagccatcggcgctggtgaagaacaacgaggagggcatccagagggccctgacggccgactacgcgctgctcatggagtccaccaccatcgagtacgtcacgcagaggaactgcaacctcacccagatcgggggcctcattgactccaagggctacggcatcggcacgcccatgggctccccataccgggacaagatcaccatcgccatcctgcagcttcaggaggaggacaagctgcatatcatgaaggagaagtggtggcggggcagcgggtgtcctgaggaggaaaacaaagaggccagtgccctggggatccagaagatcgggggcatcttcattgtcctggccgccgggctggtcctctctgtgctggtggccgtgggcgagtttgtgtacaagctccgcaaaacagcagagagagagcagcgttccttctgcagcaccgtggccgatgagatccgtttctcccttacctgccagcgtcgagtcaagcacaagcctcagcctcccatgatggtcaagactgacgccgtcatcaacatgcacacattcaatgaccgccggcttcccggcaaggacagcatggcctgcagcacatccttagcccctgtgttcccctaggcacagctggggtggggacctcaggcctgggggctgggcagaggaaagcaaaggagattggaaggaacgtcccctgtccccgcactgggcttggggaccagagctgccacctgcctgttgggccaggagcctcctgcccttacctgccaggaagccagcaggctctcaggccagctgcttgggcttcatcctcctcagatcttctgtgggtttctaaagctgccagccgagatagccaaggccaaaggaagcacatgcctctctcaggccaaactcacctgcccctcaactctcctccagagtcagaagtttctgccgcagccctgcagagggcacagaaaatggaagacagctcttatattgccatttcttccacaagagcccaggcctcctacagcttgaccgtgaggccagagacacaagccttcggcgccttaaggatgttctagcatggctgccaatgggagctcatggtgagggatacccatcccatatgcctgggcagaaggaagacttcatccctctggggctgttcacgtggtcctaatcttctgaacttggcgctgcccctggcagcccctgttctggcagagttgaagacagagctacacaggggaaaagaggagtttggggtatgggagagaagagaatgcacaaacagaggccgccattttggattcttatggacaatgacccagtggttcctaatcctctaggaggtctctaagaatataagtgggggagtggccacagaaaattcttctccactttctagccagaggagagaggaccccctgaatttctcacaaaggatgcccaaagatgcagccggtatttgaagcccagcagaggaaaagcagattccatggaagtcccaccggctcttgtgccaatggatctcactttcctggttagcaagctgttgtctaaaccctgttcacatttggaaacctgggctctttgccatcttctcatcaacaactccccattcctggctggttgaccttggcctcactctgtctttttgaaagaagagttggttgaagtgaaagtcaagttgtccctcctcaaaaaaggagttagtgtcctactacacagactaactttgggctaggtgagggaaaccagaagagaccaaaagaacttctggtctcctggacttaccaaacctagagatgctccccaggaaaagaaagtttccagggacataatatcatagctggcagaggccccaagggtggggaggaagaagctgcctcctggagaattaaccaaagaccccacacagagacatgaggccatcctggccccttgtctgttgtccagagcagctatggcattgtggggcttggggaagacagcagagaagtagcagcaggttgggtaccagccagggggtggacctatgagttccagcttgctgtgatgaatgctctagaggtctgtgactttaagagtcttggaaaagaatgagacatgaaggattaggaacaaagtgtccttaaagagaacatgatgggccagcagggttaccatggccaaggatggaggggcaggttttgaacaggggagggaggttctggggattctggatgagaactggggcataccagccactcccctcccacctctgtcccatgctgcttgggaagcccggttagggaagagcttcatttggatctcaagggctttctcatctgggtgaagggcaatctctagcaaagcaggagaccacagtgggctcatgtgataaacactgtccctcctccagactgtgagctgcaggaccaaaccagcaggttcccagaatcctagcagctctgactggctatgtacattggacgagggagaggagggctagacatacaccaaagccccatgcatgtaatgttaggaaaagccatgctgtcataagcttcagggtacagagggcgtgtgcatgtgtgtctgtgtctttgtgtttgtatgtgtgagcttcgggggctggggcacaggacagatctggacatataacatagtccagggcatgcaataataggtgaatccttggggatctgatgtgtgcatatgcgtgcgtatgtgtatctgagtgaattggggacgagggagacaaatatgtgaagcagcaaggccccatatatgtaaaaacaggagaagccatgtcataatggggccctggtgggtatgcatatgtaagcatgcatgcatgcataggtgtgtgcatgctggtgtgtgtgtgtgcacatgtacactgaatggcataggatggagatcaggatcttacctgcagctagccaaatatgcgtaaaaggagaagccatgtcaccaaggggtccatgtctgagtgcatgtgaacacatgtgtacaggcatgtgtgcacagtggggagcggggggaaggccaggaccagagagtcgtgtgacatgggtcaatgcatgctgtagacaagaagccacgtggagttgaagtttccgagtgtgtgggacacacacatatgttccaggtcacagtggaagcaaagacagacaatcaggaaggccgggcaccagggtctgtttgcacttctgtcatgggagagatcatttgtcacagagaggttccaaggttgcatgggcacacttgccaggagacgggggcacaacccttcaggggctcatgctgctgatgcctttgctgtggacatcatgtcctgtttgaagggaaaactcttttttgtaattcccaggtaacaggattctaatgaaggtatttgccaatttgctgtcagcaaacacaatcattaagcgccgtcttactttgtccagtatagtttcagagcacgtgcctcattcttgctcttgtctcacacatgtgttgtgtgtgtgatgctacatgagcatgttcttcagaggctatgcatatatgtggattgtgacaggaggaagaagaagtggtgagaatttttataaaacgaacaaagaatagtggataaatagaggcagaattcaattcgagaaaccccccaaaatgtaccgactggtctttagactcctgtgtggaagcaggagggcatgctgcctcatctcctctcccaggcaaaccttgcgtcctgatgttcaggtgttgtcggtgtggctgatatttggcttctggccaatatcctgcatttgtcctagagaccagcctagtgttcaaagtgcagtggggaccacagctgcccaagcatgagctctgtctctcccggggcactgaaaatgatgctacatctgtgaggtgggacggagtggggaggtgttttcagtgaggcagatcttgtgtttttttaagtttaggtctgtcctgccagtgggcatggagctgagctggggcaggtgcatgcgtgtgtgtgtatgtgtgtgtatgcatgtgtagtgtgtgtgcacacacgcaggcactgagaggtgatgggaagcatgaaagcttgcttggatggagcagaagaaggaacctgcctgagcagatgctggactgtccctgcgtggtgccacatgccagccctgaacagaagaatgtccccactgcatccccaaatgcaagtgcctcctctccacctgctcaagctggccaagttgaggggcagtggtaagaagacaccaaccccaccgcccctgccgaggccctgggactaaggacagtgagccctcccaatcactctccccttgtcctgctgctggtttctctgctctggacagaagaaaatcctgaaagcgttgtcaatgttcaagtggccccatgctgcaagagtctctcgcgaggggtgacgcccccttggccagtgtgctggactttgagtgtctgaggggtaagagggccaccccctcctcacagccgagactctatctaacctggaagcacactctggctccacccccaacccctgccatgccctaggccctggaagatgggaatcctggcccaggccagggtaaagggccaaacaggttagaagttgctcccctccaccaggcgtgcactcaccaagaacgatcaaaagctccctttctgcctacttttccaggggtactgggtgtggggggtgggtcacagctcctgcttcatcactcagcatgaagttggtccctccctgagccactcccagctacatgcacaaacatctgaaagtaggctggcctctctggctcacatctggagtggtcctgtgtggatacccatctgcaaaggggctagaggtttggacaaacagctgcatggacttatcatctgggatgggcccagcctcatggacagatacaagaaatgagcccaactctgtgggcaggtctctggattagacacatctgaaagttgcaggtcaagtggacacatctggaagtggcccggctgctggctgccatggaagggccgtgccctctgtccccatggcagtttaaatcaggccttcccttcagtcctggatttgccctggagtaaaaatttcagagctgaggtcatacgtgagtcacaaaacttttaggtagaaggttaatgttctgtacaatatatatatgaatgtaaaatatatatatatactgtatatatatatatatatgcacagtgtatatatgacctgtagcccatgtgtatacaaccctttcctgcacgtctgcacacggagtgtacagaacccagccagcacgggtgaggaccagatgagagatgggggctgcagcagcaaagtctgggacggaggtctcagagagccccttggggtggcgaaggccctccacacatcagagctccagaccctgaagaagagggcagagctacatggtgctgccaggtgagtcctgcaccgccagggcctcctgtgggaggggcaggaatggccaacggacctcatctccatccgagcctgtctgaggcaggacagctgggtgtgtctgagaagcaatgtcatgctagtactcagcccctgtgccaatattacattctagttctggggcaattcatcaggagcagaagggctgggaaagagcaggccactccccaggcctgttctcacacctgcctgcagaatcacaggtaggtttcaggctccatctaggataccctagaaggcggggctattctaggtagcaaaagcctctgcctctgattctcacccacatgcagaagcagtcacaacttgcacacaacacagctcacaactagggaaagcacttgttaaagagaatgcccccagggcatggccagcatgccgatacagtgttcccatgcccctgttactgatcctgtcctcctgccttctagaacagtggacctcacatcacctcccagattgtctccattttatggattgaaactctgaggcctccagacatgaagaagcagccatagattcagtcaaatgccagccaagggtttgccttgcctcagacaacctccccagccccatttgacccagagaccagctgtcagggagcgacctcagagccagaggggtgaaagatgagaggcaagaaggtagctcctatcctagcacagcccaggctccatctgtctgcctttctctcccctgcggcatcctggcagggcagttggcagagtgccccctccccaggaggctgcagatctctgtccctggctcacccagatcggtctgttctctgcagttccattcctttagcctctttcgcaggtctgagcatctctggagcatgcaggggaggagatatctgaggtgggcttccgtgcagtcagcagcctgccccagcttcagcctcaggcgtcaggctggtctgcactgaactctgggtctgcctctggggccctgaccaagcacgcctgactccagccccatgaggagcatcctgtcttggttccgtagggatcatgggtcctcttaccactgtgcgccaagcccccagcccacctctgcctgggccgacttcctggttgggcctcccatggtaggggcctcagttcccaggctctgggctgagcccccagggagcaccatgggcctctgagaccctagacctgtcccaccacccagaccagagtgcctggacgccccccactcccactcaacatggttcccacacactggtctctgggccattcaggggatgccctttgtggacatgcagaatttctatgaatatagttttttgtaaacattttgtaacaatttgggtttcatagtaactgtgttacttgccaatcattctaggctgatgtaaataaatttccaaacaaatctgattattttcctttttaagacactgtgatatatcaaagtgcacagtttgctgtatgaagtaatatggttttaaattttaaataaaatgtttctagaaaacaggg

SEQ ID NO: 137485 - DNA, 2955 bp, Homo sapiens
  Payload ID: 6914
  Gene Symbol: GRIK3
  Gene Name: glutamate receptor, ionotropic, kainate 3
  Uniprot ID: Q13003
  ENST ID: ENST00000373093
  CDS Start-End: 22-2640
cacgctcggcggcgcccaacgatgaccgctccctggcggcgcctccggagtctggtttgggaatactgggccgggctcctcgtgtgcgccttctggatcccggactcgcgcgggatgccccacgtcatccggatcggaggaatcttcgagtatgcggacggccccaacgcccaggtcatgaatgccgaggagcatgcctttcgattttctgccaacatcatcaacaggaacaggactctgctgcccaacacaaccttgacctatgacatacagaggattcacttccatgacagcttcgaggcgaccaaaaaggcctgtgaccagctggcactgggcgtggtggcgatcttcggcccatcacagggctcctgcaccaatgccgtccagtccatctgcaatgccctggaggtgccccacatccagctgcgttggaagcaccacccgctggacaacaaggacaccttctacgtgaacctctaccccgactacgcctcgctcagccatgccatcctcgacctggtccagtacctcaagtggcggtcagccaccgtggtctatgacgacagtacagggctcatccgactgcaggagctcatcatggccccatcaagatacaacatccgcctgaagatccgtcagctccccatcgactctgacgactcgcgccccttgctcaaggagatgaagcgaggccgggaattccgcattatcttcgactgcagccacactatggcggcccagatcctcaagcaggccatggccatgggcatgatgactgagtactaccacttcatcttcaccactctggatctctacgctttagacctggagccctaccgctactcaggcgtgaacctgacaggattccggattctcaatgtggacaacccacacgtctcggccattgtggagaagtggtccatggagcggctgcaggcagctccccggtccgagtctggcctgctggatggagtgatgatgactgatgcagccttactgtacgacgccgtccatatcgtgtccgtgtgctaccagcgggcaccacagatgaccgtgaactccctgcagtgccatcggcacaaggcctggcgctttggcggccgcttcatgaacttcatcaaggaggctcaatgggaaggattaactggacgaattgttttcaacaaaactagtggcttgcggacggattttgatctggacatcatcagcctgaaagaggatggcctggagaaggttggggtgtggagtcctgccgacgggctcaacatcactgaggttgccaaaggccgaggccctaatgtcaccgactctctgacaaacagatcactcattgtcaccacagtgctggaggagcccttcgtcatgtttcggaaatcagacaggacgctatacgggaatgaccggttcgagggctactgcatcgacctgctaaaggagctggcccacatccttggtttctcctatgagatccggctggtggaggacggcaagtacggggcacaggatgacaagggccagtggaacggcatggtcaaggagctcatcgaccacaaggcagatctggccgtggcccccctgaccatcacccatgttcgagagaaggccatcgacttctccaagcccttcatgacacttggtgtgagcatcctgtatcgaaagcccaatggcaccaaccccagcgtcttctccttcctcaatcccctgtccccagacatctggatgtatgttctcctcgcctacctgggggtcagctgtgtcctcttcgtcatcgccaggttcagcccttatgagtggtacgatgctcacccctgcaaccctggctccgaggtggtggaaaataacttcactctgcttaacagcttctggtttggaatgggatccctgatgcagcaagggtctgagctgatgcccaaagccctgtccacacgcatcattggtggcatctggtggttcttcacgctcatcatcatctcttcctacacggccaacctggctgcctttctgaccgtggagcgcatggaatcacccattgactctgctgatgacctggccaagcaaaccaaaatcgagtatggggctgtcaaggatggggccaccatgaccttcttcaagaaatccaagatctccaccttcgagaagatgtgggccttcatgagcagcaagccatcggcgctggtgaagaacaacgaggagggcatccagagggccctgacggccgactacgcgctgctcatggagtccaccaccatcgagtacgtcacgcagaggaactgcaacctcacccagatcgggggcctcattgactccaagggctacggcatcggcacgcccatgggctccccataccgggacaagatcaccatcgccatcctgcagcttcaggaggaggacaagctgcatatcatgaaggagaagtggtggcggggcagcgggtgtcctgaggaggaaaacaaagaggccagtgccctggggatccagaagatcgggggcatcttcattgtcctggccgccgggctggtcctctctgtgctggtggccgtgggcgagtttgtgtacaagctccgcaaaacagcagagagagagcaggtaagccttagagcttggagcctgcacaggatgggaaatggagattcgcgctgatttcactcctgtatgtgccaggcacacagtggtgtctcatctcagcctcacaacagctcaccctgcatccagtcggccagcaagccctgccactctacctctgtcctgacctggcacttttttccatcgccgttgccccaccccaggccaagccccatcacctcctgcctggattatgccgcagccttcaaactggccctccagcctccatgcttccccaacaccatccacaattcacacagcaactggtaccttgtttaaaacttaattcaaaccatatcattttcctgcataaaaccctccagggtaattgtt

SEQ ID NO: 137486 - DNA, 4214 bp, Homo sapiens
  Payload ID: 6915
  Gene Symbol: GRIK4
  Gene Name: glutamate receptor, ionotropic, kainate 4
  Uniprot ID: Q16099
  ENST ID: ENST00000438375
  CDS Start-End: 343-3213
cctttcccgattccccgacgtttcgggaggagtggggtcggagcgcagggctgggaagggtcttaggacccaggaaggagacgggtgcctcccagagaggaccccatcccctccgaggtccgggcggctcccggcctctccctggggtgccgtagcccccctcgacccgccttcccgcagccgcagtcgttcgggcctggaggtggccgggcatcggtgccgacgccgcgagggcagcgcccgcggcgggaatactaatgcaccctaaagggcacggccgccgccgcagcagagttatgtcatgcccaggccagcagggggctccatgaggattcatagaagatgccccgcgtctcggcgcctttggtgctgcttcctgcgtggctcgtgatggtcgcctgcagcccgcactccttgaggatcgctgctatcttggacgaccccatggagtgcagcagaggggagcggctctccatcaccctggccaagaaccgcatcaaccgcgctcctgagaggctgggcaaggccaaggtcgaagtggacatctttgagcttctcagagacagcgagtacgagactgcagaaaccatgtgtcagatcctccccaagggggtggtcgctgtcctcggaccatcgtccagcccagcctccagctccatcatcagcaacatctgtggagagaaggaggtccctcacttcaaagtggccccagaggagttcgtcaagttccagttccagagattcacaaccctgaacctccaccccagcaacactgacatcagcgtggctgtagctgggatcctgaacttcttcaactgcaccaccgcctgcctcatctgtgccaaagcagaatgccttttaaacctagagaagctgctccggcaattccttatctccaaggacacgctgtccgtccgcatgctggatgacacccgggaccccaccccgctcctcaaggagatccgggacgacaagaccgccaccatcatcatccacgccaacgcctccatgtcccacaccatcctcctgaaggcagccgaacttgggatggtgtcagcctattacacatacatcttcactaatctggagttctcactccagagaatggacagccttgtggatgatcgtgtcaacatcctgggattttccattttcaaccaatcccatgctttcttccaagagtttgcccagagcctcaaccagtcctggcaggagaactgtgaccatgtgcccttcactgggcctgcgctctcctcggccctgctgtttgatgctgtctatgctgtggtgactgcggtgcaggaactgaaccggagccaagagatcggcgtgaagcccttgtcctgcggctcggcccagatctggcagcacggcaccagcctcatgaactacctgcgcatggtagaattggaaggtcttaccggccacattgaattcaacagcaaaggccagaggtccaactacgctttgaaaatcttacagttcacaaggaatggttttcggcagatcggccagtggcacgtggcagagggcctcagcatggacagccacctctatgcctccaacatctcggacactctcttcaacaccaccctggtcgtcaccaccatcctggagaacccatatttaatgctgaaggggaaccaccaggagatggaaggcaatgaccgctacgagggcttctgtgtggacatgctcaaggagctggcagagatcctccgattcaactacaagatccgcctggttggggatggcgtgtacggcgttcccgaggccaacggcacctggacgggaatggtcggggagctgatcgctaggaaagcagatctggctgtggcaggcctcaccattacagctgaacgggagaaggtgattgatttctctaagccattcatgactctgggaattagcattctttaccgcgttcatatgggacgcaaacccggctatttctccttcctggacccattttctccgggcgtctggctcttcatgcttctagcctatctggccgtcagctgtgtcctcttcctggtggctcggttgacgccctacgagtggtacagcccacacccatgtgcccagggccggtgcaacctcctggtgaaccagtactccctgggcaacagcctctggtttccggtcggggggttcatgcagcaaggctccaccatcgcccctcgcgccttatccacccgctgtgtcagtggcgtctggtgggcattcacgctgatcatcatctcatcctacacggccaacctggcagccttcctgaccgtgcagcgcatggatgtgcccattgagtcagtggatgacctggctgaccagaccgccattgaatatggcacaattcacggaggctccagcatgaccttcttccaaaattcccgctaccagacctaccaacgcatgtggaattacatgtattccaagcagcccagcgtgttcgtgaagagcacagaggagggaatcgccagggtgttgaattccaactacgccttcctcctggaatccaccatgaacgagtactatcggcagcgaaactgcaacctcactcagattgggggcctgctggacaccaagggctatgggattggcatgccagtcggctcggttttccgggacgagtttgatctggccattctccagctgcaggagaacaaccgcctggagatcctgaagcgcaaatggtgggaaggagggaagtgccccaaggaggaagatcacagagctaaaggcctgggaatggagaatattggtggaatctttgtggttcttatttgtggcttaatcgtggccatttttatggctatgttggagtttttatggactctcagacactcagaagcaactgaggtgtccgtctgccaggagatggtgaccgagctgcgcagcattatcctgtgtcaggacagtatccacccccgccggcggcgcgccgcagtcccgccgccccggccccccatccccgaggagcgccgaccgcggggcacggcgacgctcagcaacgggaagctgtgcggggcaggggagcccgaccagctcgcgcagagactggcgcaggaggccgccctggtggcccgcggctgcacgcacatccgcgtctgccccgagtgccgccgcttccagggcctgcgggcacggccgtcgcccgcccgcagcgaggagagcctggagtgggagaaaaccaccaacagcagcgagcccgagtagtcccggaggccacaggacgcgcagaggccgggcggggcgggaggggaggggcggggcgggcgctgctgtcagccgccagccggaacttgtacagcgtcgacacctctccagatttcggatccagtcacttttcaaaaagatcaaggagcctgacgccccagccagagaccgcgcccggtcagggagcagggtccacccggaaacgttgcacccaaagggcaaaggacggccctccctcctgggcacaaggacccatcttctcccagtgggtctttccctctcgccaaaataacaagagtatagggtggggggtccctacccagaccagtccaatgaattggtggaatcatcagttgaatttccccctagtcaggggccaatgtaccctccgtctagttcttacagaaaaaaaaaaaattaaacagggaagtttttcttttctggatttgtatatttttgttaatgttcttttcccttttctttcctcctctccttttcttctttgtcatcttctcagtcctgttaatttgttttgtgttttttggagggggaggctgggttagggaatggaagcctaaataatccctatttcttctttttcctgaattttggaatattgcgttaccagtgcatccgatttcaggtgcttaactctctgtatggtgactgaggggcctgcaggagcacaggagaaggagtcttgggaagaatcagatggagagtctcaaaagtccattgcagtaaactttgagatgccaaaaagcaattaactcatcctatactcagaccttgaaacgcctggaatgtcaagggttaatctgtcttttctttccctttctctttctgactgtcactattactgggtttgatttgatctttttgtgaatgtagtctctgaagacagacaggggaggagaacagaatgcacaaagtatcctaggactttgtttaaggagcggaaagagcagatagaattttcccataccatggccttggcttcc

SEQ ID NO: 137487 - DNA, 5802 bp, Homo sapiens
  Payload ID: 6915
  Gene Symbol: GRIK4
  Gene Name: glutamate receptor, ionotropic, kainate 4
  Uniprot ID: Q16099
  ENST ID: ENST00000527524
  CDS Start-End: 288-3158
agctgcgggcggatcgggctggagccgccacggctgctgcggaagaggaaaaacggccaacagcagccccgcggccggcccggcagcgcccggcccccggctcagcccccggagtgcggagccgaccagcagatactttctgagtgcctactatgtgccagcctgtgctaggcactgaggacacaggtggaaaagcccgaattgctccctgctctcctggcgctcatcaccccggagagttatgtcatgcccaggccagcagggggctccatgaggattcatagaagatgccccgcgtctcggcgcctttggtgctgcttcctgcgtggctcgtgatggtcgcctgcagcccgcactccttgaggatcgctgctatcttggacgaccccatggagtgcagcagaggggagcggctctccatcaccctggccaagaaccgcatcaaccgcgctcctgagaggctgggcaaggccaaggtcgaagtggacatctttgagcttctcagagacagcgagtacgagactgcagaaaccatgtgtcagatcctccccaagggggtggtcgctgtcctcggaccatcgtccagcccagcctccagctccatcatcagcaacatctgtggagagaaggaggtccctcacttcaaagtggccccagaggagttcgtcaagttccagttccagagattcacaaccctgaacctccaccccagcaacactgacatcagcgtggctgtagctgggatcctgaacttcttcaactgcaccaccgcctgcctcatctgtgccaaagcagaatgccttttaaacctagagaagctgctccggcaattccttatctccaaggacacgctgtccgtccgcatgctggatgacacccgggaccccaccccgctcctcaaggagatccgggacgacaagaccgccaccatcatcatccacgccaacgcctccatgtcccacaccatcctcctgaaggcagccgaacttgggatggtgtcagcctattacacatacatcttcactaatctggagttctcactccagagaatggacagccttgtggatgatcgtgtcaacatcctgggattttccattttcaaccaatcccatgctttcttccaagagtttgcccagagcctcaaccagtcctggcaggagaactgtgaccatgtgcccttcactgggcctgcgctctcctcggccctgctgtttgatgctgtctatgctgtggtgactgcggtgcaggaactgaaccggagccaagagatcggcgtgaagcccttgtcctgcggctcggcccagatctggcagcacggcaccagcctcatgaactacctgcgcatggtagaattggaaggtcttaccggccacattgaattcaacagcaaaggccagaggtccaactacgctttgaaaatcttacagttcacaaggaatggttttcggcagatcggccagtggcacgtggcagagggcctcagcatggacagccacctctatgcctccaacatctcggacactctcttcaacaccaccctggtcgtcaccaccatcctggagaacccatatttaatgctgaaggggaaccaccaggagatggaaggcaatgaccgctacgagggcttctgtgtggacatgctcaaggagctggcagagatcctccgattcaactacaagatccgcctggttggggatggcgtgtacggcgttcccgaggccaacggcacctggacgggaatggtcggggagctgatcgctaggaaagcagatctggctgtggcaggcctcaccattacagctgaacgggagaaggtgattgatttctctaagccattcatgactctgggaattagcattctttaccgcgttcatatgggacgcaaacccggctatttctccttcctggacccattttctccgggcgtctggctcttcatgcttctagcctatctggccgtcagctgtgtcctcttcctggtggctcggttgacgccctacgagtggtacagcccacacccatgtgcccagggccggtgcaacctcctggtgaaccagtactccctgggcaacagcctctggtttccggtcggggggttcatgcagcaaggctccaccatcgcccctcgcgccttatccacccgctgtgtcagtggcgtctggtgggcattcacgctgatcatcatctcatcctacacggccaacctggcagccttcctgaccgtgcagcgcatggatgtgcccattgagtcagtggatgacctggctgaccagaccgccattgaatatggcacaattcacggaggctccagcatgaccttcttccaaaattcccgctaccagacctaccaacgcatgtggaattacatgtattccaagcagcccagcgtgttcgtgaagagcacagaggagggaatcgccagggtgttgaattccaactacgccttcctcctggaatccaccatgaacgagtactatcggcagcgaaactgcaacctcactcagattgggggcctgctggacaccaagggctatgggattggcatgccagtcggctcggttttccgggacgagtttgatctggccattctccagctgcaggagaacaaccgcctggagatcctgaagcgcaaatggtgggaaggagggaagtgccccaaggaggaagatcacagagctaaaggcctgggaatggagaatattggtggaatctttgtggttcttatttgtggcttaatcgtggccatttttatggctatgttggagtttttatggactctcagacactcagaagcaactgaggtgtccgtctgccaggagatggtgaccgagctgcgcagcattatcctgtgtcaggacagtatccacccccgccggcggcgcgccgcagtcccgccgccccggccccccatccccgaggagcgccgaccgcggggcacggcgacgctcagcaacgggaagctgtgcggggcaggggagcccgaccagctcgcgcagagactggcgcaggaggccgccctggtggcccgcggctgcacgcacatccgcgtctgccccgagtgccgccgcttccagggcctgcgggcacggccgtcgcccgcccgcagcgaggagagcctggagtgggagaaaaccaccaacagcagcgagcccgagtagtcccggaggccacaggacgcgcagaggccgggcggggcgggaggggaggggcggggcgggcgctgctgtcagccgccagccggaacttgtacagcgtcgacacctctccagatttcggatccagtcacttttcaaaaagatcaaggagcctgacgccccagccagagaccgcgcccggtcagggagcagggtccacccggaaacgttgcacccaaagggcaaaggacggccctccctcctgggcacaaggacccatcttctcccagtgggtctttccctctcgccaaaataacaagagtatagggtggggggtccctacccagaccagtccaatgaattggtggaatcatcagttgaatttccccctagtcaggggccaatgtaccctccgtctagttcttacagaaaaaaaaaaaattaaacagggaagtttttcttttctggatttgtatatttttgttaatgttcttttcccttttctttcctcctctccttttcttctttgtcatcttctcagtcctgttaatttgttttgtgttttttggagggggaggctgggttagggaatggaagcctaaataatccctatttcttctttttcctgaattttggaatattgcgttaccagtgcatccgatttcaggtgcttaactctctgtatggtgactgaggggcctgcaggagcacaggagaaggagtcttgggaagaatcagatggagagtctcaaaagtccattgcagtaaactttgagatgccaaaaagcaattaactcatcctatactcagaccttgaaacgcctggaatgtcaagggttaatctgtcttttctttccctttctctttctgactgtcactattactgggtttgatttgatctttttgtgaatgtagtctctgaagacagacaggggaggagaacagaatgcacaaagtatcctaggactttgtttaaggagcggaaagagcagatagaattttcccataccatggccttggcttccggtggaacgtgccgttcacagaggcggaaggactgggccaccccgttggtatggtgcatactttgtcaactgcatctcttttcaaccaaactcaaatgagtggctgcctatgaagccagacccccaagactatcatggattgggtggtttcttgctacttagacgtgagacctgggtgcaagtgtatgtgtgtgtatgtgtgcgcgcgtgtgcgtgtgtgtatttattcaacagaaagaccttaagtattcaagaatttgctaggttcctgggagagaggtggagtctcctagtcaatacacgggcctgggaaccaggaactcttgagtcgtaacctcagcttgagcagtagccctcccaccttgtatgactttaggtaaagcatttaacttctcttccatctaccaaataggagttactgatgctgtccaggttaccaggtgactgctagtgactgctctccatgtgagaagtttgcagagtccagagcacacatctgatgggaggggcgaggctttctacagctgcttgacctttgcttggcttcactaattgggagtttcacgcagagttctcattggctgatggaaaacaaattctatgcaatttctgattgtaaacttagaaaattcagagagaaacaaacagccgctaccaaccacctccacctccaccaccgctgccaccaccttgaatggaattgtcctcacttttgttgctgttgcaaatgtactaaaataaagacatctttggaagatgacgagcttaattcatgtttttgccatttgggttggtcggcatcctctttatgccaggacaatcagttagggctgccgtcctgggggccaaatggtaccctgattattcctgtgagggatactcgttttgtcctcacctgacctcactcatgaatttgaatcctttatcttttttctctttaaccatcaaatgacaacaagctgtgcaagacacttgtgtctttttttaaaccttgccttgatcctcgtggagaaacgtggatttggtgggaagggcacccgaaggccagctgacaacaaaccccaatggtgccactctgctccaacctgcagctccatcctatgcttctcacagacaacgtggttcctactgtcagatcacatttggggcgggaagggtggttttttaaaaaaactcgtttttatgagcaggctatcttgatcaatagcaaactttttttaatggattagtgaaataaatgtccccatgcatcatttatagtctgtttctttctccgtgtggaatcaagataagactgccagcactagacggtttctgttagctgctgagaccagggcctcaccttgctcaagctagtgggtgaatttgcaaccagctaatactcttccttggtttgtttccactttttatctgttggttgttggctttcttttccattctgtattttctatctgactctgtatactgtataaagcagttttttcttgtctgtttatctttcttcaactggaatatttacaataaaacagaaacaaatcctgaaatgttagtgatggatgacagctgtttgggtttagaaagtatggttcagtgtgtctaatatccaggtactagacttgaaaagcaaataaaatcataaaccc

SEQ ID NO: 137488 - DNA, 3493 bp, Homo sapiens
  Payload ID: 6916
  Gene Symbol: GRIK5
  Gene Name: glutamate receptor, ionotropic, kainate 5
  Uniprot ID: Q16478
  ENST ID: ENST00000262895
  CDS Start-End: 1-2943
atgccggctgagctgctgctgctgctgattgttgccttcgccagccccagctgccaggtgctctcatcactgcgcatggctgcaatcctggatgatcagacagtgtgtggccgcggtgagcgtctggccttggccttggcccgggagcagatcaacgggatcatcgaggtcccagccaaggcccgagtggaagtagacatctttgagctgcagcgggacagccagtacgagaccacggacaccatgtgtcagatcttacccaaaggggttgtgtctgtccttgggccctcctctagcccagcatctgcctccaccgtgagccatatctgtggagagaaggagatcccccacatcaaggtgggtcccgaggagacaccccgccttcagtaccttcgcttcgcgtctgtcagcctgtaccccagtaacgaggacgtcagcttggcggtctcccgaatcctcaagtccttcaactacccctcggccagcctcatctgcgccaaggctgagtgcctgctgcgattggaggaactggtgcgtggcttcctcatctccaaggagacgctgtcagtgaggatgttggacgacagccgggaccccacaccactgctcaaggagatccgtgatgacaaggtgtccaccatcatcatcgacgccaacgcctccatctcccacctcatcctccgtaaggcctcggaactgggaatgacctcagcgttttacaagtacatcctcaccaccatggacttccccatcctgcatctggacggtattgtggaggactcctccaacatcctgggcttctccatgttcaacacgtcccaccccttctaccctgagtttgtccgcagcctcaacatgtcctggagggagaactgtgaagccagcacctacctgggccctgcgctgtcagccgccctgatgtttgacgccgtgcacgtggtggtgagcgctgtccgagagctgaaccgcagccaggagatcggtgtgaagcctctggcctgtacatcggccaacatttggccccacgggaccagcctcatgaactacctgcgcatggtagagtatgatgggctgaccgggcgggtcgagttcaacagcaaagggcagagaaccaactacaccctgcgcatcctagaaaagtcccggcagggccaccgtgagattggggtgtggtactctaaccgcaccctggccatgaatgccaccaccctggacatcaacctgtcgcagacactggccaacaagaccctggtggtcacaaccatcctggagaacccatacgtcatgcgccggcccaacttccaggccctgtcggggaacgaacgcttcgagggcttctgcgtggacatgctgcgggagctggccgagctgctgcgcttccgctaccgcctgcggttggtggaggatgggctgtacggggcgcccgagcccaacggctcctggacgggcatggttggcgagctcatcaaccggaaggcagacctggctgtggccgccttcaccatcacagctgagcgggagaaggtcatcgacttttccaagccctttatgaccctggggatcagcatcctctaccgagtgcacatgggccgcaagcctggctacttctccttcctggaccccttctcccctgctgtgtggctcttcatgcttcttgcctacctggctgtcagctgcgtcctgtttctggctgccaggctgagcccctatgagtggtataacccacacccatgcctgcgggcacgcccccacatcctggagaaccagtacacgctgggcaacagcctgtggtttcccgtggggggcttcatgcagcagggctcggagatcatgccccgggcgctgtccacgcgctgtgtcagcggagtctggtgggccttcaccttgatcatcatctcctcctacacggccaacctggccgccttcctcaccgtgcagcgcatggaggtgcctgtggagtcggccgatgacctggcagatcagaccaacatcgagtatggcaccatccacgccggctccaccatgaccttcttccagaattcacggtaccaaacgtaccagcgcatgtggaactacatgcagtcgaagcagcccagcgtgttcgtcaagagcacagaagagggcattgcccgcgtcctcaactcccgctacgccttcctgctcgagtccaccatgaacgaataccaccggcgcctcaactgcaacctcacccagatcgggggactcctcgacaccaagggctacggcattggcatgccgctgggctccccgttccgggatgagatcacactggccatcctgcagcttcaggagaacaaccggctggagatcctgaagcgcaagtggtgggaggggggccggtgccccaaggaggaggaccatcgagctaaaggtttgggcatggagaacattggtggcatttttatcgtgctcatctgtggcctcatcattgctgtcttcgtggcggtcatggaattcatatggtccacacggaggtcagctgagtccgaggaggtgtcggtgtgccaggagatgctgcaggagctgcgccacgccgtttcttgccgcaagacgtcgcgttcccgccggcgccgacgcccgggcggcccgagccgggccctgctgtcactgcgcgcggtccgcgagatgcgcctcagcaacggcaagctctactcggccggcgcgggcggggatgcgggcagcgcgcacgggggcccgcagcgcctcctggacgacccggggccccccagcggagcccgacccgccgcccccaccccctgcacccacgtgcgcgtctgccaggagtgccggcgcatccaggcgctgcgggcctcgggggccggcgcgcctccgcgtggcctgggcgtccccgccgaagccaccagcccgccccggccgcggcctggccccgccggcccccgggagctggcggagcacgagtgaccacgggcggggctgtgcgggcgcccggactgaccgaagggacggggcccgccccaggccccagcagtctccgctcccgcagcgggcgcgggacaggacttgtgcgccggcgccccggacgccgcgattttgcctttggttccccgcgaagtccgaggcctggctctggagcccgcctgcgccccccagtggactcgcgagagggtgccgcgggcgagaagggcgcaggaaccgaggactccaggggctggggacttcgggggcggctctgggaagcggaaagcagtcagcggagaggaccccattctgggactgctcaggctccccaagacttgacgcagccccccacgcttctggaggtggggagggcctctggacagatgggtgtcccctggtgcccctccactcttctcttcctctcttttttggggggagaaacctcggaatttctatgagacctcccccagggagggggtcagttgggcccccatccctccccttgccacatcgcagcccctgttggaataaaaaaaagaacaaaaccccagaa

SEQ ID NO: 137489 - DNA, 3310 bp, Homo sapiens
  Payload ID: 6916
  Gene Symbol: GRIK5
  Gene Name: glutamate receptor, ionotropic, kainate 5
  Uniprot ID: Q16478
  ENST ID: ENST00000301218
  CDS Start-End: 36-2981
cgcggcagctgcgtccccatgaggaggggaggaagatgccggctgagctgctgctgctgctgattgttgccttcgccagccccagctgccaggtgctctcatcactgcgcatggctgcaatcctggatgatcagacagtgtgtggccgcggtgagcgtctggccttggccttggcccgggagcagatcaacgggatcatcgaggtcccagccaaggcccgagtggaagtagacatctttgagctgcagcgggacagccagtacgagaccacggacaccatgtgtcagatcttacccaaaggggttgtgtctgtccttgggccctcctctagcccagcatctgcctccaccgtgagccatatctgtggagagaaggagatcccccacatcaaggtgggtcccgaggagacaccccgccttcagtaccttcgcttcgcgtctgtcagcctgtaccccagtaacgaggacgtcagcttggcggtctcccgaatcctcaagtccttcaactacccctcggccagcctcatctgcgccaaggctgagtgcctgctgcgattggaggaactggtgcgtggcttcctcatctccaaggagacgctgtcagtgaggatgttggacgacagccgggaccccacaccactgctcaaggagatccgtgatgacaaggtgtccaccatcatcatcgacgccaacgcctccatctcccacctcatcctccgtaaggcctcggaactgggaatgacctcagcgttttacaagtacatcctcaccaccatggacttccccatcctgcatctggacggtattgtggaggactcctccaacatcctgggcttctccatgttcaacacgtcccaccccttctaccctgagtttgtccgcagcctcaacatgtcctggagggagaactgtgaagccagcacctacctgggccctgcgctgtcagccgccctgatgtttgacgccgtgcacgtggtggtgagcgctgtccgagagctgaaccgcagccaggagatcggtgtgaagcctctggcctgtacatcggccaacatttggccccacgggaccagcctcatgaactacctgcgcatggtagagtatgatgggctgaccgggcgggtcgagttcaacagcaaagggcagagaaccaactacaccctgcgcatcctagaaaagtcccggcagggccaccgtgagattggggtgtggtactctaaccgcaccctggccatgaatgccaccaccctggacatcaacctgtcgcagacactggccaacaagaccctggtggtcacaaccatcctggagaacccatacgtcatgcgccggcccaacttccaggccctgtcggggaacgaacgcttcgagggcttctgcgtggacatgctgcgggagctggccgagctgctgcgcttccgctaccgcctgcggttggtggaggatgggctgtacggggcgcccgagcccaacggctcctggacgggcatggttggcgagctcatcaaccggaaggcagacctggctgtggccgccttcaccatcacagctgagcgggagaaggtcatcgacttttccaagccctttatgaccctggggatcagcatcctctaccgagtgcacatgggccgcaagcctggctacttctccttcctggaccccttctcccctgctgtgtggctcttcatgcttcttgcctacctggctgtcagctgcgtcctgtttctggctgccaggctgagcccctatgagtggtataacccacacccatgcctgcgggcacgcccccacatcctggagaaccagtacacgctgggcaacagcctgtggtttcccgtggggggcttcatgcagcagggctcggagatcatgccccgggcgctgtccacgcgctgtgtcagcggagtctggtgggccttcaccttgatcatcatctcctcctacacggccaacctggccgccttcctcaccgtgcagcgcatggaggtgcctgtggagtcggccgatgacctggcagatcagaccaacatcgagtatggcaccatccacgccggctccaccatgaccttcttccagaattcacggtaccaaacgtaccagcgcatgtggaactacatgcagtcgaagcagcccagcgtgttcgtcaagagcacagaagagggcattgcccgcgtcctcaactcccgctacgccttcctgctcgagtccaccatgaacgaataccaccggcgcctcaactgcaacctcacccagatcgggggactcctcgacaccaagggctacggcattggcatgccgctgggctccccgttccgggatgagatcacactggccatcctgcagcttcaggagaacaaccggctggagatcctgaagcgcaagtggtgggaggggggccggtgccccaaggaggaggaccatcgagctaaaggtttgggcatggagaacattggtggcatttttatcgtgctcatctgtggcctcatcattgctgtcttcgtggcggtcatggaattcatatggtccacacggaggtcagctgagtccgaggagaccccagctctgcatccagctgcctgccagtgttctgcacttggcccaaggactcctctgaaggagccgtccatgctgctagtaaaggtgccctccacccgtgtccaggttgccttctcaaggacatccctccggcaagtctgtcctttcctcctgcagcatcagttgtcctctctttattggattcaggccaccaacgtacaaatatgctgtcatttctccagtcttaaaccctctcctgacctcactttccctcccagccaccgcccactttcttcccttctctttacagccttggcagcagtggggggtctccctgatgcttccagtttcttctttcctcccatttcctcttgccccccactccagtctggcatcggtccctgccactccactgaagccactcttgtcaccagcaacttccatgtctgaaattcccggtctcaggcctcatgtatatgaggtagcagtgggcttcggcacagccagtcactctcaatcctcaaagccccttcttccccttctcccacttctccggtcactccttcccaggctccctcgttgggtttctctttctccccaggctctgtttgttgtggggctccagggctcagtccttagactgcttctcttctcggtctttctccactacttgaatgatcccaccagccaaatggctcttaagacccactatgtgctggtgattcttgtgttagttatctattgctatcataacaaatgaccttaacagcttttaaaaa

SEQ ID NO: 137490 - DNA, 2101 bp, Homo sapiens
  Payload ID: 6916
  Gene Symbol: GRIK5
  Gene Name: glutamate receptor, ionotropic, kainate 5
  ENST ID: ENST00000594528
  CDS Start-End: 36-368
cgcggcagctgcgtccccatgaggaggggaggaagatgccggctgagctgctgctgctgctgattgttgccttcgccagccccagctgccaggtgctctcatcactgcgcatggctgcaatcctggatgatcagacagtgtgtggccgcggtgagcgtctggccttggccttggcccgggagcagatcaacgggatcatcgaggtcccagccaaggcccgagtggaagtagacatctttgagctgcagcgggacagccagtacgagaccacggacaccattgccatggctagaagaatggagttctgtgactccccaaggcctgcatcaggtgccagtcaatcctgggaaccctggactgaagggtgaggatagttcccccaggagaagttagggttctgccatgagaacaggcactggacaagcaaaaacaacagctttccacctcccagtcttgagacacacatgtgtataaggaggaagagagcagaagaaagaggaggaatgtgtcagatcttacccaaaggggttgtgtctgtccttgggccctcctctagcccagcatctgcctccaccgtgagccatatctgtggagagaaggagatcccccacatcaaggtgggtcccgaggagacaccccgccttcagtaccttcgcttcgcgtctgtcagcctgtaccccagtaacgaggacgtcagcttggcggtctcccgaatcctcaagtccttcaactacccctcggccagcctcatctgcgccaaggctgagtgcctgctgcgattggaggaactggtgcgtggcttcctcatctccaaggagacgctgtcagtgaggatgttggacgacagccgggaccccacaccactgctcaaggagatccgtgatgacaaggtgtccaccatcatcatcgacgccaacgcctccatctcccacctcatcctccgtaaggcctcggaactgggaatgacctcagcgttttacaagtacatcctcaccaccatggacttccccatcctgcatctggacggtattgtggaggactcctccaacatcctgggcttctccatgttcaacacgtcccaccccttctaccctgagtttgtccgcagcctcaacatgtcctggagggagaactgtgaagccagcacctacctgggccctgcgctgtcagccgccctgatgtttgacgccgtgcacgtggtggtgagcgctgtccgagagctgaaccgcagccaggagatcggtgtgaagcctctggcctgtacatcggccaacatttggccccacgggaccagcctcatgaactacctgcgcatggtagagtatgatgggctgaccgggcgggtcgagttcaacagcaaagggcagagaaccaactacaccctgcgcatcctagaaaagtcccggcagggccaccgtgagattggggtgtggtactctaaccgcaccctggccatgaatgccaccaccctggacatcaacctgtcgcagacactggccaacaagaccctggtggtcacaaccatcctggagaacccatacgtcatgcgccggcccaacttccaggccctgtcggggaacgaacgcttcgagggcttctgcgtggacatgctgcgggagctggccgagctgctgcgcttccgctaccgcctgcggttggtggaggatgggctgtacggggcgcccgagcccaacggctcctggacgggcatggttggcgagctcatcaaccggaaggcagacctggctgtggccgccttcaccatcacagctgagcgggagaaggtcatcgacttttccaagccctttatgaccctggggatcagcatcctctaccgagtgcacatgggccgcaagcctggctacttctccttcctggaccccttctcccctgctgtgtggctcttcatgcttcttgcctacctggctgtcagctgcgtcctgtttctggctgccaggctgagcccctatgagtggtataacccacacccatgcctgcgggcacgcccccacatcctggagaaccagtacacgctgggcaacagcctgtggtttcccgtggggggcttcatgcagcagggctcggagatcatgccccgggc

SEQ ID NO: 137491 - DNA, 3308 bp, Homo sapiens
  Payload ID: 6916
  Gene Symbol: GRIK5
  Gene Name: glutamate receptor, ionotropic, kainate 5
  Uniprot ID: Q16478
  ENST ID: ENST00000593562
  CDS Start-End: 309-3251
ccccttctctcctccattttctcctttccccttcctcccctccccggcccgccctctcctcttccacctgtccttcctccctgctcctgtggagccaccgttttggattagttgggagccaccaccggcggcgggggagggggccctgtggactgccctctccccccgcccagccccaccaccacccagcgccagagcacctcccgctgtcggtcttcgggcctcgagggagcccagccctccgtcccaccaggatccgtggcgagtgggggccgcggcagctgcgtccccatgaggaggggaggaagatgccggctgagctgctgctgctgctgattgttgccttcgccagccccagctgccaggtgctctcatcactgcgcatggctgcaatcctggatgatcagacagtgtgtggccgcggtgagcgtctggccttggccttggcccgggagcagatcaacgggatcatcgaggtcccagccaaggcccgagtggaagtagacatctttgagctgcagcgggacagccagtacgagaccacggacaccatgtgtcagatcttacccaaaggggttgtgtctgtccttgggccctcctctagcccagcatctgcctccaccgtgagccatatctgtggagagaaggagatcccccacatcaaggtgggtcccgaggagacaccccgccttcagtaccttcgcttcgcgtctgtcagcctgtaccccagtaacgaggacgtcagcttggcggtctcccgaatcctcaagtccttcaactacccctcggccagcctcatctgcgccaaggctgagtgcctgctgcgattggaggaactggtgcgtggcttcctcatctccaaggagacgctgtcagtgaggatgttggacgacagccgggaccccacaccactgctcaaggagatccgtgatgacaaggtgtccaccatcatcatcgacgccaacgcctccatctcccacctcatcctccgtaaggcctcggaactgggaatgacctcagcgttttacaagtacatcctcaccaccatggacttccccatcctgcatctggacggtattgtggaggactcctccaacatcctgggcttctccatgttcaacacgtcccaccccttctaccctgagtttgtccgcagcctcaacatgtcctggagggagaactgtgaagccagcacctacctgggccctgcgctgtcagccgccctgatgtttgacgccgtgcacgtggtggtgagcgctgtccgagagctgaaccgcagccaggagatcggtgtgaagcctctggcctgtacatcggccaacatttggccccacgggaccagcctcatgaactacctgcgcatggtagagtatgatgggctgaccgggcgggtcgagttcaacagcaaagggcagagaaccaactacaccctgcgcatcctagaaaagtcccggcagggccaccgtgagattggggtgtggtactctaaccgcaccctggccatgaatgccaccaccctggacatcaacctgtcgcagacactggccaacaagaccctggtggtcacaaccatcctggagaacccatacgtcatgcgccggcccaacttccaggccctgtcggggaacgaacgcttcgagggcttctgcgtggacatgctgcgggagctggccgagctgctgcgcttccgctaccgcctgcggttggtggaggatgggctgtacggggcgcccgagcccaacggctcctggacgggcatggttggcgagctcatcaaccggaaggcagacctggctgtggccgccttcaccatcacagctgagcgggagaaggtcatcgacttttccaagccctttatgaccctggggatcagcatcctctaccgagtgcacatgggccgcaagcctggctacttctccttcctggaccccttctcccctgctgtgtggctcttcatgcttcttgcctacctggctgtcagctgcgtcctgtttctggctgccaggctgagcccctatgagtggtataacccacacccatgcctgcgggcacgcccccacatcctggagaaccagtacacgctgggcaacagcctgtggtttcccgtggggggcttcatgcagcagggctcggagatcatgccccgggcgctgtccacgcgctgtgtcagcggagtctggtgggccttcaccttgatcatcatctcctcctacacggccaacctggccgccttcctcaccgtgcagcgcatggaggtgcctgtggagtcggccgatgacctggcagatcagaccaacatcgagtatggcaccatccacgccggctccaccatgaccttcttccagaattcacggtaccaaacgtaccagcgcatgtggaactacatgcagtcgaagcagcccagcgtgttcgtcaagagcacagaagagggcattgcccgcgtcctcaactcccgctacgccttcctgctcgagtccaccatgaacgaataccaccggcgcctcaactgcaacctcacccagatcgggggactcctcgacaccaagggctacggcattggcatgccgctgggctccccgttccgggatgagatcacactggccatcctgcagcttcaggagaacaaccggctggagatcctgaagcgcaagtggtgggaggggggccggtgccccaaggaggaggaccatcgagctaaaggtttgggcatggagaacattggtggcatttttatcgtgctcatctgtggcctcatcattgctgtcttcgtggcggtcatggaattcatatggtccacacggaggtcagctgagtccgaggaggtgtcggtgtgccaggagatgctgcaggagctgcgccacgccgtttcttgccgcaagacgtcgcgttcccgccggcgccgacgcccgggcggcccgagccgggccctgctgtcactgcgcgcggtccgcgagatgcgcctcagcaacggcaagctctactcggccggcgcgggcggggatgcgggcagcgcgcacgggggcccgcagcgcctcctggacgacccggggccccccagcggagcccgacccgccgcccccaccccctgcacccacgtgcgcgtctgccaggagtgccggcgcatccaggcgctgcgggcctcgggggccggcgcgcctccgcgtggcctgggcgtccccgccgaagccaccagcccgccccggccgcggcctggccccgccggcccccgggagctggcggagcacgagtgaccacgggcggggctgtgcgggcgcccggactgaccgaagggacggggcccgccccag

SEQ ID NO: 137492 - DNA, 4465 bp, Homo sapiens
  Payload ID: 6917
  Gene Symbol: GRIN1
  Gene Name: glutamate receptor, ionotropic, N-methyl D-aspartate 1
  ENST ID: ENST00000350902
  CDS Start-End: 313-1383
ccggaaccagcgccgtccgcggagccgccgccgccgccgccgggccctttccaagccgggcgctcggagctgtgcccggccccgcttcagcaccgcggacagcgccggccgcgtggggctgagccccgagcccccgcgcacgcttcagcgccccttccctcggccgacgtcccgggaccgccgctccgggggagacgtggcgtccgcagcccgcggggccgggcgagcgcaggacggcccggaagccccgcgggggatgcgccgagggccccgcgttcgcgccgcgcagagccaggcccgcggcccgagcccatgagcaccatgcgcctgctgacgctcgccctgctgttctcctgctccgtcgcccgtgccgcgtgcgaccccaagatcgtcaacattggcgcggtgctgagcacgcggaagcacgagcagatgttccgcgaggccgtgaaccaggccaacaagcggcacggctcctggaagattcagctcaatgccacctccgtcacgcacaagcccaacgccatccagatggctctgtcggtgtgcgaggacctcatctccagccaggtctacgccatcctagttagccatccacctacccccaacgaccacttcactcccacccctgtctcctacacagccggcttctaccgcatacccgtgctggggctgaccacccgcatgtccatctactcggacaagagcatccacctgagcttcctgcgcaccgtgccgccctactcccaccagtccagcgtgtggtttgagatgatgcgtgtctacagctggaaccacatcatcctgctggtcagcgacgaccacgagggccgggcggctcagaaacgcctggagacgctgctggaggagcgtgagtccaagagtaaaaaaaggaactatgaaaacctcgaccaactgtcctatgacaacaagcgcggacccaaggcagagaaggtgctgcagtttgacccagggaccaagaacgtgacggccctgctgatggaggcgaaagagctggaggcccgggtcatcatcctttctgccagcgaggacgatgctgccactgtataccgcgcagccgcgatgctgaacatgacgggctccgggtacgtgtggctggtcggcgagcgcgagatctcggggaacgccctgcgctacgccccagacgctcatcaacggcaagaacgagtcggcccacatcagcgacgccgtgggcgtggtggcccaggccgtgcacgagctcctcgagaaggagaacatcaccgacccgccgcggggctgcgtgggcaacaccaacatctggaagaccgggccgctcttcaagagagtgctgatgtcttccaagtatgcggatggggtgactggtcgcgtggagttcaatgaggatggggaccggaagttcgccaactacagcatcatgaacctgcagaaccgcaagctggtgcaagtgggcatctacaatggcacccacgtcatccctaatgacaggaagatcatctggccaggcggagagacagagaagcctcgagggtaccagatgtccaccagactgaagattgtgacgatccaccaggagcccttcgtgtacgtcaagcccacgctgagtgatgggacatgcaaggaggagttcacagtcaacggcgacccagtcaagaaggtgatctgcaccgggcccaacgacacgtcgccgggcagcccccgccacacggtgcctcagtgttgctacggcttttgcatcgacctgctcatcaagctggcacggaccatgaacttcacctacgaggtgcacctggtggcagatggcaagttcggcacacaggagcgggtgaacaacagcaacaagaaggagtggaatgggatgatgggcgagctgctcagcgggcaggcagacatgatcgtggcgccgctaaccataaacaacgagcgcgcgcagtacatcgagttttccaagcccttcaagtaccagggcctgactattctggtcaagaaggagattccccggagcacgctggactcgttcatgcagccgttccagagcacactgtggctgctggtggggctgtcggtgcacgtggtggccgtgatgctgtacctgctggaccgcttcagccccttcggccggttcaaggtgaacagcgaggaggaggaggaggacgcactgaccctgtcctcggccatgtggttctcctggggcgtcctgctcaactccggcatcggggaaggcgcccccagaagcttctcagcgcgcatcctgggcatggtgtgggccggctttgccatgatcatcgtggcctcctacaccgccaacctggcggccttcctggtgctggaccggccggaggagcgcatcacgggcatcaacgaccctcggctgaggaacccctcggacaagtttatctacgccacggtgaagcagagctccgtggatatctacttccggcgccaggtggagctgagcaccatgtaccggcatatggagaagcacaactacgagagtgcggcggaggccatccaggccgtgagagacaacaagctgcatgccttcatctgggactcggcggtgctggagttcgaggcctcgcagaagtgcgacctggtgacgactggagagctgtttttccgctcgggcttcggcataggcatgcgcaaagacagcccctggaagcagaacgtctccctgtccatcctcaagtcccacgagaatggcttcatggaagacctggacaagacgtgggttcggtatcaggaatgtgactcgcgcagcaacgcccctgcgacccttacttttgagaacatggccggggtcttcatgctggtagctgggggcatcgtggccgggatcttcctgattttcatcgagattgcctacaagcggcacaaggatgctcgccggaagcagatgcagctggcctttgccgccgttaacgtgtggcggaagaacctgcaggtagggcaggccaccctccgaggcctggtgcccagggcccggcctggccacggccctcctccatccccgaaggccgtggcactggctctggctctggtgggcaggactggagctaggagccatggccaggggcagtggtgagtgctcccagggcacgggggcagcaccggtggggggctgcctgcaggtggctgcccactgcaaagccggggccgagggaggccacgcaccctgctccaagcctccgcctggcccctctgtctccagagtcgcccgccggtacccattccataggaaggcaatcaggcagggtaagacaggggcccgcctgtgtatggcacgtgagtccaagatgcattttgccctccgccgacccaagccccttgacacccttcggagacccccccctttcctgctatgtccttgtgctccgtgactctaatccgaattgggccaggtccggtcctgcctggtgcccaggttgtatccatgagaatttgccaccagcaagggcagccacggcccacctgggacagggtgggcagtgggcctgtacaggcctaagggctcgtggcccgcggtcgagttccggttcactccgtctcttctctttctctgggtgccgtcctggagcctgtgtcctgagatgaagccgacagtgcggccagggctgctgggggatgggggttgctggaggctccacacctctcatccgcccgctcttgctcttggcccccacaggtcccctggggacctggccgctgccagcactggcgggcacaggccacctggccatcagacctgaggccagagtcccgggagctgcctctgtcactccaattccacctcgacacctgcctccagccctcggccccttcctgaatcttggtgtgtgccccttgggggtcagtggcctccacgcagacagctggtgtggcctgaggggcaactcctccagtcctcagaggactcctcctcctcgggacgcctgtaagccagggccacccaggagccagggagccaggcggacctcccaggaagagccagccgagagcccccaagcccagccccagcacgagcaaggtcaggcccgagaccccgggcaggagaagaggccaccctcgaacgtccgctgtcggcccgtctgtccagcacagggaggcaggcaggagcgagggcccaagtggccggccaggctgggcagcggcccatgcaggagcaggcgagggcaggtgtggccaccaccctagccatctaatcacttatacatattcattttaggatagaaagagtggtagagcagagcctgaccctaaaaagaaagccacatttagggctatcacctccaccctggcttccagcttcaagaggcgtaggtcctccaaagacacggtaagggggagagcaccccagtcccgcgtccgactccacctgccctgccctgcgtgtgtctcccgccccatcaccccgccccggaccctgggctcctgtggcccactctgcccctgtctccctgtg

SEQ ID NO: 137493 - DNA, 4114 bp, Homo sapiens
  Payload ID: 6917
  Gene Symbol: GRIN1
  Gene Name: glutamate receptor, ionotropic, N-methyl D-aspartate 1
  Uniprot ID: Q05586
  ENST ID: ENST00000371546
  CDS Start-End: 7-2886
gagcccatgagcaccatgcgcctgctgacgctcgccctgctgttctcctgctccgtcgcccgtgccgcgtgcgaccccaagatcgtcaacattggcgcggtgctgagcacgcggaagcacgagcagatgttccgcgaggccgtgaaccaggccaacaagcggcacggctcctggaagattcagctcaatgccacctccgtcacgcacaagcccaacgccatccagatggctctgtcggtgtgcgaggacctcatctccagccaggtctacgccatcctagttagccatccacctacccccaacgaccacttcactcccacccctgtctcctacacagccggcttctaccgcatacccgtgctggggctgaccacccgcatgtccatctactcggacaagagcatccacctgagcttcctgcgcaccgtgccgccctactcccaccagtccagcgtgtggtttgagatgatgcgtgtctacagctggaaccacatcatcctgctggtcagcgacgaccacgagggccgggcggctcagaaacgcctggagacgctgctggaggagcgtgagtccaagagtaaaaaaaggaactatgaaaacctcgaccaactgtcctatgacaacaagcgcggacccaaggcagagaaggtgctgcagtttgacccagggaccaagaacgtgacggccctgctgatggaggcgaaagagctggaggcccgggtcatcatcctttctgccagcgaggacgatgctgccactgtataccgcgcagccgcgatgctgaacatgacgggctccgggtacgtgtggctggtcggcgagcgcgagatctcggggaacgccctgcgctacgccccagacggcatcctcgggctgcagctcatcaacggcaagaacgagtcggcccacatcagcgacgccgtgggcgtggtggcccaggccgtgcacgagctcctcgagaaggagaacatcaccgacccgccgcggggctgcgtgggcaacaccaacatctggaagaccgggccgctcttcaagagagtgctgatgtcttccaagtatgcggatggggtgactggtcgcgtggagttcaatgaggatggggaccggaagttcgccaactacagcatcatgaacctgcagaaccgcaagctggtgcaagtgggcatctacaatggcacccacgtcatccctaatgacaggaagatcatctggccaggcggagagacagagaagcctcgagggtaccagatgtccaccagactgaagattgtgacgatccaccaggagcccttcgtgtacgtcaagcccacgctgagtgatgggacatgcaaggaggagttcacagtcaacggcgacccagtcaagaaggtgatctgcaccgggcccaacgacacgtcgccgggcagcccccgccacacggtgcctcagtgttgctacggcttttgcatcgacctgctcatcaagctggcacggaccatgaacttcacctacgaggtgcacctggtggcagatggcaagttcggcacacaggagcgggtgaacaacagcaacaagaaggagtggaatgggatgatgggcgagctgctcagcgggcaggcagacatgatcgtggcgccgctaaccataaacaacgagcgcgcgcagtacatcgagttttccaagcccttcaagtaccagggcctgactattctggtcaagaaggagattccccggagcacgctggactcgttcatgcagccgttccagagcacactgtggctgctggtggggctgtcggtgcacgtggtggccgtgatgctgtacctgctggaccgcttcagccccttcggccggttcaaggtgaacagcgaggaggaggaggaggacgcactgaccctgtcctcggccatgtggttctcctggggcgtcctgctcaactccggcatcggggaaggcgcccccagaagcttctcagcgcgcatcctgggcatggtgtgggccggctttgccatgatcatcgtggcctcctacaccgccaacctggcggccttcctggtgctggaccggccggaggagcgcatcacgggcatcaacgaccctcggctgaggaacccctcggacaagtttatctacgccacggtgaagcagagctccgtggatatctacttccggcgccaggtggagctgagcaccatgtaccggcatatggagaagcacaactacgagagtgcggcggaggccatccaggccgtgagagacaacaagctgcatgccttcatctgggactcggcggtgctggagttcgaggcctcgcagaagtgcgacctggtgacgactggagagctgtttttccgctcgggcttcggcataggcatgcgcaaagacagcccctggaagcagaacgtctccctgtccatcctcaagtcccacgagaatggcttcatggaagacctggacaagacgtgggttcggtatcaggaatgtgactcgcgcagcaacgcccctgcgacccttacttttgagaacatggccggggtcttcatgctggtagctgggggcatcgtggccgggatcttcctgattttcatcgagattgcctacaagcggcacaaggatgctcgccggaagcagatgcagctggcctttgccgccgttaacgtgtggcggaagaacctgcaggatagaaagagtggtagagcagagcctgaccctaaaaagaaagccacatttagggctatcacctccaccctggcttccagcttcaagaggcgtaggtcctccaaagacacgagcaccgggggtggacgcggcgctttgcaaaaccaaaaagacacagtgctgccgcgacgcgctattgagagggaggagggccagctgcagctgtgttcccgtcatagggagagctgagactccccgcccgccctcctctgccccctcccccgcagacagacagacagacggacgggacagcggcccggcccacgcagagccccggagcaccacggggtcgggggaggagcacccccagcctcccccaggctgcgcctgcccgcccgccggttggccggctggccggtccaccccgtcccggccccgcgcgtgcccccagcgtggggctaacgggcgccttgtctgtgtatttctattttgcagcagtaccatcccactgatatcacgggcccgctcaacctctcagatccctcggtcagcaccgtggtgtgaggcccccggaggcgcccacctgcccagttagcccggccaaggacactgatgggtcctgctgctcgggaaggcctgagggaagcccacccgccccagagactgcccaccctgggcctcccgtccgtccgcccgcccaccccgctgcctggcgggcagcccctgctggaccaaggtgcggaccggagcggctgaggacggggcagagctgagtcggctgggcagggccgcagggcgctccggcagaggcagggccctggggtctctgagcagtggggagcgggggctaactggccccaggcggaggggcttggagcagagacggcagccccatccttcccgcagcaccagcctgagccacagtggggcccatggccccagctggctgggtcgcccctcctcgggcgcctgcgctcctctgcagcctgagctccaccctcccctcttcttgcggcaccgcccacccacaccccgtctgccccttgaccccacacgccggggctggccctgccctcccccacggccgtccctgacttcccagctggcagcgcctcccgccgcctcgggccgcctcctccagactcgagagggctgagcccctcctctcctcgtccggcctgcagcccagaacgggcctccccgggggtccccggacgctggctcgggactgtcttcaaccctgccctgcaccttgggcacgggagagcgccacccgcccgcccccgccctcgctccgggtgcgtgaccggcccgccaccttgtacagaaccagcactcccagggcccgagcgcgtgccttccccgtgcggcccgtgcgcagccgcgctctgcccctccgtccccagggtgcaggcgcgcaccgcccaacccccacctcccggtgtatgcagtggtgatgcctaaaggaatgtcacgc

SEQ ID NO: 137494 - DNA, 3940 bp, Homo sapiens
  Payload ID: 6917
  Gene Symbol: GRIN1
  Gene Name: glutamate receptor, ionotropic, N-methyl D-aspartate 1
  Uniprot ID: Q05586
  ENST ID: ENST00000371550
  CDS Start-End: 7-2712
gagcccatgagcaccatgcgcctgctgacgctcgccctgctgttctcctgctccgtcgcccgtgccgcgtgcgaccccaagatcgtcaacattggcgcggtgctgagcacgcggaagcacgagcagatgttccgcgaggccgtgaaccaggccaacaagcggcacggctcctggaagattcagctcaatgccacctccgtcacgcacaagcccaacgccatccagatggctctgtcggtgtgcgaggacctcatctccagccaggtctacgccatcctagttagccatccacctacccccaacgaccacttcactcccacccctgtctcctacacagccggcttctaccgcatacccgtgctggggctgaccacccgcatgtccatctactcggacaagagcatccacctgagcttcctgcgcaccgtgccgccctactcccaccagtccagcgtgtggtttgagatgatgcgtgtctacagctggaaccacatcatcctgctggtcagcgacgaccacgagggccgggcggctcagaaacgcctggagacgctgctggaggagcgtgagtccaaggcagagaaggtgctgcagtttgacccagggaccaagaacgtgacggccctgctgatggaggcgaaagagctggaggcccgggtcatcatcctttctgccagcgaggacgatgctgccactgtataccgcgcagccgcgatgctgaacatgacgggctccgggtacgtgtggctggtcggcgagcgcgagatctcggggaacgccctgcgctacgccccagacggcatcctcgggctgcagctcatcaacggcaagaacgagtcggcccacatcagcgacgccgtgggcgtggtggcccaggccgtgcacgagctcctcgagaaggagaacatcaccgacccgccgcggggctgcgtgggcaacaccaacatctggaagaccgggccgctcttcaagagagtgctgatgtcttccaagtatgcggatggggtgactggtcgcgtggagttcaatgaggatggggaccggaagttcgccaactacagcatcatgaacctgcagaaccgcaagctggtgcaagtgggcatctacaatggcacccacgtcatccctaatgacaggaagatcatctggccaggcggagagacagagaagcctcgagggtaccagatgtccaccagactgaagattgtgacgatccaccaggagcccttcgtgtacgtcaagcccacgctgagtgatgggacatgcaaggaggagttcacagtcaacggcgacccagtcaagaaggtgatctgcaccgggcccaacgacacgtcgccgggcagcccccgccacacggtgcctcagtgttgctacggcttttgcatcgacctgctcatcaagctggcacggaccatgaacttcacctacgaggtgcacctggtggcagatggcaagttcggcacacaggagcgggtgaacaacagcaacaagaaggagtggaatgggatgatgggcgagctgctcagcgggcaggcagacatgatcgtggcgccgctaaccataaacaacgagcgcgcgcagtacatcgagttttccaagcccttcaagtaccagggcctgactattctggtcaagaaggagattccccggagcacgctggactcgttcatgcagccgttccagagcacactgtggctgctggtggggctgtcggtgcacgtggtggccgtgatgctgtacctgctggaccgcttcagccccttcggccggttcaaggtgaacagcgaggaggaggaggaggacgcactgaccctgtcctcggccatgtggttctcctggggcgtcctgctcaactccggcatcggggaaggcgcccccagaagcttctcagcgcgcatcctgggcatggtgtgggccggctttgccatgatcatcgtggcctcctacaccgccaacctggcggccttcctggtgctggaccggccggaggagcgcatcacgggcatcaacgaccctcggctgaggaacccctcggacaagtttatctacgccacggtgaagcagagctccgtggatatctacttccggcgccaggtggagctgagcaccatgtaccggcatatggagaagcacaactacgagagtgcggcggaggccatccaggccgtgagagacaacaagctgcatgccttcatctgggactcggcggtgctggagttcgaggcctcgcagaagtgcgacctggtgacgactggagagctgtttttccgctcgggcttcggcataggcatgcgcaaagacagcccctggaagcagaacgtctccctgtccatcctcaagtcccacgagaatggcttcatggaagacctggacaagacgtgggttcggtatcaggaatgtgactcgcgcagcaacgcccctgcgacccttacttttgagaacatggccggggtcttcatgctggtagctgggggcatcgtggccgggatcttcctgattttcatcgagattgcctacaagcggcacaaggatgctcgccggaagcagatgcagctggcctttgccgccgttaacgtgtggcggaagaacctgcagagcaccgggggtggacgcggcgctttgcaaaaccaaaaagacacagtgctgccgcgacgcgctattgagagggaggagggccagctgcagctgtgttcccgtcatagggagagctgagactccccgcccgccctcctctgccccctcccccgcagacagacagacagacggacgggacagcggcccggcccacgcagagccccggagcaccacggggtcgggggaggagcacccccagcctcccccaggctgcgcctgcccgcccgccggttggccggctggccggtccaccccgtcccggccccgcgcgtgcccccagcgtggggctaacgggcgccttgtctgtgtatttctattttgcagcagtaccatcccactgatatcacgggcccgctcaacctctcagatccctcggtcagcaccgtggtgtgaggcccccggaggcgcccacctgcccagttagcccggccaaggacactgatgggtcctgctgctcgggaaggcctgagggaagcccacccgccccagagactgcccaccctgggcctcccgtccgtccgcccgcccaccccgctgcctggcgggcagcccctgctggaccaaggtgcggaccggagcggctgaggacggggcagagctgagtcggctgggcagggccgcagggcgctccggcagaggcagggccctggggtctctgagcagtggggagcgggggctaactggccccaggcggaggggcttggagcagagacggcagccccatccttcccgcagcaccagcctgagccacagtggggcccatggccccagctggctgggtcgcccctcctcgggcgcctgcgctcctctgcagcctgagctccaccctcccctcttcttgcggcaccgcccacccacaccccgtctgccccttgaccccacacgccggggctggccctgccctcccccacggccgtccctgacttcccagctggcagcgcctcccgccgcctcgggccgcctcctccagactcgagagggctgagcccctcctctcctcgtccggcctgcagcccagaacgggcctccccgggggtccccggacgctggctcgggactgtcttcaaccctgccctgcaccttgggcacgggagagcgccacccgcccgcccccgccctcgctccgggtgcgtgaccggcccgccaccttgtacagaaccagcactcccagggcccgagcgcgtgccttccccgtgcggcccgtgcgcagccgcgctctgcccctccgtccccagggtgcaggcgcgcaccgcccaacccccacctcccggtgtatgcagtggtgatgcctaaaggaatgtcacgc

SEQ ID NO: 137495 - DNA, 3751 bp, Homo sapiens
  Payload ID: 6917
  Gene Symbol: GRIN1
  Gene Name: glutamate receptor, ionotropic, N-methyl D-aspartate 1
  Uniprot ID: Q05586
  ENST ID: ENST00000371553
  CDS Start-End: 7-2838
gagcccatgagcaccatgcgcctgctgacgctcgccctgctgttctcctgctccgtcgcccgtgccgcgtgcgaccccaagatcgtcaacattggcgcggtgctgagcacgcggaagcacgagcagatgttccgcgaggccgtgaaccaggccaacaagcggcacggctcctggaagattcagctcaatgccacctccgtcacgcacaagcccaacgccatccagatggctctgtcggtgtgcgaggacctcatctccagccaggtctacgccatcctagttagccatccacctacccccaacgaccacttcactcccacccctgtctcctacacagccggcttctaccgcatacccgtgctggggctgaccacccgcatgtccatctactcggacaagagcatccacctgagcttcctgcgcaccgtgccgccctactcccaccagtccagcgtgtggtttgagatgatgcgtgtctacagctggaaccacatcatcctgctggtcagcgacgaccacgagggccgggcggctcagaaacgcctggagacgctgctggaggagcgtgagtccaagagtaaaaaaaggaactatgaaaacctcgaccaactgtcctatgacaacaagcgcggacccaaggcagagaaggtgctgcagtttgacccagggaccaagaacgtgacggccctgctgatggaggcgaaagagctggaggcccgggtcatcatcctttctgccagcgaggacgatgctgccactgtataccgcgcagccgcgatgctgaacatgacgggctccgggtacgtgtggctggtcggcgagcgcgagatctcggggaacgccctgcgctacgccccagacggcatcctcgggctgcagctcatcaacggcaagaacgagtcggcccacatcagcgacgccgtgggcgtggtggcccaggccgtgcacgagctcctcgagaaggagaacatcaccgacccgccgcggggctgcgtgggcaacaccaacatctggaagaccgggccgctcttcaagagagtgctgatgtcttccaagtatgcggatggggtgactggtcgcgtggagttcaatgaggatggggaccggaagttcgccaactacagcatcatgaacctgcagaaccgcaagctggtgcaagtgggcatctacaatggcacccacgtcatccctaatgacaggaagatcatctggccaggcggagagacagagaagcctcgagggtaccagatgtccaccagactgaagattgtgacgatccaccaggagcccttcgtgtacgtcaagcccacgctgagtgatgggacatgcaaggaggagttcacagtcaacggcgacccagtcaagaaggtgatctgcaccgggcccaacgacacgtcgccgggcagcccccgccacacggtgcctcagtgttgctacggcttttgcatcgacctgctcatcaagctggcacggaccatgaacttcacctacgaggtgcacctggtggcagatggcaagttcggcacacaggagcgggtgaacaacagcaacaagaaggagtggaatgggatgatgggcgagctgctcagcgggcaggcagacatgatcgtggcgccgctaaccataaacaacgagcgcgcgcagtacatcgagttttccaagcccttcaagtaccagggcctgactattctggtcaagaaggagattccccggagcacgctggactcgttcatgcagccgttccagagcacactgtggctgctggtggggctgtcggtgcacgtggtggccgtgatgctgtacctgctggaccgcttcagccccttcggccggttcaaggtgaacagcgaggaggaggaggaggacgcactgaccctgtcctcggccatgtggttctcctggggcgtcctgctcaactccggcatcggggaaggcgcccccagaagcttctcagcgcgcatcctgggcatggtgtgggccggctttgccatgatcatcgtggcctcctacaccgccaacctggcggccttcctggtgctggaccggccggaggagcgcatcacgggcatcaacgaccctcggctgaggaacccctcggacaagtttatctacgccacggtgaagcagagctccgtggatatctacttccggcgccaggtggagctgagcaccatgtaccggcatatggagaagcacaactacgagagtgcggcggaggccatccaggccgtgagagacaacaagctgcatgccttcatctgggactcggcggtgctggagttcgaggcctcgcagaagtgcgacctggtgacgactggagagctgtttttccgctcgggcttcggcataggcatgcgcaaagacagcccctggaagcagaacgtctccctgtccatcctcaagtcccacgagaatggcttcatggaagacctggacaagacgtgggttcggtatcaggaatgtgactcgcgcagcaacgcccctgcgacccttacttttgagaacatggccggggtcttcatgctggtagctgggggcatcgtggccgggatcttcctgattttcatcgagattgcctacaagcggcacaaggatgctcgccggaagcagatgcagctggcctttgccgccgttaacgtgtggcggaagaacctgcaggatagaaagagtggtagagcagagcctgaccctaaaaagaaagccacatttagggctatcacctccaccctggcttccagcttcaagaggcgtaggtcctccaaagacacgcagtaccatcccactgatatcacgggcccgctcaacctctcagatccctcggtcagcaccgtggtgtgaggcccccggaggcgcccacctgcccagttagcccggccaaggacactgatgggtcctgctgctcgggaaggcctgagggaagcccacccgccccagagactgcccaccctgggcctcccgtccgtccgcccgcccaccccgctgcctggcgggcagcccctgctggaccaaggtgcggaccggagcggctgaggacggggcagagctgagtcggctgggcagggccgcagggcgctccggcagaggcagggccctggggtctctgagcagtggggagcgggggctaactggccccaggcggaggggcttggagcagagacggcagccccatccttcccgcagcaccagcctgagccacagtggggcccatggccccagctggctgggtcgcccctcctcgggcgcctgcgctcctctgcagcctgagctccaccctcccctcttcttgcggcaccgcccacccacaccccgtctgccccttgaccccacacgccggggctggccctgccctcccccacggccgtccctgacttcccagctggcagcgcctcccgccgcctcgggccgcctcctccagactcgagagggctgagcccctcctctcctcgtccggcctgcagcccagaacgggcctccccgggggtccccggacgctggctcgggactgtcttcaaccctgccctgcaccttgggcacgggagagcgccacccgcccgcccccgccctcgctccgggtgcgtgaccggcccgccaccttgtacagaaccagcactcccagggcccgagcgcgtgccttccccgtgcggcccgtgcgcagccgcgctctgcccctccgtccccagggtgcaggcgcgcaccgcccaacccccacctcccggtgtatgcagtggtgatgcctaaaggaatgtcacgc

SEQ ID NO: 137496 - DNA, 4003 bp, Homo sapiens
  Payload ID: 6917
  Gene Symbol: GRIN1
  Gene Name: glutamate receptor, ionotropic, N-methyl D-aspartate 1
  ENST ID: ENST00000371555
  CDS Start-End: 7-2775
gagcccatgagcaccatgcgcctgctgacgctcgccctgctgttctcctgctccgtcgcccgtgccgcgtgcgaccccaagatcgtcaacattggcgcggtgctgagcacgcggaagcacgagcagatgttccgcgaggccgtgaaccaggccaacaagcggcacggctcctggaagattcagctcaatgccacctccgtcacgcacaagcccaacgccatccagatggctctgtcggtgtgcgaggacctcatctccagccaggtctacgccatcctagttagccatccacctacccccaacgaccacttcactcccacccctgtctcctacacagccggcttctaccgcatacccgtgctggggctgaccacccgcatgtccatctactcggacaagagcatccacctgagcttcctgcgcaccgtgccgccctactcccaccagtccagcgtgtggtttgagatgatgcgtgtctacagctggaaccacatcatcctgctggtcagcgacgaccacgagggccgggcggctcagaaacgcctggagacgctgctggaggagcgtgagtccaagagtaaaaaaaggaactatgaaaacctcgaccaactgtcctatgacaacaagcgcggacccaaggcagagaaggtgctgcagtttgacccagggaccaagaacgtgacggccctgctgatggaggcgaaagagctggaggcccgggtcatcatcctttctgccagcgaggacgatgctgccactgtataccgcgcagccgcgatgctgaacatgacgggctccgggtacgtgtggctggtcggcgagcgcgagatctcggggaacgccctgcgctacgccccagacggcatcctcgggctgcagctcatcaacggcaagaacgagtcggcccacatcagcgacgccgtgggcgtggtggcccaggccgtgcacgagctcctcgagaaggagaacatcaccgacccgccgcggggctgcgtgggcaacaccaacatctggaagaccgggccgctcttcaagagagtgctgatgtcttccaagtatgcggatggggtgactggtcgcgtggagttcaatgaggatggggaccggaagttcgccaactacagcatcatgaacctgcagaaccgcaagctggtgcaagtgggcatctacaatggcacccacgtcatccctaatgacaggaagatcatctggccaggcggagagacagagaagcctcgagggtaccagatgtccaccagactgaagattgtgacgatccaccaggagcccttcgtgtacgtcaagcccacgctgagtgatgggacatgcaaggaggagttcacagtcaacggcgacccagtcaagaaggtgatctgcaccgggcccaacgacacgtcgccgggcagcccccgccacacggtgcctcagtgttgctacggcttttgcatcgacctgctcatcaagctggcacggaccatgaacttcacctacgaggtgcacctggtggcagatggcaagttcggcacacaggagcgggtgaacaacagcaacaagaaggagtggaatgggatgatgggcgagctgctcagcgggcaggcagacatgatcgtggcgccgctaaccataaacaacgagcgcgcgcagtacatcgagttttccaagcccttcaagtaccagggcctgactattctggtcaagaaggagattccccggagcacgctggactcgttcatgcagccgttccagagcacactgtggctgctggtggggctgtcggtgcacgtggtggccgtgatgctgtacctgctggaccgcttcagccccttcggccggttcaaggtgaacagcgaggaggaggaggaggacgcactgaccctgtcctcggccatgtggttctcctggggcgtcctgctcaactccggcatcggggaaggcgcccccagaagcttctcagcgcgcatcctgggcatggtgtgggccggctttgccatgatcatcgtggcctcctacaccgccaacctggcggccttcctggtgctggaccggccggaggagcgcatcacgggcatcaacgaccctcggctgaggaacccctcggacaagtttatctacgccacggtgaagcagagctccgtggatatctacttccggcgccaggtggagctgagcaccatgtaccggcatatggagaagcacaactacgagagtgcggcggaggccatccaggccgtgagagacaacaagctgcatgccttcatctgggactcggcggtgctggagttcgaggcctcgcagaagtgcgacctggtgacgactggagagctgtttttccgctcgggcttcggcataggcatgcgcaaagacagcccctggaagcagaacgtctccctgtccatcctcaagtcccacgagaatggcttcatggaagacctggacaagacgtgggttcggtatcaggaatgtgactcgcgcagcaacgcccctgcgacccttacttttgagaacatggccggggtcttcatgctggtagctgggggcatcgtggccgggatcttcctgattttcatcgagattgcctacaagcggcacaaggatgctcgccggaagcagatgcagctggcctttgccgccgttaacgtgtggcggaagaacctgcagagcaccgggggtggacgcggcgctttgcaaaaccaaaaagacacagtgctgccgcgacgcgctattgagagggaggagggccagctgcagctgtgttcccgtcatagggagagctgagactccccgcccgccctcctctgccccctcccccgcagacagacagacagacggacgggacagcggcccggcccacgcagagccccggagcaccacggggtcgggggaggagcacccccagcctcccccaggctgcgcctgcccgcccgccggttggccggctggccggtccaccccgtcccggccccgcgcgtgcccccagcgtggggctaacgggcgccttgtctgtgtatttctattttgcagcagtaccatcccactgatatcacgggcccgctcaacctctcagatccctcggtcagcaccgtggtgtgaggcccccggaggcgcccacctgcccagttagcccggccaaggacactgatgggtcctgctgctcgggaaggcctgagggaagcccacccgccccagagactgcccaccctgggcctcccgtccgtccgcccgcccaccccgctgcctggcgggcagcccctgctggaccaaggtgcggaccggagcggctgaggacggggcagagctgagtcggctgggcagggccgcagggcgctccggcagaggcagggccctggggtctctgagcagtggggagcgggggctaactggccccaggcggaggggcttggagcagagacggcagccccatccttcccgcagcaccagcctgagccacagtggggcccatggccccagctggctgggtcgcccctcctcgggcgcctgcgctcctctgcagcctgagctccaccctcccctcttcttgcggcaccgcccacccacaccccgtctgccccttgaccccacacgccggggctggccctgccctcccccacggccgtccctgacttcccagctggcagcgcctcccgccgcctcgggccgcctcctccagactcgagagggctgagcccctcctctcctcgtccggcctgcagcccagaacgggcctccccgggggtccccggacgctggctcgggactgtcttcaaccctgccctgcaccttgggcacgggagagcgccacccgcccgcccccgccctcgctccgggtgcgtgaccggcccgccaccttgtacagaaccagcactcccagggcccgagcgcgtgccttccccgtgcggcccgtgcgcagccgcgctctgcccctccgtccccagggtgcaggcgcgcaccgcccaacccccacctcccggtgtatgcagtggtgatgcctaaaggaatgtcacgc

SEQ ID NO: 137497 - DNA, 3577 bp, Homo sapiens
  Payload ID: 6917
  Gene Symbol: GRIN1
  Gene Name: glutamate receptor, ionotropic, N-methyl D-aspartate 1
  Uniprot ID: Q05586
  ENST ID: ENST00000371559
  CDS Start-End: 7-2664
gagcccatgagcaccatgcgcctgctgacgctcgccctgctgttctcctgctccgtcgcccgtgccgcgtgcgaccccaagatcgtcaacattggcgcggtgctgagcacgcggaagcacgagcagatgttccgcgaggccgtgaaccaggccaacaagcggcacggctcctggaagattcagctcaatgccacctccgtcacgcacaagcccaacgccatccagatggctctgtcggtgtgcgaggacctcatctccagccaggtctacgccatcctagttagccatccacctacccccaacgaccacttcactcccacccctgtctcctacacagccggcttctaccgcatacccgtgctggggctgaccacccgcatgtccatctactcggacaagagcatccacctgagcttcctgcgcaccgtgccgccctactcccaccagtccagcgtgtggtttgagatgatgcgtgtctacagctggaaccacatcatcctgctggtcagcgacgaccacgagggccgggcggctcagaaacgcctggagacgctgctggaggagcgtgagtccaaggcagagaaggtgctgcagtttgacccagggaccaagaacgtgacggccctgctgatggaggcgaaagagctggaggcccgggtcatcatcctttctgccagcgaggacgatgctgccactgtataccgcgcagccgcgatgctgaacatgacgggctccgggtacgtgtggctggtcggcgagcgcgagatctcggggaacgccctgcgctacgccccagacggcatcctcgggctgcagctcatcaacggcaagaacgagtcggcccacatcagcgacgccgtgggcgtggtggcccaggccgtgcacgagctcctcgagaaggagaacatcaccgacccgccgcggggctgcgtgggcaacaccaacatctggaagaccgggccgctcttcaagagagtgctgatgtcttccaagtatgcggatggggtgactggtcgcgtggagttcaatgaggatggggaccggaagttcgccaactacagcatcatgaacctgcagaaccgcaagctggtgcaagtgggcatctacaatggcacccacgtcatccctaatgacaggaagatcatctggccaggcggagagacagagaagcctcgagggtaccagatgtccaccagactgaagattgtgacgatccaccaggagcccttcgtgtacgtcaagcccacgctgagtgatgggacatgcaaggaggagttcacagtcaacggcgacccagtcaagaaggtgatctgcaccgggcccaacgacacgtcgccgggcagcccccgccacacggtgcctcagtgttgctacggcttttgcatcgacctgctcatcaagctggcacggaccatgaacttcacctacgaggtgcacctggtggcagatggcaagttcggcacacaggagcgggtgaacaacagcaacaagaaggagtggaatgggatgatgggcgagctgctcagcgggcaggcagacatgatcgtggcgccgctaaccataaacaacgagcgcgcgcagtacatcgagttttccaagcccttcaagtaccagggcctgactattctggtcaagaaggagattccccggagcacgctggactcgttcatgcagccgttccagagcacactgtggctgctggtggggctgtcggtgcacgtggtggccgtgatgctgtacctgctggaccgcttcagccccttcggccggttcaaggtgaacagcgaggaggaggaggaggacgcactgaccctgtcctcggccatgtggttctcctggggcgtcctgctcaactccggcatcggggaaggcgcccccagaagcttctcagcgcgcatcctgggcatggtgtgggccggctttgccatgatcatcgtggcctcctacaccgccaacctggcggccttcctggtgctggaccggccggaggagcgcatcacgggcatcaacgaccctcggctgaggaacccctcggacaagtttatctacgccacggtgaagcagagctccgtggatatctacttccggcgccaggtggagctgagcaccatgtaccggcatatggagaagcacaactacgagagtgcggcggaggccatccaggccgtgagagacaacaagctgcatgccttcatctgggactcggcggtgctggagttcgaggcctcgcagaagtgcgacctggtgacgactggagagctgtttttccgctcgggcttcggcataggcatgcgcaaagacagcccctggaagcagaacgtctccctgtccatcctcaagtcccacgagaatggcttcatggaagacctggacaagacgtgggttcggtatcaggaatgtgactcgcgcagcaacgcccctgcgacccttacttttgagaacatggccggggtcttcatgctggtagctgggggcatcgtggccgggatcttcctgattttcatcgagattgcctacaagcggcacaaggatgctcgccggaagcagatgcagctggcctttgccgccgttaacgtgtggcggaagaacctgcagcagtaccatcccactgatatcacgggcccgctcaacctctcagatccctcggtcagcaccgtggtgtgaggcccccggaggcgcccacctgcccagttagcccggccaaggacactgatgggtcctgctgctcgggaaggcctgagggaagcccacccgccccagagactgcccaccctgggcctcccgtccgtccgcccgcccaccccgctgcctggcgggcagcccctgctggaccaaggtgcggaccggagcggctgaggacggggcagagctgagtcggctgggcagggccgcagggcgctccggcagaggcagggccctggggtctctgagcagtggggagcgggggctaactggccccaggcggaggggcttggagcagagacggcagccccatccttcccgcagcaccagcctgagccacagtggggcccatggccccagctggctgggtcgcccctcctcgggcgcctgcgctcctctgcagcctgagctccaccctcccctcttcttgcggcaccgcccacccacaccccgtctgccccttgaccccacacgccggggctggccctgccctcccccacggccgtccctgacttcccagctggcagcgcctcccgccgcctcgggccgcctcctccagactcgagagggctgagcccctcctctcctcgtccggcctgcagcccagaacgggcctccccgggggtccccggacgctggctcgggactgtcttcaaccctgccctgcaccttgggcacgggagagcgccacccgcccgcccccgccctcgctccgggtgcgtgaccggcccgccaccttgtacagaaccagcactcccagggcccgagcgcgtgccttccccgtgcggcccgtgcgcagccgcgctctgcccctccgtccccagggtgcaggcgcgcaccgcccaacccccacctcccggtgtatgcagtggtgatgcctaaaggaatgtcacgc

SEQ ID NO: 137498 - DNA, 3640 bp, Homo sapiens
  Payload ID: 6917
  Gene Symbol: GRIN1
  Gene Name: glutamate receptor, ionotropic, N-methyl D-aspartate 1
  Uniprot ID: Q05586
  ENST ID: ENST00000371560
  CDS Start-End: 7-2727
gagcccatgagcaccatgcgcctgctgacgctcgccctgctgttctcctgctccgtcgcccgtgccgcgtgcgaccccaagatcgtcaacattggcgcggtgctgagcacgcggaagcacgagcagatgttccgcgaggccgtgaaccaggccaacaagcggcacggctcctggaagattcagctcaatgccacctccgtcacgcacaagcccaacgccatccagatggctctgtcggtgtgcgaggacctcatctccagccaggtctacgccatcctagttagccatccacctacccccaacgaccacttcactcccacccctgtctcctacacagccggcttctaccgcatacccgtgctggggctgaccacccgcatgtccatctactcggacaagagcatccacctgagcttcctgcgcaccgtgccgccctactcccaccagtccagcgtgtggtttgagatgatgcgtgtctacagctggaaccacatcatcctgctggtcagcgacgaccacgagggccgggcggctcagaaacgcctggagacgctgctggaggagcgtgagtccaagagtaaaaaaaggaactatgaaaacctcgaccaactgtcctatgacaacaagcgcggacccaaggcagagaaggtgctgcagtttgacccagggaccaagaacgtgacggccctgctgatggaggcgaaagagctggaggcccgggtcatcatcctttctgccagcgaggacgatgctgccactgtataccgcgcagccgcgatgctgaacatgacgggctccgggtacgtgtggctggtcggcgagcgcgagatctcggggaacgccctgcgctacgccccagacggcatcctcgggctgcagctcatcaacggcaagaacgagtcggcccacatcagcgacgccgtgggcgtggtggcccaggccgtgcacgagctcctcgagaaggagaacatcaccgacccgccgcggggctgcgtgggcaacaccaacatctggaagaccgggccgctcttcaagagagtgctgatgtcttccaagtatgcggatggggtgactggtcgcgtggagttcaatgaggatggggaccggaagttcgccaactacagcatcatgaacctgcagaaccgcaagctggtgcaagtgggcatctacaatggcacccacgtcatccctaatgacaggaagatcatctggccaggcggagagacagagaagcctcgagggtaccagatgtccaccagactgaagattgtgacgatccaccaggagcccttcgtgtacgtcaagcccacgctgagtgatgggacatgcaaggaggagttcacagtcaacggcgacccagtcaagaaggtgatctgcaccgggcccaacgacacgtcgccgggcagcccccgccacacggtgcctcagtgttgctacggcttttgcatcgacctgctcatcaagctggcacggaccatgaacttcacctacgaggtgcacctggtggcagatggcaagttcggcacacaggagcgggtgaacaacagcaacaagaaggagtggaatgggatgatgggcgagctgctcagcgggcaggcagacatgatcgtggcgccgctaaccataaacaacgagcgcgcgcagtacatcgagttttccaagcccttcaagtaccagggcctgactattctggtcaagaaggagattccccggagcacgctggactcgttcatgcagccgttccagagcacactgtggctgctggtggggctgtcggtgcacgtggtggccgtgatgctgtacctgctggaccgcttcagccccttcggccggttcaaggtgaacagcgaggaggaggaggaggacgcactgaccctgtcctcggccatgtggttctcctggggcgtcctgctcaactccggcatcggggaaggcgcccccagaagcttctcagcgcgcatcctgggcatggtgtgggccggctttgccatgatcatcgtggcctcctacaccgccaacctggcggccttcctggtgctggaccggccggaggagcgcatcacgggcatcaacgaccctcggctgaggaacccctcggacaagtttatctacgccacggtgaagcagagctccgtggatatctacttccggcgccaggtggagctgagcaccatgtaccggcatatggagaagcacaactacgagagtgcggcggaggccatccaggccgtgagagacaacaagctgcatgccttcatctgggactcggcggtgctggagttcgaggcctcgcagaagtgcgacctggtgacgactggagagctgtttttccgctcgggcttcggcataggcatgcgcaaagacagcccctggaagcagaacgtctccctgtccatcctcaagtcccacgagaatggcttcatggaagacctggacaagacgtgggttcggtatcaggaatgtgactcgcgcagcaacgcccctgcgacccttacttttgagaacatggccggggtcttcatgctggtagctgggggcatcgtggccgggatcttcctgattttcatcgagattgcctacaagcggcacaaggatgctcgccggaagcagatgcagctggcctttgccgccgttaacgtgtggcggaagaacctgcagcagtaccatcccactgatatcacgggcccgctcaacctctcagatccctcggtcagcaccgtggtgtgaggcccccggaggcgcccacctgcccagttagcccggccaaggacactgatgggtcctgctgctcgggaaggcctgagggaagcccacccgccccagagactgcccaccctgggcctcccgtccgtccgcccgcccaccccgctgcctggcgggcagcccctgctggaccaaggtgcggaccggagcggctgaggacggggcagagctgagtcggctgggcagggccgcagggcgctccggcagaggcagggccctggggtctctgagcagtggggagcgggggctaactggccccaggcggaggggcttggagcagagacggcagccccatccttcccgcagcaccagcctgagccacagtggggcccatggccccagctggctgggtcgcccctcctcgggcgcctgcgctcctctgcagcctgagctccaccctcccctcttcttgcggcaccgcccacccacaccccgtctgccccttgaccccacacgccggggctggccctgccctcccccacggccgtccctgacttcccagctggcagcgcctcccgccgcctcgggccgcctcctccagactcgagagggctgagcccctcctctcctcgtccggcctgcagcccagaacgggcctccccgggggtccccggacgctggctcgggactgtcttcaaccctgccctgcaccttgggcacgggagagcgccacccgcccgcccccgccctcgctccgggtgcgtgaccggcccgccaccttgtacagaaccagcactcccagggcccgagcgcgtgccttccccgtgcggcccgtgcgcagccgcgctctgcccctccgtccccagggtgcaggcgcgcaccgcccaacccccacctcccggtgtatgcagtggtgatgcctaaaggaatgtcacgc

SEQ ID NO: 137499 - DNA, 5149 bp, Homo sapiens
  Payload ID: 6917
  Gene Symbol: GRIN1
  Gene Name: glutamate receptor, ionotropic, N-methyl D-aspartate 1
  Uniprot ID: Q05586
  ENST ID: ENST00000371561
  CDS Start-End: 1098-3914
ggtaaggctctggaaaagggggcgctgggagcgcattgcgagggggctggagagggagagaggagcggaagctgagggtgtgaaacggctggccccgaacacacctcgcggcgctccagtgattcctggtgtccgacctcagccccagtcagtgcgggtccagtttccaggctctcgcggaaggcctggctgagcacatgcggcagccacggtcaccctccctattcctcttagcccgaggaggggggtcccaagttacatggccacgcagatggggcctctccctcatttctgaaccttgtggggaggggaaccttgaagggagcgccccccagagccatggcttagggcctcccccacccctctggagctccagtctgcaagagtcaggagccgaaatatcgctgactgtgggtgacgactcttgcgcgcacacacacatacaagcgggcacgacgcgttcggtcctattaaaaggcacgcaagggtgcgggctgcacgcggtgacacggacccctctaacgtttccaaactgagctccctgcaggtccccgacagcacaggcccctgtcccaggacccctccaggcacgcgctcacacgcacacgcgcgctccccggctcacgcgcgctccgacacacacgctcacgcgaacgcaggcgcacgctctggcgcgggaggcgcccccttcgcctccgtgttgggaagcgggggcggcgggaggggcaggagacgttggccccgctcgcgtttctgcagctgctgcagtcgccgcagcgtccggaccggaaccagcgccgtccgcggagccgccgccgccgccgccgggccctttccaagccgggcgctcggagctgtgcccggccccgcttcagcaccgcggacagcgccggccgcgtggggctgagccccgagcccccgcgcacgcttcagcgccccttccctcggccgacgtcccgggaccgccgctccgggggagacgtggcgtccgcagcccgcggggccgggcgagcgcaggacggcccggaagccccgcgggggatgcgccgagggccccgcgttcgcgccgcgcagagccaggcccgcggcccgagcccatgagcaccatgcgcctgctgacgctcgccctgctgttctcctgctccgtcgcccgtgccgcgtgcgaccccaagatcgtcaacattggcgcggtgctgagcacgcggaagcacgagcagatgttccgcgaggccgtgaaccaggccaacaagcggcacggctcctggaagattcagctcaatgccacctccgtcacgcacaagcccaacgccatccagatggctctgtcggtgtgcgaggacctcatctccagccaggtctacgccatcctagttagccatccacctacccccaacgaccacttcactcccacccctgtctcctacacagccggcttctaccgcatacccgtgctggggctgaccacccgcatgtccatctactcggacaagagcatccacctgagcttcctgcgcaccgtgccgccctactcccaccagtccagcgtgtggtttgagatgatgcgtgtctacagctggaaccacatcatcctgctggtcagcgacgaccacgagggccgggcggctcagaaacgcctggagacgctgctggaggagcgtgagtccaaggcagagaaggtgctgcagtttgacccagggaccaagaacgtgacggccctgctgatggaggcgaaagagctggaggcccgggtcatcatcctttctgccagcgaggacgatgctgccactgtataccgcgcagccgcgatgctgaacatgacgggctccgggtacgtgtggctggtcggcgagcgcgagatctcggggaacgccctgcgctacgccccagacggcatcctcgggctgcagctcatcaacggcaagaacgagtcggcccacatcagcgacgccgtgggcgtggtggcccaggccgtgcacgagctcctcgagaaggagaacatcaccgacccgccgcggggctgcgtgggcaacaccaacatctggaagaccgggccgctcttcaagagagtgctgatgtcttccaagtatgcggatggggtgactggtcgcgtggagttcaatgaggatggggaccggaagttcgccaactacagcatcatgaacctgcagaaccgcaagctggtgcaagtgggcatctacaatggcacccacgtcatccctaatgacaggaagatcatctggccaggcggagagacagagaagcctcgagggtaccagatgtccaccagactgaagattgtgacgatccaccaggagcccttcgtgtacgtcaagcccacgctgagtgatgggacatgcaaggaggagttcacagtcaacggcgacccagtcaagaaggtgatctgcaccgggcccaacgacacgtcgccgggcagcccccgccacacggtgcctcagtgttgctacggcttttgcatcgacctgctcatcaagctggcacggaccatgaacttcacctacgaggtgcacctggtggcagatggcaagttcggcacacaggagcgggtgaacaacagcaacaagaaggagtggaatgggatgatgggcgagctgctcagcgggcaggcagacatgatcgtggcgccgctaaccataaacaacgagcgcgcgcagtacatcgagttttccaagcccttcaagtaccagggcctgactattctggtcaagaaggagattccccggagcacgctggactcgttcatgcagccgttccagagcacactgtggctgctggtggggctgtcggtgcacgtggtggccgtgatgctgtacctgctggaccgcttcagccccttcggccggttcaaggtgaacagcgaggaggaggaggaggacgcactgaccctgtcctcggccatgtggttctcctggggcgtcctgctcaactccggcatcggggaaggcgcccccagaagcttctcagcgcgcatcctgggcatggtgtgggccggctttgccatgatcatcgtggcctcctacaccgccaacctggcggccttcctggtgctggaccggccggaggagcgcatcacgggcatcaacgaccctcggctgaggaacccctcggacaagtttatctacgccacggtgaagcagagctccgtggatatctacttccggcgccaggtggagctgagcaccatgtaccggcatatggagaagcacaactacgagagtgcggcggaggccatccaggccgtgagagacaacaagctgcatgccttcatctgggactcggcggtgctggagttcgaggcctcgcagaagtgcgacctggtgacgactggagagctgtttttccgctcgggcttcggcataggcatgcgcaaagacagcccctggaagcagaacgtctccctgtccatcctcaagtcccacgagaatggcttcatggaagacctggacaagacgtgggttcggtatcaggaatgtgactcgcgcagcaacgcccctgcgacccttacttttgagaacatggccggggtcttcatgctggtagctgggggcatcgtggccgggatcttcctgattttcatcgagattgcctacaagcggcacaaggatgctcgccggaagcagatgcagctggcctttgccgccgttaacgtgtggcggaagaacctgcaggatagaaagagtggtagagcagagcctgaccctaaaaagaaagccacatttagggctatcacctccaccctggcttccagcttcaagaggcgtaggtcctccaaagacacgagcaccgggggtggacgcggcgctttgcaaaaccaaaaagacacagtgctgccgcgacgcgctattgagagggaggagggccagctgcagctgtgttcccgtcatagggagagctgagactccccgcccgccctcctctgccccctcccccgcagacagacagacagacggacgggacagcggcccggcccacgcagagccccggagcaccacggggtcgggggaggagcacccccagcctcccccaggctgcgcctgcccgcccgccggttggccggctggccggtccaccccgtcccggccccgcgcgtgcccccagcgtggggctaacgggcgccttgtctgtgtatttctattttgcagcagtaccatcccactgatatcacgggcccgctcaacctctcagatccctcggtcagcaccgtggtgtgaggcccccggaggcgcccacctgcccagttagcccggccaaggacactgatgggtcctgctgctcgggaaggcctgagggaagcccacccgccccagagactgcccaccctgggcctcccgtccgtccgcccgcccaccccgctgcctggcgggcagcccctgctggaccaaggtgcggaccggagcggctgaggacggggcagagctgagtcggctgggcagggccgcagggcgctccggcagaggcagggccctggggtctctgagcagtggggagcgggggctaactggccccaggcggaggggcttggagcagagacggcagccccatccttcccgcagcaccagcctgagccacagtggggcccatggccccagctggctgggtcgcccctcctcgggcgcctgcgctcctctgcagcctgagctccaccctcccctcttcttgcggcaccgcccacccacaccccgtctgccccttgaccccacacgccggggctggccctgccctcccccacggccgtccctgacttcccagctggcagcgcctcccgccgcctcgggccgcctcctccagactcgagagggctgagcccctcctctcctcgtccggcctgcagcccagaacgggcctccccgggggtccccggacgctggctcgggactgtcttcaaccctgccctgcaccttgggcacgggagagcgccacccgcccgcccccgccctcgctccgggtgcgtgaccggcccgccaccttgtacagaaccagcactcccagggcccgagcgcgtgccttccccgtgcggcccgtgcgcagccgcgctctgcccctccgtccccagggtgcaggcgcgcaccgcccaacccccacctcccggtgtatgcagtggtgatgcctaaaggaatgtcacgcagttttc

SEQ ID NO: 137500 - DNA, 5031 bp, Homo sapiens
  Payload ID: 6918
  Gene Symbol: GRIN2A
  Gene Name: glutamate receptor, ionotropic, N-methyl D-aspartate 2A
  Uniprot ID: Q12879
  ENST ID: ENST00000330684
  CDS Start-End: 549-4943
cgctcagcagctcccggtcgcacaactcccagcagccggcgctggggaggtggtagggggtgcgggtggaggtgcccagttagcttctcgtgggtggccaacctggggctcccattctcctgtgcaccctggagtggagctcccgctatcagccacaggggctgaggatccgcactgggggcgtcgtgggcatcgggcttcagcttcccccctcttgtctagcccccctgggcgcataggggggcttgtgagcactgcagactgcagccttcccctcaaccctccctcccctcgttggtgggctgaccctgcctctccttctctcctccgccccgttagagccctgctgcagagcctccggctgggatagccgccccccgtgggggcgatgcggacagcgcgggacagccaggggagcgcgctggggccgcagcatgcgggaacccgctaaacccggtggctgctgaggcggccgagatgctcgtgcgcgcagcgcgccccactgcatcctcgaccttctcgggctacagggaccgtcagtggcgactatgggcagagtgggctattggaccctgctggtgctgccggcccttctggtctggcgcggtccggcgccgagcgcggcggcggagaagggtccccccgcgctaaatattgcggtgatgctgggtcacagccacgacgtgacagagcgcgaacttcgaacactgtggggccccgagcaggcggcggggctgcccctggacgtgaacgtggtagctctgctgatgaaccgcaccgaccccaagagcctcatcacgcacgtgtgcgacctcatgtccggggcacgcatccacggcctcgtgtttggggacgacacggaccaggaggccgtagcccagatgctggattttatctcctcccacaccttcgtccccatcttgggcattcatgggggcgcatctatgatcatggctgacaaggatccgacgtctaccttcttccagtttggagcgtccatccagcagcaagccacggtcatgctgaagatcatgcaggattatgactggcatgtcttctccctggtgaccactatcttccctggctacagggaattcatcagcttcgtcaagaccacagtggacaacagctttgtgggctgggacatgcagaatgtgatcacactggacacttcctttgaggatgcaaagacacaagtccagctgaagaagatccactcttctgtcatcttgctctactgttccaaagacgaggctgttctcattctgagtgaggcccgctcccttggcctcaccgggtatgatttcttctggattgtccccagcttggtctctgggaacacggagctcatcccaaaagagtttccatcgggactcatttctgtctcctacgatgactgggactacagcctggaggcgagagtgagggacggcattggcatcctaaccaccgctgcatcttctatgctggagaagttctcctacatccccgaggccaaggccagctgctacgggcagatggagaggccagaggtcccgatgcacaccttgcacccatttatggtcaatgttacatgggatggcaaagacttatccttcactgaggaaggctaccaggtgcaccccaggctggtggtgattgtgctgaacaaagaccgggaatgggaaaaggtgggcaagtgggagaaccatacgctgagcctgaggcacgccgtgtggcccaggtacaagtccttctccgactgtgagccggatgacaaccatctcagcatcgtcaccctggaggaggccccattcgtcatcgtggaagacatagaccccctgaccgagacgtgtgtgaggaacaccgtgccatgtcggaagttcgtcaaaatcaacaattcaaccaatgaggggatgaatgtgaagaaatgctgcaaggggttctgcattgatattctgaagaagctttccagaactgtgaagtttacttacgacctctatctggtgaccaatgggaagcatggcaagaaagttaacaatgtgtggaatggaatgatcggtgaagtggtctatcaacgggcagtcatggcagttggctcgctcaccatcaatgaggaacgttctgaagtggtggacttctctgtgccctttgtggaaacgggaatcagtgtcatggtttcaagaagtaatggcaccgtctcaccttctgcttttctagaaccattcagcgcctctgtctgggtgatgatgtttgtgatgctgctcattgtttctgccatagctgtttttgtctttgaatacttcagccctgttggatacaacagaaacttagccaaagggaaagcaccccatgggccttcttttacaattggaaaagctatatggcttctttggggcctggtgttcaataactccgtgcctgtccagaatcctaaagggaccaccagcaagatcatggtatctgtatgggccttcttcgctgtcatattcctggctagctacacagccaatctggctgccttcatgatccaagaggaatttgtggaccaagtgaccggcctcagtgacaaaaagtttcagagacctcatgactattccccaccttttcgatttgggacagtgcctaatggaagcacggagagaaacattcggaataactatccctacatgcatcagtacatgaccaaatttaatcagaaaggagtagaggacgccttggtcagcctgaaaacggggaagctggacgctttcatctacgatgccgcagtcttgaattacaaggctgggagggatgaaggctgcaagctggtgaccatcgggagtgggtacatctttgccaccaccggttatggaattgcccttcagaaaggctctccttggaagaggcagatcgacctggccttgcttcagtttgtgggtgatggtgagatggaggagctggagaccctgtggctcactgggatctgccacaacgagaagaacgaggtgatgagcagccagctggacattgacaacatggcgggcgtattctacatgctggctgccgccatggcccttagcctcatcaccttcatctgggagcacctcttctactggaagctgcgcttctgtttcacgggcgtgtgctccgaccggcctgggttgctcttctccatcagcaggggcatctacagctgcattcatggagtgcacattgaagaaaagaagaagtctccagacttcaatctgacgggatcccagagcaacatgttaaaactcctccggtcagccaaaaacatttccagcatgtccaacatgaactcctcaagaatggactcacccaaaagagctgctgacttcatccaaagaggttccctcatcatggacatggtttcagataaggggaatttgatgtactcagacaacaggtcctttcaggggaaagagagcatttttggagacaacatgaacgaactccaaacatttgtggccaaccggcagaaggataacctcaataactatgtattccagggacaacatcctcttactctcaatgagtccaaccctaacacggtggaggtggccgtgagcacagaatccaaagcgaactctagaccccggcagctgtggaagaaatccgtggattccatacgccaggattcactatcccagaatccagtctcccagagggatgaggcaacagcagagaataggacccactccctaaagagccctaggtatcttccagaagagatggcccactctgacatttcagaaacgtcaaatcgggccacgtgccacagggaacctgacaacagtaagaaccacaaaaccaaggacaactttaaaaggtcagtggcctccaaataccccaaggactgtagtgaggtcgagcgcacctacctgaaaaccaaatcaagctcccctagagacaagatctacactatagatggtgagaaggagcctggtttccacttagatccaccccagtttgttgaaaatgtgaccctgcccgagaacgtggacttcccggacccctaccaggatcccagtgaaaacttccgcaagggggactccacgctgccaatgaaccggaaccccttgcataatgaagaggggctttccaacaacgaccagtataaactctactccaagcacttcaccttgaaagacaagggttccccgcacagtgagaccagcgagcgataccggcagaactccacgcactgcagaagctgcctttccaacatgcccacctattcaggccacttcaccatgaggtcccccttcaagtgcgatgcctgcctgcggatggggaacctctatgacatcgatgaagaccagatgcttcaggagacaggtaacccagccaccggggagcaggtctaccagcaggactgggcacagaacaatgcccttcaattacaaaagaacaagctaaggattagccgtcagcattcctacgataacattgtcgacaaacctagggagctagaccttagcaggccctcccggagcataagcctcaaggacagggaacggcttctggagggaaatttttacggcagcctgtttagtgtcccctcaagcaaactctcggggaaaaaaagctcccttttcccccaaggtctggaggacagcaagaggagcaagtctctcttgccagaccacacctccgataaccctttcctccactcccacagggatgaccaacgcttggttattgggagatgcccctcggacccttacaaacactcgttgccatcccaggcggtgaatgacagctatcttcggtcgtccttgaggtcaacggcatcgtactgttccagggacagtcggggccacaatgatgtgtatatttcggagcatgttatgccttatgctgcaaataagaataatatgtactctacccccagggttttaaattcctgcagcaatagacgcgtgtacaagaaaatgcctagtatcgaatctgatgtttaaaaatcttccattaatgttttatctatagggaaatatacgtaatggccaatgttctggagggtaaatgttggatgtccaatagtgccct

SEQ ID NO: 137501 - DNA, 14450 bp, Homo sapiens
  Payload ID: 6918
  Gene Symbol: GRIN2A
  Gene Name: glutamate receptor, ionotropic, N-methyl D-aspartate 2A
  Uniprot ID: Q12879
  ENST ID: ENST00000396573
  CDS Start-End: 311-4705
atcatgggaccgggtgagcgctgagaatcgcggccgcagccatcagccctggagatgaccaggagcggccactgctgagaactatgtggagagaggctgcgagccctgctgcagagcctccggctgggatagccgccccccgtgggggcgatgcggacagcgcgggacagccaggggagcgcgctggggccgcagcatgcgggaacccgctaaacccggtggctgctgaggcggccgagatgctcgtgcgcgcagcgcgccccactgcatcctcgaccttctcgggctacagggaccgtcagtggcgactatgggcagagtgggctattggaccctgctggtgctgccggcccttctggtctggcgcggtccggcgccgagcgcggcggcggagaagggtccccccgcgctaaatattgcggtgatgctgggtcacagccacgacgtgacagagcgcgaacttcgaacactgtggggccccgagcaggcggcggggctgcccctggacgtgaacgtggtagctctgctgatgaaccgcaccgaccccaagagcctcatcacgcacgtgtgcgacctcatgtccggggcacgcatccacggcctcgtgtttggggacgacacggaccaggaggccgtagcccagatgctggattttatctcctcccacaccttcgtccccatcttgggcattcatgggggcgcatctatgatcatggctgacaaggatccgacgtctaccttcttccagtttggagcgtccatccagcagcaagccacggtcatgctgaagatcatgcaggattatgactggcatgtcttctccctggtgaccactatcttccctggctacagggaattcatcagcttcgtcaagaccacagtggacaacagctttgtgggctgggacatgcagaatgtgatcacactggacacttcctttgaggatgcaaagacacaagtccagctgaagaagatccactcttctgtcatcttgctctactgttccaaagacgaggctgttctcattctgagtgaggcccgctcccttggcctcaccgggtatgatttcttctggattgtccccagcttggtctctgggaacacggagctcatcccaaaagagtttccatcgggactcatttctgtctcctacgatgactgggactacagcctggaggcgagagtgagggacggcattggcatcctaaccaccgctgcatcttctatgctggagaagttctcctacatccccgaggccaaggccagctgctacgggcagatggagaggccagaggtcccgatgcacaccttgcacccatttatggtcaatgttacatgggatggcaaagacttatccttcactgaggaaggctaccaggtgcaccccaggctggtggtgattgtgctgaacaaagaccgggaatgggaaaaggtgggcaagtgggagaaccatacgctgagcctgaggcacgccgtgtggcccaggtacaagtccttctccgactgtgagccggatgacaaccatctcagcatcgtcaccctggaggaggccccattcgtcatcgtggaagacatagaccccctgaccgagacgtgtgtgaggaacaccgtgccatgtcggaagttcgtcaaaatcaacaattcaaccaatgaggggatgaatgtgaagaaatgctgcaaggggttctgcattgatattctgaagaagctttccagaactgtgaagtttacttacgacctctatctggtgaccaatgggaagcatggcaagaaagttaacaatgtgtggaatggaatgatcggtgaagtggtctatcaacgggcagtcatggcagttggctcgctcaccatcaatgaggaacgttctgaagtggtggacttctctgtgccctttgtggaaacgggaatcagtgtcatggtttcaagaagtaatggcaccgtctcaccttctgcttttctagaaccattcagcgcctctgtctgggtgatgatgtttgtgatgctgctcattgtttctgccatagctgtttttgtctttgaatacttcagccctgttggatacaacagaaacttagccaaagggaaagcaccccatgggccttcttttacaattggaaaagctatatggcttctttggggcctggtgttcaataactccgtgcctgtccagaatcctaaagggaccaccagcaagatcatggtatctgtatgggccttcttcgctgtcatattcctggctagctacacagccaatctggctgccttcatgatccaagaggaatttgtggaccaagtgaccggcctcagtgacaaaaagtttcagagacctcatgactattccccaccttttcgatttgggacagtgcctaatggaagcacggagagaaacattcggaataactatccctacatgcatcagtacatgaccaaatttaatcagaaaggagtagaggacgccttggtcagcctgaaaacggggaagctggacgctttcatctacgatgccgcagtcttgaattacaaggctgggagggatgaaggctgcaagctggtgaccatcgggagtgggtacatctttgccaccaccggttatggaattgcccttcagaaaggctctccttggaagaggcagatcgacctggccttgcttcagtttgtgggtgatggtgagatggaggagctggagaccctgtggctcactgggatctgccacaacgagaagaacgaggtgatgagcagccagctggacattgacaacatggcgggcgtattctacatgctggctgccgccatggcccttagcctcatcaccttcatctgggagcacctcttctactggaagctgcgcttctgtttcacgggcgtgtgctccgaccggcctgggttgctcttctccatcagcaggggcatctacagctgcattcatggagtgcacattgaagaaaagaagaagtctccagacttcaatctgacgggatcccagagcaacatgttaaaactcctccggtcagccaaaaacatttccagcatgtccaacatgaactcctcaagaatggactcacccaaaagagctgctgacttcatccaaagaggttccctcatcatggacatggtttcagataaggggaatttgatgtactcagacaacaggtcctttcaggggaaagagagcatttttggagacaacatgaacgaactccaaacatttgtggccaaccggcagaaggataacctcaataactatgtattccagggacaacatcctcttactctcaatgagtccaaccctaacacggtggaggtggccgtgagcacagaatccaaagcgaactctagaccccggcagctgtggaagaaatccgtggattccatacgccaggattcactatcccagaatccagtctcccagagggatgaggcaacagcagagaataggacccactccctaaagagccctaggtatcttccagaagagatggcccactctgacatttcagaaacgtcaaatcgggccacgtgccacagggaacctgacaacagtaagaaccacaaaaccaaggacaactttaaaaggtcagtggcctccaaataccccaaggactgtagtgaggtcgagcgcacctacctgaaaaccaaatcaagctcccctagagacaagatctacactatagatggtgagaaggagcctggtttccacttagatccaccccagtttgttgaaaatgtgaccctgcccgagaacgtggacttcccggacccctaccaggatcccagtgaaaacttccgcaagggggactccacgctgccaatgaaccggaaccccttgcataatgaagaggggctttccaacaacgaccagtataaactctactccaagcacttcaccttgaaagacaagggttccccgcacagtgagaccagcgagcgataccggcagaactccacgcactgcagaagctgcctttccaacatgcccacctattcaggccacttcaccatgaggtcccccttcaagtgcgatgcctgcctgcggatggggaacctctatgacatcgatgaagaccagatgcttcaggagacaggtaacccagccaccggggagcaggtctaccagcaggactgggcacagaacaatgcccttcaattacaaaagaacaagctaaggattagccgtcagcattcctacgataacattgtcgacaaacctagggagctagaccttagcaggccctcccggagcataagcctcaaggacagggaacggcttctggagggaaatttttacggcagcctgtttagtgtcccctcaagcaaactctcggggaaaaaaagctcccttttcccccaaggtctggaggacagcaagaggagcaagtctctcttgccagaccacacctccgataaccctttcctccactcccacagggatgaccaacgcttggttattgggagatgcccctcggacccttacaaacactcgttgccatcccaggcggtgaatgacagctatcttcggtcgtccttgaggtcaacggcatcgtactgttccagggacagtcggggccacaatgatgtgtatatttcggagcatgttatgccttatgctgcaaataagaataatatgtactctacccccagggttttaaattcctgcagcaatagacgcgtgtacaagaaaatgcctagtatcgaatctgatgtttaaaaatcttccattaatgttttatctatagggaaatatacgtaatggccaatgttctggagggtaaatgttggatgtccaatagtgccctgctaagaggaagaagatgtagggaggtattttgttgttgttgttgttggctcttttgcacacggcttcatgccataatcttccactcaaggaatcttgtgaggtgtgtgctgagcatggcagacaccagataggtgagtccttaaccaaaaataactaactacataagggcaagtctccgggacatgcctactgggtatgttggcaataatgatgcattggatgccaatggtgatgttatgatttcctatattccaaattccattaaggtcagcccaccatgtaattttctcatcagaaatgcctaatggtttctctaatacagaataagcaatatggtgtgcatgtaaacctgacacagacaaaataaaaacagttaagaatgcatctgcactgtagtgcgattgacatgtgcaagagattaggaagtttggctcgtaacagtttcagctttcttgttatgccttccatcacagcccaggctcaccccaagaactccaggctcccctaaagaatagcaaatcagtgtgttcgtgatgactgtgctaccttcattatagttcatttccaagacacatctggagccaaaggcccgagggaccctcaggtggggagagctacaggaatctctttggatgttgatgtgtgtttctctcaccctcggcttcgatggtcttgttcagagctgcataaactaacacatttatgtctccgagatctaagtgtggatcttctgtctgtgacacagtggccattgtagtttatcccgaagacgcctatgtacgtaagtttgcatttcctcccttctggtgatgactcagggttgtatagtatctgttaccccttccctcccagagtaaccataactcgttccgtttccaaacagccatggtggtgtccaattagctgtgtatcgctcttcccagagttgttaatgtggtgacatgcaccaacagccgtatgtgtactgtgatctgtaagaagtacaatgccatctgtctgccgaaggctagcatggttttaggtttatcttccttcacatccagaaattctgttggacactcacttccaccccaaactcctcaaatcaaaagccttcaaaacacgaggcactcttggatctaccctgagtatcctccaaactgtggatacagtttagtgagacaagcaatttctcccttctgagttattctctctgttggtggcaaaccacttcatagcaccaacagagatgtaggaaaaattcctcaaagtatttgtcatttctgagtcgcctgcattatcccattcttattctcctcaaacctgtgcatatatgacatgaaatgatatccattttttttttaagttagagacagagaggggaatacttatgcatggggagcctgttagcacagtgcctgccacaaaaacaagtgcccccgacaagatagttgctatgttatgacactttctcagatcaggattttctagtttaaaaattaaatatcataaaaccagcaaataatattaactaaaccttttatatagttctactctgttaattagtgtatttcatgtacatgaatatttttgaagtatttgggataactagccatcagtgtttgcagaagacctcagtctgttttgggccattacggaaacactaagctaatgtagactcgcctggccatttcctggtttcctcctgcattctgctttacattcttgaagaaagggataaagtggcaggttgaaaaattatcccatttcttctcctcatggtgtgcgttctgttttgtaagtattattttcttgcatgtgggcaagtgtcagggatgattcccttaaagctcaaggatgcatggaatagctccatctttgggaaagtacacctgacctacagtgttcctataatgaaaagtggttgcaataaatttcagggtcaatcatagggagacagagggaggcagtgggtgagaggagcttcctttcatttttgaaaggcagaaggggctgactaggtgctggggatgcatgtgcttgaaaatgacattttatttcccggatgctgtacctctgctgccccaagacccagccatggagaagcctggatcgaagggcccagaatagtcaccccaacatctgatcctaaatctgaatctccatgactgtgtagccttttagccctttctaccttctgcccttccagtgcattccagaccttaatccaccccagcaaggatcgcctccatttcctcatgagtctgggatgttttgacatgaatgaattaaaaagtcttcccagaatacagaagagtgatttgtcgtcaagccaaagaggctttctgtcttcctctggtgtcctctaaacccagggggctgccaaatgccacagagacctccagggagagtgagagttatacttggactgacttcatcggtcagaaagccttcccctaacagcagcattatttctgctattaaccccatacatctctggataaagaaactgaaaacgtggcctttggaagaatcaacagtaatgttgtgaaaaaaatatatattcttttcactgaccgaagtgttttttcaaataaataatcagaaatgttatgctacacaaagtttatggtatcccttctctactaattcaatgactcttcaatgtgatgatcccaagcaaaaaaaaaaaaaaaaaaaaaaaatcaactactgatcagatggtcaatttctaaggaaaagatgtagagttattcaaaggtcatctaagtcagttcagtctttgcaaaaagaatatcaggaatgtaacgtccagtggtaaatggaacccacagtatgagaagtaacaagaattaaataggaagcctggaagcctgagactatagatctatcacagaagattcccgtaacatatcccagctctgagttcttagatttgttgatgtcaaggagcccaaatttctgaacacaaatgcctgagtttcagctggcttaagtcagagctggcatccataatgatattttgttaattctaattggttttccccacttgagaaggacccaactagtcctcagataggtacacttgaatgcaaacggttgggtctctgtccatgggtaatagcacgcacatgcaaccaatttaaaatactctgggtaagagagtcttctagagcataaactgtacttgagaaacctttgtgcttctggaaaatgggtttcatcatccttacatctgcaggttcttaggccacttatggtttcaatgctctgagctggcaagtccctataggtctatctttctgccagagagacttgcaggattataatctcacaatctcaccactcattactgttatgtcctctgcaaatctctctgcgttattttagccagcaccatgactgggcatccacggattactcttgattttctcttccctgattcacaggatgccagagagtctgagtatttagtttttctggtgaaagcattaaaattcacacattgcagcaaaatctgtcaaatcatttcacgcttattttctggggagaaaaatagaaaattacaccttgtttacaaatgaaatagtttcacttaaatgggactctagccaaggcagttaattagtcaaaagatccacagctgtcatatagtcacacattgtttattctatttgctatgtcgaccactgatgtgtatttaatattctgcatccttcacaggaaatgacaaatgccctgaattatttgcaaatagaattgctaatgaaaaagaaaaaaaatgttgatgttaattaaatggtgattaaaaatttatctcctttaaatctaaaaagtgcagctttaataatcagttgtcatataaataagtaccttgtactgaaatcccttgcggtttaagacctaaataaacactaatttgagaactctaaataccttacagaggagctggatatattcgttaacattatgcacattcctgtactgtttctttgtgcatagctgttgtgcatgaatccttgaaaaggggacatgcgttgtttctgaaatggagcctgtttgtattaaccatggctatagtagacatgattggactcaaagaaaaagaagtttgagtaggtggaagctaaatgtgttgcttgatatttaatgagtgaagggttctatgtaaaggcaattttccttccaaaagtactgtttattttcactggagacaaaattagacctttccagataccccatctctttttggtgaacagggttgaaagtgctgtggggtctatacttgaaaagttctcccaatatgcagttactgtttcccattcaatccctatacattgtactgtgttcatatctaattgtatcagatgaggtcagcttgccacttgatatagatcagagatgatcaaatgcacttatcctgtgaatacaactgcttgtgtacacatgtatataatatacatgcttgatttctacaattcacacgtaagtgtattatccaaataaaattgtacatattgtaaagtttatgttaaaaattaaatggtgatgatggtattaacacatggaaaacccattctggttatttttatgggaggatatttctgtagagagggcactatatttttttaatctcagttgtagggaggatgacagagcctaagtagaatatgggtgttggcgttcttggccccttctttaaaaaacaaaactctgggatgaggggtatagaatatattctgctcgcatttgcttctgaagacaatgccgatatggacttgtgtgtgatttccttaaacacatcaaagggcatagatttcctatttaaattccttatcctctttcctcacctgcactctttctgtgcccagcagtactttcagtatagtattagctagaagtgcctgcccagaagggtcttagaaaaatagagttcgtagaaccacaccaaaagttaggagaaggggaggagagatgagaaaaatgaagtttacaaatgggcagttgcctgtttaagatcatcaagttagagagtatcagagcgaggattagatccaagacatggttcaatttctggctcgattctctgaccgggctgacttatttctaggtttctttcaaggggaaactcctgagtagctctggaataagagccagagatccccataaggctgccctggtttttgttttgttttgttttttgtttttgccacttgccccagaaagacctacccatgcttctttgaatttggttttcctttaaactccctcacaatccctgtcttaaagttcctagaagagaaaacttttctcagagaccgtctccttaggaaaaatcaacagggatattgtttaaaacctcaaactgaagataaaaggctggcagtgaccattgaaataattgaggtctatgtatcatgcattgaggaagaaccaagcacattgaccagctaataggacttcactgaatgtccactttattttgaaagccagtttgggattgtgggggaggggatgcaaaataaatagaaaatatagtctcttcccataagtagcttatggtttagaagttcagttctctaatacaaaggataaccaaggacccatgcaatgcaaacagagactaaacagcaaaaattagaaatgacaactaaagttgtagccaggaaaaaaaaaataatctgattctatgagcataccttttttaaaaaaaaaaaaaaagtccttccctaaacctttaagtaactccggagaatagagttagtggtcccggaaatgcagttgatttattttaatcttcaaataatggacttaggagacccaggagctgctaaccaggtgaacacactcacactcctacatttttgcacaggaaggcttttgtctggttccaaccagttctccagtccttgccaaatcatgcctcctcccagccttgcattatgacatgtgcctcaagaaaaggttgaaaaaattccccaaaggattagaaaatagaccatgatgtaaaaagacgaagcatttccctaaagcttttttgtttggttttgtttttgacatttgaagaacccttctgatacaccagggtatgaatgtatcagggaagcatagagggaaaattctttatcaagttccaagtgcctactgctgtggctgacagaaagcatcaggttccctagagagaaaacggggcaaagagatggcaaaaggaatagaggtgtatttcaggaaggatggcgaggtggagagggagcttttgtcactctgtctatcccattctgtgcattcttggaatgttacattttctgcttatcgcaagtacttgccatggatctgcacctgaatttgaaaatatcaaaatatatctaaattgagtgtaggcgatattctaggcatatcctagaatgtgatcctcaaaacaaccttaagatataaatatgattgctcccattttacagataaggaaactgaggctcaggtttttctcaacctcgtcagcaactagaattagctagtaaatccctaacgttagacatattttcaaagtgcctggtctcctccagggaggtcagaatagaagtcagaaagagaggtgtgctcttttgaggttcctgggcatatacccttgagtatcagcctctgtgacagggaagtctgttagggtcttacccctcattgcctgatctgtgtgtatggagaacttctggggatctcacctctgttcatagttccttctgagacttgaacactgtttgtgtctccctttcatatgcttgcacttagcatttaaaaaaatttctggggagttattttctctacttagcatgtgcctaatcttaaatatctctttcctaatgtctcatctttttatcagtcaacatcagggctaattccattaaacatatatacatagtacatgctctcatgtgtgtgggtatgcacacacacacacacagccatgtgaccctccattaaagtcctcctaaatattgtgacccatgttcaaagaggtgatattatttgcaagttgactattcctcctatttcatgtctatgtttggttatctttgccaggcagatggaatgagtttcagaggtgggacagggaataggaaatagagtttctgcatgaatgatggagagctttggtagtcagaatgattgaggaccagctattaaaatgttgttgttgttttccttcttggtctgttcctttttttttttcttttccaaattgtcttagagataattcccggctcacttagcattaggataatgacggttattctgtcccactgaagagtgttgaactggaacgcttccaccgggctttataggtacccagaatggcctaatgtttaacatatcctgcaggcatgcccctgagcacacactgcctttcctgcattcccccctctccatggtctaagccacatttctttcctggcatttatatttactgagaggtgaggggtgcattaggcccatttgatggatgaggacactagcggggatttgaaggaatgtctttctgggagtctccatgaattctctggagagttagctaacttaatgcaagttaagtgctagtctatgagaaaaatttctcagctgttttcatctttcaagctggcagtaaaaagccttttaagacagaaagattattatttgttatttggagatcctgttgttgggtctacaagtgcgtgaccatgttctccttggaatgttgagctatgcagaaatggagcactccaaagaacgatttgaccaatagcatttcttctctgggggttgtatttcaaagcatgcaactctccagggaaccagaactaaattgcttaaaatgaagtcattcctcagattaacttcctcagataaagtgtcagcggtctgcagaaacgaagaagacaaaactgagattatcactcataattctcttacttactatgtcagtgaaacaatgagtttgcatttttgcaatcctagaacattcttcattagccctgggtcatgacctcttccagttaattctctttcacacctttaggaaagatttaagatgaaccttcaataggatattaacataactcatagccaataccacagctgcctttcaaattaatgaggttaattgttctccagcaaacatgagtttgtctttggcattttaaatgcttcccattgatctgacattttgctgtttcaagttttaaagggctcaaatcaaagactattgataactgagcaaagagcgaagatccagaaatacgaaaacattgtctttttttttccatgaaaaacaatcatagccttttgaattcaatcgaagtttctacattagccatctaagacttatttaattatttctgttctcagtcaagctaattcaagtgaatgaacagtattgacttttaaaatcttttttaaatttttttaaatctttagtttattaagtttgtagaaaagctctggggccatgaccacttacgtaaatgtttcagtttaaaaacaaaagattcaggcctctaatttgagccaaatccaggtgatcttgtttgaaatttttgatgaatttgaaaagatgaaagtggaacttttaacattcatgttccccaaatttttcactgggaagggatgctaattgcctacttaagatataagttcaagaataacattttcatagaaaattcagaaaactgcttgacacagcagtgacatagttagatgtggctcagatgccttccaaacctgagggtccccaaagatttctttaccagttgtttttaactatgaatcttaatcttgttcattcccctgccaaaacaaatttaaaagcataaacctgctgaattaattggcagaattcaccatagtttatatcaccccagaatgtttatgtgtatatgtttatgtatagtatatatatttcaagctgaatgttcagaaagaataaggtgagtttcttggtagcttgaataagaattagatcataaaaattataaataatggccttctcaaagaggataaatgattcatttttcactcacgtattaataatatgacttgttgcataatacacaagctggtcattgcctgcaagaaagttattgaattaagcagctatccaggtttatgtctgagtccatttttaacccaacaaggctaggattgaactccatatgcagagggtttctattcacagctacattcaaacagaatccaaaacccacatcagaactgacttgatgtcttgtatggtggagctgaaagcaagctgtctgctctaagcaatggtcttcatttgggaattaatgttcactgatcaactgcagcagtttatatctgtcatgttttaatccactgcatgaggaagtgctaataagtgtattaaatatttccaagcatagctacaaaattatatgtttgcttaacacctttctatgatagaggaagtatatactatggttgtcttcttgtagtatgtcttttaattttgttcaatgtgttatcaactgttttaaggaatggggattgaaattcgtgtgcaaactgatatgtatataactcctgaggcaacagaagtgcccggtcatatggtgtaaaaatgtaaatacaggaaaatttcatttttctaataaagataatttctgccaattgatatgaaaatgagaaa

SEQ ID NO: 137502 - DNA, 13724 bp, Homo sapiens
  Payload ID: 6918
  Gene Symbol: GRIN2A
  Gene Name: glutamate receptor, ionotropic, N-methyl D-aspartate 2A
  ENST ID: ENST00000396575
  CDS Start-End: 1-3984
caggatccgacgtctaccttcttccagtttggagcgtccatccagcagcaagccacggtcatgctgaagatcatgcaggattatgactggcatgtcttctccctggtgaccactatcttccctggctacagggaattcatcagcttcgtcaagaccacagtggacaacagctttgtgggctgggacatgcagaatgtgatcacactggacacttcctttgaggatgcaaagacacaagtccagctgaagaagatccactcttctgtcatcttgctctactgttccaaagacgaggctgttctcattctgagtgaggcccgctcccttggcctcaccgggtatgatttcttctggattgtccccagcttggtctctgggaacacggagctcatcccaaaagagtttccatcgggactcatttctgtctcctacgatgactgggactacagcctggaggcgagagtgagggacggcattggcatcctaaccaccgctgcatcttctatgctggagaagttctcctacatccccgaggccaaggccagctgctacgggcagatggagaggccagaggtcccgatgcacaccttgcacccatttatggtcaatgttacatgggatggcaaagacttatccttcactgaggaaggctaccaggtgcaccccaggctggtggtgattgtgctgaacaaagaccgggaatgggaaaaggtgggcaagtgggagaaccatacgctgagcctgaggcacgccgtgtggcccaggtacaagtccttctccgactgtgagccggatgacaaccatctcagcatcgtcaccctggaggaggccccattcgtcatcgtggaagacatagaccccctgaccgagacgtgtgtgaggaacaccgtgccatgtcggaagttcgtcaaaatcaacaattcaaccaatgaggggatgaatgtgaagaaatgctgcaaggggttctgcattgatattctgaagaagctttccagaactgtgaagtttacttacgacctctatctggtgaccaatgggaagcatggcaagaaagttaacaatgtgtggaatggaatgatcggtgaagtggtctatcaacgggcagtcatggcagttggctcgctcaccatcaatgaggaacgttctgaagtggtggacttctctgtgccctttgtggaaacgggaatcagtgtcatggtttcaagaagtaatggcaccgtctcaccttctgcttttctagaaccattcagcgcctctgtctgggtgatgatgtttgtgatgctgctcattgtttctgccatagctgtttttgtctttgaatacttcagccctgttggatacaacagaaacttagccaaagggaaagcaccccatgggccttcttttacaattggaaaagctatatggcttctttggggcctggtgttcaataactccgtgcctgtccagaatcctaaagggaccaccagcaagatcatggtatctgtatgggccttcttcgctgtcatattcctggctagctacacagccaatctggctgccttcatgatccaagaggaatttgtggaccaagtgaccggcctcagtgacaaaaagtttcagagacctcatgactattccccaccttttcgatttgggacagtgcctaatggaagcacggagagaaacattcggaataactatccctacatgcatcagtacatgaccaaatttaatcagaaaggagtagaggacgccttggtcagcctgaaaacggggaagctggacgctttcatctacgatgccgcagtcttgaattacaaggctgggagggatgaaggctgcaagctggtgaccatcgggagtgggtacatctttgccaccaccggttatggaattgcccttcagaaaggctctccttggaagaggcagatcgacctggccttgcttcagtttgtgggtgatggtgagatggaggagctggagaccctgtggctcactgggatctgccacaacgagaagaacgaggtgatgagcagccagctggacattgacaacatggcgggcgtattctacatgctggctgccgccatggcccttagcctcatcaccttcatctgggagcacctcttctactggaagctgcgcttctgtttcacgggcgtgtgctccgaccggcctgggttgctcttctccatcagcaggggcatctacagctgcattcatggagtgcacattgaagaaaagaagaagtctccagacttcaatctgacgggatcccagagcaacatgttaaaactcctccggtcagccaaaaacatttccagcatgtccaacatgaactcctcaagaatggactcacccaaaagagctgctgacttcatccaaagaggttccctcatcatggacatggtttcagataaggggaatttgatgtactcagacaacaggtcctttcaggggaaagagagcatttttggagacaacatgaacgaactccaaacatttgtggccaaccggcagaaggataacctcaataactatgtattccagggacaacatcctcttactctcaatgagtccaaccctaacacggtggaggtggccgtgagcacagaatccaaagcgaactctagaccccggcagctgtggaagaaatccgtggattccatacgccaggattcactatcccagaatccagtctcccagagggatgaggcaacagcagagaataggacccactccctaaagagccctaggtatcttccagaagagatggcccactctgacatttcagaaacgtcaaatcgggccacgtgccacagggaacctgacaacagtaagaaccacaaaaccaaggacaactttaaaaggtcagtggcctccaaataccccaaggactgtagtgaggtcgagcgcacctacctgaaaaccaaatcaagctcccctagagacaagatctacactatagatggtgagaaggagcctggtttccacttagatccaccccagtttgttgaaaatgtgaccctgcccgagaacgtggacttcccggacccctaccaggatcccagtgaaaacttccgcaagggggactccacgctgccaatgaaccggaaccccttgcataatgaagaggggctttccaacaacgaccagtataaactctactccaagcacttcaccttgaaagacaagggttccccgcacagtgagaccagcgagcgataccggcagaactccacgcactgcagaagctgcctttccaacatgcccacctattcaggccacttcaccatgaggtcccccttcaagtgcgatgcctgcctgcggatggggaacctctatgacatcgatgaagaccagatgcttcaggagacaggtaacccagccaccggggagcaggtctaccagcaggactgggcacagaacaatgcccttcaattacaaaagaacaagctaaggattagccgtcagcattcctacgataacattgtcgacaaacctagggagctagaccttagcaggccctcccggagcataagcctcaaggacagggaacggcttctggagggaaatttttacggcagcctgtttagtgtcccctcaagcaaactctcggggaaaaaaagctcccttttcccccaaggtctggaggacagcaagaggagcaagtctctcttgccagaccacacctccgataaccctttcctccactcccacagggatgaccaacgcttggttattgggagatgcccctcggacccttacaaacactcgttgccatcccaggcggtgaatgacagctatcttcggtcgtccttgaggtcaacggcatcgtactgttccagggacagtcggggccacaatgatgtgtatatttcggagcatgttatgccttatgctgcaaataagaataatatgtactctacccccagggttttaaattcctgcagcaatagacgcgtgtacaagaaaatgcctagtatcgaatctgatgtttaaaaatcttccattaatgttttatctatagggaaatatacgtaatggccaatgttctggagggtaaatgttggatgtccaatagtgccctgctaagaggaagaagatgtagggaggtattttgttgttgttgttgttggctcttttgcacacggcttcatgccataatcttccactcaaggaatcttgtgaggtgtgtgctgagcatggcagacaccagataggtgagtccttaaccaaaaataactaactacataagggcaagtctccgggacatgcctactgggtatgttggcaataatgatgcattggatgccaatggtgatgttatgatttcctatattccaaattccattaaggtcagcccaccatgtaattttctcatcagaaatgcctaatggtttctctaatacagaataagcaatatggtgtgcatgtaaacctgacacagacaaaataaaaacagttaagaatgcatctgcactgtagtgcgattgacatgtgcaagagattaggaagtttggctcgtaacagtttcagctttcttgttatgccttccatcacagcccaggctcaccccaagaactccaggctcccctaaagaatagcaaatcagtgtgttcgtgatgactgtgctaccttcattatagttcatttccaagacacatctggagccaaaggcccgagggaccctcaggtggggagagctacaggaatctctttggatgttgatgtgtgtttctctcaccctcggcttcgatggtcttgttcagagctgcataaactaacacatttatgtctccgagatctaagtgtggatcttctgtctgtgacacagtggccattgtagtttatcccgaagacgcctatgtacgtaagtttgcatttcctcccttctggtgatgactcagggttgtatagtatctgttaccccttccctcccagagtaaccataactcgttccgtttccaaacagccatggtggtgtccaattagctgtgtatcgctcttcccagagttgttaatgtggtgacatgcaccaacagccgtatgtgtactgtgatctgtaagaagtacaatgccatctgtctgccgaaggctagcatggttttaggtttatcttccttcacatccagaaattctgttggacactcacttccaccccaaactcctcaaatcaaaagccttcaaaacacgaggcactcttggatctaccctgagtatcctccaaactgtggatacagtttagtgagacaagcaatttctcccttctgagttattctctctgttggtggcaaaccacttcatagcaccaacagagatgtaggaaaaattcctcaaagtatttgtcatttctgagtcgcctgcattatcccattcttattctcctcaaacctgtgcatatatgacatgaaatgatatccattttttttttaagttagagacagagaggggaatacttatgcatggggagcctgttagcacagtgcctgccacaaaaacaagtgcccccgacaagatagttgctatgttatgacactttctcagatcaggattttctagtttaaaaattaaatatcataaaaccagcaaataatattaactaaaccttttatatagttctactctgttaattagtgtatttcatgtacatgaatatttttgaagtatttgggataactagccatcagtgtttgcagaagacctcagtctgttttgggccattacggaaacactaagctaatgtagactcgcctggccatttcctggtttcctcctgcattctgctttacattcttgaagaaagggataaagtggcaggttgaaaaattatcccatttcttctcctcatggtgtgcgttctgttttgtaagtattattttcttgcatgtgggcaagtgtcagggatgattcccttaaagctcaaggatgcatggaatagctccatctttgggaaagtacacctgacctacagtgttcctataatgaaaagtggttgcaataaatttcagggtcaatcatagggagacagagggaggcagtgggtgagaggagcttcctttcatttttgaaaggcagaaggggctgactaggtgctggggatgcatgtgcttgaaaatgacattttatttcccggatgctgtacctctgctgccccaagacccagccatggagaagcctggatcgaagggcccagaatagtcaccccaacatctgatcctaaatctgaatctccatgactgtgtagccttttagccctttctaccttctgcccttccagtgcattccagaccttaatccaccccagcaaggatcgcctccatttcctcatgagtctgggatgttttgacatgaatgaattaaaaagtcttcccagaatacagaagagtgatttgtcgtcaagccaaagaggctttctgtcttcctctggtgtcctctaaacccagggggctgccaaatgccacagagacctccagggagagtgagagttatacttggactgacttcatcggtcagaaagccttcccctaacagcagcattatttctgctattaaccccatacatctctggataaagaaactgaaaacgtggcctttggaagaatcaacagtaatgttgtgaaaaaaatatatattcttttcactgaccgaagtgttttttcaaataaataatcagaaatgttatgctacacaaagtttatggtatcccttctctactaattcaatgactcttcaatgtgatgatcccaagcaaaaaaaaaaaaaaaaaaaaaaaatcaactactgatcagatggtcaatttctaaggaaaagatgtagagttattcaaaggtcatctaagtcagttcagtctttgcaaaaagaatatcaggaatgtaacgtccagtggtaaatggaacccacagtatgagaagtaacaagaattaaataggaagcctggaagcctgagactatagatctatcacagaagattcccgtaacatatcccagctctgagttcttagatttgttgatgtcaaggagcccaaatttctgaacacaaatgcctgagtttcagctggcttaagtcagagctggcatccataatgatattttgttaattctaattggttttccccacttgagaaggacccaactagtcctcagataggtacacttgaatgcaaacggttgggtctctgtccatgggtaatagcacgcacatgcaaccaatttaaaatactctgggtaagagagtcttctagagcataaactgtacttgagaaacctttgtgcttctggaaaatgggtttcatcatccttacatctgcaggttcttaggccacttatggtttcaatgctctgagctggcaagtccctataggtctatctttctgccagagagacttgcaggattataatctcacaatctcaccactcattactgttatgtcctctgcaaatctctctgcgttattttagccagcaccatgactgggcatccacggattactcttgattttctcttccctgattcacaggatgccagagagtctgagtatttagtttttctggtgaaagcattaaaattcacacattgcagcaaaatctgtcaaatcatttcacgcttattttctggggagaaaaatagaaaattacaccttgtttacaaatgaaatagtttcacttaaatgggactctagccaaggcagttaattagtcaaaagatccacagctgtcatatagtcacacattgtttattctatttgctatgtcgaccactgatgtgtatttaatattctgcatccttcacaggaaatgacaaatgccctgaattatttgcaaatagaattgctaatgaaaaagaaaaaaaatgttgatgttaattaaatggtgattaaaaatttatctcctttaaatctaaaaagtgcagctttaataatcagttgtcatataaataagtaccttgtactgaaatcccttgcggtttaagacctaaataaacactaatttgagaactctaaataccttacagaggagctggatatattcgttaacattatgcacattcctgtactgtttctttgtgcatagctgttgtgcatgaatccttgaaaaggggacatgcgttgtttctgaaatggagcctgtttgtattaaccatggctatagtagacatgattggactcaaagaaaaagaagtttgagtaggtggaagctaaatgtgttgcttgatatttaatgagtgaagggttctatgtaaaggcaattttccttccaaaagtactgtttattttcactggagacaaaattagacctttccagataccccatctctttttggtgaacagggttgaaagtgctgtggggtctatacttgaaaagttctcccaatatgcagttactgtttcccattcaatccctatacattgtactgtgttcatatctaattgtatcagatgaggtcagcttgccacttgatatagatcagagatgatcaaatgcacttatcctgtgaatacaactgcttgtgtacacatgtatataatatacatgcttgatttctacaattcacacgtaagtgtattatccaaataaaattgtacatattgtaaagtttatgttaaaaattaaatggtgatgatggtattaacacatggaaaacccattctggttatttttatgggaggatatttctgtagagagggcactatatttttttaatctcagttgtagggaggatgacagagcctaagtagaatatgggtgttggcgttcttggccccttctttaaaaaacaaaactctgggatgaggggtatagaatatattctgctcgcatttgcttctgaagacaatgccgatatggacttgtgtgtgatttccttaaacacatcaaagggcatagatttcctatttaaattccttatcctctttcctcacctgcactctttctgtgcccagcagtactttcagtatagtattagctagaagtgcctgcccagaagggtcttagaaaaatagagttcgtagaaccacaccaaaagttaggagaaggggaggagagatgagaaaaatgaagtttacaaatgggcagttgcctgtttaagatcatcaagttagagagtatcagagcgaggattagatccaagacatggttcaatttctggctcgattctctgaccgggctgacttatttctaggtttctttcaaggggaaactcctgagtagctctggaataagagccagagatccccataaggctgccctggtttttgttttgttttgttttttgtttttgccacttgccccagaaagacctacccatgcttctttgaatttggttttcctttaaactccctcacaatccctgtcttaaagttcctagaagagaaaacttttctcagagaccgtctccttaggaaaaatcaacagggatattgtttaaaacctcaaactgaagataaaaggctggcagtgaccattgaaataattgaggtctatgtatcatgcattgaggaagaaccaagcacattgaccagctaataggacttcactgaatgtccactttattttgaaagccagtttgggattgtgggggaggggatgcaaaataaatagaaaatatagtctcttcccataagtagcttatggtttagaagttcagttctctaatacaaaggataaccaaggacccatgcaatgcaaacagagactaaacagcaaaaattagaaatgacaactaaagttgtagccaggaaaaaaaaaataatctgattctatgagcataccttttttaaaaaaaaaaaaaaagtccttccctaaacctttaagtaactccggagaatagagttagtggtcccggaaatgcagttgatttattttaatcttcaaataatggacttaggagacccaggagctgctaaccaggtgaacacactcacactcctacatttttgcacaggaaggcttttgtctggttccaaccagttctccagtccttgccaaatcatgcctcctcccagccttgcattatgacatgtgcctcaagaaaaggttgaaaaaattccccaaaggattagaaaatagaccatgatgtaaaaagacgaagcatttccctaaagcttttttgtttggttttgtttttgacatttgaagaacccttctgatacaccagggtatgaatgtatcagggaagcatagagggaaaattctttatcaagttccaagtgcctactgctgtggctgacagaaagcatcaggttccctagagagaaaacggggcaaagagatggcaaaaggaatagaggtgtatttcaggaaggatggcgaggtggagagggagcttttgtcactctgtctatcccattctgtgcattcttggaatgttacattttctgcttatcgcaagtacttgccatggatctgcacctgaatttgaaaatatcaaaatatatctaaattgagtgtaggcgatattctaggcatatcctagaatgtgatcctcaaaacaaccttaagatataaatatgattgctcccattttacagataaggaaactgaggctcaggtttttctcaacctcgtcagcaactagaattagctagtaaatccctaacgttagacatattttcaaagtgcctggtctcctccagggaggtcagaatagaagtcagaaagagaggtgtgctcttttgaggttcctgggcatatacccttgagtatcagcctctgtgacagggaagtctgttagggtcttacccctcattgcctgatctgtgtgtatggagaacttctggggatctcacctctgttcatagttccttctgagacttgaacactgtttgtgtctccctttcatatgcttgcacttagcatttaaaaaaatttctggggagttattttctctacttagcatgtgcctaatcttaaatatctctttcctaatgtctcatctttttatcagtcaacatcagggctaattccattaaacatatatacatagtacatgctctcatgtgtgtgggtatgcacacacacacacacagccatgtgaccctccattaaagtcctcctaaatattgtgacccatgttcaaagaggtgatattatttgcaagttgactattcctcctatttcatgtctatgtttggttatctttgccaggcagatggaatgagtttcagaggtgggacagggaataggaaatagagtttctgcatgaatgatggagagctttggtagtcagaatgattgaggaccagctattaaaatgttgttgttgttttccttcttggtctgttcctttttttttttcttttccaaattgtcttagagataattcccggctcacttagcattaggataatgacggttattctgtcccactgaagagtgttgaactggaacgcttccaccgggctttataggtacccagaatggcctaatgtttaacatatcctgcaggcatgcccctgagcacacactgcctttcctgcattcccccctctccatggtctaagccacatttctttcctggcatttatatttactgagaggtgaggggtgcattaggcccatttgatggatgaggacactagcggggatttgaaggaatgtctttctgggagtctccatgaattctctggagagttagctaacttaatgcaagttaagtgctagtctatgagaaaaatttctcagctgttttcatctttcaagctggcagtaaaaagccttttaagacagaaagattattatttgttatttggagatcctgttgttgggtctacaagtgcgtgaccatgttctccttggaatgttgagctatgcagaaatggagcactccaaagaacgatttgaccaatagcatttcttctctgggggttgtatttcaaagcatgcaactctccagggaaccagaactaaattgcttaaaatgaagtcattcctcagattaacttcctcagataaagtgtcagcggtctgcagaaacgaagaagacaaaactgagattatcactcataattctcttacttactatgtcagtgaaacaatgagtttgcatttttgcaatcctagaacattcttcattagccctgggtcatgacctcttccagttaattctctttcacacctttaggaaagatttaagatgaaccttcaataggatattaacataactcatagccaataccacagctgcctttcaaattaatgaggttaattgttctccagcaaacatgagtttgtctttggcattttaaatgcttcccattgatctgacattttgctgtttcaagttttaaagggctcaaatcaaagactattgataactgagcaaagagcgaagatccagaaatacgaaaacattgtctttttttttccatgaaaaacaatcatagccttttgaattcaatcgaagtttctacattagccatctaagacttatttaattatttctgttctcagtcaagctaattcaagtgaatgaacagtattgacttttaaaatcttttttaaatttttttaaatctttagtttattaagtttgtagaaaagctctggggccatgaccacttacgtaaatgtttcagtttaaaaacaaaagattcaggcctctaatttgagccaaatccaggtgatcttgtttgaaatttttgatgaatttgaaaagatgaaagtggaacttttaacattcatgttccccaaatttttcactgggaagggatgctaattgcctacttaagatataagttcaagaataacattttcatagaaaattcagaaaactgcttgacacagcagtgacatagttagatgtggctcagatgccttccaaacctgagggtccccaaagatttctttaccagttgtttttaactatgaatcttaatcttgttcattcccctgccaaaacaaatttaaaagcataaacctgctgaattaattggcagaattcaccatagtttatatcaccccagaatgtttatgtgtatatgtttatgtatagtatatatatttcaagctgaatgttcagaaagaataaggtgagtttcttggtagcttgaataagaattagatcataaaaattataaataatggccttctcaaagaggataaatgattcatttttcactcacgtattaataatatgacttgttgcataatacacaagctggtcattgcctgcaagaaagttattgaattaagcagctatccaggtttatgtctgagtccatttttaacccaacaaggctaggattgaactccatatgcagagggtttctattcacagctacattcaaacagaatccaaaacccacatcagaactgacttgatgtcttgtatggtggagctgaaagcaagctgtctgctctaagcaatggtcttcatttgggaattaatgttcactgatcaactgcagcagtttatatctgtcatgttttaatccactgcatgaggaagtgctaataagtgtattaaatatttccaagcatagctacaaaattatatgtttgcttaacacctttctatgatagaggaagtatatactatggttgtcttcttgtagtatgtcttttaattttgttcaatgtgttatcaactgttttaaggaatggggattgaaattcgtgtgcaaactgatatgtatataactcctgaggcaacagaagtgcccggtcatatggtgtaaaaatgtaaatacaggaaaatttcatttttctaataaagataatttctgccaattgatatgaaaatg

SEQ ID NO: 137503 - DNA, 4118 bp, Homo sapiens
  Payload ID: 6918
  Gene Symbol: GRIN2A
  Gene Name: glutamate receptor, ionotropic, N-methyl D-aspartate 2A
  ENST ID: ENST00000535259
  CDS Start-End: 5-3439
ctggcaggatccgacgtctaccttcttccagtttggagcgtccatccagcagcaagccacggtcatgctgaagatcatgcaggattatgactggcatgtcttctccctggtgaccactatcttccctggctacagggaattcatcagcttcgtcaagaccacagtggacaacagctttgtgggctgggacatgcagaatgtgatcacactggacacttcctttgaggatgcaaagacacaagtccagctgaagaagatccactcttctgtcatcttgctctactgttccaaagacgaggctgttctcattctgagtgaggcccgctcccttggcctcaccgggtatgatttcttctggattgtccccagcttggtctctgggaacacggagctcatcccaaaagagtttccatcgggactcatttctgtctcctacgatgactgggactacagcctggaggcgagagtgagggacggcattggcatcctaaccaccgctgcatcttctatgctggagaagttctcctacatccccgaggccaaggccagctgctacgggcagatggagaggccagaggtcccgatgcacaccttgcacccatttatggtcaatgttacatgggatggcaaagacttatccttcactgaggaaggctaccaggtgcaccccaggctggtggtgattgtgctgaacaaagaccgggaatgggaaaaggtgggcaagtgggagaaccatacgctgagcctgaggcacgccgtgtggcccaggtacaagtccttctccgactgtgagccggatgacaaccatctcagcatcgtcaccctggaggaggccccattcgtcatcgtggaagacatagaccccctgaccgagacgtgtgtgaggaacaccgtgccatgtcggaagttcgtcaaaatcaacaattcaaccaatgaggggatgaatgtgaagaaatgctgcaaggggttctgcattgatattctgaagaagctttccagaactgtgaagtttacttacgacctctatctggtgaccaatgggaagcatggcaagaaagttaacaatgtgtggaatggaatgatcggtgaagtggtctatcaacgggcagtcatggcagttggctcgctcaccatcaatgaggaacgttctgaagtggtggacttctctgtgccctttgtggaaacgggaatcagtgtcatggtttcaagaagtaatggcaccgtctcaccttctgcttttctagaaccattcagcgcctctgtctgggtgatgatgtttgtgatgctgctcattgtttctgccatagctgtttttgtctttgaatacttcagccctgttggatacaacagaaacttagccaaagggaaagcaccccatgggccttcttttacaattggaaaagctatatggcttctttggggcctggtgttcaataactccgtgcctgtccagaatcctaaagggaccaccagcaagatcatggtatctgtatgggccttcttcgctgtcatattcctggctagctacacagccaatctggctgccttcatgatccaagaggaatttgtggaccaagtgaccggcctcagtgacaaaaagtttcagagacctcatgactattccccaccttttcgatttgggacagtgcctaatggaagcacggagagaaacattcggaataactatccctacatgcatcagtacatgaccaaatttaatcagaaaggagtagaggacgccttggtcagcctgaaaacggggaagctggacgctttcatctacgatgccgcagtcttgaattacaaggctgggagggatgaaggctgcaagctggtgaccatcgggagtgggtacatctttgccaccaccggttatggaattgcccttcagaaaggctctccttggaagaggcagatcgacctggccttgcttcagtttgtgggtgatggtgagatggaggagctggagaccctgtggctcactgggatctgccacaacgagaagaacgaggtgatgagcagccagctggacattgacaacatggcgggcgtattctacatgctggctgccgccatggcccttagcctcatcaccttcatctgggagcacctcttctactggaagctgcgcttctgtttcacgggcgtgtgctccgaccggcctgggttgctcttctccatcagcaggggcatctacagctgcattcatggagtgcacattgaagaaaagaagaagtctccagacttcaatctgacgggatcccagagcaacatgttaaaactcctccggtcagccaaaaacatttccagcatgtccaacatgaactcctcaagaatggactcacccaaaagagctgctgacttcatccaaagaggttccctcatcatggacatggtttcagataaggggaatttgatgtactcagacaacaggtcctttcaggggaaagagagcatttttggagacaacatgaacgaactccaaacatttgtggccaaccggcagaaggataacctcaataactatgtattccagggacaacatcctcttactctcaatgagtccaaccctaacacggtggaggtggccgtgagcacagaatccaaagcgaactctagaccccggcagctgtggaagaaatccgtggattccatacgccaggattcactatcccagaatccagtctcccagagggatgaggcaacagcagagaataggacccactccctaaagagccctaggtatcttccagaagagatggcccactctgacatttcagaaacgtcaaatcgggccacgtgccacagggaacctgacaacagtaagaaccacaaaaccaaggacaactttaaaaggtcagtggcctccaaataccccaaggactgtagtgaggtcgagcgcacctacctgaaaaccaaatcaagctcccctagagacaagatctacactatagatggtgagaaggagcctggtttccacttagatccaccccagtttgttgaaaatgtgaccctgcccgagaacgtggacttcccggacccctaccaggatcccagtgaaaacttccgcaagggggactccacgctgccaatgaaccggaaccccttgcataatgaagaggggctttccaacaacgaccagtataaactctactccaagcacttcaccttgaaagacaagggttccccgcacagtgagaccagcgagcgataccggcagaactccacgcactgcagaagctgcctttccaacatgcccacctattcaggccacttcaccatgaggtcccccttcaagtgcgatgcctgcctgcggatggggaacctctatgacatcgatgaagaccagatgcttcaggagacagggatgaccaacgcttggttattgggagatgcccctcggacccttacaaacactcgttgccatcccaggcggtgaatgacagctatcttcggtcgtccttgaggtcaacggcatcgtactgttccagggacagtcggggccacaatgatgtgtatatttcggagcatgttatgccttatgctgcaaataagaataatatgtactctacccccagggttttaaattcctgcagcaatagacgcgtgtacaagaaaatgcctagtatcgaatctgatgtttaaaaatcttccattaatgttttatctatagggaaatatacgtaatggccaatgttctggagggtaaatgttggatgtccaatagtgccctgctaagaggaagaagatgtagggaggtattttgttgttgttgttgttggctcttttgcacacggcttcatgccataatcttccactcaaggaatcttgtgaggtgtgtgctgagcatggcagacaccagataggtgagtccttaaccaaaaataactaactacataagggcaagtctccgggacatgcctactgggtatgttggcaataatgatgcattggatgccaatggtgatgttatgatttcctatattccaaattccattaaggtcagcccaccatgtaattttctcatcagaaatgcctaatggtttctctaatacagaataagcaatatggtgtgcatgtaaacctgacacagacaaaataaaaacagttaagaatgc

SEQ ID NO: 137504 - DNA, 4338 bp, Homo sapiens
  Payload ID: 6918
  Gene Symbol: GRIN2A
  Gene Name: glutamate receptor, ionotropic, N-methyl D-aspartate 2A
  Uniprot ID: Q12879
  ENST ID: ENST00000562109
  CDS Start-End: 30-3875
tcgggctacagggaccgtcagtggcgactatgggcagagtgggctattggaccctgctggtgctgccggcccttctggtctggcgcggtccggcgccgagcgcggcggcggagaagggtccccccgcgctaaatattgcggtgatgctgggtcacagccacgacgtgacagagcgcgaacttcgaacactgtggggccccgagcaggcggcggggctgcccctggacgtgaacgtggtagctctgctgatgaaccgcaccgaccccaagagcctcatcacgcacgtgtgcgacctcatgtccggggcacgcatccacggcctcgtgtttggggacgacacggaccaggaggccgtagcccagatgctggattttatctcctcccacaccttcgtccccatcttgggcattcatgggggcgcatctatgatcatggctgacaaggatccgacgtctaccttcttccagtttggagcgtccatccagcagcaagccacggtcatgctgaagatcatgcaggattatgactggcatgtcttctccctggtgaccactatcttccctggctacagggaattcatcagcttcgtcaagaccacagtggacaacagctttgtgggctgggacatgcagaatgtgatcacactggacacttcctttgaggatgcaaagacacaagtccagctgaagaagatccactcttctgtcatcttgctctactgttccaaagacgaggctgttctcattctgagtgaggcccgctcccttggcctcaccgggtatgatttcttctggattgtccccagcttggtctctgggaacacggagctcatcccaaaagagtttccatcgggactcatttctgtctcctacgatgactgggactacagcctggaggcgagagtgagggacggcattggcatcctaaccaccgctgcatcttctatgctggagaagttctcctacatccccgaggccaaggccagctgctacgggcagatggagaggccagaggtcccgatgcacaccttgcacccatttatggtcaatgttacatgggatggcaaagacttatccttcactgaggaaggctaccaggtgcaccccaggctggtggtgattgtgctgaacaaagaccgggaatgggaaaaggtgggcaagtgggagaaccatacgctgagcctgaggcacgccgtgtggcccaggtacaagtccttctccgactgtgagccggatgacaaccatctcagcatcgtcaccctggaggaggccccattcgtcatcgtggaagacatagaccccctgaccgagacgtgtgtgaggaacaccgtgccatgtcggaagttcgtcaaaatcaacaattcaaccaatgaggggatgaatgtgaagaaatgctgcaaggggttctgcattgatattctgaagaagctttccagaactgtgaagtttacttacgacctctatctggtgaccaatgggaagcatggcaagaaagttaacaatgtgtggaatggaatgatcggtgaagtggtctatcaacgggcagtcatggcagttggctcgctcaccatcaatgaggaacgttctgaagtggtggacttctctgtgccctttgtggaaacgggaatcagtgtcatggtttcaagaagtaatggcaccgtctcaccttctgcttttctagaaccattcagcgcctctgtctgggtgatgatgtttgtgatgctgctcattgtttctgccatagctgtttttgtctttgaatacttcagccctgttggatacaacagaaacttagccaaagggaaagcaccccatgggccttcttttacaattggaaaagctatatggcttctttggggcctggtgttcaataactccgtgcctgtccagaatcctaaagggaccaccagcaagatcatggtatctgtatgggccttcttcgctgtcatattcctggctagctacacagccaatctggctgccttcatgatccaagaggaatttgtggaccaagtgaccggcctcagtgacaaaaagtttcagagacctcatgactattccccaccttttcgatttgggacagtgcctaatggaagcacggagagaaacattcggaataactatccctacatgcatcagtacatgaccaaatttaatcagaaaggagtagaggacgccttggtcagcctgaaaacggggaagctggacgctttcatctacgatgccgcagtcttgaattacaaggctgggagggatgaaggctgcaagctggtgaccatcgggagtgggtacatctttgccaccaccggttatggaattgcccttcagaaaggctctccttggaagaggcagatcgacctggccttgcttcagtttgtgggtgatggtgagatggaggagctggagaccctgtggctcactgggatctgccacaacgagaagaacgaggtgatgagcagccagctggacattgacaacatggcgggcgtattctacatgctggctgccgccatggcccttagcctcatcaccttcatctgggagcacctcttctactggaagctgcgcttctgtttcacgggcgtgtgctccgaccggcctgggttgctcttctccatcagcaggggcatctacagctgcattcatggagtgcacattgaagaaaagaagaagtctccagacttcaatctgacgggatcccagagcaacatgttaaaactcctccggtcagccaaaaacatttccagcatgtccaacatgaactcctcaagaatggactcacccaaaagagctgctgacttcatccaaagaggttccctcatcatggacatggtttcagataaggggaatttgatgtactcagacaacaggtcctttcaggggaaagagagcatttttggagacaacatgaacgaactccaaacatttgtggccaaccggcagaaggataacctcaataactatgtattccagggacaacatcctcttactctcaatgagtccaaccctaacacggtggaggtggccgtgagcacagaatccaaagcgaactctagaccccggcagctgtggaagaaatccgtggattccatacgccaggattcactatcccagaatccagtctcccagagggatgaggcaacagcagagaataggacccactccctaaagagccctaggtatcttccagaagagatggcccactctgacatttcagaaacgtcaaatcgggccacgtgccacagggaacctgacaacagtaagaaccacaaaaccaaggacaactttaaaaggtcagtggcctccaaataccccaaggactgtagtgaggtcgagcgcacctacctgaaaaccaaatcaagctcccctagagacaagatctacactatagatggtgagaaggagcctggtttccacttagatccaccccagtttgttgaaaatgtgaccctgcccgagaacgtggacttcccggacccctaccaggatcccagtgaaaacttccgcaagggggactccacgctgccaatgaaccggaaccccttgcataatgaagaggggctttccaacaacgaccagtataaactctactccaagcacttcaccttgaaagacaagggttccccgcacagtgagaccagcgagcgataccggcagaactccacgcactgcagaagctgcctttccaacatgcccacctattcaggccacttcaccatgaggtcccccttcaagtgcgatgcctgcctgcggatggggaacctctatgacatcgatgaagaccagatgcttcaggagacagggatgaccaacgcttggttattgggagatgcccctcggacccttacaaacactcgttgccatcccaggcggtgaatgacagctatcttcggtcgtccttgaggtcaacggcatcgtactgttccagggacagtcggggccacaatgatgtgtatatttcggagcatgttatgccttatgctgcaaataagaataatatgtactctacccccagggttttaaattcctgcagcaatagacgcgtgtacaagaaaatgcctagtatcgaatctgatgtttaaaaatcttccattaatgttttatctatagggaaatatacgtaatggccaatgttctggagggtaaatgttggatgtccaatagtgccctgctaagaggaagaagatgtagggaggtattttgttgttgttgttgttggctcttttgcacacggcttcatgccataatcttccactcaaggaatcttgtgaggtgtgtgctgagcatggcagacaccagataggtgagtccttaaccaaaaataactaactacataagg

SEQ ID NO: 137505 - DNA, 30355 bp, Homo sapiens
  Payload ID: 6919
  Gene Symbol: GRIN2B
  Gene Name: glutamate receptor, ionotropic, N-methyl D-aspartate 2B
  Uniprot ID: Q13224
  ENST ID: ENST00000609686
  CDS Start-End: 455-4909
cccttaggaaggggacgctttgggaatgaccatgctccaccgagggacggagccggcccccagcttctccacacagagcctcctccactaacgctccaaaaaccaaaaaccgtaattgccagaagaagcgttaaaaatctattccagccactaacctcacatgcacacggaataattactctggattctgcattgtgagctgctctccataccctgaattacctttgaattaaatctttttttttttgaatttgcatctcttcaagacacaagattaaaacaaaatttacgctaaattggattttaaattatcttccgttcatttatccttcgtctttcttatgtggatatgcaagcgagaagaagggactggacattcccaacatgctcactcccttaatctgtccgtctagaggtttggcttctacaaaccaagggagtcgacgagttgaagatgaagcccagagcggagtgctgttctcccaagttctggttggtgttggccgtcctggccgtgtcaggcagcagagctcgttctcagaagagcccccccagcattggcattgctgtcatcctcgtgggcacttccgacgaggtggccatcaaggatgcccacgagaaagatgatttccaccatctctccgtggtaccccgggtggaactggtagccatgaatgagaccgacccaaagagcatcatcacccgcatctgtgatctcatgtctgaccggaagatccagggggtggtgtttgctgatgacacagaccaggaagccatcgcccagatcctcgatttcatttcagcacagactctcacccccatcctgggcatccacgggggctcctctatgataatggcagataaggatgaatcctccatgttcttccagtttggcccatcaattgaacagcaagcttccgtaatgctcaacatcatggaagaatatgactggtacatcttttctatcgtcaccacctatttccctggctaccaggactttgtaaacaagatccgcagcaccattgagaatagctttgtgggctgggagctagaggaggtcctcctactggacatgtccctggacgatggagattctaagatccagaatcagctcaagaaacttcaaagccccatcattcttctttactgtaccaaggaagaagccacctacatctttgaagtggccaactcagtagggctgactggctatggctacacgtggatcgtgcccagtctggtggcaggggatacagacacagtgcctgcggagttccccactgggctcatctctgtatcatatgatgaatgggactatggcctccccgccagagtgagagatggaattgccataatcaccactgctgcttctgacatgctgtctgagcacagcttcatccctgagcccaaaagcagttgttacaacacccacgagaagagaatctaccagtccaatatgctaaataggtatctgatcaatgtcacttttgaggggaggaatttgtccttcagtgaagatggctaccagatgcacccgaaactggtgataattcttctgaacaaggagaggaagtgggaaagggtggggaagtggaaagacaagtccctgcagatgaagtactatgtgtggccccgaatgtgtccagagactgaagagcaggaggatgaccatctgagcattgtgaccctggaggaggcaccatttgtcattgtggaaagtgtggaccctctgagtggaacctgcatgaggaacacagtcccctgccaaaaacgcatagtcactgagaataaaacagacgaggagccgggttacatcaaaaaatgctgcaaggggttctgtattgacatccttaagaaaatttctaaatctgtgaagttcacctatgacctttacctggttaccaatggcaagcatgggaagaaaatcaatggaacctggaatggtatgattggagaggtggtcatgaagagggcctacatggcagtgggctcactcaccatcaatgaggaacgatcggaggtggtcgacttctctgtgcccttcatagagacaggcatcagtgtcatggtgtcacgcagcaatgggactgtctcaccttctgccttcttagagccattcagcgctgacgtatgggtgatgatgtttgtgatgctgctcatcgtctcagccgtggctgtctttgtctttgagtacttcagccctgtgggttataacaggtgcctcgctgatggcagagagcctggtggaccctctttcaccatcggcaaagctatttggttgctctggggtctggtgtttaacaactccgtacctgtgcagaacccaaaggggaccacctccaagatcatggtgtcagtgtgggccttctttgctgtcatcttcctggccagctacactgccaacttagctgccttcatgatccaagaggaatatgtggaccaggtttctggcctgagcgacaaaaagttccagagacctaatgacttctcaccccctttccgctttgggaccgtgcccaacggcagcacagagagaaatattcgcaataactatgcagaaatgcatgcctacatgggaaagttcaaccagaggggtgtagatgatgcattgctctccctgaaaacagggaaactggatgccttcatctatgatgcagcagtgctgaactatatggcaggcagagatgaaggctgcaagctggtgaccattggcagtgggaaggtctttgcttccactggctatggcattgccatccaaaaagattctgggtggaagcgccaggtggaccttgctatcctgcagctctttggagatggggagatggaagaactggaagctctctggctcactggcatttgtcacaatgagaagaatgaggtcatgagcagccagctggacattgacaacatggcaggggtcttctacatgttgggggcggccatggctctcagcctcatcaccttcatctgcgaacaccttttctattggcagttccgacattgctttatgggtgtctgttctggcaagcctggcatggtcttctccatcagcagaggtatctacagctgcatccatggggtggcgatcgaggagcgccagtctgtaatgaactcccccaccgcaaccatgaacaacacacactccaacatcctgcgcctgctgcgcacggccaagaacatggctaacctgtctggtgtgaatggctcaccgcagagcgccctggacttcatccgacgggagtcatccgtctatgacatctcagagcaccgccgcagcttcacgcattctgactgcaaatcctacaacaacccgccctgtgaggagaacctcttcagtgactacatcagtgaggtagagagaacgttcgggaacctgcagctgaaggacagcaacgtgtaccaagatcactaccaccatcaccaccggccccatagtattggcagtgccagctccatcgatgggctctacgactgtgacaacccacccttcaccacccagtccaggtccatcagcaagaagcccctggacatcggcctcccctcctccaagcacagccagctcagtgacctgtacggcaaattctccttcaagagcgaccgctacagtggccacgacgacttgatccgctccgatgtctctgacatctcaacccacaccgtcacctatgggaacatcgagggcaatgccgccaagaggcgtaagcagcaatataaggacagcctgaagaagcggcctgcctcggccaagtcccgcagggagtttgacgagatcgagctggcctaccgtcgccgaccgccccgctcccctgaccacaagcgctacttcagggacaaggaagggctacgggacttctacctggaccagttccgaacaaaggagaactcaccccactgggagcacgtagacctgaccgacatctacaaggagcggagtgatgactttaagcgcgactccgtcagcggaggagggccctgtaccaacaggtctcacatcaagcacgggacgggcgacaaacacggcgtggtcagcggggtacctgcaccttgggagaagaacctgaccaacgtggagtgggaggaccggtccgggggcaacttctgccgcagctgtccctccaagctgcacaactactccacgacggtgacgggtcagaactcgggcaggcaggcgtgcatccggtgtgaggcttgcaagaaagcaggcaacctgtatgacatcagtgaggacaactccctgcaggaactggaccagccggctgccccagtggcggtgacgtcaaacgcctccaccactaagtaccctcagagcccgactaattccaaggcccagaagaagaaccggaacaaactgcgccggcagcactcctacgacaccttcgtggacctgcagaaggaagaagccgccctggccccgcgcagcgtaagcctgaaagacaagggccgattcatggatgggagcccctacgcccacatgtttgagatgtcagctggcgagagcacctttgccaacaacaagtcctcagtgcccactgccggacatcaccaccacaacaaccccggcggcgggtacatgctcagcaagtcgctctaccctgaccgggtcacgcaaaaccctttcatccccacttttggggacgaccagtgcttgctccatggcagcaaatcctacttcttcaggcagcccacggtggcgggggcgtcgaaagccaggccggacttccgggcccttgtcaccaacaagccggtggtctcggcccttcatggggccgtgccagcccgtttccagaaggacatctgtatagggaaccagtccaacccctgtgtgcctaacaacaaaaaccccagggctttcaatggctccagcaatgggcatgtttatgagaaactttctagtattgagtctgatgtctgagtgagggaacagagaggttaaggtgggtacgggagggtaaggctgtgggtcgcgtgatgcgcatgtcacggagggtgacgggggtgaacttggttcccatttgctcctttcttgttttaatttatttatgggatcctggagttctggttcctactgggggcaaccctggtgaccagcaccatctctcctccttttcacagttctctccttcttccccccgctgtcagccattcctgttcccatgagatgatgccatgggccctctcagcaggggagggtagagcggagaaaggaagggctgcatgcgggcttcctcctggtgtggaagagctccttgatatcctctttgagtgaagctgggagaaccaaaaagaggctatgtgagcacaaaggtagcttttcccaaactgatcttttcatttaggtgaggaagcaaaagcatctatgtgagaccatttagcacactgcttgtgaaaggaaagaggctctggctaaattcatgctgcttagatgacatctgtctaggaatcatgtgccaagcagaggttgggaggccatttgtgtttatatataagccaaaaaatgcttgcttcaaccccatgagactcgatagtggtggtgaacagaacaaaaggtcattggtggcagagtggattcttgaacaaactggaaagtacgttatgatagtgtcccacggtgccttggggacaagagcaggtggattgtgcgtgcatgtgtgttcatgcacacttgcacccatgtgtagtcaggtgcctcaagagaaggcaaccttgactctttctattgtttctttcaatatccccaagcagtgtgattgtttggcttatatacagacagagatggccatgtattacctgaattttggctgtgtctcccttcatccttctggaataaggagaatgaaaattcttgataaagaagattctgtggtctaaacaaaaaaaggcggtgagcaatcctgcaagaacaaggtacataaacaagtcctcagtggttggcaattgtttcaaccagtttgaaccaagaactttccaggaaggctaaagggaaaccgaattttcacagccatgattcttttgcccacacttgggagcaaaagattctacaaagctcttttgagcatttagactctcgactggccaaggtttggggaagaacgaagccacctttgaagaagtaaggagtcgtgtatggtagggtaagtgagagagggggatgtttccaatgctttgatcccttcttacttaacctgaagctagacgagcaggcttcttccccccaaaactgattacaactgctacagagcagacagttaagagaaatgagcttgacctttaagagaaatgagctgcactccatgagtgcagctctggaggtacgaaaagaggggaagagacttggaaatgggagacgggggcagagagggaccctccaccacctctttgggcctggctccctgggaatgtgacttgagcccagagtgaacactcttggtagaagcccttctaccttcctgcaacaccttgtttccctctcagattgtaccattgaggaataaaaaaagatatacatgtataaaactccagggatgagggtaccagcagaactgatgctcccttcacttaacattggaaaattgagaagggaaatgaatatgtatcactgccggtcctgaaacttgcggtagggctatttattctatgggtcagttccactgtcctgccatcctcccctacacagggtggcatccagagagccccaggtctgtgtggaagcttgactgcaggatcgccatgttgcacacaggacacataaaccagaaaggtgctcatcctcctctggaaggaagctgccatgtctcttcaagtcactccctccagggctgctcttcgcccctgtttgccctcactcgtgacccttcctcatcccgcccttgactgctgtccccaaccctcctccttgatttttacctcagtatctttcattttaaagccaactgaaggccttgtaaagctttgttttctttctaaaatgaacatgggggcaaggggctgaacctctcacagatttggtgagaggagcacggagtgctttaccttagataacagaaaagactgagagaggacagagggcatgaggcacctccaggaggaagaaggcgaagggccacgtaaacactgcttcgccctgactctgtccaggggtcagggactcatcccctcatcttcctcttacctcacccctttcaaacaaaaaaaccaaaccaactaacctagcgaacagcaatctagaaccaagggagctctttcagtctccgctggcaacagaaatcaagatggtgtttatttcatatgtaaatattttgttttctaattttgtatagataaagtgttctcttgtgagtattcagggtgttgggctggagggagtggggtggtgatgggaatgagagggaaaaagtgttttgttatgggttttcatttcccattgggggaattgttttgtatggcttttttgcttcagggtgtctggaaaaagcgaatgctcatggaggccactatggtgaaaaagccaggggaaagtaattgtgtccatcccccccagaaaaccagtcttcttactggtttgtgagaaatgttcatgcactttggccagggttttacatagggttcaatttggctctaagcaaaccccaggtctgactcctatcttctaggtagaccctaggttaccacattccacacaaagacaggctggtggcaccatatttcctctgtcagtacctagggtaggaaagattcccaaaagggcttaaacagaattaaggtcaaattaacttcccattcttggcgtgactgaaaggtttcaggaagctcaatcctgagaaatctcccagcggcctcctctgatgctgaaacaatcgtctcagtcatctgagtcttttcttctttaggacctgggcgctgactcactccctgccccatctccaccctcagaagtcagcctggcaaacacacgtggaaaaatctccactaactctactttttgaagcatgtgatatctggtcacagagaggtagtgctggatatgtgtcttacaaatttgcatgcttttctagaaaagatgatgggatccactagaaactcagtggtgagatgattcccttagcaagattgctgaagttaggtttagacgtgggagggtgggtatgtgagcaatggtgccaatagcggctctttatttgccttgtcctcattactgccatcaggaaggtgctactggcctcgagccaggtgttcataatctggccttgggttaaccagacaaatagaacttcttttcctagactgttggctttgtggaggttggcagcctctatcacaggataaaatttccaaatccatttacccagtatattcactacattttttcctatcctcccatcataaaagctgttagctggacaattttatttttctaaacttatttggccccagttggttgcttttcttcaactggatatttgcactgggactaagttactcatggtctgcttaagaaaacttaaagaaaggaaggctgggcattgttaaaatctagatgttacttaattccagaataacaagcaagtaaaatgcatgaggaagaattcagctataagcccaatctatatcacagatgggtatgaaacaacacccaatccatccaaaactgtgagattccgcagataccctcaggagcacctaatattcccatgttcttcagaatccatgctttctcgctttgtaccctctatcattcccttccattgcagaagtggttggtgagtgtggtcctgtatgaactcctttcagtggcaatgcttaaatctcagcatttccactgacaataatctgacccttgaatttgcctgagtcgagactttgcacacccttcaaagtgatgcatgtacagtggactttgttatttcaaaatctgtcactgtgtatcctcagccagaacttgggaaacatccttcatatgtatttccctgcactggccacagccatgttgtgattgaggggaaaatcccaaatgattccattaaatgttgctggtgtcagtagtgccaaaaacgcatgtatgacatgatacagtaggagttgtctatacagttaagtgactatcactcacccggtcttccgtggccatcaggagttgcccaagggagaattctctgcagagtgctggtcacctgcacatgtcactaagaactaggtttctttggttcattttttttttttttttggtcggtttttagttagttagttcaagatttacagatagaataaccagattgtttgggcaataagcttttggaaaaactattccagaactcactttattctttcaatcatcatctctctaaaaaggccctgtcattgcttgacaccctgtgaatgtctgtttttgtatgttaggaatgattcagatgtgtgcataaatgatgtcactgcagtgatattgatgaatgcattcagcatttccagggactgtggccataccttatgtgctctctgagcccaaagccatataggaaatacatgctcagtaggctgctacacactacagcagagcttttgctttcttcacttgggtgtcagagacttttcctcctgtttaaggagctcttcatggaggagaagcagctgaaagtgaatagtcacactgggatgggtctggccttatgtatgctatgtggtccatggtgtgttgaaggtcctgaaaaggtctttttcatttcccaccccactgcaactaccaccttcccacacagatttgttgctttagcactgagctgagctgtctgtcattcgaatgaaagtaatcccaggaaaggtgacatattaagccatattagggatgtatacatttaatcacctaatttacattaggaatctcactccttttcctgggaataagttatgatacaagagaagaggaagggagcagagagcactgagagcaatagagtagggaacaaggatacaggttctagatggcaaagacatttaaaccatattttggcctccgcctgcttttatttaagcctcatttgacacctaaataggactcctggttaggaattattttcaatacacaatcatatgagtgtataatttatgaatttctaaattcagtatcttgtagggcaggttgagaactatgattctttccatagaaaatagaagagtgatgcttctcctccattacatgttactgagtaggcagctagaaaaatcaaattgaattagtgatacaataaaatttactgtcattgtctggtttctgtcccagtttaattaatcttccaattagctgagttggtctatatcctatactttccacctccatagggggtgccctgttatctggtaaaagagccacttatgacctcaggtgctacttaacctggggggcaattgtttcttaggcctagcagatgtttgggatgacactaaaatggcagattagtcagtctgagaatgtctaatattgatctgaatctaggattctattctagtttggggggtggggttgcagtattgtataaaatcataggatatctgagaacatcccaccctcaactcattccaaccacattgattcagtcacacagtggccctgtgagctctatgacttagaagagatagcctatctattcctatgacaaaggccctcacccaaaaccttaaattgaaagccagtgctgctactttcatgccttggagagaactgtgacgtttagggcttctcatttacaatattgaagcaagaaaaaagaattttgttcagagtaatgggttagaatagcagtactgggaataagtagggaaagttagaaatcttccacatttctctctacatctctcaagagctctgtacagtgagtttctggagctgcttcatgctttgaatataattgctggggtgattatgtggttaagggctcctgaaagaactgaaggtgaaaagcagagtagatgagtagaattcctcagagccttggcactctggtgtgtagaatctgtgttttggagaaggtgaaagaactcagtgcaagaattaaggtacaattaaaaagcacaacactaagcccaatttaaactgttattttaaagattaggtttccacactttaaacctgaactcttttatcggtaattattttaatgttgtgatttaggaggtggagcagattctagtactatgcaggagaaaaaaataaaagctctctggttaaatatgtgagtttaattaaaccaacgtctattgtgcacgtactatgtccctaggctagttctgtgaatgatataaaaggtttcaaaatggagtatattgtactcacgtagaatatatgaaagcataagtataaaatatgtaaatgtatgtataaataggtatgcatacatttgtatgattatacatgcaagtttaatattttctggtttcagggtaggagtcaaagatatccattatgctatttgaaaaaacattgcagagattcagcttcccatgtcatggccaggcctggacttattcttttgaaattattacacctcccagagctaaaactctgggatttcctctctaaccacaaccttgccttttctatatcttccttccttcaagacccctctgttgttctggtccataaatccatcaggcctcattgaattccctctttggtctaaccctgtatttacccacattagcaatattctcaccggcaattcctttttcctcttgccatctcactacaccaaccatgcttagctaactgcatcccatccccttgtcattcattgcatccccaagaagagcaagtcttaaacctacgtgaagagcacaaattcaatcaatttaacctcacctgaagcctactcacttggactttttaatttctccaatgttgactcagtgtcacattctgtgcttgataaatttgttttattttcctttcatgttcatgtcctgtctttcaacaggcaatctttcctactgtgtttgcaagaaaatctgattattgaatcctcacatatgctgtcctctctgcctttagatttctcttgtctttcacacatcttttccatcctttctcccaaccaagtgctcctcttccctatgctctgacctcttctgaggtgctctccagccaattgtatttctctcttttgcatctttaattccttccacacatctacctgcaactatctcaaaaacacccgtcctacaactatctctaaagacaaatctctcaatccaatttgactcttgaatttctgtcctatcgctatcttttcacttcccaacttctcaaaagggtagtctttctttctccacttcctcaccttatgctcatggcttcatcaatgggctacaccctaccactcttctgaaactactctcaggcaacgttccaatgaagttcttgttacaaaagtcaatagccttttttctttacttaccctgctcttcaacctcattgacaattaccattgggaggcaatacattctggttttaatcttagttctctggtcctctaacctcattggttcctgctcttcctcttatctccttagcattgacttgccatggtatatctgagcttgaccctcttctccttatcttaatgcttctgtagcaatctttctgtcttctatgatttcaataactctttgaatgaagatgaatcccaaatcttcacttttagcccctaccttttgcttttccttcatacacatacttccagtcaccttctgaacactcaacttcatcttgactcaaatatccaaaaccattgctgcaaaccaacataatcaccaacttcctccttttgcttaatggtatcaccatgtcttccgtcaccgaactcaagcttttcaggcacttttgcctcctccattttcttcatcctgcatatctaaaaatttgaaaagcctactaattcttccccctaaggtttccagtctttccttttcattcagacccttccttctagtctggattatttcagcgtcttttagcattgttccaatattttatatttgaatctactcttgtcagtactcacttcctacatataaatcagatgtcattcttcagatcaagaaacaaccttcagtgggcttcacttgccgtagtctgccagcaataatttcttgttacttgactatgtgtgtgtcccataatccagacaagctgaataacatttgtttcacctttccctaccagcttgttttcccacttgcgtcttcccttaaactgttccctttgtccaaaatactctccttcctatctcccatctcactcccttcttgaataatatccattccctctatataagtcttcaaagaccagaacaacttctttatcttccattcagaaaataattttaggcattttatgaatgcccataacactttcgttgtttctccctagtggcagctatcatgggccatcttatttcataggtatttggttatacatctcatctctcctgctacagcataagctccctgtgttcagggccatgtatttttaaatctttttatctcctgtagcactaaacagagtgccttgtatatgaaaggcattagtaaatatttgatattattataaattataattgagaaggagtcactttattttgcccatttgtatctgcagtagcacctaaggatgaatccccccagtttctctatatatatctgcacacacaatcacatgtatatactacatgtatacagttcattatttcaaatggaatctggatttttctaagtgctttgtcctttttctaagtgctttgtcctttgaagttgttttggactgttttatggttaggaaagtgtacttggaacactacatgtgttcaagtaagtgacagagggagaaactatgaaggatattgatcaaattttaggtatcagcttttcagatgctttgggtagagcttgtatccagacactttactaccaagattgagtctctaataacctgatccatgctgggactgatctgtgatccaatatttagcttcttttttaacactttcagcaccaaaagaaccttgtcacagttctggctcactaatcacacagccttgtagaccccaggtggtggtccaacaggaccactgtatttcaccacacgctacttccacatttgtggccttgggggaactgtctgtgctggtcaccaccttgtctttatatttctttcctgagttctttggcttctcaccctttctgaggctttgtctacaggatcacttctcccaaagggaggataagagttgaggtaattgagcactttacctcttatctgtatatttacaatgaaagtaagttaggatttgaatgagctggctcagagagaatgctagtctctaaactactcctttctctgtaaatataaagggattcattacctcagggggagacaacatcacttctgaccttatggccctcccttatcctctggtccctgtattcttgaagccctgttaacccttcctcctcctctcttggctctacttagcaatctatcaatcattctttctagccagtgtcagtctctgtccctctgaagaaactcttggagctcgtactgtcctttcacttcagctgctctggtaaccgataatgttttcgttccttctcccggccagccttctctgtaaatctcattatgccattggctatgaattattcccctttgggaggcatcttctgccactgtgtgctaatttaaagcatactatagagaactgaactcaaataagttacaggcagtgacaagtctctttttttaaaaaaaaagtgaagaaagtccactcttcattgagacaggagtgggtaggacaattattattggcaaggtagggcaaaacttgtgacaacttgggagatacctagtgaaaattaaaatataagtctagagagataattttgcttttcaaaagtcctatggggtctagatagccttgctcctgaaaatgagaatagttaatattttagagcaaaacccatttcattatactatgagacttttttttttagctgatgaaacaaattatctggtaaacagctggtgggagggtaggaagacagccatcctcatgaaggacgttcatgaatctcatttgggccaataaatggaccaaaattctaggcattttagccatgaactgttcatgtcaattattttgcctacaaatacccataaaaggaaagggaggatatgaggaaggaaaagaacaggaagtctacactggagcttccttttgtgtcaccaataaagccagaagctgacatgtgaggcacatggttcccccttggttactggcttcaatgatagcttcggaaagtagggaaacttgaaagagcaaggaccaaagcggagatgagtgaggaacctgaatgcaaccttatgtgtgaggtcctgatatccacaaggaacctggccccatgtcattcctgcccaggtccttcagattacagcacccaaggagcccttgatcatcaccctgggcagagggagtgacttatcacaccacccttacccacagaatttaggccaccaggctgtgactccatctgtcccccttgcagtaagagattcatagtctctgaaatctgacaggagaacagcatcaggggaaggggccacaggaatgcgaatttgttgagctgcctgctcctctaggataagtatattacctgtttccagaggggattgtttttttttcgaaatgaaacaaaacatgcctgcctaaaacttcagccctattcagaacagtcttgcagttaactgtcattgtcacattttaattgtaattgattttcttttgaaatccatggctattttaatgctccctttgaccatgacataagaaccctctgcaaaccagagacctggccattaggttgcctctggctgagttatactctcagtagtttatactttgctctcagatattcacctgaacagcacaactacacagaatttgatctctttgccatgagcattctgatgcctatgtacctccctaatgcacacacacaatcttaacaaatagatccaaatttcctatgtcaatcatgttatggtagatgaaagtgttcatttagaatgggataaagagacatatcataatttatgcagccagtgttttctctttgctctacctggcttgtggatcattgatccctcaaggtttgacagaaatattcaggcttcatgtgaaggcagcatgttctttgtgatgaaacaacctagttatcgtctccattttcccattttaccctatggaatccatgtggccttctaaggtcctgttgatggactggtactaagaggatggagaagcagaagccagtccccctgagaacagacagtcctgttgcttagatacatacatattcgcacatgtgcccacatctcttcttggaaacatcatgagcagaggtggagaggtctgttctcaatgggaggaataagggtaggagaattccttgagaatccctattctcaaggaatagggataaatgccttcacggattcaataatttatctgttctctctctcccagggtcaggagcaagaaaaatatcaaggtttcacataggcaggaagcaaggaggatagtgaagcatctaggtggaggtggaactcttactgagaaaaacatgaagtagtaaaatcaccctttctttgatataaatgcatttagaagtcaatgagggcacttacagctgtgtttcccttcactaacttttcatctcttgcattctttacttctctttctcaatttattcatcttgaggtatacttatcctgagttgactctgagcagcccatcctcaaaacacaaacaatgttaggatgagaagttgagtgagcacagagctcgaacacgtgcatggtacttaatgtttccaaactcgagcccaatcagtctagcacagtcaatcccactgcattttaatgactaggatggggcctgctgtacatagctggacatcttggattacagaaaagaggctttatgtgaaggcagcattttctttgtggtagagcaacatagttatcctgctaactgtcctatttgacctgatggaatccataaggtcctgttgatgggttggttctaagaggatggagaagcagaagtcattctactgagaacagacagtcctgttgcttagatacatacatattctttatgacagaattcctcctgagactcttgcacaccttcagtgatcagcgcattcactttggttatttcttggtaacaggcacgagaaatgggtcacatagaaatctgaagagtcatttctcgagcatttttagcttattcccatgtaaagaggcactgagctcctgcagttctagcctgcctctgctcccctccttggggaatggtggagtttctaggataaccagcaacccattaggctccaccacacttagcctatggtacattctgagtaaatcacagtagttggtatgtgaatacagaagaatttaccataaccacttctccaaataacctcctttgacttggaaataagatcatctttcagttttacagatgagaagtcaaagcacaaaattggataattagccaaaagtaagattatacagaaaattcttgacagaaccaaaacttggctgaaccaaaacttgtccaaatttctaactctcagtctagctcagcgagtaatgctgcctgaattgtctgcccccactgtaggttttcagcatctagcagtggagaaaagtcacgaaatctaggcagctgatttagccagatcttatctatgaaatttccctttgtagacacacacacactccacatacatctacagagacaagtcaaaaagagcaagaagaaagcaaaaatttgaaaatcagaaaggttagagaggtttccacggtgaagaaaacttggtcaaataaaaatgtttttgaattctatagggtaagatattgtgaataattttttattattaaaaattttttttaggtagcatgtaatccacataaataaaaaactcaagaataaactgggacagaggatttcttccagagtgctacatggcaaaagagccttcaggaacgtgtgcaggggtgtcatgatactccgaaggtgtcagtagttttggtcagcccacagtgagcagggcagcctcaagggagagccccttacatccttttctgggcacctctgtctaattaagttcaaacatacaagcctgattctaggattaaggcataagttagttctgaacagaaaaatataaggcagttcacatacacaatgaattcttgaagaaagaacctatagcccccagaccgataataaataattactgcctgccaaaatcctgaagaaagggaagcatgggggctccaaaattaatagtctcctgagaatacttatgagaccttgattttgtcacaaggttgcaatggtgaattatttattaagcacccgcagatcagagaatcttgcaacaaccttctcttacaacccacctgttcacttatgaatgatatcaagctcaggatataatccatctttccaaagattttagtatctttagtttgggctgcagaagaaattttggctcacagcattatgcttaaaccaaaaacagtgaaagagctctagtgtcctgcttaatgtagagtaactttttttttttatcagtccttcctagccctagagggaagataggagaggaggtaggaagatggaaaagtccttagatgaatgagtgaggagacttctataccatcaacttcagagtgtactgatccccggagcctggttcaggaggctagtttcagatgatcggaggaaatggaggaggtagcttttattcccatgcatgaagatggggggaggaggtgggcactagactaattttttaatctaaaaaaaatcaagcctattacaaatctcatttttcccttgtccttttgcctcccaataattcacataaaatcgtgttatcatagtaagctaagagagaggggcagtagctatttctaccttgactccgtggtgacttcatctttttcatgagtgtcattacagatacctggatcatgatgatcctgaaaaacaggtcacagggccaacagctgatgagtatttggagcatcttattcccccaagatgaccactccctgtcttctgctacacctatattcatcgggggggggaggtgggaaaatagcaggattcttggggactctgagggcatgaatggagaattatttgattgaaaccacagagctcttgtacttagtattaaatattaaaatagaaatgaaaagttcagcttttctgagctgtaccatagcggccaatggaggaagtcttacaaagaaaatctatatctgcacaagactgaagccactaaaccgagtatacacaacataaagatatcttcctatttcaagtatcccttagggggcatgggtgcttagctatcctatgaaagacagagaagataagctcaattttagagcccagagcttgctccggaacagcaagatccacatgaacttaaactctttcccactgagcctaggggtggaatgtaattcctctgatggttttgatttatttccaagctagacttctctatttgatcattggcaccttggcagctcacacatctccgtggtctcttctgtagctttcagaaaaaaaaaaaaaatatatatatatatatatatatacacacacatacatacatacatacatatacataaccctgtttgggtaaggcctattgacagaagccagatatctgggtggaagttagaagatgggcaaggaattcttatctcagagtttcaacactgcgacaatgtggagagaagtctcctgggaaaatgcagatgcccaataacttccaaaagaatcagggaagttggagtatttttgagatttacagtgtctttacttcagtaaaacaagccatagcaacattatgctctgcagagtcttctgttcacctttggatggaaaagagctgcttctcctagggagacaactaagaccaagaacaaaactcccatctcctaggccaattattgttttctcctttcctttcttttttattctctttgttacataatggtgaaatctacctggccattgccagtcaaacattctaattgctaaatatcatacagaaattcatgaaaaaagagtagaatcagcagatttcatttaatcccaagggtctttgcagttttcatcctctccctcaaagttatctcttctttgagacacatgatcacccctttcctcttctgggtggccatgattccaaaatgaacttcagtggttggtgcttcacaaaaggaaagacagctataatataaaatagaccaaaatacttatatttttagccactgcaaagtgggttttatcgttgagaacaaccttccaagctccttacttggaaacccttcctcacctcccagcctcctggcagctctcctggttccccttcatgtttttggctcccctccccgactttcctttcctatgaaaatgggatatatcccttaaactgtattcttatctaaactatcagactgttaaaagaaacccttgacagtaatttttcatggttttctcatcattttttaacttaggaagttggagaaagaatgacaagcaggcaaatgaggtcttgttcctgagtgcttcaactcaagatcaagtgctgggatagtgagtggctcttagtggagagggatgtgctctggaatattaagccacctctgagcatgtgtcctggtgctctggtcaagatgcctgttgtgtatgtggaggtattttgtggcttttcttgttctctctttttaaatttatttcaaggcacaagccctttgtgatggaggatgtctagcttgaacatgctggtaatgtgacactatcctcagctccccttggccctgggttcataggaggcaagtgtttctaaatttctcgcccagtgagttgttgcatgttatttttaaccattaatattgtgtgtctattggaatgagaaacagaaggttgaatgggaaatagattcagtgacaagcagacaaaaagcttggttctgagaaatgttcttcactgagttgaaaaaaaaataatctagaaacaaagaagagggaaattggggtagaatggtttggtggtgaagagacgatgacacccacatccagatgctctggtgtattccctcagagatttgtcattccctgtgagctctggcagaaggagaggctgtgctgccattgatggctcagaaatggtgacaggctggctttagaaagagacgtaggctttcttccagacagacattgataagcattgtagctcgattcttcaaaaccttgtctacaaacctttagggcagcccctctccaatgatttccattctccagtcaagaagattctgagtggaagagccttgtgtgcattgtgattacattgacttaaattgggaagccaaggggcactgagaactgaatatatcaggggaatggagttagctgaacctttttttttcaatattggaatgattttggatcacaaagttaggtcacctctgagagagaaaatctgttaaataaaattatatcttcccatctccagtgaaatcactaggttgttaatgtgattactgtttacttcagaaagaaaattgctagattcgattacaaataggcattttacagattgatttaatcctgagtcttacacatattaacatggaatttactgactcagacatgatcttctaagctataaaatattactggcgggtagtagatcatatgttctaagcaaaccaggaaagctaaaacgttaagtaatcctcccaaatattcagcgtctgtgtatttcactatagctgaaggggatttgggagttaggccgcaggggagaggagggacaaagtgccatagattaatgaaactcggagtaacttttttcttacctattaaaaataataattaacccaaggacaattctcaaaccagaaaaatcatgaaaagtgagctctgcacttgccattggttaaaatttagaaacacttagaataaatatccaggttttgggggaggagttgtttccttgcttgcattgttttgtttactggagctcttattttggggatatttggtctgtggcttcagagcatgttttggataaatgacttatccatgttgatatttattgagtggaaacccatgccaggctgttctaggtgctggaatataagaacgaaccacacaaagtccataccctcttgaagtttgtatgttgatgagaggaaatggacaaaaaagcaaatcaatagatctcatgtcagatagtgcaaagtgtcatgcagaaaaatgaggcagattaagggggatagatgataggatgggtgtggggttgctatttttgagtaagcaaagatgacatttaagtaaaggtttggaggaaatgagggagtgagacttggggctttctatgcaaaggcaaagagaaagcaattgcaaaggccctgctgtcaaaccaaatgcttggcaaacttgaggaagagccgggaggccaatgagggaggaggagagtatgagaggtgaggtcagagagggggcaataacgcaagtcaggtagggccttgtaggacactgtcaggatttggcttttaccaagagcaagatgagaagttgctagaaggttcggagcatagagtgatatgatctgacttcagttgaagaggaagctttgggactgctgtgttgagagtataccctgagagggcagacaatggaagcggctgaaagaccggttaggaagctcttgcaataatcctggtaagagatcatagttgcttgggccatgatgttagcaggggaggtgataagaagcagttggattccagaaatgttttaaagaatcgatatcacacagtttgctgatgaattagacattgaataagagaaagaaaaatcttaagaataaccttagaatgtttggcctgagctattgaaagtttggagttgccatcagtgtaagacaggaatcctgcaggtgaggctgactgggaaggaaagccttatagtttaaggtgtctacagatgttgcaagtagaaatgatgattaggcaattagatatatggacctggagttcagggaaaatgtatagcctgaagatacatatttaaaatttgtatgcgtttggttggtatttgaagccatgatactggaactagagaatgagtagcgacagaagaggattctctagactgaggcccagggtggaggattgttcaaagctccaggagatgagaagggaccagcaatgggaggagtggttaatgggtaaagcaagtactattattgagtaggataagactatctggaaacatggaggtcatcccattgatgacctggaagagagctgtttcagtggactggtgggggcaaaagcatgatggggtggattcaagaaagaggggaaggagaggaggtagagacaacaggaataggcaacgctttaggagtttggctgtaaagaggacatggaaatagcagatcatagagaatgtgacgcccagggagggacttctttttttaagatgggaaaaataacagcccattttatgttgacaagactaatccaggagaaaggaaaaattgatgatgcctagggagagaggacaattgctggagtaatgtctttgatgaagtgagagggcatgggattcaatacaaacatagagggactggcttcaggggactaaccaggtttgtttgtattaatagcagggagatagtgcatttgggcacagatgcaagtgggctggtaaatgggataatgggagtatgctttttctgattgatttttagtaaactatgaaaggagttcatcagttaagagtgagtataggggaagagtattggaggttttggaaggaagaaagcatgaatgagtcatatagccatccggcaggaagagtgagaacaaaaatgtcggagacaccaaaaatataggagacatgctagggggcataaaggaattatttgagtttttatgattatgagtttaaagaaatttgttttcttcagtcaccttcagctgcttaaacagggtggcaagttagattggaacagggttggggtataaccaggtgaatataatgaaagcaagagatgtggagtcaagggcaactgcagtgtgttaactataatgtttggtcatggaatctaagctgggtgtagaggaaagtgaggatttttagggaaggaggaacaatgaagcatattagaggcagaggattgagattcaagctgggatcactcagttagtgagtcagaagcaataacgtagaaattaggaggtgggttggagaggtggatgcttgaggttatggagggcttgcagttattggtggtttggggtctgttgttggggtggtgggctgagataagatagaggaaaaggttatagaaggagcaggggtcaaggaactgagaggccaggatatgggaattatatagatattgaagtcaacaaaatgttgacttccatatgataggaatgtaaattatgacaggaatgagggagagtgattcgagaacatttcaatcattgcatcaagtaaggggtgcagctagcctagtctgatgtgcatcaaagctggattttatggttgttgcatgttatttttttttaaaaaggagggaggatggtctggaatggcaatgaggggcaagaagggcatctccacctccaggccccagggcatgaggaaggtgcaagtggaaatgctcaccacctgggagtgattcagggtcctcaaagaggagccaggtttctgtaagagcaagaggaaaggaattgccagggttgtggctggtgatgaaccactgattcttaggcaggatttgggagttggtaaaggaagggaaatgagctgagatgggagatgtgcatgggtatctggggatgaaagtccaagtgataagagggactgggggtcttgggcttctcgtggtgattgccctaagcgaggctgtgggcatttggggttggccctaattgtctctatgtcagattgaggtggtgatgctgcaagtgcccggggcagggacttgatggcagcacatggaactctggtacctcttcctcagtcctgatatttgcttttttaacttctactaaaaaccccactgctaactgtgataggccacaacatgtttttatagatgtcaacaaatgttatcctggattgagaccacattttgactatttatcctggaaagtacacattttcacaggaaatcttgtcctttctaaggttcccaactaagctagtctcgttgtgggggggtcataattatttgttcttacttaccttactccttgttcatctttaaaaaaaaaatcaaataaaaaggattggaaagcaactttgcttctgcccaattctgctaaatgaaagttttctctgacagatcattttgattttgtattttcttttgtgacagaaacagtgggacaggagcatggaaatgaatgaaagtctttaaaagccttgagagagcgttttcaaggatcaggagagggcttagaaagaaaaggactctgagtggggctgcatgaaaagggggtaagtgaggactcttggggagggtctgaaaaaaacaagtagtttggcaaggagagcagaaaaataaaattccactgtgtaggcatttggagatttagcaagagcaacctagagtctgcccccagagacactgcacgttgtttctgacacagaggatgcactaattctatttcctgtgccacctgaaaaaatcataatttgagaagagaaactgttaggccatttctagtgaactatttttccaaaccctcacggaaccctgaacagggtgtgaatgagatcacaactactgctgctgctggttcagcctctctgtccactaataaaggcaaacccttcagcatggtcatatcctgccagccgttttcccccaaaagattaaattatgttcatcttggctcatctaacgccacatcttgagttcttaaggtatcacagccaactcagtcataccttactttatgcactgagtacgcattaaactctatttaggaaggaagagggaagcaaaggaagccagggatggttttgtcatgacctctctttgctttctgacctcccggaatccactctttggaagatgtgcagaaaacaatgtgacttccatttaccctgcctcagatctcccctccttcagactggctcccacccctggttaatggggtaacctgggtacgcctatttgttaaaggaatttgtgggaagtgaggggcaaaattgttggagcagagggaatagatttatgggagctttgttacccagtgactatcccagcattaatacttcagagtagccctgacgcttgtggaaacatttcaagggagctagaggcaatgttacagtggagatcagagaagggatggggcagtgagctcttgtccctaggggaaatctcttttcctccacgtgacaggagccagtgctccaacagcatcagaattacacttagccacaatgactgatgcgtgtgtgtgcctgtgcacatgtgtgtgagcgtgtgtgtgagcgcacgtgtgtaagggggtgatgatggaaacatgatatgcatccactatggggttgcgttgcaaattcacagctgcacccctcccaaagtcacatggcagaggggaaatggtcatagctttcctgtgtgatgtcctctccagggagcaccgacgactcaggcttgcctcagctctgcgaggcccagactccacactcctccctggggccggctctccttcctcttgactctcagatccccagcccatccacctccaagttctttttttgtttatttgttttgcttctgttttctgtaaatatctatttcttattttggacatgcagggatcaattgagattctggagtggggggaggggcggatgactgggtctttttattttttcctttctctcttggattttggtgtttgaacttgaaaaaaataattacaagtatatatataagcaaatgacttacctttaaacaaaagaaataagttgatttcattcttttgatttatcttgtttctcattggggtcgggtgggggtggggggtcttttgggtggagggcttttttgtgagctgtatagatttccagtttggacttgttcaaatgatgcaggaacaaaaattaaaacgaattaaaaaaaagacaacataaaaaaacaagaaaaactttgtgatgtataaaagctgtaaatagtcaaagattctttctcttttctaatggcaaattatttctgtcactttatattcaaaaaataaagaaacctaccacaaattatcagggttaaaaaaaatccagaatcagagtttttttcttggtctttgtgctttctttactgtgattccaaaaagattgttaaaagtgctgtttgggaaaaaccccttgcccagttggtttccaattgttggtaggagtcttggactggcgaatctacttgggttgggatctgtttctactatagctggtgctggagcccttggttacactcatctccccctcatgtattattctgaaacaaatcccataattatatggtttcatctgtaaacattacagtatatatctcttttactaaggactcttttttagtttaacaataccattgtgacatcataaggtagccataattccttgataagaaatatccagtgttcactaattgtctcaaatgtaatactgttttatggggtggtggtgggtttttttcccataagtcataaggtccatacaattagttgctatttctcaaatgtattttaaatctaaagatttgctttctaactttttcttgacatatacttgttaaaggaatagagcactttatcctttagaggttcccacagttggattttgctggttcttcccaatattaatgaagacaatgtaaattggtaattgttttactctttaatgcatacttccattgcttggaggtgtcagaaaagcaaaccagcccttgttttgctgattgtttcccaccccactcccagtcccagtcctgttactggctttatatatggattctaaatgatctctctttctataccttgattgctaaattatccaagttaaataatagtatctcccccttagctatcttggtaagaaaatagcatagacatatttagcttttcacatgccaatcatgaggcacatttcaacatcactttattaaaagccacatgctcctcctatagtcctagtactggaaaggaccttctagagaccatttagaagaactctgtctcatggccaaggagcctgggtgagctcatgtatggcagccctggctagaagccagcagggctaatccctagttccaggaatctcccaggataatgtattgttatctctttgaagttactgtctcagagagattatctgtgagggtctctcttgtactttcctttgtactgaacaaaaattcttgtttctccctgaacattccagaaagtagcaagctctaacataaagccagattcttcccagatatagtgattctctttacttctggagatacttccttaaaccccaaattttttttggacaacagaactgctttaacaataatctgaaaattatacagtaagtttgatttgaaaatctgagatttgtttaaaaaaaaaagggggaagacaagacttgaaatcttggctctgatttttctgttgtttttgtttttttgtttgttttttttttgtttgtttgttttttaagagggtcttgctctgtcatccaggctggagtggagaggtatgattacggctcactgcagccttgacctcccaggctcaagtgattctaccacctccgcctcctgtgtagctgggtactactggtgcataccaccacactgggctgattttgtattttttgtagagacggggtttcaccatgttgtccaggctgattctgaactcctgggttcaagtgatctgcctgcctcggcttcctatgatgctaggattacaggtgtgagccactgtgcccatcttggctctagttttaaataaggaagcttgcgagtatttatctggattatggtgggaacctccagtaggatatcatgaaagctttgatcatgatcacaacaccttcaataaaacaaagactccaatgacaagggtgagtgccagaacttcctgagactatgccaagtgtctgttctttatacagcctgcctcacccacacctggaatctcttaaatggattagctcagagcacctgtgtcctacatgcccttgtgccaccctgaagtccactgcaagggactatcagtaagaccagtctaatgaaaggctgagggagcacccggttgtgtccccatcagccaactgttccggaaagatgagcctccttggctgtcccaggattgacactcttcccctgcatacatcactaggaaggtagaacctaccctgaacacttgatttgaatatttctattcccctattcttttacaaatgcaaactaattctttcaaaaatataaatgatcctctgaaagaaatttcttgtggaattctggaatgaccaagaagatgggaagagaccaccagaaaagtggttctgagagtctgcagggcctgtcaaaaaaattatgccaaagctatcatttgtggcctgcatcaaatcatctagacttccgttttcttatcttgaaacccagatgttggtctatctgccctccccatcaaaggttacctggagcagtagttctcagttttacatagtggagtcatctgagtatttctgaaatgctgatgcctgagtctcatcccctagagagtctcattcaattgtcctgggtggctggaggggttaggggttgaaaacttgcccaggtgattttaatatacagccagaatgtgaaccactatgtatgtgcatctggggaaagcgggcctcctatttacttctaatcccattatatgtggcagctgtttgttgtcactctcctctcaccatggacaactattcacagcacagacagtcaccctttggaactccaggacctctttcctcttccatttggagctgaagaatggacataacggaagcaccattttatgattacagcctcgttctctaattctgcctatccccagcatacacggctagatatagacatactgcaaagctcctctatgtaaaggaaattctacacataaaatttaaacttggaatcga

SEQ ID NO: 137506 - DNA, 595 bp, Homo sapiens
  Payload ID: 6919
  Gene Symbol: GRIN2B
  Gene Name: glutamate receptor, ionotropic, N-methyl D-aspartate 2B
  ENST ID: ENST00000627535
  CDS Start-End: 490-595
gcttcgtgggtttctcctccccccggagtcagggtgtgcgaggaaggggacgctttgggaatgaccatgctccaccgagggacggagccggcccccagcttctccacacagagcctcctccactaacgctccaaaaaccaaaaaccgtaattgccagaagaagcgttaaaaatctattccagccactaacctcacatgcacacggaataattactctggattctgcattgtgagctgctctccataccctgaattacctttgaattaaatctttttttttttgaatttgcatctcttcaagacacaagattaaaacaaaatttacgctaaattggattttaaattatcttccgttcatttatccttcgtctttcttatgtggatatgcaagcgagaagaagggactggacattcccaacatgctcactcccttaatctgtccgtctagaggtttggcttctacaaaccaagggagtcgacgagttgaagatgaagcccagagcggagtgctgttctcccaagttctggttggtgttggccgtcctggccgtgtcaggcagcagagctcgttctcagaagagcccccccagcattg

SEQ ID NO: 137507 - DNA, 830 bp, Homo sapiens
  Payload ID: 6919
  Gene Symbol: GRIN2B
  Gene Name: glutamate receptor, ionotropic, N-methyl D-aspartate 2B
  ENST ID: ENST00000630791
  CDS Start-End: 725-830
gcttcgtgggtttctcctccccccggagtcagggtgtgcgaggaaatctcggggcttcgctctatcgagagtgctcgtcaagggtgattcttgatcaccaccatccagtagtgctggcgtccgaatgcatatccttttgccttgcaaagaagagtcatgaacttcaaaacccccgagacggatcattaatcctgctttgcaggaaaggaaaaccctccattcccagccaccggccacccctctccgcagactgcaaccgcggaggcgctcggagccggaaggggacgctttgggaatgaccatgctccaccgagggacggagccggcccccagcttctccacacagagcctcctccactaacgctccaaaaaccaaaaaccgtaattgccagaagaagcgttaaaaatctattccagccactaacctcacatgcacacggaataattactctggattctgcattgtgagctgctctccataccctgaattacctttgaattaaatctttttttttttgaatttgcatctcttcaagacacaagattaaaacaaaatttacgctaaattggattttaaattatcttccgttcatttatccttcgtctttcttatgtggatatgcaagcgagaagaagggactggacattcccaacatgctcactcccttaatctgtccgtctagaggtttggcttctacaaaccaagggagtcgacgagttgaagatgaagcccagagcggagtgctgttctcccaagttctggttggtgttggccgtcctggccgtgtcaggcagcagagctcgttctcagaagagcccccccagcattg

SEQ ID NO: 137508 - DNA, 4261 bp, Homo sapiens
  Payload ID: 6920
  Gene Symbol: GRIN2C
  Gene Name: glutamate receptor, ionotropic, N-methyl D-aspartate 2C
  Uniprot ID: Q14957
  ENST ID: ENST00000293190
  CDS Start-End: 148-3849
tgtccttgagccgcgggtgacggtggctctcgctgctcgcgccccctcctcccgcggggggagcctgatgccacgttccctatgaattatttatcgccggcctaaaaataccccgaacttcacagcccgagtgaccctccggtggacatgggtggggccctggggccggccctgttgctcacctcgctcttcggtgcctgggcagggctgggtccggggcagggcgagcagggcatgacggtggccgtggtgtttagcagctcagggccgccccaggcccagttccgtgcccgcctcaccccccagagcttcctggacctacccctggagatccagccgctcacagttggggtcaacaccaccaaccccagcagcctcctcacccagatctgcggcctcctgggtgctgcccacgtccacggcattgtctttgaggacaacgtggacaccgaggcggtggcccagatccttgacttcatctcctcccagacccatgtgcccatcctcagcatcagcggaggctctgctgtggtcctcacccccaaggagccgggctccgccttcctgcagctgggcgtgtccctggagcagcagctgcaggtgctgttcaaggtgctggaagagtacgactggagcgccttcgccgtcatcaccagcctgcacccgggccacgcgctcttcctggagggcgtgcgcgccgtcgccgacgccagccacgtgagttggcggctgctggacgtggtcacgctggagctgggcccgggagggccgcgcgcgcgcacgcagcgcctgctgcgccagctcgacgcgcccgtgtttgtggcctactgctcgcgcgaggaggccgaggtgctcttcgccgaggcggcgcaggccggtctggtggggcccggccacgtgtggctggtgcccaacctggcgctgggcagcaccgatgcgccccccgccaccttccccgtgggcctcatcagcgtcgtcaccgagagctggcgcctcagcctgcgccagaaggtgcgcgacggcgtggccattctggccctgggcgcccacagctactggcgccagcatggaaccctgccagccccggccggggactgccgtgttcaccctgggcccgtcagccctgcccgggaggccttctacaggcacctactgaatgtcacctgggagggccgagacttctccttcagccctggtgggtacctggtccagcccaccatggtggtgatcgccctcaaccggcaccgcctctgggagatggtggggcgctgggagcatggcgtcctatacatgaagtaccccgtgtggcctcgctacagtgcctctctgcagcctgtggtggacagtcggcacctgacggtggccacgctggaagagcggccctttgtcatcgtggagagccctgaccctggcacaggaggctgtgtccccaacaccgtgccctgccgcaggcagagcaaccacaccttcagcagcggggacgtggccccctacaccaagctctgctgtaagggattctgcatcgacatcctcaagaagctggccagagtggtcaaattctcctacgacctgtacctggtgaccaacggcaagcatggcaagcgggtgcgcggcgtatggaacggcatgattggggaggtgtactacaagcgggcagacatggccatcggctccctcaccatcaatgaggaacgctccgagatcgtagacttctctgtaccctttgtggagacgggcatcagtgtgatggtggctcgcagcaatggcaccgtctccccctcggccttcttggagccatatagccctgcagtgtgggtgatgatgtttgtcatgtgcctcactgtggtggccatcaccgtcttcatgttcgagtacttcagccctgtcagctacaaccagaacctcaccagaggcaagaagtccgggggcccagctttcactatcggcaagtccgtgtggctgctgtgggcgctggtcttcaacaactcagtgcccatcgagaacccgcggggcaccaccagcaagatcatggttctggtctgggccttctttgctgtcatcttcctcgccagctacacggccaacctggccgccttcatgatccaagagcaatacatcgacactgtgtcgggcctcagtgacaagaagtttcagcggcctcaagatcagtacccacctttccgcttcggcacggtgcccaacggcagcacggagcggaacatccgcagtaactaccgtgacatgcacacccacatggtcaagttcaaccagcgctcggtggaggacgcgctcaccagcctcaagatggggaagctggatgccttcatctatgatgctgctgtcctcaactacatggcaggcaaggacgagggctgcaagctggtcaccattgggtctggcaaggtctttgctaccactggctacggcatcgccatgcagaaggactcccactggaagcgggccatagacctggcgctcttgcagttcctgggggacggagagacacagaaactggagacagtgtggctctcagggatctgccagaatgagaagaacgaggtgatgagcagcaagctggacatcgacaacatggcaggcgtcttctacatgctgctggtggccatggggctggccctgctggtcttcgcctgggagcacctggtctactggaagctgcgccactcggtgcccaactcatcccagctggacttcctgctggctttcagcaggggcatctacagctgcttcagcggggtgcagagcctcgccagcccaccgcggcaggccagcccggacctcacggccagctcggcccaggccagcgtgctcaagatgctgcaggcagcccgcgacatggtgaccacggcgggcgtaagcagctccctggaccgcgccactcgcaccatcgagaattggggtggcggccgccgtgcgcccccaccgtccccctgcccgaccccgcggtctggccccagcccatgcctgcccacccccgacccgcccccagagccgagccccacgggctggggaccgccagacgggggtcgcgcggcgcttgtgcgcagggctccgcagcccccgggccgccccccgacgccggggccgcccctgtccgacgtctcccgagtgtcgcgccgcccagcctgggaggcgcggtggccggtgcggaccgggcactgcgggaggcacctctcggcctccgagcggcccctgtcgcccgcgcgctgtcactacagctcctttcctcgagccgaccgatccggccgccccttcctcccgctcttcccggagctggaggacctgccgctgctcggtccggagcagctggcccggcgggaggccctgctgcacgcggcctgggcccggggctcgcgcccgcgtcacgcttccctgcccagctccgtggccgaggccttcgctcggcccagctcgctgcccgctgggtgcaccggccccgcctgcgcccgccccgacggccactcggcctgcaggcgcttggcgcaggcgcagtcgatgtgcttgccgatctaccgggaggcctgccaggagggcgagcaggcaggggcccccgcctggcagcacagacagcacgtctgcctgcacgcccacgcccacctgccattttgctggggggctgtctgtcctcaccttccaccctgtgccagccacggctcctggctctccggggcctgggggcctctggggcacaggggcaggactctggggctgggcacaggctacagagacagtgggggactggacgagatcagcagggtagcccgtgggacgcaaggcttcccgggaccctgcacctggagacggatctccagtctggagtcagaagtgtgagttatcagccactcaggctccgagccagctggattctctgcctgccactgtcagggttaagcggcaggcaggattgggcttttctggcttctgccatgaaatcctggccatgggaccccagtgacagatgatgtcttccatggtcatcagtgacctcagtagcctcaaatcatggtgagggctgggcttttgctgtcctcttctcacgcagagttctgccaggagggtgtgctgtgggggtcagactcctgaggctctcccttccctggggctagccagttactggtcatggctgctgtgggcatggaggctggaacttgtggttgaggcagggccatcccgatccttgctctacctggctagagtttcttctcatcagagcactgggacattaaaccaaccttttacaaca

SEQ ID NO: 137509 - DNA, 2929 bp, Homo sapiens
  Payload ID: 6920
  Gene Symbol: GRIN2C
  Gene Name: glutamate receptor, ionotropic, N-methyl D-aspartate 2C
  ENST ID: ENST00000347612
  CDS Start-End: 103-2724
cgcgggcagggcggggacacgcggagcaaaggcacccggcaacctgaacccccaggtgcgtcccgcgaccctgcaaggagctgctgggaccctccggtggacatgggtggggccctggggccggccctgttgctcacctcgctcttcggtgcctgggcagggctgggtccggggcagggcgagcagggcatgacggtggccgtggtgtttagcagctcagggccgccccaggcccagttccgtgcccgcctcaccccccagagcttcctggacctacccctggagatccagccgctcacagttggggtcaacaccaccaaccccagcagcctcctcacccagatctgcggcctcctgggtgctgcccacgtccacggcattgtctttgaggacaacgtggacaccgaggcggtggcccagatccttgacttcatctcctcccagacccatgtgcccatcctcagcatcagcggaggctctgctgtggtcctcacccccaaggagccgggctccgccttcctgcagctgggcgtgtccctggagcagcagctgcaggtgctgttcaaggtgctggaagagtacgactggagcgccttcgccgtcatcaccagcctgcacccgggccacgcgctcttcctggagggcgtgcgcgccgtcgccgacgccagccacgtgagttggcggctgctggacgtggtcacgctggagctgggcccgggagggccgcgcgcgcgcacgcagcgcctgctgcgccagctcgacgcgcccgtgtttgtggcctactgctcgcgcgaggaggccgaggtgctcttcgccgaggcggcgcaggccggtctggtggggcccggccacgtgtggctggtgcccaacctggcgctgggcagcaccgatgcgccccccgccaccttccccgtgggcctcatcagcgtcgtcaccgagagctggcgcctcagcctgcgccagaaggtgcgcgacggcgtggccattctggccctgggcgcccacagctactggcgccagcatggaaccctgccagccccggccggggactgccgtgttcaccctgggcccgtcagccctgcccgggaggccttctacaggcacctactgaatgtcacctgggagggccgagacttctccttcagccctggtgggtacctggtccagcccaccatggtggtgatcgccctcaaccggcaccgcctctgggagatggtggggcgctgggagcatggcgtcctatacatgaagtaccccgtgtggcctcgctacagtgcctctctgcagcctgtggtggacagtcggcacctgacggtggccacgctggaagagcggccctttgtcatcgtggagagccctgaccctggcacaggaggctgtgtccccaacaccgtgccctgccgcaggcagagcaaccacaccttcagcagcggggacgtggccccctacaccaagctctgctgtaagggattctgcatcgacatcctcaagaagctggccagagtggtcaaattctcctacgacctgtacctggtgaccaacggcaagcatggcaagcgggtgcgcggcgtatggaacggcatgattggggaggtgtactacaagcgggcagacatggccatcggctccctcaccatcaatgaggaacgctccgagatcgtagacttctctgtaccctttgtggagacgggcatcagtgtgatggtggctcgcagcaatggcaccgtctccccctcggccttcttggagccatatagccctgcagtgtgggtgatgatgtttgtcatgtgcctcactgtggtggccatcaccgtcttcatgttcgagtacttcagccctgtcagctacaaccagaacctcaccagaggcaagaagtccgggggcccagctttcactatcggcaagtccgtgtggctgctgtgggcgctggtcttcaacaactcagtgcccatcgagaacccgcggggcaccaccagcaagatcatggttctggtctgggccttctttgctgtcatcttcctcgccagctacacggccaacctggccgccttcatgatccaagagcaatacatcgacactgtgtcgggcctcagtgacaagaagtttcagcggcctcaagatcagtacccacctttccgcttcggcacggtgcccaacggcagcacggagcggaacatccgcagtaactaccgtgacatgcacacccacatggtcaagttcaaccagcgctcggtggaggacgcgctcaccagcctcaagatggggaagctggatgccttcatctatgatgctgctgtcctcaactacatggcaggcaaggacgagggctgcaagctggtcaccattgggtctggcaaggtctttgctaccactggctacggcatcgccatgcagaaggactcccactggaagcgggccatagacctggcgctcttgcagttcctgggggacggagagacacagaaactggagacagtgtggctctcagggatctgccagaatgagaagaacgaggtgatgagcagcaagctggacatcgacaacatggcaggcgtcttctacatgctgctggtggccatggggctggccctgctggtcttcgcctgggagcacctggtctactggaagctgcgccactcggtgcccaactcatcccagctggacttcctgctggctttcagcagggtgggtgcccacccctccccacacaggccaaagttttaagggcacctacccagataagtccgggctggccatggcccatttccagaggtaaaaccaaggttctggcccggctcatggctcacacctgtaatctcaacactttgagaggcttaggccagtggatcccttgagtccagaagtttgagaccagcctgggcaacatggcgaaaacccatctctacagaaaataaaagaattagctggg

SEQ ID NO: 137510 - DNA, 5093 bp, Homo sapiens
  Payload ID: 6921
  Gene Symbol: GRIN2D
  Gene Name: glutamate receptor, ionotropic, N-methyl D-aspartate 2D
  Uniprot ID: O15399
  ENST ID: ENST00000263269
  CDS Start-End: 89-4099
ggacgccgggttccggtcctggcccccccgccatccccccaacagaacagggtcatgaaaagaggccgcccggcggggcccgcaggcgatgcgcggcgccggtggcccccgcggccctcggggccccgctaagatgctgctgctgctggcgctggcctgcgccagcccgttcccggaggaggcgccggggccgggcggggccggtgggcccggcggcggcctcggcggggcgcggccgctcaacgtggcgctcgtgttctcggggcccgcgtacgcggccgaggcggcacgcctgggcccggccgtggcggcggcggtgcgcagcccgggcctagacgtgcggcccgtggcgctggtgctcaacggctcggacccgcgcagcctcgtgctgcagctctgcgacctgctgtcggggttgcgcgtgcacggcgtggtcttcgaagacgactcgcgcgcgcccgccgtcgcgcccatcctcgacttcctgtcggcgcagacctcgctgcccatcgtggccgtgcacggcggcgccgcgctcgtgctcacgcccaaggagaagggctccaccttcctgcagctgggctcttccaccgagcaacagcttcaggtcatctttgaggtgctggaggagtatgactggacgtcctttgtagccgtgaccactcgtgcccctggccaccgggccttcctgtcctacattgaggtgctgactgacggtagtctggtgggctgggagcaccgcggagcgctgacgctggaccctggggcgggcgaggccgtgctcagtgcccagctccgcagtgtcagcgcgcagatccgcctgctcttctgcgcccgagaggaggccgagcccgtgttccgcgcagctgaggaggctggcctcactggatctggctacgtctggttcatggtggggccccagctggctggaggcgggggctctggggcccctggtgagccccctcttctgccaggaggcgcccccctgcctgccgggctgtttgcagtgcgctcggctggctggcgggatgacctggctcggcgagtggcagctggcgtggccgtagtggccagaggtgcccaggccctgctgcgtgattatggtttccttcctgagctcggccacgactgtcgcgcccagaaccgcacccaccgcggcgagagtctgcataggtacttcatgaacatcacgtgggataaccgggattactccttcaatgaggacggcttcctagtgaacccctccctggtggtcatctccctcaccagagacaggacgtgggaggtggtgggcagctgggagcagcagacgctccgcctcaagtacccgctgtggtcccgctatggtcgcttcctgcagccagtggacgacacgcagcacctcacggtggccacgctggaggaaaggccgtttgtcatcgtggagcctgcagaccctatcagcggcacctgcatccgagactccgtcccctgccggagccagctcaaccgaacccacagccctccaccggatgccccccgcccggaaaagcgctgctgcaagggtttctgcatcgacattctgaagcggctggcgcataccatcggcttcagctacgacctctacctggtcaccaatggcaagcacggaaagaagatcgatggcgtctggaacggcatgatcggggaggtgttctaccagcgcgcagacatggccatcggctccctcaccatcaacgaggagcgctccgagatcgtggacttctccgtccccttcgtggagaccggcatcagcgtcatggtggcgcgcagcaatggcacggtgtccccctcggccttcctcgagccctacagccccgccgtgtgggtgatgatgttcgtcatgtgcctcactgtggtcgccgtcactgttttcatcttcgagtacctcagtcctgttggttacaaccgcagcctggccacgggcaagcgccctggcggttcaaccttcaccattgggaaatccatctggctgctctgggccctggtgttcaataattcggtgcccgtggagaacccccggggaaccaccagcaaaatcatggtgctggtgtgggccttcttcgccgtcatcttcctcgccagctacacagccaacctggccgccttcatgatccaggaggagtacgtggatactgtgtctgggctcagtgaccgcaagttccagaggccccaggagcagtacccgcccctgaagtttgggaccgtgcccaacggctccacggagaagaacatccgcagcaactatcccgacatgcacagctacatggtgcgctacaaccagccccgcgtagaggaagcgctcactcagctcaaggcagggaagctggacgccttcatctacgatgctgcagtgctcaattacatggcccgcaaggacgagggctgcaagcttgtcaccatcggctccggcaaggtcttcgccacgacaggctatggcatcgccctgcacaagggctcccgctggaagcggcccatcgacctggcgttgctgcagttcctgggggatgatgagatcgagatgctggagcggctgtggctctctgggatctgccacaatgacaaaatcgaggtgatgagcagcaagctggacatcgacaacatggcgggcgtcttctacatgctcctggtggccatgggcctgtccctgctggtcttcgcctgggagcacctggtgtactggcgcctgcggcactgcctggggcccacccaccgcatggacttcctgctggccttctccaggggcatgtacagctgctgcagcgctgaggccgccccaccgcccgccaagcccccgccgccgccacagcccctgcccagccccgcgtaccccgcgccgcggccggctcccgggcccgcacctttcgtgccccgcgagcgcgcctcagtggaccgctggcgccggaccaagggcgcggggccgccggggggcgcgggcctggccgacggcttccaccgctactacggccccatcgagccgcagggcctaggcctcggcctgggcgaagcgcgcgcggcaccgcggggcgcagccgggcgcccgctgtccccgccggccgctcagcccccgcagaagccgccgccctcctatttcgccatcgtacgcgacaaggagccagccgagccccccgccggcgccttccccggcttcccgtcgccgcccgcgccccccgccgccgcggccaccgccgtcgggccgccactctgccgcttggccttcgaggacgagagcccgccggcgcccgcgcggtggccgcgctcggaccccgagagccaacccctgctggggccaggcgcgggcggcgcggggggcacggggggcgcaggcggaggagccccggccgctccgcccccgtgccgcgccgcgccgcccccgtgcccttacctcgatctcgagccgtcgccgtcggactcggaggactcggagagcctgggcggcgcgtcgctgggcggcctggagccctggtggttcgccgacttcccttacccgtatgccgagcgcctcgggccgccgcccggccgctactggtcggtcgacaagctcgggggctggcgcgccgggagctgggactacctgcccccgcgcagcggtccggccgcctggcactgtcggcactgcgccagcctggagctgctgccgccgccgcgccatctcagctgctcgcacgatggcctggacggcggctggtgggcgccaccgcctccaccctgggccgccgggcccctgccccgacgccgggcccgctgcgggtgcccgcggtcgcacccgcaccgcccgcgggcctcgcaccgcacgcccgccgccgccgcgccccaccaccacaggcaccggcgcgccgctgggggctgggacctcccgccgcccgcgcccacctcgcgctcgctcgaggacctcagctcgtgccctcgcgccgcccctgcgcgcaggcttaccgggccctcccgccacgctcgcaggtgtccgcacgccgcgcactgggggccgccgctgcccacagcttcccaccggagacaccggggcggggacctgggcacccgcaggggctcggcgcacttctctagcctcgagtccgaggtatgacgcggccccgggggccccaccgcccccttggtcagcgcaggccacggcccgagggggcgcccgcagtggacaggacccgcgtgggttgggaaggaaagcagtggaactggccggaccccgcctggagcagcgtcctgcgccccctggttctggaggaaccgcaagccggagaggatttggtccctcaactatcacccagcctgagaacgagggggcgggggccttggagcccaccggacttttttttaaacccgacaagggctttttaacgtcaccagatggggcgggaggtggggggttcacgccactcccgcgtcccacctccacgcccggggccgtggcccccacatcactgtgcagctccccggccccagccgcgcctccggggaagcccgtttttaacctttcatccattgggactcaaaactgtgagacgcgttcgccaaactgtgaccccagaccttggccccgccacacagaaacccctgacccagactgtgacatccgactcctaaaatggtcatccgactccagactgtgacccctgaccccaaactgtgacccgaaccccagactgtgccccgaccagactgtgacccttgacatcaaaccgtgacaccccctcctcctcttccaccctcggtcgcttttccctactctgacctaggacacgtccccaacggaagccccgccttcccttgcaccgcgatgaacccaacctccctgaagccaaaacttcccaccctgccgcacctccggaccaccccacttgccaccaagcacatcctctccaaatccaacccttatttgcgacccttcagtgatgacccagcagacctccaaaaagcctcctctgcccagatctccagccgggtctggggctgggttgcggaggggagggtctgggagtccacacttctccaccaacttcccttcccactctcttattccacattgcagtgtttggaataaaccatgtttttatgcctcctca

SEQ ID NO: 137511 - DNA, 1968 bp, Homo sapiens
  Payload ID: 6922
  Gene Symbol: GRINA
  Gene Name: glutamate receptor, ionotropic, N-methyl D-aspartate-associated protein 1 (glutamate binding)
  Uniprot ID: Q7Z429
  ENST ID: ENST00000313269
  CDS Start-End: 279-1394
aaggccccgctgcgtcttccgagccgcaggcgcaggcccagctgagcggccgccgagcgggtgcgggtgcgggcgcatcggccatcaccgcgcggccgcgcagcggacaccgtgcgtaccggcctgcggcgcccggccaccggtgagtccccggcccgagcccaggagcgcctctgacccgctgcgccgcgcggcctgccgcccccgcccccgcccccacgcggatcttgcgcatccgagcgtggccgcctcgggggcggaccgcggaacccgaggccatgtcccatgaaaagagttttttggtgtctggggacaactatcctccccccaaccctggatatccgggggggccccagccacccatgcccccctatgctcagcctccctaccctggggccccttacccacagccccctttccagccctccccctacggtcagccagggtacccccatggccccagcccctacccccaagggggctacccacagggtccctacccccaagggggctacccacagggcccctacccacaagagggctacccacagggcccctacccccaagggggctacccccaggggccatatccccagagccccttcccccccaacccctatggacagccacaggtcttcccaggacaagaccctgactcaccccagcatggaaactaccaggaggagggtcccccatcctactatgacaaccaggacttccctgccaccaactgggatgacaagagcatccgacaggccttcatccgcaaggtgttcctagtgctgaccttgcagctgtcggtgaccctgtccacggtgtctgtgttcacttttgttgcggaggtgaagggctttgtccgggagaatgtctggacctactatgtctcctatgctgtcttcttcatctctctcatcgtcctcagctgttgtggggacttccggcgaaagcacccctggaaccttgttgcactgtcggtcctgaccgccagcctgtcgtacatggtggggatgatcgccagcttctacaacaccgaggcagtcatcatggccgtgggcatcaccacagccgtctgcttcaccgtcgtcatcttctccatgcagacccgctacgacttcacctcatgcatgggcgtgctcctggtgagcatggtggtgctcttcatcttcgccattctctgcatcttcatccggaaccgcatcctggagatcgtgtacgcctcactgggcgctctgctcttcacctgcttcctcgcagtggacacccagctgctactggggaacaagcagctgtccctgagcccagaagagtatgtgtttgctgcgctgaacctgtacacagacatcatcaacatcttcctgtacatcctcaccatcattggccgcgccaaggagtagccgagctccagctcgctgtgcccgctcaggtggcacggctggcctggaccctgcccctggcacggcagtgccagctgtacttcccctctctcttgtccccaggcacagcctagggaaaaggatgcctctctccaaccctcctgtatgtacactgcagatacttccatttggacccgctgtggccacagcatggcccctttagtcctcccgcccccgccaaggggcaccaaggccacgtttccgtgccacctcctgtctactcattgttgcatgagccctgtctgccagcccaccccagggactgggggcagcaccaggtcccggggagagggattgagccaagaggtgagggtgcacgtcttccctcctgtcccagctccccagcctggcgtagagcacccctcccctcccccccacccccctggagtgctgccctctggggacatgcggagtgggggtcttatccctgtgctgagccctgagggcagagaggatggcatgtttcaggggagggggaagccttcctctcaatttgttgtcagtgaaattccaataaatgggatttgctctctgc

SEQ ID NO: 137512 - DNA, 1814 bp, Homo sapiens
  Payload ID: 6922
  Gene Symbol: GRINA
  Gene Name: glutamate receptor, ionotropic, N-methyl D-aspartate-associated protein 1 (glutamate binding)
  Uniprot ID: Q7Z429
  ENST ID: ENST00000395068
  CDS Start-End: 125-1240
tgagcggccgccgagcgggtgcgggtgcgggcgcatcggccatcaccgcgcggccgcgcagcggacaccgtgcgtaccggcctgcggcgcccggccaccggggcggaccgcggaacccgaggccatgtcccatgaaaagagttttttggtgtctggggacaactatcctccccccaaccctggatatccgggggggccccagccacccatgcccccctatgctcagcctccctaccctggggccccttacccacagccccctttccagccctccccctacggtcagccagggtacccccatggccccagcccctacccccaagggggctacccacagggtccctacccccaagggggctacccacagggcccctacccacaagagggctacccacagggcccctacccccaagggggctacccccaggggccatatccccagagccccttcccccccaacccctatggacagccacaggtcttcccaggacaagaccctgactcaccccagcatggaaactaccaggaggagggtcccccatcctactatgacaaccaggacttccctgccaccaactgggatgacaagagcatccgacaggccttcatccgcaaggtgttcctagtgctgaccttgcagctgtcggtgaccctgtccacggtgtctgtgttcacttttgttgcggaggtgaagggctttgtccgggagaatgtctggacctactatgtctcctatgctgtcttcttcatctctctcatcgtcctcagctgttgtggggacttccggcgaaagcacccctggaaccttgttgcactgtcggtcctgaccgccagcctgtcgtacatggtggggatgatcgccagcttctacaacaccgaggcagtcatcatggccgtgggcatcaccacagccgtctgcttcaccgtcgtcatcttctccatgcagacccgctacgacttcacctcatgcatgggcgtgctcctggtgagcatggtggtgctcttcatcttcgccattctctgcatcttcatccggaaccgcatcctggagatcgtgtacgcctcactgggcgctctgctcttcacctgcttcctcgcagtggacacccagctgctactggggaacaagcagctgtccctgagcccagaagagtatgtgtttgctgcgctgaacctgtacacagacatcatcaacatcttcctgtacatcctcaccatcattggccgcgccaaggagtagccgagctccagctcgctgtgcccgctcaggtggcacggctggcctggaccctgcccctggcacggcagtgccagctgtacttcccctctctcttgtccccaggcacagcctagggaaaaggatgcctctctccaaccctcctgtatgtacactgcagatacttccatttggacccgctgtggccacagcatggcccctttagtcctcccgcccccgccaaggggcaccaaggccacgtttccgtgccacctcctgtctactcattgttgcatgagccctgtctgccagcccaccccagggactgggggcagcaccaggtcccggggagagggattgagccaagaggtgagggtgcacgtcttccctcctgtcccagctccccagcctggcgtagagcacccctcccctcccccccacccccctggagtgctgccctctggggacatgcggagtgggggtcttatccctgtgctgagccctgagggcagagaggatggcatgtttcaggggagggggaagccttcctctcaatttgttgtcagtgaaattccaataaatgggatttgctctctgc

SEQ ID NO: 137513 - DNA, 806 bp, Homo sapiens
  Payload ID: 6922
  Gene Symbol: GRINA
  Gene Name: glutamate receptor, ionotropic, N-methyl D-aspartate-associated protein 1 (glutamate binding)
  ENST ID: ENST00000527194
  CDS Start-End: 1-553
ggacttccctgccaccaactgggatgacaagagcatccgacaggccttcatccgcaaggtgttcctagtgctgaccttgcagctgtcggtgaccctgtccacggtgtctgtgttcacttttgttgcggagtcggtcctgaccgccagcctgtcgtacatggtggggatgatcgccagcttctacaacaccgaggcagtcatcatggccgtgggcatcaccacagccgtctgcttcaccgtcgtcatcttctccatgcagacccgctacgacttcacctcatgcatgggcgtgctcctggtgagcatggtggtgctcttcatcttcgccattctctgcatcttcatccggaaccgcatcctggagatcgtgtacgcctcactgggcgctctgctcttcacctgcttcctcgcagtggacacccagctgctactggggaacaagcagctgtccctgagcccagaagagtatgtgtttgctgcgctgaacctgtacacagacatcatcaacatcttcctgtacatcctcaccatcattggccgcgccaaggagtagccgagctccagctcgctgtgcccgctcaggtggcacggctggcctggaccctgcccctggcacggcagtgccagctgtacttcccctctctcttgtccccaggcacagcctagggaaaaggatgcctctctccaaccctcctgtatgtacactgcagatacttccatttggacccgctgtggccacagcatggcccctttagtcctcccgcccccgccaaggggcaccaaggccacgtttccgtgccacctcc

SEQ ID NO: 137514 - DNA, 564 bp, Homo sapiens
  Payload ID: 6922
  Gene Symbol: GRINA
  Gene Name: glutamate receptor, ionotropic, N-methyl D-aspartate-associated protein 1 (glutamate binding)
  ENST ID: ENST00000533044
  CDS Start-End: 1-564
caacccctatggacagccacaggtcttcccaggacaagaccctgactcaccccagcatggaaactaccaggaggagggtcccccatcctactatgacaaccaggacttccctgccaccaactgggatgacaagagcatccgacaggccttcatccgcaagtcggtcctgaccgccagcctgtcgtacatggtggggatgatcgccagcttctacaacaccgaggcagtcatcatggccgtgggcatcaccacagccgtctgcttcaccgtcgtcatcttctccatgcagacccgctacgacttcacctcatgcatgggcgtgctcctggtgagcatggtggtgctcttcatcttcgccattctctgcatcttcatccggaaccgcatcctggagatcgtgtacgcctcactgggcgctctgctcttcacctgcttcctcgcagtggacacccagctgctactggggaacaagcagctgtccctgagcccagaagagtatgtgtttgctgcgctgaacctgtacacagacatcatcaacatcttcctgtacatcctcaccatcat

SEQ ID NO: 137515 - DNA, 1075 bp, Homo sapiens
  Payload ID: 6922
  Gene Symbol: GRINA
  Gene Name: glutamate receptor, ionotropic, N-methyl D-aspartate-associated protein 1 (glutamate binding)
  ENST ID: ENST00000529301
  CDS Start-End: 254-1075
gcaggcgcaggcccagctgagcggccgccgagcgggtgcgggtgcgggcgcatcggccatcaccgcgcggccgcgcagcggacaccgtgcgtaccggcctgcggcgcccggccaccggtgagtccccggcccgagcccaggagcgcctctgacccgctgcgccgcgcggcctgccgcccccgcccccgcccccacgcggatcttgcgcatccgagcgtggccgcctcgggggcggaccgcggaacccgaggccatgtcccatgaaaagagttttttggtgtctggggacaactatcctccccccaaccctggatatccgggggggccccagccacccatgcccccctatgctcagcctccctaccctggggccccttacccacagccccctttccagccctccccctacggtcagccagggtacccccatggccccagcccctacccccaagggggctacccacagggtccctacccccaagggggctacccacagggcccctacccacaagagggctacccacagggcccctacccccaagggggctacccccaggggccatatccccagagccccttcccccccaacccctatggacagccacaggtcttcccaggacaagaccctgactcaccccagcatggaaactaccaggaggagggtcccccatcctactatgacaaccaggacttccctgccaccaactgggatgacaagagcatccgacaggccttcatccgcaaggtgttcctagtgctgaccttgcagctgtcggtgaccctgtccacggtgtctgtgttcacttttgttgcggaggtgaagggctttgtccgggagaatgtctggacctactatgtctcctatgctgtcttcttcatctctctcatcgtcctcagctgttgtggggacttccggcgaaagcacccctggaaccttgttgcactgtcggtcctgaccgccagcctgtcgtacatggtggggatgatcgccagcttctacaacaccgaggcagtcatcatggccgtgggcatcaccacagccgtctgcttcaccgtcgtcatcttctccatgcag

SEQ ID NO: 137516 - DNA, 1050 bp, Homo sapiens
  Payload ID: 6922
  Gene Symbol: GRINA
  Gene Name: glutamate receptor, ionotropic, N-methyl D-aspartate-associated protein 1 (glutamate binding)
  ENST ID: ENST00000534791
  CDS Start-End: 1-1050
gggctacccacagggcccctacccacaagagggctacccacagggcccctacccccaagggggctacccccaggggccatatccccagagccccttcccccccaacccctatggacagccacaggtcttcccaggacaagaccctgactcaccccagcatggaaactaccaggaggagggtcccccatcctactatgacaaccaggacttccctgccaccaactgggatgacaagagcatccgacaggccttcatccgcaaggtgttcctagtgctgaccttgcagctgtcggtgaccctgtccacggtgtctgtgttcacttttgttgcggaggtgaagggctttgtccgggagaatgtctggacctactatgtctcctatgctgtcttcttcatctctctcatcgtcctcagctgttgtggggacttccggcgaaagcacccctggaaccttgttgcactggtaacccccaaacctgagcctctgtgcctgggtccggccatgcagtcccacacgcccactcttccgggcctggtcaccgtggttctccttgtgctcatgaggcaggggccggcaggggtggcatgggggcacacacccaaggtcagcctgtgtctcccaactgcagtcggtcctgaccgccagcctgtcgtacatggtggggatgatcgccagcttctacaacaccgaggcagtcatcatggccgtgggcatcaccacagccgtctgcttcaccgtcgtcatcttctccatgcagacccgctacgacttcacctcatgcatgggcgtgctcctggtgagcatggtggtgctcttcatcttcgccattctctgcatcttcatccggaaccgcatcctggagatcgtgtacgcctcactgggcgctctgctcttcacctgcttcctcgcagtggacacccagctgctactggggaacaagcagctgtccctgagcccagaagagtatgtgtttgctgcgctgaacctgtacacagacatcatcaacatcttcctgtacatcctcaccatcattggccgcgccaaggagt

SEQ ID NO: 137517 - DNA, 558 bp, Homo sapiens
  Payload ID: 6922
  Gene Symbol: GRINA
  Gene Name: glutamate receptor, ionotropic, N-methyl D-aspartate-associated protein 1 (glutamate binding)
  ENST ID: ENST00000530898
  CDS Start-End: 256-558
gttgttgggctcgcgggggtgggggggctcgggcctttgttggtcacagatggcccggggatttcctgggatagaaatagccgccggctccggccccttaaagctgcttaaggggcgggatgcggaggggagggtccgggcacaccccacacgtccccggccgagaccccagcctccgcgctgagctcccacccgggagacgccggcagcggcgcaggcctccggttgcttgggcggaccgcggaacccgaggccatgtcccatgaaaagagttttttggtgtctggggacaactatcctccccccaaccctggatatccgggggggccccagccacccatgcccccctatgctcagcctccctaccctggggccccttacccacagccccctttccagccctccccctacggtcagccagggtacccccatggccccagcccctacccccaagggggctacccacagggtccctacccccaagggggctacccacagggcccctacccacaagagggctacccacagggcccctacccccaagggggctacccccag

SEQ ID NO: 137518 - DNA, 7770 bp, Homo sapiens
  Payload ID: 6923
  Gene Symbol: GRIN3A
  Gene Name: glutamate receptor, ionotropic, N-methyl-D-aspartate 3A
  Uniprot ID: Q8TCU5
  ENST ID: ENST00000361820
  CDS Start-End: 602-3949
cagagaggaagtagcgagagaagagagaaaatgaagtcggcgctgggggagcctgcaggagggtggccaacagtggaggaaggtggatttggcttcttttccgcaccccgggcgtgaaagccctctccaacgcgaccccaggaaataagtgggtctcgcctgggcagaaaaggaaaagaatccaggcgagagcgcgtcgctcctctgtcactgctgcccccgaggaactccggctgcttctcatcccggccgcctcgcggggccggacgcagtgcccgaggcgccctgcagatggggcgggcagggaacgggcgctccagctgcgggtgacaggcgccggcccgcccgcctgcctgctcagcgcagtgaccgggcgggcagaggatgccaggcggagggacctgggagcgggatctgagactgccggaggcgcgctacgctccaacttgcatggcctagagaccgctccagctcctgggaccgcttcaccgagtggagtgaagctgcgcgcgggacctggaggcggagacctcaggcagcggctgcagaggggcgagccgggcgcaggagggggcgcgctttctccctgcgggtctcagtaatgaggagactgagtttgtggtggctgctgagcagggtctgtctgctgttgccgccgccctgcgcactggtgctggccggggtgcccagctcctcctcgcacccgcagccctgccagatcctcaagcgcatcgggcacgcggtgagggtgggcgcggtgcacttgcagccctggaccaccgccccccgcgcggccagccgcgctccggacgacagccgagcaggagcccagagggatgagccggagccagggactaggcggtccccggcgccctcgccgggcgcacgctggttggggagcaccctgcatggccgggggccgccgggctcccgtaagcccggggagggcgccagggcggaggccctgtggccacgggacgccctcctatttgccgtggacaacctgaaccgcgtggaagggctgctaccctacaacctgtctttggaagtagtgatggccatcgaggcaggcctgggcgatctgccacttttgcccttctcctcccctagttcgccatggagcagtgaccctttctccttcctgcaaagtgtgtgccataccgtggtggtgcaaggggtgtcggcgctgctcgccttcccccagagccagggcgaaatgatggagctcgacttggtcagcttagtcctgcacattccagtgatcagcatcgtgcgccacgagtttccacgggagagtcagaatccccttcacctacaactgagtttagaaaattcattaagttctgatgctgatgtcactgtctcaatcctgaccatgaacaactggtacaattttagcttgttgctgtgccaggaagactggaacatcaccgacttcctcctccttacccagaataattccaagttccaccttggttctatcatcaacatcaccgctaacctcccctccacccaggacctcttgagcttcctacagatccagcttgagagtattaagaacagcacacccacagtggtgatgtttggctgcgacatggaaagtatccggcggattttcgaaattacaacccagtttggggtcatgccccctgaacttcgttgggtgctgggagattcccagaatgtggaggaactgaggacagagggtctgcccttagggctcattgctcatggaaaaacaacacagtctgtctttgagcactacgtacaagatgctatggagctggtcgcaagagctgtagccacagccaccatgatccaaccagaacttgctctcattcccagcacgatgaactgcatggaggtggaaactacaaatctcacttcaggacaatatttatcaaggtttctagccaataccactttcagaggcctcagtggttccatcagagtaaaaggttccaccatcgtcagctcagaaaacaactttttcatctggaatcttcaacatgaccccatgggaaagccaatgtggacccgcttgggcagctggcaggggggaaagattgtcatggactatggaatatggccagagcaggcccagagacacaaaacccacttccaacatccaagtaagctacacttgagagtggttaccctgattgagcatccttttgtcttcacaagggaggtagatgatgaaggcttgtgccctgctggccaactctgtctagaccccatgactaatgactcttccacattggacagcctttttagcagcctccatagcagtaatgatacagtgcccattaaattcaagaagtgctgctatggatattgcattgatctgctggaaaagatagcagaagacatgaactttgacttcgacctctatattgtaggggatggaaagtatggagcatggaaaaatgggcactggactgggctagtgggtgatctcctgagagggactgcccacatggcagtcacttcctttagcatcaatactgcacggagccaggtgatagatttcaccagccctttcttctccaccagcttgggcatcttagtgaggacccgagatacagcagctcccattggagccttcatgtggccactccactggacaatgtggctggggatttttgtggctctgcacatcactgccgtcttcctcactctgtatgaatggaagagtccatttggtttgactcccaaggggcgaaatagaagtaaagtcttctccttttcttcagccttgaacatctgttatgccctcttgtttggcagaacagtggccatcaaacctccaaaatgttggactggaaggtttctaatgaacctttgggccattttctgtatgttttgcctttccacatacacggcaaacttggctgctgtcatggtaggtgagaagatctatgaagagctttctggaatacatgaccccaagttacatcatccttcccaaggattccgctttggaactgtccgagaaagcagtgctgaagattatgtgagacaaagtttcccagagatgcatgaatatatgagaaggtacaatgttccagccacccctgatggagtggagtatctgaagaatgatccagagaaactagacgccttcatcatggacaaagcccttctggattatgaagtgtcaatagatgctgactgcaaacttctcactgtggggaagccatttgccatagaaggatacggcattggcctcccacccaactctccattgaccgccaacatatccgagctaatcagtcaatacaagtcacatgggtttatggatatgctccatgacaagtggtacagggtggttccctgtggcaagagaagttttgctgtcacggagactttgcaaatgggcatcaaacacttctctgggctctttgtgctgctgtgcattggatttggtctgtccattttgaccaccattggtgagcacatagtatacaggctgctgctaccacgaatcaaaaacaaatccaagctgcaatactggctccacaccagccagagattacacagagcaataaatacatcatttatagaggaaaagcagcagcatttcaagaccaaacgtgtggaaaagaggtctaatgtgggaccccgtcagcttaccgtatggaatacttccaatctgagtcatgacaaccgacggaaatacatctttagtgatgaggaaggacaaaaccagctgggcatccggatccaccaggacatccccctccctccaaggagaagagagctccctgccttgcggaccaccaatgggaaagcagactccctaaatgtatctcggaactcagtgatgcaggaactctcagagctcgagaagcagattcaggtgatccgtcaggagctgcagctggctgtgagcaggaaaacggagctggaggagtatcaaaggacaagtcggacttgtgagtcctaggtgaccacactgcttccctttctcagttcctgaccttcctctgagcccttgagacactttgtaatgctcttttgtaactatcgacaaaggtgtggggaagctgaggtctaggtcttcttaaaggtcaagtctgctctccctcgcctaaagtgcagcagcagctcctctcaagctcactctctaggtctccagggtaggagtgtttttctagcaagaatcttagtcaggagtaagctctgtgcgagagatctgtgaataaccagataaccccagctgccgttaaccttttcaccaggtgccacagtaatatttctggtttttagccctttctctgcactaccaacaagagataaaattgttactcacacttatgtcttactgggttgctggttttcatcgtaacacagaacgaggttatctagggttgtagcttttgatacaactccccgatctagatttattcctacattctgaatggggagcaggtaagagcagagcacctcccactgggggtggggtatttaaaaattaactcattagtatcataaacgtcaaggattgattggaccaggcaagagccatgtttttgagaaggttctggatctctgactccatcctgactgtttagtaagagcatgcttacaccctactgtgaaaaggggaggggatgtggtaagcggaaacagaagacaggcagcagaggcattaaaaatgcataccatgctttcagaacaaaagctctgggccagaaaggcaatttggctaaaaaatgaataagactacttctaatgtaactaagcatctccactatggtgtgtgccttttataaaggaaaagagagaaaaaggcaaagcaaggttgtggccttaggttggacctggaatatcccttattgcctataatggaatatgtgacactgtgggtgaaatgttctacacaccacacactaggccattttcagatcagcagtcacccatcgcttagcatagaaatcccaaaacctccagcccgggaacactataagcttcgaccattcaggaatctgccctgcactttgcatatctgtatagaaaatcaagtcaatcccccatcctcacacccactcatctctgaggagctatgaactggttttggtccctctaatgatcctccagcctcatctaatgccccccaaagactgatacaagtaacctcccctctgcttaggtgtcactttctcagcatatcaagtttaggcagcaagggaaaggaatatgggtcagttctcaaatgtcaatgtagataagagtcatctagtagagaactcatcagagtgcggattgccaagacccttctccagagattatggggttgggggtggaggtctagaggtgagctcagaaacctactgttaaccaacacccccaagtgactgacacaggtggtctaaaaattacttttctagaaacaccattctggaagtttggctgcccacaggcaggaggagaagcatgaagagaaaacctgtttgagaagttttgttttgttttgttttgctttttaataattttagcacacatctgctgactctccttcaacatcctcacccccacccctgggcaccatttaggacaagacttccttatttatcaattacttgatttatcttctcaggactcattgttccacccccaaccaatttgaatgcctacaataagttcaggagctgtgccaagcactttcctcttttacagctggagatcactggaaaggtgtctcagtcacaaaacttctccctctactactggatgaaatgtctgcatttccaccaaaatctacccagtcacccagggaataacaacttaagctgtagttagataacacctagtgattaattggctgagaaaaccctggagtggagggaggctcagagatactgatatggatgtgggagggctctaaagttagaggtcaccaactccacagatgaaacagttcaataatgaggaaacaggtgagccctgaaaacacaaaaggacagttctgtgttgaaacaccccatcccctcacgttctcaccccaggcccagaagtaggttgcaactgcctttggaagattttgccccttagccatccccacccacttgtaccagctaagaatgctggagactctgccaccatgctctgcgtgcccctgaacctctgtgcagcccggaaggctgatgtacaggtgtacctcaatccacattacagccatgctcctaatgtacatggacatttttgtaactcagctcatattctgactgtatttgagaagctggctgtttaagggaacccagaagtgaattcttttgtaaagtaaagcacccttttgtaatgcaattaattatcccttaatgtatctgttttgtaagtctgcatttttgtatatcggatttaccttaagcttctctagtgaggcattctgagcagtggtgatcacatgccagatcgccctgcctatccacaaagtagatgaccaatgcacgctcctcaaacatctttggaggaactacctggccaaaacactggccaggatgcagcaagcagcagcaggggctgacagcaggcttactgccatcaacattgcttgaaatgcctctatgttctgaataaagaaaaaccataattgcttgtggtgaaacgaagcagtcttcatgttaagtagcaatggttatttttattggtagtaactgaacagtgttttgcaatttgtgaaacagtgtattgtgttttgtaaaatgatgtcatgaaatggtgggtccttggaaacctcctttccgttcagctctgcctctgttctttcaactcctttgaggctcaaaaaaaacacaaagatcagaagccttcagatagagggtggtattctggtaaagaagaaagagataagggacgctaccttgcttttctggcacaggaagcacatgataaagcatgctcagatgagctggaacagatatagctacctggttcgtgtaaataagaataatcaaggccccagagtgtgtatgcttccaggtggaggagaaaggggaatctcccaaaatttaaaaacaaattggaagaataaccaggacagccaagtgaagcagccacagggacccaagcagtcgaggtctttaatgtgcctggagatgactctctgctattcatgaatcttgctattgcacaaaccctatcaagagctgctgcttcccttccagccagaaaagtggtaagcggagcaagtgccaagcagaacagaccttatcatctgggtaacagacttctcagtgttggtgctgtgtctgttagagccttagagcaagttaagcacttccttggtgtgggtaaagaataaaggggaaagaaactactttagagcctctttttctcccaactcatatttttgataggaaaaacagaaaacccatccagttcttcagaaattgctttctaggcattaatactactttactatctatactgtttagttattcctttctttacccacctaaactatccatctaatccaggattccctcactctttttttttagttactaatcattttatgaaaataatgtatttataagtattttcttaaggtttgtgaagagtatttgcattgtgtcttcattttaatgtgtttgcaatcgctccgctccaggaagaacggaaatgctgtcttgtgagcatgaagtgaacgggctgttttgctccagccacttttcttgtacaaccacatggatggattagatgtcctcaggtcttttccatcttcagtttctatgactgtggaataaatgttcagatagaaacttc

SEQ ID NO: 137519 - DNA, 3281 bp, Homo sapiens
  Payload ID: 6924
  Gene Symbol: GRIN3B
  Gene Name: glutamate receptor, ionotropic, N-methyl-D-aspartate 3B
  Uniprot ID: O60391
  ENST ID: ENST00000234389
  CDS Start-End: 20-3151
cgacgccgacaactttgcgatggagtttgtgcgggcgctgtggctgggcctggcgctggcgctggggccggggtccgcggggggccaccctcagccgtgcggcgtcctggcgcgcctcgggggctccgtgcgcctgggcgccctcctgccccgcgcgcctctcgcccgcgcccgcgcccgcgccgccctggcccgggccgccctggcgccgcggctgccgcacaacctgagcttggagctggtggtcgccgcgccccccgcccgcgaccccgcctcgctgacccgcggcctgtgccaggcgctggtgcctccgggcgtggcggccctgctcgcctttcccgaggctcggcccgagctgctgcagctgcacttcctggcggcggccaccgagacccccgtgctcagcctgctgcggcgggaggcgcgcgcgcccctcggagccccgaacccattccacctgcagctgcactgggccagccccctggagacgctgctggatgtgctggtggcggtgctgcaggcgcacgcctgggaagacgtcggcctggccctgtgccgcactcaggaccccggcggcctggtggccctctggacaagccgggctggccggcccccacagctggtcctggacctaagccggcgggacacgggagatgcaggactgcgggcacgcctggccccgatggcggcgccagtggggggtgaagcaccggtacccgcggcggtcctcctcggctgtgacatcgcccgtgcccgtcgggtgctggaggccgtacctcccggcccccactggctgttggggacaccactgccgcccaaggccctgcccaccgcggggctgccaccagggctgctggcgctgggcgaggtggcacgacccccgctggaggccgccatccatgacattgtgcaactggtggcccgggcgctgggcagtgcggcccaggtgcagccgaagcgagccctcctccccgccccggtcaactgcggggacctgcagccggccgggcccgagtccccggggcgcttcttggcacggttcctggccaacacgtccttccagggccgcacgggccccgtgtgggtgacaggcagctcccaggtacacatgtctcggcactttaaggtgtggagccttcgccgggacccacggggcgccccggcctgggccacggtgggcagctggcgggacggccagctggacttggaaccgggaggtgcctctgcacggcccccgcccccacagggtgcccaggtctggcccaagctgcgtgtggtaacgctgttggaacacccatttgtgtttgcccgtgatccagacgaagacgggcagtgcccagcggggcagctgtgcctggaccctggcaccaacgactcggccaccctggacgcactgttcgccgcgctggccaacggctcagcgccccgtgccctgcgcaagtgctgctacggctactgcattgacctgctggagcggctggcggaggacacgcccttcgacttcgagctgtacctcgtgggtgacggcaagtacggcgccctgcgggacggccgctggaccggcctggtcggggacctgctggccggccgggcccacatggcggtcaccagcttcagtatcaactccgcccgctcacaggtggtggacttcaccagccccttcttctccaccagcctgggcatcatggtgcgggcacgggacacggcctcacccatcggtgcctttatgtggcccctgcactggtccacgtggctgggcgtctttgcggccctgcacctcaccgcgctcttcctcaccgtgtacgagtggcgtagcccctacggcctcacgccacgtggccgcaaccgcagcaccgtcttctcctactcctcagccctcaacctgtgctacgccatcctcttcagacgcaccgtgtccagcaagacgcccaagtgccccacgggccgcctgctcatgaacctctgggccatcttctgcctgctggtgctgtccagctacacggccaacctggctgccgtcatggtcggggacaagaccttcgaggagctgtcggggatccacgaccccaagctgcaccacccggcgcagggcttccgcttcggcaccgtgtgggagagcagcgccgaggcgtacatcaagaagagcttccccgacatgcacgcacacatgcggcgccacagcgcgcccaccacgccccgcggcgtcgccatgctcacgagcgacccccccaagctcaacgccttcatcatggacaagtcgctcctggactacgaggtctccatcgacgccgactgcaaactgctgaccgtgggaaagcccttcgccattgagggctatgggatcggactgccccagaactcgccgctcacctccaacctgtccgagttcatcagccgctacaagtcctccggcttcatcgacctgctccacgacaagtggtacaagatggtgccttgcggcaagcgggtctttgcggttacagagaccctgcagatgagcatctaccacttcgcgggcctcttcgtgttgctgtgcctgggcctgggcagcgctctgctcagctcgctgggcgagcacgccttcttccgcctggcgctgccgcgcatccgcaaggggagcaggctgcagtactggctgcacaccagccagaaaatccaccgcgccctcaacacggagccaccagaggggtcgaaggaggagacggcagaggcggagcccagcggccccgaggtggagcagcagcagcagcagcaggaccagccaacggctccggagggctggaaacgggcgcgccgggccgtggacaaggagcgccgcgtgcgcttcctgctggagcccgccgtggttgtggcacccgaagcggacgcggaggcggaggctgcgccgcgagagggccccgtctggctgtgctcctacggccgcccgcccgccgcaaggcccacgggggccccccagcccggggagctgcaggagctggagcgccgcatcgaagtcgcgcgtgagcggctccgccaggccctggtgcggcgcggccagctcctggcacagctcggggacagcgcacgtcaccggcctcggcgcttgcttcaggccagagcggcccccgcggaggccccaccacactctggccgaccggggagccaggaatgaggcggcagccgggccgtttgggctcaagacacacacacagcgcagtgagccgctgtcaacagacagtttattctatatacaaacacaattttgtacactgcaattaaatagaatggaatgagcgctcctc

SEQ ID NO: 137520 - DNA, 6622 bp, Homo sapiens
  Payload ID: 6925
  Gene Symbol: GRM1
  Gene Name: glutamate receptor, metabotropic 1
  Uniprot ID: Q13255
  ENST ID: ENST00000282753
  CDS Start-End: 236-3820
gaattcccttacaaacgcctccagcttgtagaggcggtcgtggaggacccagaggaggagacgaaggggaaggaggcggtggtggaggaggcaaaggccttggacgaccattgttggcgaggggcaccactccgggagaggcggcgctgggcgtcttgggggtgcgcgccgggagcctgcagcgggaccagcgtgggaacgcggctggcaggctgtggacctcgtcctcaccaccatggtcgggctccttttgttttttttcccagcgatctttttggaggtgtcccttctccccagaagccccggcaggaaagtgttgctggcaggagcgtcgtctcagcgctcggtggccagaatggacggagatgtcatcattggagccctcttctcagtccatcaccagcctccggccgagaaagtgcccgagaggaagtgtggggagatcagggagcagtatggcatccagagggtggaggccatgttccacacgttggataagatcaacgcggacccggtcctcctgcccaacatcaccctgggcagtgagatccgggactcctgctggcactcttccgtggctctggaacagagcattgagttcattagggactctctgatttccattcgagatgagaaggatgggatcaaccggtgtctgcctgacggccagtccctccccccaggcaggactaagaagcccattgcgggagtgatcggtcccggctccagctctgtagccattcaagtgcagaacctgctccagctcttcgacatcccccagatcgcttattcagccacaagcatcgacctgagtgacaaaactttgtacaaatacttcctgagggttgtcccttctgacactttgcaggcaagggccatgcttgacatagtcaaacgttacaattggacctatgtctctgcagtccacacggaagggaattatggggagagcggaatggacgctttcaaagagctggctgcccaggaaggcctctgtatcgcccattctgacaaaatctacagcaacgctggggagaagagctttgaccgactcttgcgcaaactccgagagaggcttcccaaggctagagtggtggtctgcttctgtgaaggcatgacagtgcgaggactcctgagcgccatgcggcgccttggcgtcgtgggcgagttctcactcattggaagtgatggatgggcagacagagatgaagtcattgaaggttatgaggtggaagccaacgggggaatcacgataaagctgcagtctccagaggtcaggtcatttgatgattatttcctgaaactgaggctggacactaacacgaggaatccctggttccctgagttctggcaacatcggttccagtgccgccttccaggacaccttctggaaaatcccaactttaaacgaatctgcacaggcaatgaaagcttagaagaaaactatgtccaggacagtaagatggggtttgtcatcaatgccatctatgccatggcacatgggctgcagaacatgcaccatgccctctgccctggccacgtgggcctctgcgatgccatgaagcccatcgacggcagcaagctgctggacttcctcatcaagtcctcattcattggagtatctggagaggaggtgtggtttgatgagaaaggagacgctcctggaaggtatgatatcatgaatctgcagtacactgaagctaatcgctatgactatgtgcacgttggaacctggcatgaaggagtgctgaacattgatgattacaaaatccagatgaacaagagtggagtggtgcggtctgtgtgcagtgagccttgcttaaagggccagattaaggttatacggaaaggagaagtgagctgctgctggatttgcacggcctgcaaagagaatgaatatgtgcaagatgagttcacctgcaaagcttgtgacttgggatggtggcccaatgcagatctaacaggctgtgagcccattcctgtgcgctatcttgagtggagcaacatcgaatccattatagccatcgccttttcatgcctgggaatccttgttaccttgtttgtcaccctaatctttgtactgtaccgggacacaccagtggtcaaatcctccagtcgggagctctgctacatcatcctagctggcatcttccttggttatgtgtgcccattcactctcattgccaaacctactaccacctcctgctacctccagcgcctcttggttggcctctcctctgcgatgtgctactctgctttagtgactaaaaccaatcgtattgcacgcatcctggctggcagcaagaagaagatctgcacccggaagcccaggttcatgagtgcctgggctcaggtgatcattgcctcaattctgattagtgtgcaactaaccctggtggtaaccctgatcatcatggaaccccctatgcccattctgtcctacccaagtatcaaggaagtctaccttatctgcaataccagcaacctgggtgtggtggcccctttgggctacaatggactcctcatcatgagctgtacctactatgccttcaagacccgcaacgtgcccgccaacttcaacgaggccaaatatatcgcgttcaccatgtacaccacctgtatcatctggctagcttttgtgcccatttactttgggagcaactacaagatcatcacaacttgctttgcagtgagtctcagtgtaacagtggctctggggtgcatgttcactcccaagatgtacatcattattgccaagcctgagaggaatgtccgcagtgccttcaccacctctgatgttgtccgcatgcatgttggcgatggcaagctgccctgccgctccaacactttcctcaacatcttccgaagaaagaaggcaggggcagggaatgccaattctaatggcaagtctgtgtcatggtctgaaccaggtggaggacaggtgcccaagggacagcatatgtggcaccgcctctctgtgcacgtgaagaccaatgagacggcctgcaaccaaacagccgtcatcaagcccctcactaaaagttaccaaggctctggcaagagcctgaccttttcagataccagcaccaagaccctttacaacgtagaggaggaggaggatgcccagccgattcgctttagcccgcctggtagcccttccatggtggtgcacaggcgcgtgccaagcgcggcgaccactccgcctctgccgtcccacctgaccgcagaggagacccccctcttcctggccgaaccagccctccccaagggcttgccccctcctctccagcagcagcagcaaccccctccacagcagaaatcgctgatggaccagctccagggagtggtcagcaacttcagtaccgcgatcccggattttcacgcggtgctggcaggccccggtggtcccgggaacgggctgcggtccctgtacccgcccccgccacctccgcagcacctgcagatgctgccgctgcagctgagcacctttggggaggagctggtctccccgcccgcggacgacgacgacgacagcgagaggtttaagctcctccaggagtacgtgtatgagcacgagcgggaagggaacacggaagaagacgaactggaagaggaggaggaggacctgcaggcggccagcaaactgaccccggatgattcgcctgcgctgacgcctccgtcgcctttccgcgactcggtggcctcgggcagctcggtgcccagctcccccgtgtccgagtcggtgctctgcacccctcccaacgtatcctacgcctctgtcattctgcgggactacaagcaaagctcttccaccctgtaagggggaagggtccacatagaaaagcaagacaagccagagatctcccacacctccagagatgtgcaaacagctgggaggaaaagcctgggagtggggggcctcgtcgggaggacaggagaccgctgctgctgctgccgctactgctgctgctgccttaagtaggaagagagggaaggacaccaagcaaaaaatgttccaggccaggattcggattcttgaattactcgaagccttctctgggaagaaagggaattctgacaaagcacaattccatatggtatgtaacttttatcacaaatcaaatagtgacatcacaaacataatgtcctcttttgcacaattgtgcatagatatatatatgcccacacacactgggccatgcttgccaaggaacagcccacgtggacatgccagtcggatcatgagttcacctgatggcattcggagtgagctggtggagccagacagagcaggtgcggggaagggaagggcccaggccagacccatcccaaacggatgatgggatgatgggacagcagctccttgctcagaagcccttctccccgctgggctgacagactcctcatcttcaggagactcaggaatggagcggcacaggggtctctcttcatccactgcaacccatccagtgccagctttgagattgcacttgaagaaaggtgcatggaccccctgctgctctgcagattccctttatttaggaaaacaggaataagagcaaaattatcaccaaaaagtgcttcatcaggcgtgctacaggaggaaggagctagaaatagaacaatccatcagcatgagactttgaaaaaaaaacacatgatcagcttctcatgttccatattcacttattggcgatttggggaaaaggccggaacaagagattgttacgagagtggcagaaacccttttgtagattgacttgtgtttgtgccaagcgggctttccattgaccttcagttaaagaacaaaccatgtgacaaaattgttaccttccacttactgtagcaaataatacctacaagttgaacttctaagatgcgtatatgtacaatttggtgccattatttctcctacgtattagagaaacaaatccatctttgaatctaatggtgtactcatagcaactattactggtttaaatgacaaataattctatcctattgtcactgaagtccttgtaactagcgagtgaatgtgttcctgtgtccttgtatatgtgcgatcgtaaaatttgtgcaatgtaatgtcaaattgactggtcaatgtcaacctagtagtcaatctaactgcaattagaaattgtcttttgaatatactatatatattttttatgttccaataatgttttgtacatcattgtcatcaatatctacagaagctctttgacggtttgaatactatggctcaaggttttcatatgcagctcggatggacatttttcttctaagatggaacttatttttcagatattttctgatgtggagatatgttattaatgaagtggtttgaaaatttgttatattaaaagtgcacaaaaactgagagtgaaaataaaaggtacattttataagcttgcacacattattaacacataagattgaacaaagcatttagattattccaggttatatcatttttttaaagattttccacagctacttgagtgtctaacatacagtaacatctaactcagctaataatttgtaaaatctttatcaatcacattttgccttcttttaatttttatgttcatggacttttattcctgtgtcttggctgtcataactttttatttctgctatttgctgttgtgtaatatccatggacatgtaatccacttactccatctttacaatccctttttaccaccaataaaaggatttttcttgctgttttgatttcttctattatttgtggaatgaattataccccccttaaatatctttgtttatgccttatgttcagtcatattttaatatgcttccttcatattgaagctgctgatttctcagccaaaaatcatcttagaatctttaaatatccattgcatcatttgttcagaatttaacatccattccaatgttggaggcttgtattacttatatttcatcatattctattgccaagtttagtcagttccacaccaagaatgaactgcatttcctttaaaaattattttaaaacacctttattgaaaagatctcatgactgagatgtggactttggttccatgttttcattgtaagaaagcagagagcggaaaatcaatggctccagtgattaatagatgggtttttagtaattgacaaattcatgagggaaagcatatgatctctttattagtgaatcatgcttattttttactcttaatgccactaatatacatccctaatatcacagggcttgtgcattcagatttttaaaaaattaggatagataaggaaacaacttatattcaagtgtaagatgatatcaggttggtctaagacttttggtgaacacgttcattcaactgtgatcactttattactctgaatgcctactattatcctgattatggggtctcctgaataaatagagtattagtccttatgtcatcattgttcaaaattggagatgtacacatacataccctataccaagagggccgaaactcttcaccttgatgtatgttctgatacaagttgttcagcttcttgtaaatgtgttttccttcggcttgttactgccttttgtcaaataatcttgacaatgctgtataataaatattttctatttatt

SEQ ID NO: 137521 - DNA, 3874 bp, Homo sapiens
  Payload ID: 6925
  Gene Symbol: GRM1
  Gene Name: glutamate receptor, metabotropic 1
  Uniprot ID: Q13255
  ENST ID: ENST00000355289
  CDS Start-End: 236-2962
gaattcccttacaaacgcctccagcttgtagaggcggtcgtggaggacccagaggaggagacgaaggggaaggaggcggtggtggaggaggcaaaggccttggacgaccattgttggcgaggggcaccactccgggagaggcggcgctgggcgtcttgggggtgcgcgccgggagcctgcagcgggaccagcgtgggaacgcggctggcaggctgtggacctcgtcctcaccaccatggtcgggctccttttgttttttttcccagcgatctttttggaggtgtcccttctccccagaagccccggcaggaaagtgttgctggcaggagcgtcgtctcagcgctcggtggccagaatggacggagatgtcatcattggagccctcttctcagtccatcaccagcctccggccgagaaagtgcccgagaggaagtgtggggagatcagggagcagtatggcatccagagggtggaggccatgttccacacgttggataagatcaacgcggacccggtcctcctgcccaacatcaccctgggcagtgagatccgggactcctgctggcactcttccgtggctctggaacagagcattgagttcattagggactctctgatttccattcgagatgagaaggatgggatcaaccggtgtctgcctgacggccagtccctccccccaggcaggactaagaagcccattgcgggagtgatcggtcccggctccagctctgtagccattcaagtgcagaacctgctccagctcttcgacatcccccagatcgcttattcagccacaagcatcgacctgagtgacaaaactttgtacaaatacttcctgagggttgtcccttctgacactttgcaggcaagggccatgcttgacatagtcaaacgttacaattggacctatgtctctgcagtccacacggaagggaattatggggagagcggaatggacgctttcaaagagctggctgcccaggaaggcctctgtatcgcccattctgacaaaatctacagcaacgctggggagaagagctttgaccgactcttgcgcaaactccgagagaggcttcccaaggctagagtggtggtctgcttctgtgaaggcatgacagtgcgaggactcctgagcgccatgcggcgccttggcgtcgtgggcgagttctcactcattggaagtgatggatgggcagacagagatgaagtcattgaaggttatgaggtggaagccaacgggggaatcacgataaagctgcagtctccagaggtcaggtcatttgatgattatttcctgaaactgaggctggacactaacacgaggaatccctggttccctgagttctggcaacatcggttccagtgccgccttccaggacaccttctggaaaatcccaactttaaacgaatctgcacaggcaatgaaagcttagaagaaaactatgtccaggacagtaagatggggtttgtcatcaatgccatctatgccatggcacatgggctgcagaacatgcaccatgccctctgccctggccacgtgggcctctgcgatgccatgaagcccatcgacggcagcaagctgctggacttcctcatcaagtcctcattcattggagtatctggagaggaggtgtggtttgatgagaaaggagacgctcctggaaggtatgatatcatgaatctgcagtacactgaagctaatcgctatgactatgtgcacgttggaacctggcatgaaggagtgctgaacattgatgattacaaaatccagatgaacaagagtggagtggtgcggtctgtgtgcagtgagccttgcttaaagggccagattaaggttatacggaaaggagaagtgagctgctgctggatttgcacggcctgcaaagagaatgaatatgtgcaagatgagttcacctgcaaagcttgtgacttgggatggtggcccaatgcagatctaacaggctgtgagcccattcctgtgcgctatcttgagtggagcaacatcgaatccattatagccatcgccttttcatgcctgggaatccttgttaccttgtttgtcaccctaatctttgtactgtaccgggacacaccagtggtcaaatcctccagtcgggagctctgctacatcatcctagctggcatcttccttggttatgtgtgcccattcactctcattgccaaacctactaccacctcctgctacctccagcgcctcttggttggcctctcctctgcgatgtgctactctgctttagtgactaaaaccaatcgtattgcacgcatcctggctggcagcaagaagaagatctgcacccggaagcccaggttcatgagtgcctgggctcaggtgatcattgcctcaattctgattagtgtgcaactaaccctggtggtaaccctgatcatcatggaaccccctatgcccattctgtcctacccaagtatcaaggaagtctaccttatctgcaataccagcaacctgggtgtggtggcccctttgggctacaatggactcctcatcatgagctgtacctactatgccttcaagacccgcaacgtgcccgccaacttcaacgaggccaaatatatcgcgttcaccatgtacaccacctgtatcatctggctagcttttgtgcccatttactttgggagcaactacaagatcatcacaacttgctttgcagtgagtctcagtgtaacagtggctctggggtgcatgttcactcccaagatgtacatcattattgccaagcctgagaggaatgtccgcagtgccttcaccacctctgatgttgtccgcatgcatgttggcgatggcaagctgccctgccgctccaacactttcctcaacatcttccgaagaaagaaggcaggggcagggaatgccaagtggaggacaggtgcccaagggacagcatatgtggcaccgcctctctgtgcacgtgaagaccaatgagacggcctgcaaccaaacagccgtcatcaagcccctcactaaaagttaccaaggctctggcaagagcctgaccttttcagataccagcaccaagaccctttacaacgtagaggaggaggaggatgcccagccgattcgctttagcccgcctggtagcccttccatggtggtgcacaggcgcgtgccaagcgcggcgaccactccgcctctgccgtcccacctgaccgcagaggagacccccctcttcctggccgaaccagccctccccaagggcttgccccctcctctccagcagcagcagcaaccccctccacagcagaaatcgctgatggaccagctccagggagtggtcagcaacttcagtaccgcgatcccggattttcacgcggtgctggcaggccccggtggtcccgggaacgggctgcggtccctgtacccgcccccgccacctccgcagcacctgcagatgctgccgctgcagctgagcacctttggggaggagctggtctccccgcccgcggacgacgacgacgacagcgagaggtttaagctcctccaggagtacgtgtatgagcacgagcgggaagggaacacggaagaagacgaactggaagaggaggaggaggacctgcaggcggccagcaaactgaccccggatgattcgcctgcgctgacgcctccgtcgcctttccgcgactcggtggcctcgggcagctcggtgcccagctcccccgtgtccgagtcggtgctctgcacccctcccaacgtatcctacgcctctgtcattctgcgggactacaagcaaagctcttccaccctgtaagggggaagggtccacatagaaaagcaagacaagccagagatctcccacacctccagagatgtgcaaacagctgggaggaaaagcctggg

SEQ ID NO: 137522 - DNA, 6754 bp, Homo sapiens
  Payload ID: 6925
  Gene Symbol: GRM1
  Gene Name: glutamate receptor, metabotropic 1
  Uniprot ID: Q13255
  ENST ID: ENST00000361719
  CDS Start-End: 368-3952
caggtactcaggtatgtctcaagtccatgtcctccaaacagactcagcatctagctcaccgctgccaacacgacttccactgtactcttgatcaatttaccttgatgcactaccggtgaagaacggggactcgaattcccttacaaacgcctccagcttgtagaggcggtcgtggaggacccagaggaggagacgaaggggaaggaggcggtggtggaggaggcaaaggccttggacgaccattgttggcgaggggcaccactccgggagaggcggcgctgggcgtcttgggggtgcgcgccgggagcctgcagcgggaccagcgtgggaacgcggctggcaggctgtggacctcgtcctcaccaccatggtcgggctccttttgttttttttcccagcgatctttttggaggtgtcccttctccccagaagccccggcaggaaagtgttgctggcaggagcgtcgtctcagcgctcggtggccagaatggacggagatgtcatcattggagccctcttctcagtccatcaccagcctccggccgagaaagtgcccgagaggaagtgtggggagatcagggagcagtatggcatccagagggtggaggccatgttccacacgttggataagatcaacgcggacccggtcctcctgcccaacatcaccctgggcagtgagatccgggactcctgctggcactcttccgtggctctggaacagagcattgagttcattagggactctctgatttccattcgagatgagaaggatgggatcaaccggtgtctgcctgacggccagtccctccccccaggcaggactaagaagcccattgcgggagtgatcggtcccggctccagctctgtagccattcaagtgcagaacctgctccagctcttcgacatcccccagatcgcttattcagccacaagcatcgacctgagtgacaaaactttgtacaaatacttcctgagggttgtcccttctgacactttgcaggcaagggccatgcttgacatagtcaaacgttacaattggacctatgtctctgcagtccacacggaagggaattatggggagagcggaatggacgctttcaaagagctggctgcccaggaaggcctctgtatcgcccattctgacaaaatctacagcaacgctggggagaagagctttgaccgactcttgcgcaaactccgagagaggcttcccaaggctagagtggtggtctgcttctgtgaaggcatgacagtgcgaggactcctgagcgccatgcggcgccttggcgtcgtgggcgagttctcactcattggaagtgatggatgggcagacagagatgaagtcattgaaggttatgaggtggaagccaacgggggaatcacgataaagctgcagtctccagaggtcaggtcatttgatgattatttcctgaaactgaggctggacactaacacgaggaatccctggttccctgagttctggcaacatcggttccagtgccgccttccaggacaccttctggaaaatcccaactttaaacgaatctgcacaggcaatgaaagcttagaagaaaactatgtccaggacagtaagatggggtttgtcatcaatgccatctatgccatggcacatgggctgcagaacatgcaccatgccctctgccctggccacgtgggcctctgcgatgccatgaagcccatcgacggcagcaagctgctggacttcctcatcaagtcctcattcattggagtatctggagaggaggtgtggtttgatgagaaaggagacgctcctggaaggtatgatatcatgaatctgcagtacactgaagctaatcgctatgactatgtgcacgttggaacctggcatgaaggagtgctgaacattgatgattacaaaatccagatgaacaagagtggagtggtgcggtctgtgtgcagtgagccttgcttaaagggccagattaaggttatacggaaaggagaagtgagctgctgctggatttgcacggcctgcaaagagaatgaatatgtgcaagatgagttcacctgcaaagcttgtgacttgggatggtggcccaatgcagatctaacaggctgtgagcccattcctgtgcgctatcttgagtggagcaacatcgaatccattatagccatcgccttttcatgcctgggaatccttgttaccttgtttgtcaccctaatctttgtactgtaccgggacacaccagtggtcaaatcctccagtcgggagctctgctacatcatcctagctggcatcttccttggttatgtgtgcccattcactctcattgccaaacctactaccacctcctgctacctccagcgcctcttggttggcctctcctctgcgatgtgctactctgctttagtgactaaaaccaatcgtattgcacgcatcctggctggcagcaagaagaagatctgcacccggaagcccaggttcatgagtgcctgggctcaggtgatcattgcctcaattctgattagtgtgcaactaaccctggtggtaaccctgatcatcatggaaccccctatgcccattctgtcctacccaagtatcaaggaagtctaccttatctgcaataccagcaacctgggtgtggtggcccctttgggctacaatggactcctcatcatgagctgtacctactatgccttcaagacccgcaacgtgcccgccaacttcaacgaggccaaatatatcgcgttcaccatgtacaccacctgtatcatctggctagcttttgtgcccatttactttgggagcaactacaagatcatcacaacttgctttgcagtgagtctcagtgtaacagtggctctggggtgcatgttcactcccaagatgtacatcattattgccaagcctgagaggaatgtccgcagtgccttcaccacctctgatgttgtccgcatgcatgttggcgatggcaagctgccctgccgctccaacactttcctcaacatcttccgaagaaagaaggcaggggcagggaatgccaattctaatggcaagtctgtgtcatggtctgaaccaggtggaggacaggtgcccaagggacagcatatgtggcaccgcctctctgtgcacgtgaagaccaatgagacggcctgcaaccaaacagccgtcatcaagcccctcactaaaagttaccaaggctctggcaagagcctgaccttttcagataccagcaccaagaccctttacaacgtagaggaggaggaggatgcccagccgattcgctttagcccgcctggtagcccttccatggtggtgcacaggcgcgtgccaagcgcggcgaccactccgcctctgccgtcccacctgaccgcagaggagacccccctcttcctggccgaaccagccctccccaagggcttgccccctcctctccagcagcagcagcaaccccctccacagcagaaatcgctgatggaccagctccagggagtggtcagcaacttcagtaccgcgatcccggattttcacgcggtgctggcaggccccggtggtcccgggaacgggctgcggtccctgtacccgcccccgccacctccgcagcacctgcagatgctgccgctgcagctgagcacctttggggaggagctggtctccccgcccgcggacgacgacgacgacagcgagaggtttaagctcctccaggagtacgtgtatgagcacgagcgggaagggaacacggaagaagacgaactggaagaggaggaggaggacctgcaggcggccagcaaactgaccccggatgattcgcctgcgctgacgcctccgtcgcctttccgcgactcggtggcctcgggcagctcggtgcccagctcccccgtgtccgagtcggtgctctgcacccctcccaacgtatcctacgcctctgtcattctgcgggactacaagcaaagctcttccaccctgtaagggggaagggtccacatagaaaagcaagacaagccagagatctcccacacctccagagatgtgcaaacagctgggaggaaaagcctgggagtggggggcctcgtcgggaggacaggagaccgctgctgctgctgccgctactgctgctgctgccttaagtaggaagagagggaaggacaccaagcaaaaaatgttccaggccaggattcggattcttgaattactcgaagccttctctgggaagaaagggaattctgacaaagcacaattccatatggtatgtaacttttatcacaaatcaaatagtgacatcacaaacataatgtcctcttttgcacaattgtgcatagatatatatatgcccacacacactgggccatgcttgccaaggaacagcccacgtggacatgccagtcggatcatgagttcacctgatggcattcggagtgagctggtggagccagacagagcaggtgcggggaagggaagggcccaggccagacccatcccaaacggatgatgggatgatgggacagcagctccttgctcagaagcccttctccccgctgggctgacagactcctcatcttcaggagactcaggaatggagcggcacaggggtctctcttcatccactgcaacccatccagtgccagctttgagattgcacttgaagaaaggtgcatggaccccctgctgctctgcagattccctttatttaggaaaacaggaataagagcaaaattatcaccaaaaagtgcttcatcaggcgtgctacaggaggaaggagctagaaatagaacaatccatcagcatgagactttgaaaaaaaaacacatgatcagcttctcatgttccatattcacttattggcgatttggggaaaaggccggaacaagagattgttacgagagtggcagaaacccttttgtagattgacttgtgtttgtgccaagcgggctttccattgaccttcagttaaagaacaaaccatgtgacaaaattgttaccttccacttactgtagcaaataatacctacaagttgaacttctaagatgcgtatatgtacaatttggtgccattatttctcctacgtattagagaaacaaatccatctttgaatctaatggtgtactcatagcaactattactggtttaaatgacaaataattctatcctattgtcactgaagtccttgtaactagcgagtgaatgtgttcctgtgtccttgtatatgtgcgatcgtaaaatttgtgcaatgtaatgtcaaattgactggtcaatgtcaacctagtagtcaatctaactgcaattagaaattgtcttttgaatatactatatatattttttatgttccaataatgttttgtacatcattgtcatcaatatctacagaagctctttgacggtttgaatactatggctcaaggttttcatatgcagctcggatggacatttttcttctaagatggaacttatttttcagatattttctgatgtggagatatgttattaatgaagtggtttgaaaatttgttatattaaaagtgcacaaaaactgagagtgaaaataaaaggtacattttataagcttgcacacattattaacacataagattgaacaaagcatttagattattccaggttatatcatttttttaaagattttccacagctacttgagtgtctaacatacagtaacatctaactcagctaataatttgtaaaatctttatcaatcacattttgccttcttttaatttttatgttcatggacttttattcctgtgtcttggctgtcataactttttatttctgctatttgctgttgtgtaatatccatggacatgtaatccacttactccatctttacaatccctttttaccaccaataaaaggatttttcttgctgttttgatttcttctattatttgtggaatgaattataccccccttaaatatctttgtttatgccttatgttcagtcatattttaatatgcttccttcatattgaagctgctgatttctcagccaaaaatcatcttagaatctttaaatatccattgcatcatttgttcagaatttaacatccattccaatgttggaggcttgtattacttatatttcatcatattctattgccaagtttagtcagttccacaccaagaatgaactgcatttcctttaaaaattattttaaaacacctttattgaaaagatctcatgactgagatgtggactttggttccatgttttcattgtaagaaagcagagagcggaaaatcaatggctccagtgattaatagatgggtttttagtaattgacaaattcatgagggaaagcatatgatctctttattagtgaatcatgcttattttttactcttaatgccactaatatacatccctaatatcacagggcttgtgcattcagatttttaaaaaattaggatagataaggaaacaacttatattcaagtgtaagatgatatcaggttggtctaagacttttggtgaacacgttcattcaactgtgatcactttattactctgaatgcctactattatcctgattatggggtctcctgaataaatagagtattagtccttatgtcatcattgttcaaaattggagatgtacacatacataccctataccaagagggccgaaactcttcaccttgatgtatgttctgatacaagttgttcagcttcttgtaaatgtgttttccttcggcttgttactgccttttgtcaaataatcttgacaatgctgtataataaatattttctatttatt

SEQ ID NO: 137523 - DNA, 6836 bp, Homo sapiens
  Payload ID: 6925
  Gene Symbol: GRM1
  Gene Name: glutamate receptor, metabotropic 1
  Uniprot ID: Q13255
  ENST ID: ENST00000492807
  CDS Start-End: 368-3088
caggtactcaggtatgtctcaagtccatgtcctccaaacagactcagcatctagctcaccgctgccaacacgacttccactgtactcttgatcaatttaccttgatgcactaccggtgaagaacggggactcgaattcccttacaaacgcctccagcttgtagaggcggtcgtggaggacccagaggaggagacgaaggggaaggaggcggtggtggaggaggcaaaggccttggacgaccattgttggcgaggggcaccactccgggagaggcggcgctgggcgtcttgggggtgcgcgccgggagcctgcagcgggaccagcgtgggaacgcggctggcaggctgtggacctcgtcctcaccaccatggtcgggctccttttgttttttttcccagcgatctttttggaggtgtcccttctccccagaagccccggcaggaaagtgttgctggcaggagcgtcgtctcagcgctcggtggccagaatggacggagatgtcatcattggagccctcttctcagtccatcaccagcctccggccgagaaagtgcccgagaggaagtgtggggagatcagggagcagtatggcatccagagggtggaggccatgttccacacgttggataagatcaacgcggacccggtcctcctgcccaacatcaccctgggcagtgagatccgggactcctgctggcactcttccgtggctctggaacagagcattgagttcattagggactctctgatttccattcgagatgagaaggatgggatcaaccggtgtctgcctgacggccagtccctccccccaggcaggactaagaagcccattgcgggagtgatcggtcccggctccagctctgtagccattcaagtgcagaacctgctccagctcttcgacatcccccagatcgcttattcagccacaagcatcgacctgagtgacaaaactttgtacaaatacttcctgagggttgtcccttctgacactttgcaggcaagggccatgcttgacatagtcaaacgttacaattggacctatgtctctgcagtccacacggaagggaattatggggagagcggaatggacgctttcaaagagctggctgcccaggaaggcctctgtatcgcccattctgacaaaatctacagcaacgctggggagaagagctttgaccgactcttgcgcaaactccgagagaggcttcccaaggctagagtggtggtctgcttctgtgaaggcatgacagtgcgaggactcctgagcgccatgcggcgccttggcgtcgtgggcgagttctcactcattggaagtgatggatgggcagacagagatgaagtcattgaaggttatgaggtggaagccaacgggggaatcacgataaagctgcagtctccagaggtcaggtcatttgatgattatttcctgaaactgaggctggacactaacacgaggaatccctggttccctgagttctggcaacatcggttccagtgccgccttccaggacaccttctggaaaatcccaactttaaacgaatctgcacaggcaatgaaagcttagaagaaaactatgtccaggacagtaagatggggtttgtcatcaatgccatctatgccatggcacatgggctgcagaacatgcaccatgccctctgccctggccacgtgggcctctgcgatgccatgaagcccatcgacggcagcaagctgctggacttcctcatcaagtcctcattcattggagtatctggagaggaggtgtggtttgatgagaaaggagacgctcctggaaggtatgatatcatgaatctgcagtacactgaagctaatcgctatgactatgtgcacgttggaacctggcatgaaggagtgctgaacattgatgattacaaaatccagatgaacaagagtggagtggtgcggtctgtgtgcagtgagccttgcttaaagggccagattaaggttatacggaaaggagaagtgagctgctgctggatttgcacggcctgcaaagagaatgaatatgtgcaagatgagttcacctgcaaagcttgtgacttgggatggtggcccaatgcagatctaacaggctgtgagcccattcctgtgcgctatcttgagtggagcaacatcgaatccattatagccatcgccttttcatgcctgggaatccttgttaccttgtttgtcaccctaatctttgtactgtaccgggacacaccagtggtcaaatcctccagtcgggagctctgctacatcatcctagctggcatcttccttggttatgtgtgcccattcactctcattgccaaacctactaccacctcctgctacctccagcgcctcttggttggcctctcctctgcgatgtgctactctgctttagtgactaaaaccaatcgtattgcacgcatcctggctggcagcaagaagaagatctgcacccggaagcccaggttcatgagtgcctgggctcaggtgatcattgcctcaattctgattagtgtgcaactaaccctggtggtaaccctgatcatcatggaaccccctatgcccattctgtcctacccaagtatcaaggaagtctaccttatctgcaataccagcaacctgggtgtggtggcccctttgggctacaatggactcctcatcatgagctgtacctactatgccttcaagacccgcaacgtgcccgccaacttcaacgaggccaaatatatcgcgttcaccatgtacaccacctgtatcatctggctagcttttgtgcccatttactttgggagcaactacaagatcatcacaacttgctttgcagtgagtctcagtgtaacagtggctctggggtgcatgttcactcccaagatgtacatcattattgccaagcctgagaggaatgtccgcagtgccttcaccacctctgatgttgtccgcatgcatgttggcgatggcaagctgccctgccgctccaacactttcctcaacatcttccgaagaaagaaggcaggggcagggaatgccaagaagaggcagccagaattctcgcccaccagccaatgtccgtcggcacatgtgcagctttgaaaacccccacactgcagtgaatgtttctaatggcaagtctgtgtcatggtctgaaccaggtggaggacaggtgcccaagggacagcatatgtggcaccgcctctctgtgcacgtgaagaccaatgagacggcctgcaaccaaacagccgtcatcaagcccctcactaaaagttaccaaggctctggcaagagcctgaccttttcagataccagcaccaagaccctttacaacgtagaggaggaggaggatgcccagccgattcgctttagcccgcctggtagcccttccatggtggtgcacaggcgcgtgccaagcgcggcgaccactccgcctctgccgtcccacctgaccgcagaggagacccccctcttcctggccgaaccagccctccccaagggcttgccccctcctctccagcagcagcagcaaccccctccacagcagaaatcgctgatggaccagctccagggagtggtcagcaacttcagtaccgcgatcccggattttcacgcggtgctggcaggccccggtggtcccgggaacgggctgcggtccctgtacccgcccccgccacctccgcagcacctgcagatgctgccgctgcagctgagcacctttggggaggagctggtctccccgcccgcggacgacgacgacgacagcgagaggtttaagctcctccaggagtacgtgtatgagcacgagcgggaagggaacacggaagaagacgaactggaagaggaggaggaggacctgcaggcggccagcaaactgaccccggatgattcgcctgcgctgacgcctccgtcgcctttccgcgactcggtggcctcgggcagctcggtgcccagctcccccgtgtccgagtcggtgctctgcacccctcccaacgtatcctacgcctctgtcattctgcgggactacaagcaaagctcttccaccctgtaagggggaagggtccacatagaaaagcaagacaagccagagatctcccacacctccagagatgtgcaaacagctgggaggaaaagcctgggagtggggggcctcgtcgggaggacaggagaccgctgctgctgctgccgctactgctgctgctgccttaagtaggaagagagggaaggacaccaagcaaaaaatgttccaggccaggattcggattcttgaattactcgaagccttctctgggaagaaagggaattctgacaaagcacaattccatatggtatgtaacttttatcacaaatcaaatagtgacatcacaaacataatgtcctcttttgcacaattgtgcatagatatatatatgcccacacacactgggccatgcttgccaaggaacagcccacgtggacatgccagtcggatcatgagttcacctgatggcattcggagtgagctggtggagccagacagagcaggtgcggggaagggaagggcccaggccagacccatcccaaacggatgatgggatgatgggacagcagctccttgctcagaagcccttctccccgctgggctgacagactcctcatcttcaggagactcaggaatggagcggcacaggggtctctcttcatccactgcaacccatccagtgccagctttgagattgcacttgaagaaaggtgcatggaccccctgctgctctgcagattccctttatttaggaaaacaggaataagagcaaaattatcaccaaaaagtgcttcatcaggcgtgctacaggaggaaggagctagaaatagaacaatccatcagcatgagactttgaaaaaaaaacacatgatcagcttctcatgttccatattcacttattggcgatttggggaaaaggccggaacaagagattgttacgagagtggcagaaacccttttgtagattgacttgtgtttgtgccaagcgggctttccattgaccttcagttaaagaacaaaccatgtgacaaaattgttaccttccacttactgtagcaaataatacctacaagttgaacttctaagatgcgtatatgtacaatttggtgccattatttctcctacgtattagagaaacaaatccatctttgaatctaatggtgtactcatagcaactattactggtttaaatgacaaataattctatcctattgtcactgaagtccttgtaactagcgagtgaatgtgttcctgtgtccttgtatatgtgcgatcgtaaaatttgtgcaatgtaatgtcaaattgactggtcaatgtcaacctagtagtcaatctaactgcaattagaaattgtcttttgaatatactatatatattttttatgttccaataatgttttgtacatcattgtcatcaatatctacagaagctctttgacggtttgaatactatggctcaaggttttcatatgcagctcggatggacatttttcttctaagatggaacttatttttcagatattttctgatgtggagatatgttattaatgaagtggtttgaaaatttgttatattaaaagtgcacaaaaactgagagtgaaaataaaaggtacattttataagcttgcacacattattaacacataagattgaacaaagcatttagattattccaggttatatcatttttttaaagattttccacagctacttgagtgtctaacatacagtaacatctaactcagctaataatttgtaaaatctttatcaatcacattttgccttcttttaatttttatgttcatggacttttattcctgtgtcttggctgtcataactttttatttctgctatttgctgttgtgtaatatccatggacatgtaatccacttactccatctttacaatccctttttaccaccaataaaaggatttttcttgctgttttgatttcttctattatttgtggaatgaattataccccccttaaatatctttgtttatgccttatgttcagtcatattttaatatgcttccttcatattgaagctgctgatttctcagccaaaaatcatcttagaatctttaaatatccattgcatcatttgttcagaatttaacatccattccaatgttggaggcttgtattacttatatttcatcatattctattgccaagtttagtcagttccacaccaagaatgaactgcatttcctttaaaaattattttaaaacacctttattgaaaagatctcatgactgagatgtggactttggttccatgttttcattgtaagaaagcagagagcggaaaatcaatggctccagtgattaatagatgggtttttagtaattgacaaattcatgagggaaagcatatgatctctttattagtgaatcatgcttattttttactcttaatgccactaatatacatccctaatatcacagggcttgtgcattcagatttttaaaaaattaggatagataaggaaacaacttatattcaagtgtaagatgatatcaggttggtctaagacttttggtgaacacgttcattcaactgtgatcactttattactctgaatgcctactattatcctgattatggggtctcctgaataaatagagtattagtccttatgtcatcattgttcaaaattggagatgtacacatacataccctataccaagagggccgaaactcttcaccttgatgtatgttctgatacaagttgttcagcttcttgtaaatgtgttttccttcggcttgttactgccttttgtcaaataatcttgacaatgctgtataataaatattttctattt

SEQ ID NO: 137524 - DNA, 3756 bp, Homo sapiens
  Payload ID: 6925
  Gene Symbol: GRM1
  Gene Name: glutamate receptor, metabotropic 1
  Uniprot ID: Q13255
  ENST ID: ENST00000507907
  CDS Start-End: 33-2753
gctggcaggctgtggacctcgtcctcaccaccatggtcgggctccttttgttttttttcccagcgatctttttggaggtgtcccttctccccagaagccccggcaggaaagtgttgctggcaggagcgtcgtctcagcgctcggtggccagaatggacggagatgtcatcattggagccctcttctcagtccatcaccagcctccggccgagaaagtgcccgagaggaagtgtggggagatcagggagcagtatggcatccagagggtggaggccatgttccacacgttggataagatcaacgcggacccggtcctcctgcccaacatcaccctgggcagtgagatccgggactcctgctggcactcttccgtggctctggaacagagcattgagttcattagggactctctgatttccattcgagatgagaaggatgggatcaaccggtgtctgcctgacggccagtccctccccccaggcaggactaagaagcccattgcgggagtgatcggtcccggctccagctctgtagccattcaagtgcagaacctgctccagctcttcgacatcccccagatcgcttattcagccacaagcatcgacctgagtgacaaaactttgtacaaatacttcctgagggttgtcccttctgacactttgcaggcaagggccatgcttgacatagtcaaacgttacaattggacctatgtctctgcagtccacacggaagggaattatggggagagcggaatggacgctttcaaagagctggctgcccaggaaggcctctgtatcgcccattctgacaaaatctacagcaacgctggggagaagagctttgaccgactcttgcgcaaactccgagagaggcttcccaaggctagagtggtggtctgcttctgtgaaggcatgacagtgcgaggactcctgagcgccatgcggcgccttggcgtcgtgggcgagttctcactcattggaagtgatggatgggcagacagagatgaagtcattgaaggttatgaggtggaagccaacgggggaatcacgataaagctgcagtctccagaggtcaggtcatttgatgattatttcctgaaactgaggctggacactaacacgaggaatccctggttccctgagttctggcaacatcggttccagtgccgccttccaggacaccttctggaaaatcccaactttaaacgaatctgcacaggcaatgaaagcttagaagaaaactatgtccaggacagtaagatggggtttgtcatcaatgccatctatgccatggcacatgggctgcagaacatgcaccatgccctctgccctggccacgtgggcctctgcgatgccatgaagcccatcgacggcagcaagctgctggacttcctcatcaagtcctcattcattggagtatctggagaggaggtgtggtttgatgagaaaggagacgctcctggaaggtatgatatcatgaatctgcagtacactgaagctaatcgctatgactatgtgcacgttggaacctggcatgaaggagtgctgaacattgatgattacaaaatccagatgaacaagagtggagtggtgcggtctgtgtgcagtgagccttgcttaaagggccagattaaggttatacggaaaggagaagtgagctgctgctggatttgcacggcctgcaaagagaatgaatatgtgcaagatgagttcacctgcaaagcttgtgacttgggatggtggcccaatgcagatctaacaggctgtgagcccattcctgtgcgctatcttgagtggagcaacatcgaatccattatagccatcgccttttcatgcctgggaatccttgttaccttgtttgtcaccctaatctttgtactgtaccgggacacaccagtggtcaaatcctccagtcgggagctctgctacatcatcctagctggcatcttccttggttatgtgtgcccattcactctcattgccaaacctactaccacctcctgctacctccagcgcctcttggttggcctctcctctgcgatgtgctactctgctttagtgactaaaaccaatcgtattgcacgcatcctggctggcagcaagaagaagatctgcacccggaagcccaggttcatgagtgcctgggctcaggtgatcattgcctcaattctgattagtgtgcaactaaccctggtggtaaccctgatcatcatggaaccccctatgcccattctgtcctacccaagtatcaaggaagtctaccttatctgcaataccagcaacctgggtgtggtggcccctttgggctacaatggactcctcatcatgagctgtacctactatgccttcaagacccgcaacgtgcccgccaacttcaacgaggccaaatatatcgcgttcaccatgtacaccacctgtatcatctggctagcttttgtgcccatttactttgggagcaactacaagatcatcacaacttgctttgcagtgagtctcagtgtaacagtggctctggggtgcatgttcactcccaagatgtacatcattattgccaagcctgagaggaatgtccgcagtgccttcaccacctctgatgttgtccgcatgcatgttggcgatggcaagctgccctgccgctccaacactttcctcaacatcttccgaagaaagaaggcaggggcagggaatgccaagaagaggcagccagaattctcgcccaccagccaatgtccgtcggcacatgtgcagctttgaaaacccccacactgcagtgaatgtgtggaggacaggtgcccaagggacagcatatgtggcaccgcctctctgtgcacgtgaagaccaatgagacggcctgcaaccaaacagccgtcatcaagcccctcactaaaagttaccaaggctctggcaagagcctgaccttttcagataccagcaccaagaccctttacaacgtagaggaggaggaggatgcccagccgattcgctttagcccgcctggtagcccttccatggtggtgcacaggcgcgtgccaagcgcggcgaccactccgcctctgccgtcccacctgaccgcagaggagacccccctcttcctggccgaaccagccctccccaagggcttgccccctcctctccagcagcagcagcaaccccctccacagcagaaatcgctgatggaccagctccagggagtggtcagcaacttcagtaccgcgatcccggattttcacgcggtgctggcaggccccggtggtcccgggaacgggctgcggtccctgtacccgcccccgccacctccgcagcacctgcagatgctgccgctgcagctgagcacctttggggaggagctggtctccccgcccgcggacgacgacgacgacagcgagaggtttaagctcctccaggagtacgtgtatgagcacgagcgggaagggaacacggaagaagacgaactggaagaggaggaggaggacctgcaggcggccagcaaactgaccccggatgattcgcctgcgctgacgcctccgtcgcctttccgcgactcggtggcctcgggcagctcggtgcccagctcccccgtgtccgagtcggtgctctgcacccctcccaacgtatcctacgcctctgtcattctgcgggactacaagcaaagctcttccaccctgtaagggggaagggtccacatagaaaagcaagacaagccagagatctcccacacctccagagatgtgcaaacagctgggaggaaaagcctggg

SEQ ID NO: 137525 - DNA, 2993 bp, Homo sapiens
  Payload ID: 6926
  Gene Symbol: GRM2
  Gene Name: glutamate receptor, metabotropic 2
  ENST ID: ENST00000296479
  CDS Start-End: 217-1524
agcgagcgagcgagcgggagccggagcctcgcgccccccgctccactccgattctctccgcgccagagccagcgcgccaggagctgggtcccttcgcatctctcttcttgtctgtcctttcctggtccctgtttcctcctctctttgccttcgctgcttctaatctcatcccctggagacccaggtctgcgggacccatccatcccctttggggccatgggatcgctgcttgcgctcctggcactgctgctgctgtggggtgctgtggctgagggcccagccaagaaggtgctgaccctggagggagacttggtgctgggtgggctgttcccagtgcaccagaagggcggcccagcagaggactgtggtcctgtcaatgagcaccgtggcatccagcgcctggaggccatgctttttgcactggaccgcatcaaccgtgacccgcacctgctgcctggcgtgcgcctgggtgcacacatcctcgacagttgctccaaggacacacatgcgctggagcaggcactggactttgtgcgtgcctcactcagccgtggtgctgatggctcacgccacatctgccccgacggctcttatgcgacccatggtgatgctcccactgccatcactggtgttattggcggttcctacagtgatgtctccatccaggtggccaacctcttgaggctatttcagatcccacagattagctacgcctctaccagtgccaagctgagtgacaagtcccgctatgactactttgcccgcacagtgcctcctgacttcttccaagccaaggccatggctgagattctccgcttcttcaactggacctatgtgtccactgtggcgtctgagggcgactatggcgagacaggcattgaggcctttgagctagaggctcgtgcccgcaacatctgtgtggccacctcggagaaagtgggccgtgccatgagccgcgcggcctttgagggtgtggtgcgagccctgctgcagaagcccagtgcccgcgtggctgtcctgttcacccgttctgaggatgcccgggagctgcttgctgccagccagcgcctcaatgccagcttcacctgggtggccagtgatggttggggggccctggagagtgtggtggcaggcagtgagggggctgctgagggtgctatcaccatcgagctggcctcctaccccatcagtgactttgcctcctacttccagagcctggacccttggaacaacagccggaacccctggttccgtgaattctgggagcagaggttccgctgcagcttccggcagcgagactgcgcagcccactctctccgggctgtgccctttgagcaggagtccaagatcatgtttgtggtcaatgcagtgtacgccatggcccatgcgctccacaacatgcaccgtgccctctgccccaacaccacccggctctgtgacgcgatgcggccagttaacgggcgccgcctctacaaggactttgtgctcaacgtcaagtttgatggtgacctgaaagtctcctgaaatcaaaagttattttaataagagtgccagctttaagagaaatgactgctgcagatcatcactatgcttcaggaagaatcaccgtgggaacagtgggagacaaagcttggaagccctggcccagggttaagatgaagaccccctttcgcccagctgacacccacaatgaggtccgctttgaccgctttggtgatggtattggccgctacaacatcttcacctatctgcgtgcaggcagtgggcgctatcgctaccagaaggtgggctactgggcagaaggcttgactctggacaccagcctcatcccatgggcctcaccctcagccggccccctgcccgcctctcgctgcagtgagccctgcctccagaatgaggtgaagagtgtgcagccgggcgaagtctgctgctggctctgcattccgtgccagccctatgagtaccgattggacgaattcacttgcgctgattgtggcctgggctactggcccaatgccagcctgactggctgcttcgaactgccccaggagtacatccgctggggcgatgcctgggctgtgggacctgtcaccatcgcctgcctcggtgccctggccaccctctttgtgctgggtgtctttgtgcggcacaatgccacaccagtggtcaaggcctcaggtcgggagctctgctacatcctgctgggtggtgtcttcctctgctactgcatgaccttcatcttcattgccaagccatccacggcagtgtgtaccttacggcgtcttggtttgggcactgccttctctgtctgctactcagccctgctcaccaagaccaaccgcattgcacgcatcttcggtggggcccgggagggtgcccagcggccacgcttcatcagtcctgcctcacaggtggccatctgcctggcacttatctcgggccagctgctcatcgtggtcgcctggctggtggtggaggcaccgggcacaggcaaggagacagcccccgaacggcgggaggtggtgacactgcgctgcaaccaccgcgatgcaagtatgttgggctcgctggcctacaatgtgctcctcatcgcgctctgcacgctttatgccttcaagactcgcaagtgccccgaaaacttcaacgaggccaagttcattggcttcaccatgtacaccacctgcatcatctggctggcattcctgcccatcttctatgtcacctccagtgactaccgggtacagaccaccaccatgtgcgtgtcagtcagcctcagcggctccgtggtgcttggctgcctctttgcgcccaagctgcacatcatcctcttccagccgcagaagaacgtggttagccaccgggcacccaccagccgctttggcagtgctgctgccagggccagctccagccttggccaagggtctggctcccagtttgtccccactgtttgcaatggccgtgaggtggtggactcgacaacgtcatcgctttga

SEQ ID NO: 137526 - DNA, 3151 bp, Homo sapiens
  Payload ID: 6926
  Gene Symbol: GRM2
  Gene Name: glutamate receptor, metabotropic 2
  Uniprot ID: Q14416
  ENST ID: ENST00000395052
  CDS Start-End: 235-2853
gcgcagagccagcgagccagcgagcgagcgagcgggagccggagcctcgcgccccccgctccactccgattctctccgcgccagagccagcgcgccaggagctgggtcccttcgcatctctcttcttgtctgtcctttcctggtccctgtttcctcctctctttgccttcgctgcttctaatctcatcccctggagacccaggtctgcgggacccatccatcccctttggggccatgggatcgctgcttgcgctcctggcactgctgctgctgtggggtgctgtggctgagggcccagccaagaaggtgctgaccctggagggagacttggtgctgggtgggctgttcccagtgcaccagaagggcggcccagcagaggactgtggtcctgtcaatgagcaccgtggcatccagcgcctggaggccatgctttttgcactggaccgcatcaaccgtgacccgcacctgctgcctggcgtgcgcctgggtgcacacatcctcgacagttgctccaaggacacacatgcgctggagcaggcactggactttgtgcgtgcctcactcagccgtggtgctgatggctcacgccacatctgccccgacggctcttatgcgacccatggtgatgctcccactgccatcactggtgttattggcggttcctacagtgatgtctccatccaggtggccaacctcttgaggctatttcagatcccacagattagctacgcctctaccagtgccaagctgagtgacaagtcccgctatgactactttgcccgcacagtgcctcctgacttcttccaagccaaggccatggctgagattctccgcttcttcaactggacctatgtgtccactgtggcgtctgagggcgactatggcgagacaggcattgaggcctttgagctagaggctcgtgcccgcaacatctgtgtggccacctcggagaaagtgggccgtgccatgagccgcgcggcctttgagggtgtggtgcgagccctgctgcagaagcccagtgcccgcgtggctgtcctgttcacccgttctgaggatgcccgggagctgcttgctgccagccagcgcctcaatgccagcttcacctgggtggccagtgatggttggggggccctggagagtgtggtggcaggcagtgagggggctgctgagggtgctatcaccatcgagctggcctcctaccccatcagtgactttgcctcctacttccagagcctggacccttggaacaacagccggaacccctggttccgtgaattctgggagcagaggttccgctgcagcttccggcagcgagactgcgcagcccactctctccgggctgtgccctttgagcaggagtccaagatcatgtttgtggtcaatgcagtgtacgccatggcccatgcgctccacaacatgcaccgtgccctctgccccaacaccacccggctctgtgacgcgatgcggccagttaacgggcgccgcctctacaaggactttgtgctcaacgtcaagtttgatgccccctttcgcccagctgacacccacaatgaggtccgctttgaccgctttggtgatggtattggccgctacaacatcttcacctatctgcgtgcaggcagtgggcgctatcgctaccagaaggtgggctactgggcagaaggcttgactctggacaccagcctcatcccatgggcctcaccctcagccggccccctgcccgcctctcgctgcagtgagccctgcctccagaatgaggtgaagagtgtgcagccgggcgaagtctgctgctggctctgcattccgtgccagccctatgagtaccgattggacgaattcacttgcgctgattgtggcctgggctactggcccaatgccagcctgactggctgcttcgaactgccccaggagtacatccgctggggcgatgcctgggctgtgggacctgtcaccatcgcctgcctcggtgccctggccaccctctttgtgctgggtgtctttgtgcggcacaatgccacaccagtggtcaaggcctcaggtcgggagctctgctacatcctgctgggtggtgtcttcctctgctactgcatgaccttcatcttcattgccaagccatccacggcagtgtgtaccttacggcgtcttggtttgggcactgccttctctgtctgctactcagccctgctcaccaagaccaaccgcattgcacgcatcttcggtggggcccgggagggtgcccagcggccacgcttcatcagtcctgcctcacaggtggccatctgcctggcacttatctcgggccagctgctcatcgtggtcgcctggctggtggtggaggcaccgggcacaggcaaggagacagcccccgaacggcgggaggtggtgacactgcgctgcaaccaccgcgatgcaagtatgttgggctcgctggcctacaatgtgctcctcatcgcgctctgcacgctttatgccttcaagactcgcaagtgccccgaaaacttcaacgaggccaagttcattggcttcaccatgtacaccacctgcatcatctggctggcattcctgcccatcttctatgtcacctccagtgactaccgggtacagaccaccaccatgtgcgtgtcagtcagcctcagcggctccgtggtgcttggctgcctctttgcgcccaagctgcacatcatcctcttccagccgcagaagaacgtggttagccaccgggcacccaccagccgctttggcagtgctgctgccagggccagctccagccttggccaagggtctggctcccagtttgtccccactgtttgcaatggccgtgaggtggtggactcgacaacgtcatcgctttgaagaccccatactcccgccctgacacagctgctcctgggaacctagtgcagacccacgtccagggccaggaggaagttggctggagcactgcaataatttattacccaccctatgtctgcccccaaagtcacttacccacctccttaccccagctcttcagactcagaagtcaggagccttggccaggagcctctgcagtggccactaactgcccttgtagctgtgtttcctcctggccaggcccagggctcagagaggagcaagccagggttcactctgccctggacccgggtggctg

SEQ ID NO: 137527 - DNA, 590 bp, Homo sapiens
  Payload ID: 6926
  Gene Symbol: GRM2
  Gene Name: glutamate receptor, metabotropic 2
  ENST ID: ENST00000419928
  CDS Start-End: 381-590
ctttctgtctgtgcctccgtctttgtctcaacctctcaggcttgctcgctccctgcccagattttgtggcccaggctcctggctgtctgactccgggtttctgtccccttcctgcctctgagcttccgtctgggcctcccctctgggagacttgcgacttgaccagttttggcttcagcccccatctgggtccctgtctccatctgtgctggtcttcctccctgcttctccctcgcttgcctgggagctgggtcccttcgcatctctcttcttgtctgtcctttcctggtccctgtttcctcctctctttgccttcgctgcttctaatctcatcccctggagacccaggtctgcgggacccatccatcccctttggggccatgggatcgctgcttgcgctcctggcactgctgctgctgtggggtgctgtggctgagggcccagccaagaaggtgctgaccctggagggagacttggtgctgggtgggctgttcccagtgcaccagaagggcggcccagcagaggactgtggtcctgtcaatgagcaccgtggcatccagcgcctggaggccatgctttttgcactggac

SEQ ID NO: 137528 - DNA, 2064 bp, Homo sapiens
  Payload ID: 6926
  Gene Symbol: GRM2
  Gene Name: glutamate receptor, metabotropic 2
  ENST ID: ENST00000442933
  CDS Start-End: 140-1924
caggagctgggtcccttcgcatctctcttcttgtctgtcctttcctggtccctgtttcctcctctctttgccttcgctgcttctaatctcatcccctggagacccaggtctgcgggacccatccatcccctttggggccatgggatcgctgcttgcgctcctggcactgctgctgctgtggggtgctgtggctgagggcccagccaagaaggtgctgaccctggagggagacttggtgctgggtgggctgttcccagtgcaccagaagggcggcccagcagaggactgtggtcctgtcaatgagcaccgtggcatccagcgcctggaggccatgctttttgcactggaccgcatcaaccgtgacccgcacctgctgcctggcgtgcgcctgggtgcacacatcctcgacagttgctccaaggacacacatgcgctggagcaggcactggactttgtgcgtgcctcactcagccgtggtgctgatggctcacgccacatctgccccgacggctcttatgcgacccatggtgatgctcccactgccatcactggtgttattggcggttcctacagtgatgtctccatccaggtggccaacctcttgaggctatttcagatcccacagattagctacgcctctaccagtgccaagctgagtgacaagtcccgctatgactactttgcccgcacagtgcctcctgacttcttccaagccaaggccatggctgagattctccgcttcttcaactggacctatgtgtccactgtggcgtctgagggcgactatggcgagacaggcattgaggcctttgagctagaggctcgtgcccgcaacatctgtgtggccacctcggagaaagtgggccgtgccatgagccgcgcggcctttgagggtgtggtgcgagccctgctgcagaagcccagtgcccgcgtggctgtcctgttcacccgttctgaggatgcccgggagctgcttgctgccagccagcgcctcaatgccagcttcacctgggtggccagtgatggttggggggccctggagagtgtggtggcaggcagtgagggggctgctgagggtgctatcaccatcgagctggcctcctaccccatcagtgactttgcctcctacttccagagcctggacccttggaacaacagccggaacccctggttccgtgaattctgggagcagaggttccgctgcagcttccggcagcgagactgcgcagcccactctctccgggctgtgccctttgagcaggagtccaagatcatgtttgtggtcaatgcagtgtacgccatggcccatgcgctccacaacatgcaccgtgccctctgccccaacaccacccggctctgtgacgcgatgcggccagttaacgggcgccgcctctacaaggactttgtgctcaacgtcaagtttgatgccccctttcgcccagctgacacccacaatgaggtccgctttgaccgctttggtgatggtattggccgctacaacatcttcacctatctgcgtgcaggcagtgggcgctatcgctaccagaagactcgcaagtgccccgaaaacttcaacgaggccaagttcattggcttcaccatgtacaccacctgcatcatctggctggcattcctgcccatcttctatgtcacctccagtgactaccgggtacagaccaccaccatgtgcgtgtcagtcagcctcagcggctccgtggtgcttggctgcctctttgcgcccaagctgcacatcatcctcttccagccgcagaagaacgtggttagccaccgggcacccaccagccgctttggcagtgctgctgccagggccagctccagccttggccaagggtctggctcccagtttgtccccactgtttgcaatggccgtgaggtggtggactcgacaacgtcatcgctttgaagaccccatactcccgccctgacacagctgctcctgggaacctagtgcagacccacgtccagggccaggaggaagttggctggagcactgcaataatttattacccaccctatgtctgcccccaaagtcacttacccacc

SEQ ID NO: 137529 - DNA, 4268 bp, Homo sapiens
  Payload ID: 6927
  Gene Symbol: GRM3
  Gene Name: glutamate receptor, metabotropic 3
  Uniprot ID: Q14832
  ENST ID: ENST00000361669
  CDS Start-End: 1100-3739
gtgcagttgagtcgcgagtacggctgagctgcgtaccggcctccctggctctcacactccctctctgctcccgctctcctaatctcctctggcatgcggtcagccccctgcccagggaccacaggagagttcttgtaaggactgttagtccctgcttacctgaaagccaagcgctctagcagagctttaaagttggagccgccaccctccctaccgccccatgccccttcaccccactccgaaattcaccgacctttgcatgcactgcctaaggatttcagagtgaggcaaagcagtcggcaaatctaccctggcttttcgtataaaaatcctctcgtctaggtaccctggctcactgaagactctgcagatatacccttataagagggagggtgggggagggaaaagaacgagagagggaggaaagaatgaaaaggagaggatgccaggaggtccgtgcttctgccaagagtcccaattagatgcgacggcttcagcctggtcaaggtgaaggaaagttgcttccgcgcctaggaagtgggtttgcctgataagagaaggaggaggggactcggctgggaagagctcccctcccctccgcggaagaccactgggtcccctctttccccaacctcctccctctcttctactccacccctccgttttcccactccccactgactcggatgcctggatgttctgccaccgggcagtggtccagcgtgcagccgggagggggcaggggcagggggcactgtgacaggaagctgcgcgcacaagttggccatttcgagggcaaaataagttctcccttggatttggaaaggacaaagccagtaagctacctcttttgtgtcggatgaggaggaccaaccatgagccagagcccgggtgcaggctcaccgccgccgctgccaccgcggtcagctccagttcctgccaggagttgtcggtgcgaggaattttgtgacaggctctgttagtctgttcctcccttatttgaaggacaggccaaagatccagtttggaaatgagagaggactagcatgacacattggctccaccattgatatctcccagaggtacagaaacaggattcatgaagatgttgacaagactgcaagttcttaccttagctttgttttcaaagggatttttactctctttaggggaccataactttctaaggagagagattaaaatagaaggtgaccttgttttagggggcctgtttcctattaacgaaaaaggcactggaactgaagaatgtgggcgaatcaatgaagaccgagggattcaacgcctggaagccatgttgtttgctattgatgaaatcaacaaagatgattacttgctaccaggagtgaagttgggtgttcacattttggatacatgttcaagggatacctatgcattggagcaatcactggagtttgtcagggcatctttgacaaaagtggatgaagctgagtatatgtgtcctgatggatcctatgccattcaagaaaacatcccacttctcattgcaggggtcattggtggctcttatagcagtgtttccatacaggtggcaaacctgctgcggctcttccagatccctcagatcagctacgcatccaccagcgccaaactcagtgataagtcgcgctatgattactttgccaggaccgtgccccccgacttctaccaggccaaagccatggctgagatcttgcgcttcttcaactggacctacgtgtccacagtagcctccgagggtgattacggggagacagggatcgaggccttcgagcaggaagcccgcctgcgcaacatctgcatcgctacggcggagaaggtgggccgctccaacatccgcaagtcctacgacagcgtgatccgagaactgttgcagaagcccaacgcgcgcgtcgtggtcctcttcatgcgcagcgacgactcgcgggagctcattgcagccgccagccgcgccaatgcctccttcacctgggtggccagcgacggctggggcgcgcaggagagcatcatcaagggcagcgagcatgtggcctacggcgccatcaccctggagctggcctcccagcctgtccgccagttcgaccgctacttccagagcctcaacccctacaacaaccaccgcaacccctggttccgggacttctgggagcaaaagtttcagtgcagcctccagaacaaacgcaaccacaggcgcgtctgcgacaagcacctggccatcgacagcagcaactacgagcaagagtccaagatcatgtttgtggtgaacgcggtgtatgccatggcccacgctttgcacaaaatgcagcgcaccctctgtcccaacactaccaagctttgtgatgctatgaagatcctggatgggaagaagttgtacaaggattacttgctgaaaatcaacttcacggctccattcaacccaaataaagatgcagatagcatagtcaagtttgacacttttggagatggaatggggcgatacaacgtgttcaatttccaaaatgtaggtggaaagtattcctacttgaaagttggtcactgggcagaaaccttatcgctagatgtcaactctatccactggtcccggaactcagtccccacttcccagtgcagcgacccctgtgcccccaatgaaatgaagaatatgcaaccaggggatgtctgctgctggatttgcatcccctgtgaaccctacgaatacctggctgatgagtttacctgtatggattgtgggtctggacagtggcccactgcagacctaactggatgctatgaccttcctgaggactacatcaggtgggaagacgcctgggccattggcccagtcaccattgcctgtctgggttttatgtgtacatgcatggttgtaactgtttttatcaagcacaacaacacacccttggtcaaagcatcgggccgagaactctgctacatcttattgtttggggttggcctgtcatactgcatgacattcttcttcattgccaagccatcaccagtcatctgtgcattgcgccgactcgggctggggagttccttcgctatctgttactcagccctgctgaccaagacaaactgcattgcccgcatcttcgatggggtcaagaatggcgctcagaggccaaaattcatcagccccagttctcaggttttcatctgcctgggtctgatcctggtgcaaattgtgatggtgtctgtgtggctcatcctggaggccccaggcaccaggaggtatacccttgcagagaagcgggaaacagtcatcctaaaatgcaatgtcaaagattccagcatgttgatctctcttacctacgatgtgatcctggtgatcttatgcactgtgtacgccttcaaaacgcggaagtgcccagaaaatttcaacgaagctaagttcataggttttaccatgtacaccacgtgcatcatctggttggccttcctccctatattttatgtgacatcaagtgactacagagtgcagacgacaaccatgtgcatctctgtcagcctgagtggctttgtggtcttgggctgtttgtttgcacccaaggttcacatcatcctgtttcaaccccagaagaatgttgtcacacacagactgcacctcaacaggttcagtgtcagtggaactgggaccacatactctcagtcctctgcaagcacgtatgtgccaacggtgtgcaatgggcgggaagtcctcgactccaccacctcatctctgtgattgtgaattgcagttcagttcttgtgtttttagactgttagacaaaagtgctcacgtgcagctccagaatatggaaacagagcaaaagaacaaccctagtacctttttttagaaacagtacgataaattatttttgaggactgtatatagtgatgtgctagaactttctaggctgagtctagtgcccctattattaacaattcccccagaacatggaaataaccattgtttacagagctgagcattggtgacagggtctgacatggtcagtctactaaaaaacaaaaaaaaaaaacaaaaaaaaaaaaacaaaagaaaaaaataaaaatacggtggcaatattatgtaaccttttttcctatgaagttttttgtaggtccttgttgtaactaatttaggatgagtttctatgttgtatattaaagttacattatgtgtaacagattgattttctcagcacaaaataaaaagcatctgtattaatgtaaagatactgagaataaaaccttcaaggttttccagcatggtg

SEQ ID NO: 137530 - DNA, 528 bp, Homo sapiens
  Payload ID: 6927
  Gene Symbol: GRM3
  Gene Name: glutamate receptor, metabotropic 3
  ENST ID: ENST00000421579
  CDS Start-End: 268-528
agttcctgccaggagttgtcggtgcgaggtaagggtcccagaggaggacgtgtccctctggagggcgcccagccagggcgcggaagctcgggtgccgcgtggggcaggcgcagccgggaaagttgaggaattttgtgacaggctctgttagtctgttcctcccttatttgaaggacaggccaaagatccagtttggaaatgagagaggactagcatgacacattggctccaccattgatatctcccagaggtacagaaacaggattcatgaagatgttgacaagactgcaagttcttaccttagctttgttttcaaagggatttttactctctttaggggaccataactttctaaggagagagattaaaatagaaggtgaccttgttttagggggcctgtttcctattaacgaaaaaggcactggaactgaagaatgtgggcgaatcaatgaagaccgagggattcaacgcctggaagccatgttgtttgctattgatgaaatcaacaaagatgattacttgctacca

SEQ ID NO: 137531 - DNA, 1811 bp, Homo sapiens
  Payload ID: 6927
  Gene Symbol: GRM3
  Gene Name: glutamate receptor, metabotropic 3
  Uniprot ID: Q14832
  ENST ID: ENST00000439827
  CDS Start-End: 172-1785
tccagttcctgccaggagttgtcggtgcgaggaattttgtgacaggctctgttagtctgttcctcccttatttgaaggacaggccaaagatccagtttggaaatgagagaggactagcatgacacattggctccaccattgatatctcccagaggtacagaaacaggattcatgaagatgttgacaagactgcaagttcttaccttagctttgttttcaaagggatttttactctctttaggggaccataactttctaaggagagagattaaaatagaaggtgaccttgttttagggggcctgtttcctattaacgaaaaaggcactggaactgaagaatgtgggcgaatcaatgaagaccgagggattcaacgcctggaagccatgttgtttgctattgatgaaatcaacaaagatgattacttgctaccaggagtgaagttgggtgttcacattttggatacatgttcaagggatacctatgcattggagcaatcactggagtttgtcagggcatctttgacaaaagtggatgaagctgagtatatgtgtcctgatggatcctatgccattcaagaaaacatcccacttctcattgcaggggtcattggtggctcttatagcagtgtttccatacaggtggcaaacctgctgcggctcttccagatccctcagatcagctacgcatccaccagcgccaaactcagtgataagtcgcgctatgattactttgccaggaccgtgccccccgacttctaccaggccaaagccatggctgagatcttgcgcttcttcaactggacctacgtgtccacagtagcctccgagggtgattacggggagacagggatcgaggccttcgagcaggaagcccgcctgcgcaacatctgcatcgctacggcggagaaggtgggccgctccaacatccgcaagtcctacgacagcgtgatccgagaactgttgcagaagcccaacgcgcgcgtcgtggtcctcttcatgcgcagcgacgactcgcgggagctcattgcagccgccagccgcgccaatgcctccttcacctgggtggccagcgacggctggggcgcgcaggagagcatcatcaagggcagcgagcatgtggcctacggcgccatcaccctggagctggcctcccagcctgtccgccagttcgaccgctacttccagagcctcaacccctacaacaaccaccgcaacccctggttccgggacttctgggagcaaaagtttcagtgcagcctccagaacaaacgcaaccacaggcgcgtctgcgacaagcacctggccatcgacagcagcaactacgagcaagagtccaagatcatgtttgtggtgaacgcggtgtatgccatggcccacgctttgcacaaaatgcagcgcaccctctgtcccaacactaccaagctttgtgatgctatgaagatcctggatgggaagaagttgtacaaggattacttgctgaaaatcaacttcacgggtgcagacgacaaccatgtgcatctctgtcagcctgagtggctttgtggtcttgggctgtttgtttgcacccaaggttcacatcatcctgtttcaaccccagaagaatgttgtcacacacagactgcacctcaacaggttcagtgtcagtggaactgggaccacatactctcagtcctctgcaagcacgtatgtgccaacggtgtgcaatgggcgggaagtcctcgactccaccacctcatctctgtgattgtgaattgcagttcagttcttgtgtttttagactgttagacaaaagtgctcacgtgcagctccag

SEQ ID NO: 137532 - DNA, 770 bp, Homo sapiens
  Payload ID: 6927
  Gene Symbol: GRM3
  Gene Name: glutamate receptor, metabotropic 3
  ENST ID: ENST00000454217
  CDS Start-End: 256-770
tctttccccaacctcctccctctcttctactccacccctccgttttcccactccccactgactcggatgcctggatgttctgccaccgggcagtggtccagcgtgcagccgggagggggcaggggcagggggcactgtgacaggaagctgcgcgcacaagttggccatttcgagggcaaaataagttctcccttggatttggaaaggacaaagccagtaagctacctcttttgtgtcggatgaggaggaccaaccatgagccagagcccgggtgcaggctcaccgccgccgctgccaccgcggtcagctccagttcctgccaggagttgtcggtgcgaggtggcaaacctgctgcggctcttccagatccctcagatcagctacgcatccaccagcgccaaactcagtgataagtcgcgctatgattactttgccaggaccgtgccccccgacttctaccaggccaaagccatggctgagatcttgcgcttcttcaactggacctacgtgtccacagtagcctccgagggtgattacggggagacagggatcgaggccttcgagcaggaagcccgcctgcgcaacatctgcatcgctacggcggagaaggtgggccgctccaacatccgcaagtcctacgacagcgtgatccgagaactgttgcagaagcccaacgcgcgcgtcgtggtcctcttcatgcgcagcgacgactcgcgggagctcattgcagccgccagccgcgccaatgcctccttcacctgggtggccag

SEQ ID NO: 137533 - DNA, 491 bp, Homo sapiens
  Payload ID: 6927
  Gene Symbol: GRM3
  Gene Name: glutamate receptor, metabotropic 3
  ENST ID: ENST00000441140
  CDS Start-End: 248-491
acaataatcaagagactacttgttcataagaagaataggctgcaaatgtaacttctattgtcttatcttttcattttttcataatgcaaatatgaccaattaaaaatgaattttgtgacaggctctgttagtctgttcctcccttatttgaaggacaggccaaagatccagtttggaaatgagagaggactagcatgacacattggctccaccattgatatctcccagaggtacagaaacaggattcatgaagatgttgacaagactgcaagttcttaccttagctttgttttcaaagggatttttactctctttaggggaccataactttctaaggagagagattaaaatagaaggtgaccttgttttagggggcctgtttcctattaacgaaaaaggcactggaactgaagaatgtgggcgaatcaatgaagaccgagggattcaacgcctggaagccatgttgtttgctattgatgaaatcaacaaag

SEQ ID NO: 137534 - DNA, 3590 bp, Homo sapiens
  Payload ID: 6928
  Gene Symbol: GRM4
  Gene Name: glutamate receptor, metabotropic 4
  Uniprot ID: Q14833
  ENST ID: ENST00000374177
  CDS Start-End: 233-2623
aatcccagcgctttgctggaggatcgcttgagcccaggaattcaagaccagcctgggcaacatggcgagaccctgtctgtcccaaaacaaaaaaacagattttaattggtttgggatgcggcctggacacagggaaattttaaagctctctaggtaactccaatgtgcgtcgaggttgcgaaccgccggcctgtcacacagagggagctcaggagatgctgagagtgggaggatgccggcttgggagcctggagttgcagcttcctgcggctggcgcgcccctccttgctcccctctacgcctctgcatcgcaccccacccctgtaccccaccttcctcccaccaaggaaacctcacctgccgcctcccgcccaggtcctttggattttgccggtgtgtgtgggtgcgcacaagaggcccctccctgccaggagagcaggtgagcctggccgcgcacgaatccgagggggcggccgcccagctgggaagcagccctgaaatagacccccgccgcccccgctgcctccttccggaatctgctcagataccccagatcagctacgcctccacagcgccagacctgagtgacaacagccgctacgacttcttctcccgcgtggtgccctcggacacgtaccaggcccaggccatggtggacatcgtccgtgccctcaagtggaactatgtgtccacagtggcctcggagggcagctatggtgagagcggtgtggaggccttcatccagaagtcccgtgaggacgggggcgtgtgcatcgcccagtcggtgaagataccacgggagcccaaggcaggcgagttcgacaagatcatccgccgcctcctggagacttcgaacgccagggcagtcatcatctttgccaacgaggatgacatcaggcgtgtgctggaggcagcacgaagggccaaccagacaggccatttcttctggatgggctctgacagctggggctccaagattgcacctgtgctgcacctggaggaggtggctgagggtgctgtcacgatcctccccaagaggatgtccgtacgagaccgtgagcgaattgggcaggattcagcttatgagcaggaggggaaggtgcagtttgtgatcgatgccgtgtacgccatgggccacgcgctgcacgccatgcaccgtgacctgtgtcccggccgcgtggggctctgcccgcgcatggaccctgtagatggcacccagctgcttaagtacatccgaaacgtcaacttctcaggcatcgcagggaaccctgtgaccttcaatgagaatggagatgcgcctgggcgctatgacatctaccaataccagctgcgcaacgattctgccgagtacaaggtcattggctcctggactgaccacctgcaccttagaatagagcggatgcactggccggggagcgggcagcagctgccccgctccatctgcagcctgccctgccaaccgggtgagcggaagaagacagtgaagggcatgccttgctgctggcactgcgagccttgcacagggtaccagtaccaggtggaccgctacacctgtaagacgtgtccctatgacatgcggcccacagagaaccgcacgggctgccggcccatccccatcatcaagcttgagtggggctcgccctgggccgtgctgcccctcttcctggccgtggtgggcatcgctgccacgttgttcgtggtgatcacctttgtgcgctacaacgacacgcccatcgtcaaggcctcgggccgtgaactgagctacgtgctgctggcaggcatcttcctgtgctatgccaccaccttcctcatgatcgctgagcccgaccttggcacctgctcgctgcgccgaatcttcctgggactagggatgagcatcagctatgcagccctgctcaccaagaccaaccgcatctaccgcatcttcgagcagggcaagcgctcggtcagtgccccacgcttcatcagccccgcctcacagctggccatcaccttcagcctcatctcgctgcagctgctgggcatctgtgtgtggtttgtggtggacccctcccactcggtggtggacttccaggaccagcggacactcgacccccgcttcgccaggggtgtgctcaagtgtgacatctcggacctgtcgctcatctgcctgctgggctacagcatgctgctcatggtcacgtgcaccgtgtatgccatcaagacacgcggcgtgcccgagaccttcaatgaggccaagcccattggcttcaccatgtacaccacttgcatcgtctggctggccttcatccccatcttctttggcacctcgcagtcggccgacaagctgtacatccagacgacgacgctgacggtctcggtgagtctgagcgcctcggtgtccctgggaatgctctacatgcccaaagtctacatcatcctcttccacccggagcagaacgtgcccaagcgcaagcgcagcctcaaagccgtcgttacggcggccaccatgtccaacaagttcacgcagaagggcaacttccggcccaacggagaggccaagtctgagctctgcgagaaccttgaggccccagcgctggccaccaaacagacttacgtcacttacaccaaccatgcaatctagcgagtccatggagctgagcagcaggaggaggagccgtgaccctgtggaaggtgcgtcgggccagggccacacccaagggcccagctgtcttgcctgcccgtgggcacccacggacgtggcttggtgctgaggatagcagagcccccagccatcactgctggcagcctgggcaaaccgggtgagcaacaggaggacgaggggccggggcggtgccaggctaccacaagaacctgcgtcttggaccattgcccctcccggccccaaaccacaggggctcaggtcgtgtgggccccagtgctagatctctccctcccttcgtctctgtctgtgctgttggcgacccctctgtctgtctccagccctgtctttctgttctcttatctctttgtttcaccttttccctctctggcgtccccggctgcttgtactcttggccttttctgtgtctcctttctggctcttgcctccgcctctctctctcatcctctttgtcctcagctcctcctgctttcttgggtcccaccagtgtcacttttctgccgttttctttcctgttctcctctgcttcattctcgtccagccattgctcccctctccctgccacccttccccagttcaccaaaccttacatgttgcaaaagagaaaaaaggaaaaaaaatcaaaacacaaaaaagccaaaacgaaaacaaatctcgagtgtgttgccaagtgctgcgtcctcctggtggcctctgtgtgtgtccctgtggcccgcagcctgcccgcctgccccgcccatctgccgtgtgtcttgcccgcctgccccgcccgtctgccgtctgtcttgcccgcctgcccgcctgcccctcctgccgaccacacggagttcagtgcctgggtgtttggtgatggttattgacgacaatgtgtagcgcatgattgtttttataccaagaacatttctaataaaaataaacacatggtttt

SEQ ID NO: 137535 - DNA, 7275 bp, Homo sapiens
  Payload ID: 6928
  Gene Symbol: GRM4
  Gene Name: glutamate receptor, metabotropic 4
  ENST ID: ENST00000374181
  CDS Start-End: 502-3099
agtgacgcaccagggtgggagtagcgcgcccctctgcgtccctgtgctttgctgtacttttctgggtgtgtgttagggaggctatgttcctgaccctccccctctggggtgagaaggggtccccgccatgtcctcggggttggtaggaggagaggattggagctgttttctccttgatgccaagatacgccaagctaggagcattctgccctttccacagtcatccaccgagaacaggcctgcaggacgggacaaggatcagagccttcctgcaaccccggccactgcctgctgtctgtgggcctggactgtgcgggcaactgtgcttggcccgagtgacaaggaggtgggagagggtagcagcatgggctacgcggttggctgccctcagtccccctgctgctgaagctgccctgcccatgcccacccaggccgtggggccaggggcctgccagggctaggagtgggcctgccgttcatgggtctctagggatttccgagatgcctgggaagagaggcttgggctggtggtgggcccggctgcccctttgcctgctcctcagcctttacggcccctggatgccttcctccctgggaaagcccaaaggccaccctcacatgaattccatccgcatagatggggacatcacactgggaggcctgttcccggtgcatggccggggctcagagggcaagccctgtggagaacttaagaaggaaaagggcatccaccggctggaggccatgctgttcgccctggatcgcatcaacaacgacccggacctgctgcctaacatcacgctgggcgcccgcattctggacacctgctccagggacacccatgccctcgagcagtcgctgacctttgtgcaggcgctcatcgagaaggatggcacagaggtccgctgtggcagtggcggcccacccatcatcaccaagcctgaacgtgtggtgggtgtcatcggtgcttcagggagctcggtctccatcatggtggccaacatccttcgcctcttcaagataccccagatcagctacgcctccacagcgccagacctgagtgacaacagccgctacgacttcttctcccgcgtggtgccctcggacacgtaccaggcccaggccatggtggacatcgtccgtgccctcaagtggaactatgtgtccacagtggcctcggagggcagctatggtgagagcggtgtggaggccttcatccagaagtcccgtgaggacgggggcgtgtgcatcgcccagtcggtgaagataccacgggagcccaaggcaggcgagttcgacaagatcatccgccgcctcctggagacttcgaacgccagggcagtcatcatctttgccaacgaggatgacatcaggcgtgtgctggaggcagcacgaagggccaaccagacaggccatttcttctggatgggctctgacagctggggctccaagattgcacctgtgctgcacctggaggaggtggctgagggtgctgtcacgatcctccccaagaggatgtccgtacgagaccgtgagcgaattgggcaggattcagcttatgagcaggaggggaaggtgcagtttgtgatcgatgccgtgtacgccatgggccacgcgctgcacgccatgcaccgtgacctgtgtcccggccgcgtggggctctgcccgcgcatggaccctgtagatggcacccagctgcttaagtacatccgaaacgtcaacttctcaggcatcgcagggaaccctgtgaccttcaatgagaatggagatgcgcctgggcgctatgacatctaccaataccagctgcgcaacgattctgccgagtacaaggtcattggctcctggactgaccacctgcaccttagaatagagcggatgcactggccggggagcgggcagcagctgccccgctccatctgcagcctgccctgccaaccgggtgagcggaagaagacagtgaagggcatgccttgctgctggcactgcgagccttgcacagggtaccagtaccaggtggaccgctacacctgtaagacgtgtccctatgacatgcggcccacagagaaccgcacgggctgccggcccatccccatcatcaagcttgagtggggctcgccctgggccgtgctgcccctcttcctggccgtggtgggcatcgctgccacgttgttcgtggtgatcacctttgtgcgctacaacgacacgcccatcgtcaaggcctcgggccgtgaactgagctacgtgctgctggcaggcatcttcctgtgctatgccaccaccttcctcatgatcgctgagcccgaccttggcacctgctcgctgcgccgaatcttcctgggactagggatgagcatcagctatgcagccctgctcaccaagaccaaccgcatctaccgcatcttcgagcagggcaagcgctcggtcagtgccccacgcttcatcagccccgcctcacagctggccatcaccttcagcctcatctcgctgcagctgctgggcatctgtgtgtggtttgtggtggacccctcccactcggtggtggacttccaggaccagcggacactcgacccccgcttcgccaggggtgtgctcaagtgtgacatctcggacctgtcgctcatctgcctgctgggctacagcatgctgctcatggtcacgtgcaccgtgtatgccatcaagacacgcggcgtgcccgagaccttcaatgaggccaagcccattggcttcaccatgtacaccacttgcatcgtctggctggccttcatccccatcttctttggcacctcgcagtcggccgacaagctgtacatccagacgacgacgctgacggtctcggtgagtctgagcgcctcggtgtccctgggaatgctctacatgcccaaagtctacatcatcctcttccacccggagcagaacgtgcccaagcgcaagcgcagcctcaaagccgtcgttacggcggccaccatgtccaacaagttcacgcagaagggcaacttccggcccaacggagaggccaagtctgagctctgcgagaaccttgaggccccagcgctggccaccaaacagacttacgtcacttacaccaaccatgcaatctagcgagtccatggagctgagcagcaggaggaggagccgtgaccctgtggaaggtgcgtcgggccagggccacacccaagggcccagctgtcttgcctgcccgtgggcacccacggacgtggcttggtgctgaggatagcagagcccccagccatcactgctggcagcctgggcaaaccgggtgagcaacaggaggacgaggggccggggcggtgccaggctaccacaagaacctgcgtcttggaccattgcccctcccggccccaaaccacaggggctcaggtcgtgtgggccccagtgctagatctctccctcccttcgtctctgtctgtgctgttggcgacccctctgtctgtctccagccctgtctttctgttctcttatctctttgtttcaccttttccctctctggcgtccccggctgcttgtactcttggccttttctgtgtctcctttctggctcttgcctccgcctctctctctcatcctctttgtcctcagctcctcctgctttcttgggtcccaccagtgtcacttttctgccgttttctttcctgttctcctctgcttcattctcgtccagccattgctcccctctccctgccacccttccccagttcaccaaaccttacatgttgcaaaagagaaaaaaggaaaaaaaatcaaaacacaaaaaagccaaaacgaaaacaaatctcgagtgtgttgccaagtgctgcgtcctcctggtggcctctgtgtgtgtccctgtggcccgcagcctgcccgcctgccccgcccatctgccgtgtgtcttgcccgcctgccccgcccgtctgccgtctgtcttgcccgcctgcccgcctgcccctcctgccgaccacacggagttcagtgcctgggtgtttggtgatggttattgacgacaatgtgtagcgcatgattgtttttataccaagaacatttctaataaaaataaacacatggttttgcacccgggctccacatccactgagggtcctgccatgggaccacaggctcagcctgcagctggagggcttagacctagagggaagcgggaactgggctctggagacccagggcttgggggctgtggagactgctccctaggctgggatctagtgtggtgtggtgaggccttgggcatggaggggccagattcccaggtaaggggcagggacattgcaggaaattccaggaatcagcacctagtagtcccctaattagggggtatgctctgtcccctgccctgcagccctgggagggtaacatttctgccttgcctgtcctctgtctcacacccctcacacctgggactgcccttccacccctgcccccataacctgtgcctctctccttccagccaggaagtcctcttcttgagaagttagcttcccgggctgccagcactcatagccgtcccctcctgcttgtgttggctccaggctcgggtgctaagaagatgtgtgtctgtcctggagatcagtgtgttgttatgtgtccacgtgggcccacaagtgcacggcacaggcatggccgtgtggctgtgttggctgtgttggctgtgtgtctgtgtgcacgtccagcgcctccatgcgcatgcgtgcctgtcttgtttgcgtgtctgatcatctgtttgggccccggtggctcatgcagatgcctgtctcaggcccatggcgagtgttcacctcagctggcttccctggcaggttgggaggtgggaaacaggagcgcttaggggctgggctctggctggggtaaattatagagccagaaacacaatgaggccataggcagcagctggagcctgggctgcctgtgccgtcccctcctgccctgcccctgggtcctgcaccccctcccacctccaggctagctgacagcgctatggagcacagtggaagggactggaggaaccctaggcagggggccacgcagggacagagtatgagagtgtgtgtataactgaggctgggacattgaatcatgccaggtatgtcttctccatcagcccactcttactcctggcctgggcatctcacacatctgtgcataggaaatctcttcttccctggggtctgtgtgcagcacctagtagatgctcaataaatgtttgtgtgagggaaggagacaggaaaggaagtgtctcgctgatcatcttgcggaatggttcctaagacctctgcccaggaaagattccacccagtgctccagcccggtcaggcagaactaggttgccagatcaagggtatctcccaaaagcttccagggcagttgggggtgggggggtggggggtagggatggggaatgcagaagcgggtgcagccagctctcccccagggtgactctggcagcacccccatcctgggcaccctgcctgctctgtggctcacgcccctcctgaagtgactgatgctctgaggcccaaggctaggtccagggcagggcctgcaggggtttcatgctcagtccaggacttgcctaggtccccctacatctgtggggcccccatctaggttctaacaggagaatcacctctccaagggggatgctgcccctcggctccccttggctctcaggaggggccctcagggactaccagtcccctgccagtgggaagaaatagccctgccctcagggagcttccagtgtgatgggggagatacagcagactgtgtcccaaagtaaaatgactgttagaatgaggtgggtggaggagggaagccttgggtgggtgtgactttgggcatctgagcctggggtgcagaggtgggctctgtgggcctgaggtggacaggagggaaccaggccctagcaagacttttgccagctagacctgctgcagcagttgggagggtgggtgctgctggagtcctgggtccatcacctagaaggctcaggccagtgcagccagggctggggcccacagctggcctgggtgggacctgccctgatgcccatggcaggagggacgcctggcccttcacaattggcttggctgctcacctttgctctcatcctcaattattaatgactggagaaagctgctaagtatcttcagaatgttagatttcaacaagatggggggttcagggtccctggcaccctggatagggagccagcggcccctagagacctttgctgtgtgcagggggtatgtgctcacccccgtggcctcagcctcctcaatgtctgaatgaaggattgggctagcagacatcccaccccacagcacactttctaaccagcaggggaacttctagacaatagagacgctgggctccctccagaacactggacctgaacttctggggggagggctgggcacgggcatattttaaaagctccccagcagatgggccgtgcagtcaagtgggccaagagtggcaccagactttggggcttgtgaagtcaggagggagcaacagtgcccactcgagcttgcctggggctcaagcccaaggctgggctgctgccagcctgagcagacacccaggagcttccaggccagctggatgcacagggcacctttgtggaactcctaggaccctggggagacccacctcaggagcagagtctcaggtcccttccggctctgaggggctgttctgagctctaatgtcttatggtctgcccctcccatccttacttctcaggccctggaggcagaggcatagagccaggcaggacagaggtctcagtgggccacatgccagctgcccccacactgcctcagcctccaggcctccaaggggtcctggggagcccctgagaagatgctgagcctgcataaggctgggcgcccctctttctgacaccctcactggctccacggctcccccttcccatcccaggtttccatctgcccactgaacagggaggggaaactgaggcactcccctggcactgagggctccttctgtcatcctgcctgccctggatggtcctggctgcccctcagggcttggccctggcactgtgagcctcacagggctcagacccccacccccaacccagcactaaatggcactcggcaccagaatctcacttcagttggcaaaagcagcaattagcatgtaatgaggcttcttgctttatttttaggtaacctccaaggccctgcctgtgtaattcagcccgccattgctcggtggataattaaagcatgtcaccat

SEQ ID NO: 137536 - DNA, 2574 bp, Homo sapiens
  Payload ID: 6928
  Gene Symbol: GRM4
  Gene Name: glutamate receptor, metabotropic 4
  Uniprot ID: Q14833
  ENST ID: ENST00000455714
  CDS Start-End: 32-2350
aaatgccccagtccttccggctggctgcaagatggtgcaaactcttcccaagctatttccccatgatggcgccaagagaaaaaagaggacccttaggacttcagggccatgctttgggggtggaggacagataccccagatcagctacgcctccacagcgccagacctgagtgacaacagccgctacgacttcttctcccgcgtggtgccctcggacacgtaccaggcccaggccatggtggacatcgtccgtgccctcaagtggaactatgtgtccacagtggcctcggagggcagctatggtgagagcggtgtggaggccttcatccagaagtcccgtgaggacgggggcgtgtgcatcgcccagtcggtgaagataccacgggagcccaaggcaggcgagttcgacaagatcatccgccgcctcctggagacttcgaacgccagggcagtcatcatctttgccaacgaggatgacatcaggcgtgtgctggaggcagcacgaagggccaaccagacaggccatttcttctggatgggctctgacagctggggctccaagattgcacctgtgctgcacctggaggaggtggctgagggtgctgtcacgatcctccccaagaggatgtccgtacgaggcttcgaccgctacttctccagccgcacgctggacaacaaccggcgcaacatctggtttgccgagttctgggaggacaacttccactgcaagctgagccgccacgccctcaagaagggcagccacgtcaagaagtgcaccaaccgtgagcgaattgggcaggattcagcttatgagcaggaggggaaggtgcagtttgtgatcgatgccgtgtacgccatgggccacgcgctgcacgccatgcaccgtgacctgtgtcccggccgcgtggggctctgcccgcgcatggaccctgtagatggcacccagctgcttaagtacatccgaaacgtcaacttctcaggcatcgcagggaaccctgtgaccttcaatgagaatggagatgcgcctgggcgctatgacatctaccaataccagctgcgcaacgattctgccgagtacaaggtcattggctcctggactgaccacctgcaccttagaatagagcggatgcactggccggggagcgggcagcagctgccccgctccatctgcagcctgccctgccaaccgggtgagcggaagaagacagtgaagggcatgccttgctgctggcactgcgagccttgcacagggtaccagtaccaggtggaccgctacacctgtaagacgtgtccctatgacatgcggcccacagagaaccgcacgggctgccggcccatccccatcatcaagcttgagtggggctcgccctgggccgtgctgcccctcttcctggccgtggtgggcatcgctgccacgttgttcgtggtgatcacctttgtgcgctacaacgacacgcccatcgtcaaggcctcgggccgtgaactgagctacgtgctgctggcaggcatcttcctgtgctatgccaccaccttcctcatgatcgctgagcccgaccttggcacctgctcgctgcgccgaatcttcctgggactagggatgagcatcagctatgcagccctgctcaccaagaccaaccgcatctaccgcatcttcgagcagggcaagcgctcggtcagtgccccacgcttcatcagccccgcctcacagctggccatcaccttcagcctcatctcgctgcagctgctgggcatctgtgtgtggtttgtggtggacccctcccactcggtggtggacttccaggaccagcggacactcgacccccgcttcgccaggggtgtgctcaagtgtgacatctcggacctgtcgctcatctgcctgctgggctacagcatgctgctcatggtcacgtgcaccgtgtatgccatcaagacacgcggcgtgcccgagaccttcaatgaggccaagcccattggcttcaccatgtacaccacttgcatcgtctggctggccttcatccccatcttctttggcacctcgcagtcggccgacaagctgtacatccagacgacgacgctgacggtctcggtgagtctgagcgcctcggtgtccctgggaatgctctacatgcccaaagtctacatcatcctcttccacccggagcagaacgtgcccaagcgcaagcgcagcctcaaagccgtcgttacggcggccaccatgtccaacaagttcacgcagaagggcaacttccggcccaacggagaggccaagtctgagctctgcgagaaccttgaggccccagcgctggccaccaaacagacttacgtcacttacaccaaccatgcaatctagcgagtccatggagctgagcagcaggaggaggagccgtgaccctgtggaaggtgcgtcgggccagggccacacccaagggcccagctgtcttgcctgcccgtgggcacccacggacgtggcttggtgctgaggatagcagagcccccagccatcactgctggcagcctgggcaaaccgggtgagcaacaggaggacgaggggccggggcggtgccaggctaccac

SEQ ID NO: 137537 - DNA, 2983 bp, Homo sapiens
  Payload ID: 6928
  Gene Symbol: GRM4
  Gene Name: glutamate receptor, metabotropic 4
  Uniprot ID: Q14833
  ENST ID: ENST00000544773
  CDS Start-End: 364-2595
agctgcccccaagccttggcagcctgagggtgcccatggggagccctgtctccgcttggctccttgcagtctgtggggcacagcgttcccctggagagaggctgttccttgtgggctcttactgtccatactcccagcctgccctggggggaacttcctgctatctcctcacctccaggcctgagctggaggaaggctgggcagaggagagctgccaggcaagacagatggcctgcagcctgggccagggaggggcaccactttgatctctgatgccctggggactcacgggctgcaggtgctaccagcccagcaccccggcacagcggggaggctgaggcagacacacgctcctggagagacatgtcatgtaagataccccagatcagctacgcctccacagcgccagacctgagtgacaacagccgctacgacttcttctcccgcgtggtgccctcggacacgtaccaggcccaggccatggtggacatcgtccgtgccctcaagtggaactatgtgtccacagtggcctcggagggcagctatggtgagagcggtgtggaggccttcatccagaagtcccgtgaggacgggggcgtgtgcatcgcccagtcggtgaagataccacgggagcccaaggcaggcgagttcgacaagatcatccgccgcctcctggagacttcgaacgccagggcagtcatcatctttgccaacgaggatgacatcaggcgtgtgctggaggcagcacgaagggccaaccagacaggccatttcttctggatgggctctgacagctggggctccaagattgcacctgtgctgcacctggaggaggtggctgagggtgctgtcacgatcctccccaagaggatgtccgtacgaggcttcgaccgctacttctccagccgcacgctggacaacaaccggcgcaacatctggtttgccgagttctgggaggacaacttccactgcaagctgagccgccacgccctcaagaagggcagccacgtcaagaagtgcaccaaccgtgagcgaattgggcaggattcagcttatgagcaggaggggaaggtgcagtttgtgatcgatgccgtgtacgccatgggccacgcgctgcacgccatgcaccgtgacctgtgtcccggccgcgtggggctctgcccgcgcatggaccctgtagatggcacccagctgcttaagtacatccgaaacgtcaacttctcaggcatcgcagggaaccctgtgaccttcaatgagaatggagatgcgcctgggcgctatgacatctaccaataccagctgcgcaacgattctgccgagtacaaggtcattggctcctggactgaccacctgcaccttagaatagagcggatgcactggccggggagcgggcagcagctgccccgctccatctgcagcctgccctgccaaccgggtgagcggaagaagacagtgaagggcatgccttgctgctggcactgcgagccttgcacagggtaccagtaccaggtggaccgctacacctgtaagacgtgtccctatgacatgcggcccacagagaaccgcacgggctgccggcccatccccatcatcaagcttgagtggggctcgccctgggccgtgctgcccctcttcctggccgtggtgggcatcgctgccacgttgttcgtggtgatcacctttgtgcgctacaacgacacgcccatcgtcaaggcctcgggccgtgaactgagctacgtgctgctggcaggcatcttcctgtgctatgccaccaccttcctcatgatcgctgagcccgaccttggcacctgctcgctgcgccgaatcttcctgggactagggatgagcatcagctatgcagccctgctcaccaagaccaaccgcatctaccgcatcttcgagcagggcaagcgctcggtcagtgccccacgcttcatcagccccgcctcacagctggccatcaccttcagcctcatctcgctgcagctgctgggcatctgtgtgtggtttgtggtggacccctcccactcggtggtggacttccaggaccagcggacactcgacccccgcttcgccaggggtgtgctcaagtgtgacatctcggacctgtcgctcatctgcctgctgggctacagcatgctgctcatggtcacgtgcaccgtgtatgccatcaagacacgcggcgtgcccgagaccttcaatgaggccaagcccattggcttcaccatgtacaccacttgcatcgtctggctggccttcatccccatcttctttggcacctcgcagtcggccgacaagctgtacatccagacgacgacgctgacggtctcggtgagtctgagcgcctcggtgtccctgggaatgctctacatgcccaaagtctacatcatcctcttccacccggagcagaacgtgcccaagcgcaagcgcagcctcaaagccgtcgttacggcggccaccatgtccaacaagttcacgcagaagggcaacttccggcccaacggagaggccaagtctgagctctgcgagaaccttgaggccccagcgctggccaccaaacagacttacgtcacttacaccaaccatgcaatctagcgagtccatggagctgagcagcaggaggaggagccgtgaccctgtggaaggtgcgtcgggccagggccacacccaagggcccagctgtcttgcctgcccgtgggcacccacggacgtggcttggtgctgaggatagcagagcccccagccatcactgctggcagcctgggcaaaccgggtgagcaacaggaggacgaggggccggggcggtgccaggctaccacaagaacctgcgtcttggaccattgcccctcccggccccaaaccacaggggctcaggtcgtgtgggccccagtgctagatctctccctcccttcgtctctgtctgtgctgttggcgacccctctgtctgtctccagccctgtctttctgttctcttatctctttg

SEQ ID NO: 137538 - DNA, 6670 bp, Homo sapiens
  Payload ID: 6928
  Gene Symbol: GRM4
  Gene Name: glutamate receptor, metabotropic 4
  Uniprot ID: Q14833
  ENST ID: ENST00000535756
  CDS Start-End: 155-2494
gcagtgcctgacacatcccagtctttcaccgtggtgcctgtggacagatgaggagactgaggctcacaaaggaggtgacttgcccaaggtcacacagcgaggcagcttctcacctatgggagttggactttgagccctccttggaaaagggggcatggctgtgccccttggggctccttgctgggcctctgccctgcctgcctgggctcctcccggcctcccccacagatcactgttgacaaggttactgagtcagcatgtaaaacctgcaaaaataccccagatcagctacgcctccacagcgccagacctgagtgacaacagccgctacgacttcttctcccgcgtggtgccctcggacacgtaccaggcccaggccatggtggacatcgtccgtgccctcaagtggaactatgtgtccacagtggcctcggagggcagctatggtgagagcggtgtggaggccttcatccagaagtcccgtgaggacgggggcgtgtgcatcgcccagtcggtgaagataccacgggagcccaaggcaggcgagttcgacaagatcatccgccgcctcctggagacttcgaacgccagggcagtcatcatctttgccaacgaggatgacatcaggcgtgtgctggaggcagcacgaagggccaaccagacaggccatttcttctggatgggctctgacagctggggctccaagattgcacctgtgctgcacctggaggaggtggctgagggtgctgtcacgatcctccccaagaggatgtccgtacgaggcttcgaccgctacttctccagccgcacgctggacaacaaccggcgcaacatctggtttgccgagttctgggaggacaacttccactgcaagctgagccgccacgccctcaagaagggcagccacgtcaagaagtgcaccaaccgtgagcgaattgggcaggattcagcttatgagcaggaggggaaggtgcagtttgtgatcgatgccgtgtacgccatgggccacgcgctgcacgccatgcaccgtgacctgtgtcccggccgcgtggggctctgcccgcgcatggaccctgtagatggcacccagctgcttaagtacatccgaaacgtcaacttctcaggcatcgcagggaaccctgtgaccttcaatgagaatggagatgcgcctgggcgctatgacatctaccaataccagctgcgcaacgattctgccgagtacaaggtcattggctcctggactgaccacctgcaccttagaatagagcggatgcactggccggggagcgggcagcagctgccccgctccatctgcagcctgccctgccaaccgggtgagcggaagaagacagtgaagggcatgccttgctgctggcactgcgagccttgcacagggtaccagtaccaggtggaccgctacacctgtaagacgtgtccctatgacatgcggcccacagagaaccgcacgggctgccggcccatccccatcatcaagcttgagtggggctcgccctgggccgtgctgcccctcttcctggccgtggtgggcatcgctgccacgttgttcgtggtgatcacctttgtgcgctacaacgacacgcccatcgtcaaggcctcgggccgtgaactgagctacgtgctgctggcaggcatcttcctgtgctatgccaccaccttcctcatgatcgctgagcccgaccttggcacctgctcgctgcgccgaatcttcctgggactagggatgagcatcagctatgcagccctgctcaccaagaccaaccgcatctaccgcatcttcgagcagggcaagcgctcggtcagtgccccacgcttcatcagccccgcctcacagctggccatcaccttcagcctcatctcgctgcagctgctgggcatctgtgtgtggtttgtggtggacccctcccactcggtggtggacttccaggaccagcggacactcgacccccgcttcgccaggggtgtgctcaagtgtgacatctcggacctgtcgctcatctgcctgctgggctacagcatgctgctcatggtcacgtgcaccgtgtatgccatcaagacacgcggcgtgcccgagaccttcaatgaggccaagcccattggcttcaccatgtacaccacttgcatcgtctggctggccttcatccccatcttctttggcacctcgcagtcggccgacaagctgtacatccagacgacgacgctgacggtctcggtgagtctgagcgcctcggtgtccctgggaatgctctacatgcccaaagtctacatcatcctcttccacccggagcagaacgtgcccaagcgcaagcgcagcctcaaagccgtcgttacggcggccaccatgtccaacaagttcacgcagaagggcaacttccggcccaacggagaggccaagtctgagctctgcgagaaccttgaggccccagcgctggccaccaaacagacttacgtcacttacaccaaccatgcaatctagcgagtccatggagctgagcagcaggaggaggagccgtgaccctgtggaaggtgcgtcgggccagggccacacccaagggcccagctgtcttgcctgcccgtgggcacccacggacgtggcttggtgctgaggatagcagagcccccagccatcactgctggcagcctgggcaaaccgggtgagcaacaggaggacgaggggccggggcggtgccaggctaccacaagaacctgcgtcttggaccattgcccctcccggccccaaaccacaggggctcaggtcgtgtgggccccagtgctagatctctccctcccttcgtctctgtctgtgctgttggcgacccctctgtctgtctccagccctgtctttctgttctcttatctctttgtttcaccttttccctctctggcgtccccggctgcttgtactcttggccttttctgtgtctcctttctggctcttgcctccgcctctctctctcatcctctttgtcctcagctcctcctgctttcttgggtcccaccagtgtcacttttctgccgttttctttcctgttctcctctgcttcattctcgtccagccattgctcccctctccctgccacccttccccagttcaccaaaccttacatgttgcaaaagagaaaaaaggaaaaaaaatcaaaacacaaaaaagccaaaacgaaaacaaatctcgagtgtgttgccaagtgctgcgtcctcctggtggcctctgtgtgtgtccctgtggcccgcagcctgcccgcctgccccgcccatctgccgtgtgtcttgcccgcctgccccgcccgtctgccgtctgtcttgcccgcctgcccgcctgcccctcctgccgaccacacggagttcagtgcctgggtgtttggtgatggttattgacgacaatgtgtagcgcatgattgtttttataccaagaacatttctaataaaaataaacacatggttttgcacccgggctccacatccactgagggtcctgccatgggaccacaggctcagcctgcagctggagggcttagacctagagggaagcgggaactgggctctggagacccagggcttgggggctgtggagactgctccctaggctgggatctagtgtggtgtggtgaggccttgggcatggaggggccagattcccaggtaaggggcagggacattgcaggaaattccaggaatcagcacctagtagtcccctaattagggggtatgctctgtcccctgccctgcagccctgggagggtaacatttctgccttgcctgtcctctgtctcacacccctcacacctgggactgcccttccacccctgcccccataacctgtgcctctctccttccagccaggaagtcctcttcttgagaagttagcttcccgggctgccagcactcatagccgtcccctcctgcttgtgttggctccaggctcgggtgctaagaagatgtgtgtctgtcctggagatcagtgtgttgttatgtgtccacgtgggcccacaagtgcacggcacaggcatggccgtgtggctgtgttggctgtgttggctgtgtgtctgtgtgcacgtccagcgcctccatgcgcatgcgtgcctgtcttgtttgcgtgtctgatcatctgtttgggccccggtggctcatgcagatgcctgtctcaggcccatggcgagtgttcacctcagctggcttccctggcaggttgggaggtgggaaacaggagcgcttaggggctgggctctggctggggtaaattatagagccagaaacacaatgaggccataggcagcagctggagcctgggctgcctgtgccgtcccctcctgccctgcccctgggtcctgcaccccctcccacctccaggctagctgacagcgctatggagcacagtggaagggactggaggaaccctaggcagggggccacgcagggacagagtatgagagtgtgtgtataactgaggctgggacattgaatcatgccaggtatgtcttctccatcagcccactcttactcctggcctgggcatctcacacatctgtgcataggaaatctcttcttccctggggtctgtgtgcagcacctagtagatgctcaataaatgtttgtgtgagggaaggagacaggaaaggaagtgtctcgctgatcatcttgcggaatggttcctaagacctctgcccaggaaagattccacccagtgctccagcccggtcaggcagaactaggttgccagatcaagggtatctcccaaaagcttccagggcagttgggggtgggggggtggggggtagggatggggaatgcagaagcgggtgcagccagctctcccccagggtgactctggcagcacccccatcctgggcaccctgcctgctctgtggctcacgcccctcctgaagtgactgatgctctgaggcccaaggctaggtccagggcagggcctgcaggggtttcatgctcagtccaggacttgcctaggtccccctacatctgtggggcccccatctaggttctaacaggagaatcacctctccaagggggatgctgcccctcggctccccttggctctcaggaggggccctcagggactaccagtcccctgccagtgggaagaaatagccctgccctcagggagcttccagtgtgatgggggagatacagcagactgtgtcccaaagtaaaatgactgttagaatgaggtgggtggaggagggaagccttgggtgggtgtgactttgggcatctgagcctggggtgcagaggtgggctctgtgggcctgaggtggacaggagggaaccaggccctagcaagacttttgccagctagacctgctgcagcagttgggagggtgggtgctgctggagtcctgggtccatcacctagaaggctcaggccagtgcagccagggctggggcccacagctggcctgggtgggacctgccctgatgcccatggcaggagggacgcctggcccttcacaattggcttggctgctcacctttgctctcatcctcaattattaatgactggagaaagctgctaagtatcttcagaatgttagatttcaacaagatggggggttcagggtccctggcaccctggatagggagccagcggcccctagagacctttgctgtgtgcagggggtatgtgctcacccccgtggcctcagcctcctcaatgtctgaatgaaggattgggctagcagacatcccaccccacagcacactttctaaccagcaggggaacttctagacaatagagacgctgggctccctccagaacactggacctgaacttctggggggagggctgggcacgggcatattttaaaagctccccagcagatgggccgtgcagtcaagtgggccaagagtggcaccagactttggggcttgtgaagtcaggagggagcaacagtgcccactcgagcttgcctggggctcaagcccaaggctgggctgctgccagcctgagcagacacccaggagcttccaggccagctggatgcacagggcacctttgtggaactcctaggaccctggggagacccacctcaggagcagagtctcaggtcccttccggctctgaggggctgttctgagctctaatgtcttatggtctgcccctcccatccttacttctcaggccctggaggcagaggcatagagccaggcaggacagaggtctcagtgggccacatgccagctgcccccacactgcctcagcctccaggcctccaaggggtcctggggagcccctgagaagatgctgagcctgcataaggctgggcgcccctctttctgacaccctcactggctccacggctcccccttcccatcccaggtttccatctgcccactgaacagggaggggaaactgaggcactcccctggcactgagggctccttctgtcatcctgcctgccctggatggtcctggctgcccctcagggcttggccctggcactgtgagcctcacagggctcagacccccacccccaacccagcactaaatggcactcggcaccagaatctcacttcagttggcaaaagcagcaattagcatgtaatgaggcttcttgctttatttttaggtaacctccaaggccctgcctgtgtaattcagcccgccattgctcggtggataattaaagcatgtcaccat

SEQ ID NO: 137539 - DNA, 4153 bp, Homo sapiens
  Payload ID: 6928
  Gene Symbol: GRM4
  Gene Name: glutamate receptor, metabotropic 4
  Uniprot ID: Q14833
  ENST ID: ENST00000538487
  CDS Start-End: 445-3183
ttttctgggtgtgtgttagggaggctatgttcctgaccctccccctctggggtgagaaggggtccccgccatgtcctcggggttggtaggaggagaggattggagctgttttctccttgatgccaagatacgccaagctaggagcattctgccctttccacagtcatccaccgagaacaggcctgcaggacgggacaaggatcagagccttcctgcaaccccggccactgcctgctgtctgtgggcctggactgtgcgggcaactgtgcttggcccgagtgacaaggaggtgggagagggtagcagcatgggctacgcggttggctgccctcagtccccctgctgctgaagctgccctgcccatgcccacccaggccgtggggccaggggcctgccagggctaggagtgggcctgccgttcatgggtctctagggatttccgagatgcctgggaagagaggcttgggctggtggtgggcccggctgcccctttgcctgctcctcagcctttacggcccctggatgccttcctccctgggaaagcccaaaggccaccctcacatgaattccatccgcatagatggggacatcacactgggaggcctgttcccggtgcatggccggggctcagagggcaagccctgtggagaacttaagaaggaaaagggcatccaccggctggaggccatgctgttcgccctggatcgcatcaacaacgacccggacctgctgcctaacatcacgctgggcgcccgcattctggacacctgctccagggacacccatgccctcgagcagtcgctgacctttgtgcaggcgctcatcgagaaggatggcacagaggtccgctgtggcagtggcggcccacccatcatcaccaagcctgaacgtgtggtgggtgtcatcggtgcttcagggagctcggtctccatcatggtggccaacatccttcgcctcttcaagataccccagatcagctacgcctccacagcgccagacctgagtgacaacagccgctacgacttcttctcccgcgtggtgccctcggacacgtaccaggcccaggccatggtggacatcgtccgtgccctcaagtggaactatgtgtccacagtggcctcggagggcagctatggtgagagcggtgtggaggccttcatccagaagtcccgtgaggacgggggcgtgtgcatcgcccagtcggtgaagataccacgggagcccaaggcaggcgagttcgacaagatcatccgccgcctcctggagacttcgaacgccagggcagtcatcatctttgccaacgaggatgacatcaggcgtgtgctggaggcagcacgaagggccaaccagacaggccatttcttctggatgggctctgacagctggggctccaagattgcacctgtgctgcacctggaggaggtggctgagggtgctgtcacgatcctccccaagaggatgtccgtacgaggcttcgaccgctacttctccagccgcacgctggacaacaaccggcgcaacatctggtttgccgagttctgggaggacaacttccactgcaagctgagccgccacgccctcaagaagggcagccacgtcaagaagtgcaccaaccgtgagcgaattgggcaggattcagcttatgagcaggaggggaaggtgcagtttgtgatcgatgccgtgtacgccatgggccacgcgctgcacgccatgcaccgtgacctgtgtcccggccgcgtggggctctgcccgcgcatggaccctgtagatggcacccagctgcttaagtacatccgaaacgtcaacttctcaggcatcgcagggaaccctgtgaccttcaatgagaatggagatgcgcctgggcgctatgacatctaccaataccagctgcgcaacgattctgccgagtacaaggtcattggctcctggactgaccacctgcaccttagaatagagcggatgcactggccggggagcgggcagcagctgccccgctccatctgcagcctgccctgccaaccgggtgagcggaagaagacagtgaagggcatgccttgctgctggcactgcgagccttgcacagggtaccagtaccaggtggaccgctacacctgtaagacgtgtccctatgacatgcggcccacagagaaccgcacgggctgccggcccatccccatcatcaagcttgagtggggctcgccctgggccgtgctgcccctcttcctggccgtggtgggcatcgctgccacgttgttcgtggtgatcacctttgtgcgctacaacgacacgcccatcgtcaaggcctcgggccgtgaactgagctacgtgctgctggcaggcatcttcctgtgctatgccaccaccttcctcatgatcgctgagcccgaccttggcacctgctcgctgcgccgaatcttcctgggactagggatgagcatcagctatgcagccctgctcaccaagaccaaccgcatctaccgcatcttcgagcagggcaagcgctcggtcagtgccccacgcttcatcagccccgcctcacagctggccatcaccttcagcctcatctcgctgcagctgctgggcatctgtgtgtggtttgtggtggacccctcccactcggtggtggacttccaggaccagcggacactcgacccccgcttcgccaggggtgtgctcaagtgtgacatctcggacctgtcgctcatctgcctgctgggctacagcatgctgctcatggtcacgtgcaccgtgtatgccatcaagacacgcggcgtgcccgagaccttcaatgaggccaagcccattggcttcaccatgtacaccacttgcatcgtctggctggccttcatccccatcttctttggcacctcgcagtcggccgacaagctgtacatccagacgacgacgctgacggtctcggtgagtctgagcgcctcggtgtccctgggaatgctctacatgcccaaagtctacatcatcctcttccacccggagcagaacgtgcccaagcgcaagcgcagcctcaaagccgtcgttacggcggccaccatgtccaacaagttcacgcagaagggcaacttccggcccaacggagaggccaagtctgagctctgcgagaaccttgaggccccagcgctggccaccaaacagacttacgtcacttacaccaaccatgcaatctagcgagtccatggagctgagcagcaggaggaggagccgtgaccctgtggaaggtgcgtcgggccagggccacacccaagggcccagctgtcttgcctgcccgtgggcacccacggacgtggcttggtgctgaggatagcagagcccccagccatcactgctggcagcctgggcaaaccgggtgagcaacaggaggacgaggggccggggcggtgccaggctaccacaagaacctgcgtcttggaccattgcccctcccggccccaaaccacaggggctcaggtcgtgtgggccccagtgctagatctctccctcccttcgtctctgtctgtgctgttggcgacccctctgtctgtctccagccctgtctttctgttctcttatctctttgtttcaccttttccctctctggcgtccccggctgcttgtactcttggccttttctgtgtctcctttctggctcttgcctccgcctctctctctcatcctctttgtcctcagctcctcctgctttcttgggtcccaccagtgtcacttttctgccgttttctttcctgttctcctctgcttcattctcgtccagccattgctcccctctccctgccacccttccccagttcaccaaaccttacatgttgcaaaagagaaaaaaggaaaaaaaatcaaaacacaaaaaagccaaaacgaaaacaaatctcgagtgtgttgccaagtgctgcgtcctcctggtggcctctgtgtgtgtccctgtggcccgcagcctgcccgcctgccccgcccatctgccgtgtgtcttgcccgcctgccccgcccgtctgccgtctgtcttgcccgcctgcccgcctgcccctcctgccgaccacacggagttcagtgcctgggtgtttggtgatggttattgacgacaatgtgtagcgcatgattgtttttataccaagaacatttctaataaaaataaacacatggttttgca

SEQ ID NO: 137540 - DNA, 570 bp, Homo sapiens
  Payload ID: 6928
  Gene Symbol: GRM4
  Gene Name: glutamate receptor, metabotropic 4
  ENST ID: ENST00000609443
  CDS Start-End: 283-570
agagtgaccagatgctcagggcaggagtaggcagctggtctaaatccacagagcagaggaatagatctgattaatgagggagtcaagtcctgagggggcgtgtgcatcgcccagtcggtgaagataccacgggagcccaaggcaggcgagttcgacaagatcatccgccgcctcctggagacttcgaacgccagggcagtcatcatctttgccaacgaggatgacatcaggcgtgtgctggaggcagcacgaagggccaaccagacaggccatttcttctggatgggctctgacagctggggctccaagattgcacctgtgctgcacctggaggaggtggctgagggtgctgtcacgatcctccccaagaggatgtccgtacgaggcttcgaccgctacttctccagccgcacgctggacaacaaccggcgcaacatctggtttgccgagttctgggaggacaacttccactgcaagctgagccgccacgccctcaagaagggcagccacgtcaagaagtgcaccaaccgtgagcgaattgggcaggattcagcttatgagcaggagggg

SEQ ID NO: 137541 - DNA, 2978 bp, Homo sapiens
  Payload ID: 6928
  Gene Symbol: GRM4
  Gene Name: glutamate receptor, metabotropic 4
  ENST ID: ENST00000609278
  CDS Start-End: 457-1002
gctttgctgtacttttctgggtgtgtgttagggaggctatgttcctgaccctccccctctggggtgagaaggggtccccgccatgtcctcggggttggtaggaggagaggattggagctgttttctccttgatgccaagatacgccaagctaggagcattctgccctttccacagtcatccaccgagaacaggcctgcaggacgggacaaggatcagagccttcctgcaaccccggccactgcctgctgtctgtgggcctggactgtgcgggcaactgtgcttggcccgagtgacaaggaggtgggagagggtagcagcatgggctacgcggttggctgccctcagtccccctgctgctgaagctgccctgcccatgcccacccaggccgtggggccaggggcctgccagggctaggagtgggcctgccgttcatgggtctctagggatttccgagatgcctgggaagagaggcttgggctggtggtgggcccggctgcccctttgcctgctcctcagcctttacggcccctggatgccttcctccctgggaaagcccaaaggccaccctcacatgaattccatccgcatagatggggacatcacactgggaggcctgttcccggtgcatggccggggctcagagggcaagccctgtggagaacttaagaaggaaaagggcatccaccggctggaggccatgctgttcgccctggatcgcatcaacaacgacccggacctgctgcctaacatcacgctgggcgcccgcattctggacacctgctccagggacacccatgccctcgagcagtcgctgacctttgtgcaggcgctcatcgagaaggatggcacagaggtccgctgtggcagtggcggcccacccatcatcaccaagcctgaacgtgtggtgggtgtcatcggtgcttcagggagctcggtctccatcatggtggccaacatccttcgcctcttcaagggggcgtgtgcatcgcccagtcggtgaagataccacgggagcccaaggcaggcgagttcgacaagatcatccgccgcctcctggagacttcgaacgccagggcagtcatcatctttgccaacgaggatgacatcaggcgtgtgctggaggcagcacgaagggccaaccagacaggccatttcttctggatgggctctgacagctggggctccaagattgcacctgtgctgcacctggaggaggtggctgagggtgctgtcacgatcctccccaagaggatgtccgtacgaggcttcgaccgctacttctccagccgcacgctggacaacaaccggcgcaacatctggtttgccgagttctgggaggacaacttccactgcaagctgagccgccacgccctcaagaagggcagccacgtcaagaagtgcaccaaccgtgagcgaattgggcaggattcagcttatgagcaggaggggaaggtgcagtttgtgatcgatgccgtgtacgccatgggccacgcgctgcacgccatgcaccgtgacctgtgtcccggccgcgtggggctctgcccgcgcatggaccctgtagatggcacccagctgcttaagtacatccgaaacgtcaacttctcaggcatcgcagggaaccctgtgaccttcaatgagaatggagatgcgcctgggcgctatgacatctaccaataccagctgcgcaacgattctgccgagtacaaggtcattggctcctggactgaccacctgcaccttagaatagagcggatgcactggccggggagcgggcagcagctgccccgctccatctgcagcctgccctgccaaccgggtgagcggaagaagacagtgaagggcatgccttgctgctggcactgcgagccttgcacagggtaccagtaccaggtggaccgctacacctgtaagacgtgtccctatgacatgcggcccacagagaaccgcacgggctgccggcccatccccatcatcaagcttgagtggggctcgccctgggccgtgctgcccctcttcctggccgtggtgggcatcgctgccacgttgttcgtggtgatcacctttgtgcgctacaacgacacgcccatcgtcaaggcctcgggccgtgaactgagctacgtgctgctggcaggcatcttcctgtgctatgccaccaccttcctcatgatcgctgagcccgaccttggcacctgctcgctgcgccgaatcttcctgggactagggatgagcatcagctatgcagccctgctcaccaagaccaaccgcatctaccgcatcttcgagcagggcaagcgctcggtcagtgccccacgcttcatcagccccgcctcacagctggccatcaccttcagcctcatctcgctgcagctgctgggcatctgtgtgtggtttgtggtggacccctcccactcggtggtggacttccaggaccagcggacactcgacccccgcttcgccaggggtgtgctcaagtgtgacatctcggacctgtcgctcatctgcctgctgggctacagcatgctgctcatggtcacgtgcaccgtgtatgccatcaagacacgcggcgtgcccgagaccttcaatgaggccaagcccattggcttcaccatgtacaccacttgcatcgtctggctggccttcatccccatcttctttggcacctcgcagtcggccgacaagctgtacatccagacgacgacgctgacggtctcggtgagtctgagcgcctcggtgtccctgggaatgctctacatgcccaaagtctacatcatcctcttccacccggagcagaacgtgcccaagcgcaagcgcagcctcaaagccgtcgttacggcggccaccatgtccaacaagttcacgcagaagggcaacttccggcccaacggagaggccaagtctgagctctgcgagaaccttgaggccccagcgctggccaccaaacagacttacgtcacttacaccaaccatgcaatctag

SEQ ID NO: 137542 - DNA, 3176 bp, Homo sapiens
  Payload ID: 6928
  Gene Symbol: GRM4
  Gene Name: glutamate receptor, metabotropic 4
  Uniprot ID: Q14833
  ENST ID: ENST00000609222
  CDS Start-End: 194-2533
agagatgctggagctgtggacctgggcggtcctggtggaggagtgcctgacacatcccagtctttcaccgtggtgcctgtggacagatgaggagactgaggctcacaaaggaggtgacttgcccaaggtcacacagcgaggcagcttctcacctatgggagttggactttgagccctccttggaaaagggggcatggctgtgccccttggggctccttgctgggcctctgccctgcctgcctgggctcctcccggcctcccccacagatcactgttgacaaggttactgagtcagcatgtaaaacctgcaaaaataccccagatcagctacgcctccacagcgccagacctgagtgacaacagccgctacgacttcttctcccgcgtggtgccctcggacacgtaccaggcccaggccatggtggacatcgtccgtgccctcaagtggaactatgtgtccacagtggcctcggagggcagctatggtgagagcggtgtggaggccttcatccagaagtcccgtgaggacgggggcgtgtgcatcgcccagtcggtgaagataccacgggagcccaaggcaggcgagttcgacaagatcatccgccgcctcctggagacttcgaacgccagggcagtcatcatctttgccaacgaggatgacatcaggcgtgtgctggaggcagcacgaagggccaaccagacaggccatttcttctggatgggctctgacagctggggctccaagattgcacctgtgctgcacctggaggaggtggctgagggtgctgtcacgatcctccccaagaggatgtccgtacgaggcttcgaccgctacttctccagccgcacgctggacaacaaccggcgcaacatctggtttgccgagttctgggaggacaacttccactgcaagctgagccgccacgccctcaagaagggcagccacgtcaagaagtgcaccaaccgtgagcgaattgggcaggattcagcttatgagcaggaggggaaggtgcagtttgtgatcgatgccgtgtacgccatgggccacgcgctgcacgccatgcaccgtgacctgtgtcccggccgcgtggggctctgcccgcgcatggaccctgtagatggcacccagctgcttaagtacatccgaaacgtcaacttctcaggcatcgcagggaaccctgtgaccttcaatgagaatggagatgcgcctgggcgctatgacatctaccaataccagctgcgcaacgattctgccgagtacaaggtcattggctcctggactgaccacctgcaccttagaatagagcggatgcactggccggggagcgggcagcagctgccccgctccatctgcagcctgccctgccaaccgggtgagcggaagaagacagtgaagggcatgccttgctgctggcactgcgagccttgcacagggtaccagtaccaggtggaccgctacacctgtaagacgtgtccctatgacatgcggcccacagagaaccgcacgggctgccggcccatccccatcatcaagcttgagtggggctcgccctgggccgtgctgcccctcttcctggccgtggtgggcatcgctgccacgttgttcgtggtgatcacctttgtgcgctacaacgacacgcccatcgtcaaggcctcgggccgtgaactgagctacgtgctgctggcaggcatcttcctgtgctatgccaccaccttcctcatgatcgctgagcccgaccttggcacctgctcgctgcgccgaatcttcctgggactagggatgagcatcagctatgcagccctgctcaccaagaccaaccgcatctaccgcatcttcgagcagggcaagcgctcggtcagtgccccacgcttcatcagccccgcctcacagctggccatcaccttcagcctcatctcgctgcagctgctgggcatctgtgtgtggtttgtggtggacccctcccactcggtggtggacttccaggaccagcggacactcgacccccgcttcgccaggggtgtgctcaagtgtgacatctcggacctgtcgctcatctgcctgctgggctacagcatgctgctcatggtcacgtgcaccgtgtatgccatcaagacacgcggcgtgcccgagaccttcaatgaggccaagcccattggcttcaccatgtacaccacttgcatcgtctggctggccttcatccccatcttctttggcacctcgcagtcggccgacaagctgtacatccagacgacgacgctgacggtctcggtgagtctgagcgcctcggtgtccctgggaatgctctacatgcccaaagtctacatcatcctcttccacccggagcagaacgtgcccaagcgcaagcgcagcctcaaagccgtcgttacggcggccaccatgtccaacaagttcacgcagaagggcaacttccggcccaacggagaggccaagtctgagctctgcgagaaccttgaggccccagcgctggccaccaaacagacttacgtcacttacaccaaccatgcaatctagcgagtccatggagctgagcagcaggaggaggagccgtgaccctgtggaaggtgcgtcgggccagggccacacccaagggcccagctgtcttgcctgcccgtgggcacccacggacgtggcttggtgctgaggatagcagagcccccagccatcactgctggcagcctgggcaaaccgggtgagcaacaggaggacgaggggccggggcggtgccaggctaccacaagaacctgcgtcttggaccattgcccctcccggccccaaaccacaggggctcaggtcgtgtgggccccagtgctagatctctccctcccttcgtctctgtctgtgctgttggcgacccctctgtctgtctccagccctgtctttctgttctcttatctctttgtttcaccttttccctctctggcgtccccggctgcttgtactcttggccttttctgtgtctcctttctggctcttgcctccgcctctctctctcatcctctttgtcctcagctcctcctgctttcttgggtcccaccagtgtcacttttctgccgttttctttcctgttctcctctgcttcattctcgtccagccattgctcccctctccctgccacccttccccagttcaccaaaccttacatgttgcaaaagag

SEQ ID NO: 137543 - DNA, 4475 bp, Homo sapiens
  Payload ID: 6929
  Gene Symbol: GRM5
  Gene Name: glutamate receptor, metabotropic 5
  Uniprot ID: P41594
  ENST ID: ENST00000305432
  CDS Start-End: 151-3693
acaaaatggtcctttagaaaatacatctgaattgctggctaatttcttgatttgcgactcaacgtaggacatcgcttgttcgtagctatcagaaccctcctgaattttccccaccatgctatctttattggcttgaactcctttcctaaaatggtccttctgttgatcctgtcagtcttacttttgaaagaagatgtccgtgggagtgcacagtccagtgagaggagggtggtggctcacatgccgggtgacatcattattggagctctcttttctgttcatcaccagcctactgtggacaaagttcatgagaggaagtgtggggcggtccgtgaacagtatggcattcagagagtggaggccatgctgcataccctggaaaggatcaattcagaccccacactcttgcccaacatcacactgggctgtgagataagggactcctgctggcattcggctgtggccctagagcagagcattgagttcataagagattccctcatttcttcagaagaggaagaaggcttggtacgctgtgtggatggctcctcctcttccttccgctccaagaagcccatagtaggggtcattgggcctggctccagttctgtagccattcaggtccagaatttgctccagcttttcaacatacctcagattgcttactcagcaaccagcatggatctgagtgacaagactctgttcaaatatttcatgagggttgtgccttcagatgctcagcaggcaagggccatggtggacatagtgaagaggtacaactggacctatgtatcagccgtgcacacagaaggcaactatggagaaagtgggatggaagccttcaaagatatgtcagcgaaggaagggatttgcatcgcccactcttacaaaatctacagtaatgcaggggagcagagctttgataagctgctgaagaagctcacaagtcacttgcccaaggcccgggtggtggcctgcttctgtgagggcatgacggtgagaggtctgctgatggccatgaggcgcctgggtctagcgggagaatttctgcttctgggcagtgatggctgggctgacaggtatgatgtgacagatggatatcagcgagaagctgttggtggcatcacaatcaagctccaatctcccgatgtcaagtggtttgatgattattatctgaagctccggccagaaacaaaccaccgaaacccttggtttcaagaattttggcagcatcgttttcagtgccgactggaagggtttccacaggagaacagcaaatacaacaagacttgcaatagttctctgactctgaaaacacatcatgttcaggattccaaaatgggatttgtgatcaacgccatctattcgatggcctatgggctccacaacatgcagatgtccctctgcccaggctatgcaggactctgtgatgccatgaagccaattgatggacggaaacttttggagtccctgatgaaaaccaattttactggggtttctggagatacgatcctattcgatgagaatggagactctccaggaaggtatgaaataatgaatttcaaggaaatgggaaaagattactttgattatatcaacgttggaagttgggacaatggagaattaaaaatggatgatgatgaagtatggtccaagaaaagcaacatcatcagatctgtgtgcagtgaaccatgtgagaaaggccagatcaaggtgatccgaaagggagaagtcagctgttgttggacctgtacaccttgtaaggagaatgagtatgtctttgatgagtacacatgcaaggcatgccaactggggtcttggcccactgatgatctcacaggttgtgacttgatcccagtacagtatcttcgatggggtgaccctgaacccattgcagctgtggtgtttgcctgccttggcctcctggccaccctgtttgttactgtagtcttcatcatttaccgtgatacaccagtagtcaagtcctcaagcagggaactctgctacattatccttgctggcatctgcctgggctacttatgtaccttctgcctcattgcgaagcccaaacagatttactgctaccttcagagaattggcattggtctctccccagccatgagctactcagcccttgtaacaaagaccaaccgtattgcaaggatcctggctggcagcaagaagaagatctgtaccaaaaagcccagattcatgagtgcctgtgcccagctagtgattgctttcattctcatatgcatccagttgggcatcatcgttgccctctttataatggagcctcctgacataatgcatgactacccaagcattcgagaagtctacctgatctgtaacaccaccaacctaggagttgtcactccacttggatacaatggattgttgattttgagctgcaccttctatgcgttcaagaccagaaatgttccagctaacttcaacgaggccaagtatatcgccttcacaatgtacacgacctgcattatatggctagcttttgtgccaatctactttggcagcaactacaaaatcatcaccatgtgtttctcggtcagcctcagtgccacagtggccctaggctgcatgtttgtgccgaaggtgtacatcatcctggccaaaccagagagaaacgtgcgcagcgccttcaccacatctaccgtggtgcgcatgcatgtaggggatggcaagtcatcctccgcagccagcagatccagcagcctagtcaacctgtggaagagaaggggctcctctggggaaaccttaagttccaatggaaaatccgtcacgtgggcccagaatgagaagagcagccgggggcagcacctgtggcagcgcctgtccatccacatcaacaagaaagaaaaccccaaccaaacggccgtcatcaagcccttccccaagagcacggagagccgtggcctgggcgctggcgctggcgcaggcgggagcgctgggggcgtgggggccacgggcggtgcgggctgcgcaggcgccggcccaggcgggcccgagtccccagacgccggccccaaggcgctgtatgatgtggccgaggctgaggagcacttcccggcgcccgcgcggccgcgctcaccgtcgcccatcagcacgctgagccaccgcgcgggctcggccagccgcacggacgacgatgtgccgtcgctgcactcggagcctgtggcgcgcagcagctcctcgcagggctccctcatggagcagatcagcagtgtggtcacccgcttcacggccaacatcagcgagctcaactccatgatgctgtccaccgcggcccccagccccggcgtcggcgccccgctctgctcgtcctacctgatccccaaagagatccagttgcccacgaccatgacgacctttgccgaaatccagcctctgccggccatcgaagtcacgggaggcgcgcagcccgcggcaggggcgcaggcggctggggacgcggcccgggagagccccgcggccggtcccgaggctgcggccgccaagccagacctggaggagctggtggctctcaccccgccgtcccccttcagagactcggtggactcggggagcacaacccccaactcgccagtgtccgagtcggccctctgtatcccgtcgtctcccaaatatgacactcttatcataagagattacactcagagctcctcgtcgttgtgaatgtccctggaaagcacgccggcctgcgcgtgcggagcggagccccccgtgttcacacacacacaatggcaagcatagtcgcctggttacggcccagggggaagatgccaagggcaccccttaatggaaacacgagatcagtagtgctatctcatgacaaccgacgaagaaaccgacgacaaatcttttggcagattttcttctagtggccttagaaaacatgggcttttaagaaacacggctgatatctttgagggctgacaaggcgtctcttcaaacagttccataccaagtgctttgctctagggaagcagtgcgtgtgaaacagcgtaacggagggtgaagagcatagttaataagcaactgtaaaaagttttatttgtttactttaattcttttcccagaagagtctttgattcaccaaacatgaatgtacattttctaacaaactcaaaatctgggaccaaaacatcaacttttttctttcttttttctttctttttgttttttctttcctgtaaagaccttgaaaagcagtaacttgggtccagtatttacggaggcgttgtgaatgtgtcccatgcataacacactactggatagtgagtgctgcgctaatgtactacgtagggcttctaccagagattttcctctccaattgggttgtgaaatactcttccaaaagcctgcatcggggattccacctacttatttcagattcacctccattaaccaagaaaaccagtggaagatttcttgactatttcaccatgttgccaatc

SEQ ID NO: 137544 - DNA, 4571 bp, Homo sapiens
  Payload ID: 6929
  Gene Symbol: GRM5
  Gene Name: glutamate receptor, metabotropic 5
  Uniprot ID: P41594
  ENST ID: ENST00000305447
  CDS Start-End: 151-3789
acaaaatggtcctttagaaaatacatctgaattgctggctaatttcttgatttgcgactcaacgtaggacatcgcttgttcgtagctatcagaaccctcctgaattttccccaccatgctatctttattggcttgaactcctttcctaaaatggtccttctgttgatcctgtcagtcttacttttgaaagaagatgtccgtgggagtgcacagtccagtgagaggagggtggtggctcacatgccgggtgacatcattattggagctctcttttctgttcatcaccagcctactgtggacaaagttcatgagaggaagtgtggggcggtccgtgaacagtatggcattcagagagtggaggccatgctgcataccctggaaaggatcaattcagaccccacactcttgcccaacatcacactgggctgtgagataagggactcctgctggcattcggctgtggccctagagcagagcattgagttcataagagattccctcatttcttcagaagaggaagaaggcttggtacgctgtgtggatggctcctcctcttccttccgctccaagaagcccatagtaggggtcattgggcctggctccagttctgtagccattcaggtccagaatttgctccagcttttcaacatacctcagattgcttactcagcaaccagcatggatctgagtgacaagactctgttcaaatatttcatgagggttgtgccttcagatgctcagcaggcaagggccatggtggacatagtgaagaggtacaactggacctatgtatcagccgtgcacacagaaggcaactatggagaaagtgggatggaagccttcaaagatatgtcagcgaaggaagggatttgcatcgcccactcttacaaaatctacagtaatgcaggggagcagagctttgataagctgctgaagaagctcacaagtcacttgcccaaggcccgggtggtggcctgcttctgtgagggcatgacggtgagaggtctgctgatggccatgaggcgcctgggtctagcgggagaatttctgcttctgggcagtgatggctgggctgacaggtatgatgtgacagatggatatcagcgagaagctgttggtggcatcacaatcaagctccaatctcccgatgtcaagtggtttgatgattattatctgaagctccggccagaaacaaaccaccgaaacccttggtttcaagaattttggcagcatcgttttcagtgccgactggaagggtttccacaggagaacagcaaatacaacaagacttgcaatagttctctgactctgaaaacacatcatgttcaggattccaaaatgggatttgtgatcaacgccatctattcgatggcctatgggctccacaacatgcagatgtccctctgcccaggctatgcaggactctgtgatgccatgaagccaattgatggacggaaacttttggagtccctgatgaaaaccaattttactggggtttctggagatacgatcctattcgatgagaatggagactctccaggaaggtatgaaataatgaatttcaaggaaatgggaaaagattactttgattatatcaacgttggaagttgggacaatggagaattaaaaatggatgatgatgaagtatggtccaagaaaagcaacatcatcagatctgtgtgcagtgaaccatgtgagaaaggccagatcaaggtgatccgaaagggagaagtcagctgttgttggacctgtacaccttgtaaggagaatgagtatgtctttgatgagtacacatgcaaggcatgccaactggggtcttggcccactgatgatctcacaggttgtgacttgatcccagtacagtatcttcgatggggtgaccctgaacccattgcagctgtggtgtttgcctgccttggcctcctggccaccctgtttgttactgtagtcttcatcatttaccgtgatacaccagtagtcaagtcctcaagcagggaactctgctacattatccttgctggcatctgcctgggctacttatgtaccttctgcctcattgcgaagcccaaacagatttactgctaccttcagagaattggcattggtctctccccagccatgagctactcagcccttgtaacaaagaccaaccgtattgcaaggatcctggctggcagcaagaagaagatctgtaccaaaaagcccagattcatgagtgcctgtgcccagctagtgattgctttcattctcatatgcatccagttgggcatcatcgttgccctctttataatggagcctcctgacataatgcatgactacccaagcattcgagaagtctacctgatctgtaacaccaccaacctaggagttgtcactccacttggatacaatggattgttgattttgagctgcaccttctatgcgttcaagaccagaaatgttccagctaacttcaacgaggccaagtatatcgccttcacaatgtacacgacctgcattatatggctagcttttgtgccaatctactttggcagcaactacaaaatcatcaccatgtgtttctcggtcagcctcagtgccacagtggccctaggctgcatgtttgtgccgaaggtgtacatcatcctggccaaaccagagagaaacgtgcgcagcgccttcaccacatctaccgtggtgcgcatgcatgtaggggatggcaagtcatcctccgcagccagcagatccagcagcctagtcaacctgtggaagagaaggggctcctctggggaaaccttaaggtacaaagacaggagactggcccagcacaagtcggaaatagagtgtttcacccccaaagggagtatggggaatggtgggagagcaacaatgagcagttccaatggaaaatccgtcacgtgggcccagaatgagaagagcagccgggggcagcacctgtggcagcgcctgtccatccacatcaacaagaaagaaaaccccaaccaaacggccgtcatcaagcccttccccaagagcacggagagccgtggcctgggcgctggcgctggcgcaggcgggagcgctgggggcgtgggggccacgggcggtgcgggctgcgcaggcgccggcccaggcgggcccgagtccccagacgccggccccaaggcgctgtatgatgtggccgaggctgaggagcacttcccggcgcccgcgcggccgcgctcaccgtcgcccatcagcacgctgagccaccgcgcgggctcggccagccgcacggacgacgatgtgccgtcgctgcactcggagcctgtggcgcgcagcagctcctcgcagggctccctcatggagcagatcagcagtgtggtcacccgcttcacggccaacatcagcgagctcaactccatgatgctgtccaccgcggcccccagccccggcgtcggcgccccgctctgctcgtcctacctgatccccaaagagatccagttgcccacgaccatgacgacctttgccgaaatccagcctctgccggccatcgaagtcacgggaggcgcgcagcccgcggcaggggcgcaggcggctggggacgcggcccgggagagccccgcggccggtcccgaggctgcggccgccaagccagacctggaggagctggtggctctcaccccgccgtcccccttcagagactcggtggactcggggagcacaacccccaactcgccagtgtccgagtcggccctctgtatcccgtcgtctcccaaatatgacactcttatcataagagattacactcagagctcctcgtcgttgtgaatgtccctggaaagcacgccggcctgcgcgtgcggagcggagccccccgtgttcacacacacacaatggcaagcatagtcgcctggttacggcccagggggaagatgccaagggcaccccttaatggaaacacgagatcagtagtgctatctcatgacaaccgacgaagaaaccgacgacaaatcttttggcagattttcttctagtggccttagaaaacatgggcttttaagaaacacggctgatatctttgagggctgacaaggcgtctcttcaaacagttccataccaagtgctttgctctagggaagcagtgcgtgtgaaacagcgtaacggagggtgaagagcatagttaataagcaactgtaaaaagttttatttgtttactttaattcttttcccagaagagtctttgattcaccaaacatgaatgtacattttctaacaaactcaaaatctgggaccaaaacatcaacttttttctttcttttttctttctttttgttttttctttcctgtaaagaccttgaaaagcagtaacttgggtccagtatttacggaggcgttgtgaatgtgtcccatgcataacacactactggatagtgagtgctgcgctaatgtactacgtagggcttctaccagagattttcctctccaattgggttgtgaaatactcttccaaaagcctgcatcggggattccacctacttatttcagattcacctccattaaccaagaaaaccagtggaagatttcttgactatttcaccatgttgccaatc

SEQ ID NO: 137545 - DNA, 1268 bp, Homo sapiens
  Payload ID: 6929
  Gene Symbol: GRM5
  Gene Name: glutamate receptor, metabotropic 5
  ENST ID: ENST00000393294
  CDS Start-End: 371-1267
cgcgagagagcgagcgccaccgccgcgggccccgcagccgttctgcctgctgtcaccgctgcctccatcgccgacactagcgctccagctgcagccaaggccgctacgagagcgcaggaagccctcgaggagcggctgcctgggggcgcaaggctcagggcgcgcacctggtttagaagatcatgaccacatggatcatctaactaaatggtacatggggacaaaatggtcctttagaaaatacatctgaattgctggctaatttcttgatttgcgactcaacgtaggacatcgcttgttcgtagctatcagaaccctcctgaattttccccaccatgctatctttattggcttgaactcctttcctaaaatggtccttctgttgatcctgtcagtcttacttttgaaagaagatgtccgtgggagtgcacagtccagtgagaggagggtggtggctcacatgccgggtgacatcattattggagctctcttttctgttcatcaccagcctactgtggacaaagttcatgagaggaagtgtggggcggtccgtgaacagtatggcattcagagagtggaggccatgctgcataccctggaaaggatcaattcagaccccacactcttgcccaacatcacactgggctgtgagataagggactcctgctggcattcggctgtggccctagagcagagcattgagttcataagagattccctcatttcttcagaagaggaagaaggcttggtacgctgtgtggatggctcctcctcttccttccgctccaagaagcccatagtaggggtcattgggcctggctccagttctgtagccattcaggtccagaatttgctccagcttttcaacatacctcagattgcttactcagcaaccagcatggatctgagtgacaagactctgttcaaatatttcatgagggttgtgccttcagatgctcagcaggcaagggccatggtggacatagtgaagaggtacaactggacctatgtatcagccgtgcacacagaaggtagagggacaaagaaggaagagatgcgtaagagggatcagacattgatgttatcttttatgaggtgtgtgttcttgagatttgaagaaattagatggaatgattctttagtatatgatgccctggaaaatgaaaacatccaagtgctgtctctctgtttccccagcagtgctgtaattcaaataaatacctttctttctcctatagctttaataaaccgtttgaatgttacataaa

SEQ ID NO: 137546 - DNA, 450 bp, Homo sapiens
  Payload ID: 6929
  Gene Symbol: GRM5
  Gene Name: glutamate receptor, metabotropic 5
  ENST ID: ENST00000449371
  CDS Start-End: 1-263
ctcagattgcttactcagcaaccagcatggatctgagtgacaagactctgttcaaatatttcatgagggttgtgccttcagatgctcagcaggcaagggccatggtggacatagtgaagaggtacaactggacctatgtatcagccgtgcacacagaaggtagagggacaaagaaggaagagatgcgtaagagggatcagacattgatgttatcttttatgaggttcaagctattctcatgcctcagcctccagaggagctaggattacaggcatgtaccacacccaggaagttatacagatacacgttcctctgaacttcgccaatacttacagtattgtacaatacttatttgtgacttctcatcaacaccccaactggttagatgctgttatttttactggttgtatattaagacaataaaaaatttcgtacttgggtagcaaagaa

SEQ ID NO: 137547 - DNA, 7927 bp, Homo sapiens
  Payload ID: 6929
  Gene Symbol: GRM5
  Gene Name: glutamate receptor, metabotropic 5
  Uniprot ID: P41594
  ENST ID: ENST00000455756
  CDS Start-End: 369-3911
agctcggctgttctgcgcacgctgagcggagggaatgagcttgagatcatcttgggggggaagccggggactggagaggccggctctgccctgctgatccccgtggcccaacttttcggggggctagctagaccgagtctcactgctcgcagcgcagccaacaggggggtttagaagatcatgaccacatggatcatctaactaaatggtacatggggacaaaatggtcctttagaaaatacatctgaattgctggctaatttcttgatttgcgactcaacgtaggacatcgcttgttcgtagctatcagaaccctcctgaattttccccaccatgctatctttattggcttgaactcctttcctaaaatggtccttctgttgatcctgtcagtcttacttttgaaagaagatgtccgtgggagtgcacagtccagtgagaggagggtggtggctcacatgccgggtgacatcattattggagctctcttttctgttcatcaccagcctactgtggacaaagttcatgagaggaagtgtggggcggtccgtgaacagtatggcattcagagagtggaggccatgctgcataccctggaaaggatcaattcagaccccacactcttgcccaacatcacactgggctgtgagataagggactcctgctggcattcggctgtggccctagagcagagcattgagttcataagagattccctcatttcttcagaagaggaagaaggcttggtacgctgtgtggatggctcctcctcttccttccgctccaagaagcccatagtaggggtcattgggcctggctccagttctgtagccattcaggtccagaatttgctccagcttttcaacatacctcagattgcttactcagcaaccagcatggatctgagtgacaagactctgttcaaatatttcatgagggttgtgccttcagatgctcagcaggcaagggccatggtggacatagtgaagaggtacaactggacctatgtatcagccgtgcacacagaaggcaactatggagaaagtgggatggaagccttcaaagatatgtcagcgaaggaagggatttgcatcgcccactcttacaaaatctacagtaatgcaggggagcagagctttgataagctgctgaagaagctcacaagtcacttgcccaaggcccgggtggtggcctgcttctgtgagggcatgacggtgagaggtctgctgatggccatgaggcgcctgggtctagcgggagaatttctgcttctgggcagtgatggctgggctgacaggtatgatgtgacagatggatatcagcgagaagctgttggtggcatcacaatcaagctccaatctcccgatgtcaagtggtttgatgattattatctgaagctccggccagaaacaaaccaccgaaacccttggtttcaagaattttggcagcatcgttttcagtgccgactggaagggtttccacaggagaacagcaaatacaacaagacttgcaatagttctctgactctgaaaacacatcatgttcaggattccaaaatgggatttgtgatcaacgccatctattcgatggcctatgggctccacaacatgcagatgtccctctgcccaggctatgcaggactctgtgatgccatgaagccaattgatggacggaaacttttggagtccctgatgaaaaccaattttactggggtttctggagatacgatcctattcgatgagaatggagactctccaggaaggtatgaaataatgaatttcaaggaaatgggaaaagattactttgattatatcaacgttggaagttgggacaatggagaattaaaaatggatgatgatgaagtatggtccaagaaaagcaacatcatcagatctgtgtgcagtgaaccatgtgagaaaggccagatcaaggtgatccgaaagggagaagtcagctgttgttggacctgtacaccttgtaaggagaatgagtatgtctttgatgagtacacatgcaaggcatgccaactggggtcttggcccactgatgatctcacaggttgtgacttgatcccagtacagtatcttcgatggggtgaccctgaacccattgcagctgtggtgtttgcctgccttggcctcctggccaccctgtttgttactgtagtcttcatcatttaccgtgatacaccagtagtcaagtcctcaagcagggaactctgctacattatccttgctggcatctgcctgggctacttatgtaccttctgcctcattgcgaagcccaaacagatttactgctaccttcagagaattggcattggtctctccccagccatgagctactcagcccttgtaacaaagaccaaccgtattgcaaggatcctggctggcagcaagaagaagatctgtaccaaaaagcccagattcatgagtgcctgtgcccagctagtgattgctttcattctcatatgcatccagttgggcatcatcgttgccctctttataatggagcctcctgacataatgcatgactacccaagcattcgagaagtctacctgatctgtaacaccaccaacctaggagttgtcactccacttggatacaatggattgttgattttgagctgcaccttctatgcgttcaagaccagaaatgttccagctaacttcaacgaggccaagtatatcgccttcacaatgtacacgacctgcattatatggctagcttttgtgccaatctactttggcagcaactacaaaatcatcaccatgtgtttctcggtcagcctcagtgccacagtggccctaggctgcatgtttgtgccgaaggtgtacatcatcctggccaaaccagagagaaacgtgcgcagcgccttcaccacatctaccgtggtgcgcatgcatgtaggggatggcaagtcatcctccgcagccagcagatccagcagcctagtcaacctgtggaagagaaggggctcctctggggaaaccttaagttccaatggaaaatccgtcacgtgggcccagaatgagaagagcagccgggggcagcacctgtggcagcgcctgtccatccacatcaacaagaaagaaaaccccaaccaaacggccgtcatcaagcccttccccaagagcacggagagccgtggcctgggcgctggcgctggcgcaggcgggagcgctgggggcgtgggggccacgggcggtgcgggctgcgcaggcgccggcccaggcgggcccgagtccccagacgccggccccaaggcgctgtatgatgtggccgaggctgaggagcacttcccggcgcccgcgcggccgcgctcaccgtcgcccatcagcacgctgagccaccgcgcgggctcggccagccgcacggacgacgatgtgccgtcgctgcactcggagcctgtggcgcgcagcagctcctcgcagggctccctcatggagcagatcagcagtgtggtcacccgcttcacggccaacatcagcgagctcaactccatgatgctgtccaccgcggcccccagccccggcgtcggcgccccgctctgctcgtcctacctgatccccaaagagatccagttgcccacgaccatgacgacctttgccgaaatccagcctctgccggccatcgaagtcacgggaggcgcgcagcccgcggcaggggcgcaggcggctggggacgcggcccgggagagccccgcggccggtcccgaggctgcggccgccaagccagacctggaggagctggtggctctcaccccgccgtcccccttcagagactcggtggactcggggagcacaacccccaactcgccagtgtccgagtcggccctctgtatcccgtcgtctcccaaatatgacactcttatcataagagattacactcagagctcctcgtcgttgtgaatgtccctggaaagcacgccggcctgcgcgtgcggagcggagccccccgtgttcacacacacacaatggcaagcatagtcgcctggttacggcccagggggaagatgccaagggcaccccttaatggaaacacgagatcagtagtgctatctcatgacaaccgacgaagaaaccgacgacaaatcttttggcagattttcttctagtggccttagaaaacatgggcttttaagaaacacggctgatatctttgagggctgacaaggcgtctcttcaaacagttccataccaagtgctttgctctagggaagcagtgcgtgtgaaacagcgtaacggagggtgaagagcatagttaataagcaactgtaaaaagttttatttgtttactttaattcttttcccagaagagtctttgattcaccaaacatgaatgtacattttctaacaaactcaaaatctgggaccaaaacatcaacttttttctttcttttttctttctttttgttttttctttcctgtaaagaccttgaaaagcagtaacttgggtccagtatttacggaggcgttgtgaatgtgtcccatgcataacacactactggatagtgagtgctgcgctaatgtactacgtagggcttctaccagagattttcctctccaattgggttgtgaaatactcttccaaaagcctgcatcggggattccacctacttatttcagattcacctccattaaccaagaaaaccagtggaagatttcttgactatttcaccatgttgccaatcaatactggagtagcaaaaaaaatattttctggaatactgttttgtaattccctcactggggtgcattgtagctggaaattctctttataaaaatcattcttgagctccagcctggctatctctttcaagaaacatggccactctttaggaatgctgttgcgtttgcattgccaactaaaatattaaaatatgcattggggcttcttcattcctttattttgagaacctgatgcacaaagagctcctttgttcttttcgagtcccaccactggaagagtggtccatagaccccatgaagacattgtcatgatttgagagactgttgttgaaaggattaacacaatcttaatacactgaaaattttaactgtgtcaagtcagcttagtggagatttagctatgccagtgagcagtgattttaactattcttggctgcttaaacagggcagctatgaactatgacaaatgtagatttttcaaagcaatacaaaatactaaaaaagaggaaccttaatgaatattaaccacacagtctttcttagccattccaaaaagaggcaaagcaattcttattttcttttttaaaataatgattaatatgattttgtgcacttcatactgtcactttttaaaactacagaaaagagatttagagtataacagaaacaagtgtgctttgatagtctcaaataggtagaattcatagttcaagacctgaatccactgtcatctctttcttcctcccattgcagctatcctcaggtaccaaatgttttgatttttaaataaggatagtaataaatggaggaggtgtcctataaatttaaagttcagttgacccagccttatacttaagatagccttatgaaaaatatgtgctgtgaggcagaagtatattttggcagagagaataataaataaaactttttcttttagctcaatatccttactttggtaagtatttttttttatttcacatctacttaacagaaaataaactgagaaatagaagtcagtccattggcataatttatcattcttcactttaaaaaattctaataaatattctgcttgagttttcttttctgctatttgttcttacttgcaactttaagtcaaacctcccaatacaaaacattaaaagctaacattaatgtactaaagtattaatttaaaagaaatcgaacctcccatgctagatttgaaaataacatcatcacagcaccctgatcccaaatattacaccgaggcttttaaaatgtaagtgaaatctagctaagtttcatggtttcattaaaagcaaatgtctgcctctatctgaaaaacaaatggaaatcttttgaggtgttaataccctttggatcctcatcaaaaggatggcattcacctgaggattcctatcttgacttcttaggtattaaaaacctttcttgatatgctctacattttaaaatttgttttataaaatccttatgttgattttcattttattctcaagtacaatacgtttcactctagaccagttgaagaacatgtttaaactttgttcatggtcaaattcattttctatttttttagtaacatatctcttaaaaagcacactaccttataaaaaacttcatcagaaattaaatttaatgcaagtaaattgccatctgatacttccacatgctatcataatcaactgtaataataaaaatgatttatccaattagaaaaggacaagatatatttttctctgtatttctataacttttgccactccattgaatacattgtatgttggacataagattattagtaatgcattcttgagatcttttattttggaatgatgctaactctgtctctttgccaattctaataccaggttccaagtaataactctacagtacaaagagaactgaatattcattctagggctataggatatgaacttcacaattcatttgggtacattctcattgaatttccttcaaaacaatctgttcctggtgcccagtgataattcagtcgggaccagcatgactaaaaggaaggggatatgctaaggctcagcaaagtgaccctaaatgagagatatgtcccaggatggaaagaagaagacgtggtttaaccaagttatactgactaatctaagcagtccactcatccttccattttgggaaaggagtgggggcagcctaagaagaacatatctggattgggaagaaccgtctttctgggctagggatggggaacagaaagggagtatggaaagaaaaattataagagatttgactgaagcaaggaaaaaaagcaaatccccaaacgtgctaatccttgaaagtaactatctttcccaaactactgctgttaccagcaagtgatcaggaagactaggagctatttctgactgtaaatgaattgtataatagctctgctgcagttctgtgacttccaagccaggaattaaatgctctttttaagaataacaaaaaacaaaagcatttcctatgctagtctcccagtaaaatgtacatgttttggagacttcaaaggtattatgtgagttcacatttagcaacagcttattaataaccctcaagctgtcagaatctctatagttaccatttacaattttatactgtgaaaaaatacagatcagtgaaagcataaagacaagtcagaattcactttgaagagggtctgaggcctgggagagtctctactgtctattgaagaatgaggcatgtataaaatagttggttgaatttcactgatcttcccaatgtgaacaaatatactatgtatattgtgtgtatttctagaaatcaatggcagctgctgatggtgttgtaattagaaatctatatagattatagatgttttagaaagatggtgccaatcctaaaagatttgtgtgggctaaaagtgcttgtacttacttttttctgcacttataactgatttggttttaaaattgtgtgcgtgtatctgttctttctctgttgtggcagcttgtactattaaaataatagagaatgttaaattattttgatgtgaactgcaaatgattttttttcataaagtttaacatttttatcagcattgttttgctttgtacttgtataaatatgttttattttagcacttcaaaatatacttgcctgtttctcagttgtctaaatcatgttgtacttggtgtttgtgaagccagttacttttcaaaaaaattaaaaaacctataatatga

SEQ ID NO: 137548 - DNA, 6143 bp, Homo sapiens
  Payload ID: 6930
  Gene Symbol: GRM6
  Gene Name: glutamate receptor, metabotropic 6
  Uniprot ID: O15303
  ENST ID: ENST00000231188
  CDS Start-End: 180-2813
cggaggcccgggcaggccggctgagctaactccccagagccgaagtggaaggcgcgccccgagcgccttctccccaggaccccggtgtccctccccgcgccccgagcccgcgctctccttcccccgccctcagagcgctccccgcccctctgtctccccgcagcccgctagacgagccgatggcgcggccccggagagcccgggagccgctgctcgtggcgctgctgccgctggcgtggctggcgcaggcgggcctggcgcgcgcggcgggctctgtgcgcctggcgggcggcctgacgctgggcggcctgttcccggtgcacgcgcggggcgcggcgggccgggcgtgcgggcagctgaagaaggagcagggcgtgcaccggctggaggccatgctgtacgcgctggaccgcgtcaacgccgaccccgagctgctgcccggcgtgcgcctgggcgcgcggctgctggacacctgctcgcgggacacctacgcgctggagcaggcgctgagcttcgtgcaggcgctgatccgcggccgcggcgacggcgacgaggtgggcgtgcgctgcccgggaggcgtccctccgctgcgccccgcgccccccgagcgcgtcgtggccgtcgtgggcgcctcggccagctccgtctccatcatggtcgccaacgtgctgcgcctgtttgcgataccccagatcagctatgcctccacagccccggagctcagcgactccacacgctatgacttcttctcccgggtggtgccacccgactcctaccaggcgcaggccatggtggacatcgtgagggcactgggatggaactatgtgtccacgctggcctccgagggcaactatggcgaaagtggggttgaggccttcgttcagatctcccgagaggctgggggggtctgtattgcccagtctatcaagattcccagggaaccaaagccaggagagttcagcaaggtgatcaggagactcatggagacgcccaacgcccggggcatcatcatctttgccaatgaggatgacatcaggcgggtcctggaggcagctcgccaggccaacctgaccggccacttcctgtgggtcggctcagacagctggggagccaagacctcacccatcttgagcctggaggacgtggccgttggggccatcaccatcctgcccaaaagggcctccatcgacggatttgaccagtacttcatgactcgatccctggagaacaaccgcaggaacatctggttcgccgagttctgggaagagaattttaactgcaaactgaccagctcaggtacccagtcagacgattccacccgcaaatgcacaggcgaggaacgcatcggccgggactccacctacgagcaggagggcaaggtgcagtttgtgattgatgcggtgtacgccattgcccacgccctccacagcatgcaccaggcgctctgccctgggcacacaggcctgtgcccggcgatggaacccactgatgggcggatgcttctgcagtacattcgagctgtccgcttcaatggcagcgcaggaacccctgtgatgttcaacgagaacggagatgcgcccgggcggtacgacatcttccagtaccaggcgaccaatggcagtgccagcagtggcgggtaccaggcagtgggccagtgggcagagaccctcagactggatgtggaggccctgcagtggtctggcgacccccacgaggtgccctcgtctctgtgcagcctgccctgcgggccgggggagcggaagaagatggtgaagggcgtcccctgctgttggcactgcgaggcctgtgacgggtaccgcttccaggtggacgagttcacatgcgaggcctgtcctggggacatgaggcccacgcccaaccacacgggctgccgccccacacctgtggtgcgcctgagctggtcctccccctgggcagccccgccgctcctcctggccgtgctgggcatcgtggccactaccacggtggtggccaccttcgtgcggtacaacaacacgcccatcgtccgggcctcgggccgagagctcagctacgtcctcctcaccggcatcttcctcatctacgccatcaccttcctcatggtggctgagcctggggccgcggtctgtgccgcccgcaggctcttcctgggcctgggcacgaccctcagctactctgccctgctcaccaagaccaaccgtatctaccgcatctttgagcagggcaagcgctcggtcacaccccctcccttcatcagccccacctcacagctggtcatcaccttcagcctcacctccctgcaggtggtggggatgatagcatggctgggggcccggcccccacacagcgtgattgactatgaggaacagcggacggtggaccccgagcaggccagaggggtgctcaagtgcgacatgtcggatctgtctctcatcggctgcctgggctacagcctcctgctcatggtcacgtgcacagtgtacgccatcaaggcccgtggcgtgcccgagaccttcaacgaggccaagcccatcggcttcaccatgtacaccacctgcatcatctggctggcattcgtgcccatcttctttggcactgcccagtcagctgaaaagatctacatccagacaaccacgctaaccgtgtccttgagcctgagtgcctcggtgtccctcggcatgctctacgtacccaaaacctacgtcatcctcttccatccagagcagaatgtgcagaagcgaaagcggagcctcaaggccacctccacggtggcagccccacccaagggcgaggatgcagaggcccacaagtagcagggcaggtgggaacgggactgcttgctgcctctcctttcttcctcttgcctcgaggtggaagctgtatagagcccgggtccacggtgaacagtcagtggcagggagtttgccaagaccatgctccgcgtcggtggggctggccttgagaaggaactggacccagctctaccccgattccagcatgtgagcttcatgcttcctcaccacagaccagactcgcttcccatggtgggaaacagccaccgagaaggttctagctctagaaagggactaaacttattctctcatccgaagtccaaagaggatgatgaagccctgggctttgcctggtttgcgggagatttcctcccctcagtcaacccccataacctggggattgggcagtgtggaagaacgtgtagaccccagaatgaaacatggggttggagtggaggaggagctgtctcagcaagaggagacctggggctgtgcatctggatggaggcactcaggcctgggtaggattcctctggcacggagggagagaccctgggtgagacccctgtgagcatgggaagggcctgcagtgggcgcgggagtgagctgaggaactggggtgcgcccccatgagattcccaatgccatgggctttcccccatccccccgggattgggcaaggtcagacttagagtacagctgttttcctcccctctgtgtactcccttaaatcaccccaaccttggccaggcatggtggctcacacctgtaatcccagcactttgggaggccgaggcaggtggatcacctgaggtccggagttcgagaccagcctggccaatgtggtgaaaccctgtctctactaaaaatacaaaaattagccaggtgtgatggtgggtgcctgtaatcccagttacttgggaggctgaggcaggagaatcgcttgaacctgggaggtggaggttgcagtgagctgtgattgtgccactgtactccagcctgggtgacagagcgagactctgtctcaaaaaaacaaaacaaaaaaacaccaaaaaaacccccaaacctgaagaaattcagatacacgtgtgtaatgttagtgatgtgagaacaaggagcaggggtgcatttgtgttgtgttcgggttggggatgggtttaggagctccaggttgggagcagtgacagagagtcatggccgtggtgagggtgaatcccaagtggatggctcaggacgggtatggaaacccttcattcctcataggtactgggaagtccatttgcaagctgagcgccaggcctggggaggaagaggcttgggctgcagatgcacgcacatttgtttttcactgatagtttttacaaaaagcttggtttaagttatggagttttatgtccctgggagtagaatttacatttgttaaattgaccactgtttaagatcagtatacattctctagtctgtgatgtctggagctagttttgagggtgaaccacactttatccaacatacaaactttcccatgcagcttctctggtgcgcagttggttttgaccgtgggactaggtgcttctgcaggttttaagtaattaacttaaaagcttctcctctgagaaacatttctgttgcgctactgactctccttctccacatttgttgtgttcctagggcttctctatagtgcacattaggacgtttcatttgttgctgaatgctttccagaattatttattccatagggtttctctcctgtgcagctctctcatgggtaatggggcgtgttttcttgccaaaggcggttccaccctcgtgattgtatagggctcttctcctgtatgaactctgagatcagtgagctctgatctccaagggaaagttttcctgcatttgctgttttctcatgtctctcccagtgtgaattctttggtgtgcagtgcgctctggcttctagctgaaaacttttccacagttttacattcatgtggttttctccactgtgaactctgtgattcagaatcagaagcagttcttagtagaggcatttctacactgattgcactgaggatttctccccagtgtgaagtttctggcatagagtcctggcttcccgcagacgactttcacactctgccatgttcatgcctgtgggcctctctggcaggaactctgatgcaccgcgaggcccatgtactcctgtggctttctcacattcggtctacttgcagggtatctccacagcatgcaccattctgggtacagggggacatcctctgttactgaagatgttgtcatatttagtaccttcacaaggtttctctccttccagaattttctgatgtacacaaataactgacttccacaagagggcttttccacactcggtgtgtgcatacagtttctgcctgtgatcatttctttatgttattattttattttttcgagatagggtcttgctcaatttcttaggctggagtgcagtggcacgatcatagctcactgaagtttcgacctgggctcaagcaatcctcccgcttcagcctcctgagtagctggtgcgcacgaccatacccagctaatgttttattttttgtagagacgaggtctcactatgttgcccaggctggtctcgaacttctgagctcgagcgatcctcctgcctccacctcccaaagtgttcggattacaaacgtgagccatcgcacctagcctctttgatcatttctgtggtgttcagtggaggttgacagctccctaaagattttcctgtttttttgcatgcatgggtttgaattctttgaggtccaatttatttggacccctgaataaagttttgtgggttttcttctatgtgtggaatttataaggcattcttccagtgtggtttctcttatgtcgagtgagagctgacctgcaccgaaggttttgtcccatttgttgcccttgaattatttgtatgaattatatgttccagtgaaaatggagttctgggttggaggcttattccatgtttacacaattaaaattgcagtgttcctctctgggatgagagctctaaagcagagtaagattacgttctgatgtaagctttaaccacctatttataaggtctcacctgtggtccactgtgttgagacttctacagaagagcttctgtatagtaaccattttcttaggctgtctcacttgtgtgaatcttctgacacatttattatagctttgtcccatttcttatcctttttgctctttagaaatttccctttaatttattacattcattgcttactgtaaagagtccaggtaactgactttattcagttacttcctgttcaataaatttaacttttcccaaaa

SEQ ID NO: 137549 - DNA, 2673 bp, Homo sapiens
  Payload ID: 6930
  Gene Symbol: GRM6
  Gene Name: glutamate receptor, metabotropic 6
  Uniprot ID: O15303
  ENST ID: ENST00000517717
  CDS Start-End: 40-2673
tgaaccgacagcggctggcgcagcccgctagacgagccgatggcgcggccccggagagcccgggagccgctgctcgtggcgctgctgccgctggcgtggctggcgcaggcgggcctggcgcgcgcggcgggctctgtgcgcctggcgggcggcctgacgctgggcggcctgttcccggtgcacgcgcggggcgcggcgggccgggcgtgcgggcagctgaagaaggagcagggcgtgcaccggctggaggccatgctgtacgcgctggaccgcgtcaacgccgaccccgagctgctgcccggcgtgcgcctgggcgcgcggctgctggacacctgctcgcgggacacctacgcgctggagcaggcgctgagcttcgtgcaggcgctgatccgcggccgcggcgacggcgacgaggtgggcgtgcgctgcccgggaggcgtccctccgctgcgccccgcgccccccgagcgcgtcgtggccgtcgtgggcgcctcggccagctccgtctccatcatggtcgccaacgtgctgcgcctgtttgcgataccccagatcagctatgcctccacagccccggagctcagcgactccacacgctatgacttcttctcccgggtggtgccacccgactcctaccaggcgcaggccatggtggacatcgtgagggcactgggatggaactatgtgtccacgctggcctccgagggcaactatggcgaaagtggggttgaggccttcgttcagatctcccgagaggctgggggggtctgtattgcccagtctatcaagattcccagggaaccaaagccaggagagttcagcaaggtgatcaggagactcatggagacgcccaacgcccggggcatcatcatctttgccaatgaggatgacatcaggcgggtcctggaggcagctcgccaggccaacctgaccggccacttcctgtgggtcggctcagacagctggggagccaagacctcacccatcttgagcctggaggacgtggccgttggggccatcaccatcctgcccaaaagggcctccatcgacggatttgaccagtacttcatgactcgatccctggagaacaaccgcaggaacatctggttcgccgagttctgggaagagaattttaactgcaaactgaccagctcaggtacccagtcagacgattccacccgcaaatgcacaggcgaggaacgcatcggccgggactccacctacgagcaggagggcaaggtgcagtttgtgattgatgcggtgtacgccattgcccacgccctccacagcatgcaccaggcgctctgccctgggcacacaggcctgtgcccggcgatggaacccactgatgggcggatgcttctgcagtacattcgagctgtccgcttcaatggcagcgcaggaacccctgtgatgttcaacgagaacggagatgcgcccgggcggtacgacatcttccagtaccaggcgaccaatggcagtgccagcagtggcgggtaccaggcagtgggccagtgggcagagaccctcagactggatgtggaggccctgcagtggtctggcgacccccacgaggtgccctcgtctctgtgcagcctgccctgcgggccgggggagcggaagaagatggtgaagggcgtcccctgctgttggcactgcgaggcctgtgacgggtaccgcttccaggtggacgagttcacatgcgaggcctgtcctggggacatgaggcccacgcccaaccacacgggctgccgccccacacctgtggtgcgcctgagctggtcctccccctgggcagccccgccgctcctcctggccgtgctgggcatcgtggccactaccacggtggtggccaccttcgtgcggtacaacaacacgcccatcgtccgggcctcgggccgagagctcagctacgtcctcctcaccggcatcttcctcatctacgccatcaccttcctcatggtggctgagcctggggccgcggtctgtgccgcccgcaggctcttcctgggcctgggcacgaccctcagctactctgccctgctcaccaagaccaaccgtatctaccgcatctttgagcagggcaagcgctcggtcacaccccctcccttcatcagccccacctcacagctggtcatcaccttcagcctcacctccctgcaggtggtggggatgatagcatggctgggggcccggcccccacacagcgtgattgactatgaggaacagcggacggtggaccccgagcaggccagaggggtgctcaagtgcgacatgtcggatctgtctctcatcggctgcctgggctacagcctcctgctcatggtcacgtgcacagtgtacgccatcaaggcccgtggcgtgcccgagaccttcaacgaggccaagcccatcggcttcaccatgtacaccacctgcatcatctggctggcattcgtgcccatcttctttggcactgcccagtcagctgaaaagatctacatccagacaaccacgctaaccgtgtccttgagcctgagtgcctcggtgtccctcggcatgctctacgtacccaaaacctacgtcatcctcttccatccagagcagaatgtgcagaagcgaaagcggagcctcaaggccacctccacggtggcagccccacccaagggcgaggatgcagaggcccacaagtag

SEQ ID NO: 137550 - DNA, 4127 bp, Homo sapiens
  Payload ID: 6931
  Gene Symbol: GRM7
  Gene Name: glutamate receptor, metabotropic 7
  Uniprot ID: Q14831
  ENST ID: ENST00000357716
  CDS Start-End: 275-3022
agtgctgggctgttggagagagcgagcagcaagccggtgagcgcgagcgcggcgcgccggccggctaacccgagagcgcgaggcgccccaggctggcaggcgccgcgggacccctcaccctctctggtcgcccctccccggattcccccaccctccgtgcctgcaggagcccctgggctttcccggaggagctcgccctgaagggcccggacctcggcgagcccaccaccgttccctccagcgccgccgccgccaccgcagcagccggagcagcatggtccagctgaggaagctgctccgcgtcctgactttgatgaagttcccctgctgcgtgctggaggtgctcctgtgcgcgctggcggcggcggcgcgcggccaggagatgtacgccccgcactcaatccggatcgagggggacgtcaccctcggggggctgttccccgtgcacgccaagggtcccagcggagtgccctgcggcgacatcaagagggaaaacgggatccacaggctggaagcgatgctctacgccctggaccagatcaacagtgatcccaacctactgcccaacgtgacgctgggcgcgcggatcctggacacttgttccagggacacttacgcgctcgaacagtcgcttactttcgtccaggcgctcatccagaaggacacctccgacgtgcgctgcaccaacggcgaaccgccggttttcgtcaagccggagaaagtagttggagtgattggggcttcggggagttcggtctccatcatggtagccaacatcctgaggctcttccagatcccccagattagttatgcatcaacggcacccgagctaagtgatgaccggcgctatgacttcttctctcgcgtggtgccacccgattccttccaagcccaggccatggtagacattgtaaaggccctaggctggaattatgtgtctaccctcgcatcggaaggaagttatggagagaaaggtgtggagtccttcacgcagatttccaaagaggcaggtggactctgcattgcccagtccgtgagaatcccccaggaacgcaaagacaggaccattgactttgatagaattatcaaacagctcctggacacccccaactccagggccgtcgtgatttttgccaacgatgaggatataaagcagatccttgcagcagccaaaagagctgaccaagttggccattttctttgggtgggatcagacagctggggatccaaaataaacccactgcaccagcatgaagatatcgcagaaggggccatcaccattcagcccaagcgagccacggtggaagggtttgatgcctactttacgtcccgtacacttgaaaacaacagaagaaatgtatggtttgccgaatactgggaggaaaacttcaactgcaagttgacgattagtgggtcaaaaaaagaagacacagatcgcaaatgcacaggacaggagagaattggaaaagattccaactatgagcaggagggtaaagtccagttcgtgattgacgcagtctatgctatggctcacgcccttcaccacatgaacaaggatctctgtgctgactaccggggtgtctgcccagagatggagcaagctggaggcaagaagttgctgaagtatatacgcaatgttaatttcaatggtagtgctggcactccagtgatgtttaacaagaacggggatgcacctgggcgttatgacatctttcagtaccagaccacaaacaccagcaacccgggttaccgtctgatcgggcagtggacagacgaacttcagctcaatatagaagacatgcagtggggtaaaggagtccgagagatacccgcctcagtgtgcacactaccatgtaagccaggacagagaaagaagacacagaaaggaactccttgctgttggacctgtgagccttgcgatggttaccagtaccagtttgatgagatgacatgccagcattgcccctatgaccagaggcccaatgaaaatcgaaccggatgccaggatattcccatcatcaaactggagtggcactccccctgggctgtgattcctgtcttcctggcaatgttggggatcattgccaccatctttgtcatggccactttcatccgctacaatgacacgcccattgtccgggcatctgggcgggaactcagctatgttcttttgacgggcatctttctttgctacatcatcactttcctgatgattgccaaaccagatgtggcagtgtgttctttccggcgagttttcttgggcttgggtatgtgcatcagttatgcagccctcttgacgaaaacaaatcggatttatcgcatatttgagcagggcaagaaatcagtaacagctcccagactcataagcccaacatcacaactggcaatcacttccagtttaatatcagttcagcttctaggggtgttcatttggtttggtgttgatccacccaacatcatcatagactatgatgaacacaagacaatgaaccctgagcaagccagaggggttctcaagtgtgacattacagatctccaaatcatttgctccttgggatatagcattcttctcatggtcacatgtactgtgtatgccatcaagactcggggtgtacccgagaattttaacgaagccaagcccattggattcactatgtacacgacatgtatagtatggcttgccttcattccaattttttttggcaccgctcaatcagcggaaaagctctacatacaaactaccacgcttacaatctccatgaacctaagtgcatcagtggcgctggggatgctatacatgccgaaagtgtacatcatcattttccaccctgaactcaatgtccagaaacggaagcgaagcttcaaggcggtagtcacagcagccaccatgtcatcgaggctgtcacacaaacccagtgacagacccaacggtgaggcaaagaccgagctctgtgaaaacgtagacccaaacagccctgctgcaaaaaagaagtatgtcagttataataacctggttatctaacctgttccattccatggaaccatggaggaggaagaccctcagttattttgtcacccaacctggcataggactctttggtcctacccgcttcccatcaccggaggagcttccccggccgggagaccagtgttagaggatccaagcgacctaaacagctgctttatgaaatatccttactttatctgggcttaataagtcactgacatcagcactgccaactcggctgcaattgtggaccttccctaccaaagggagtgttgaaactcaagtcccgccctggctctttagaatggaccactgagagccacaggaccgttttggggctgacctgtcttattacgtatgtacttctaggttgcaaggttttgaaattttctgtacagtttgtgaggacctttgcactttgccatctgatgtcgtacctcggttcactgtttgttttcgaatgccttgttttcatagagccctattctctcagacggtggaatatttggaaaaattttaaaacaattaaaattttaaagcaatcttggcagactaaaacaagtacatctgtacatgactgtataattacgattatagtaccactgcacatcatgtttttttttttaagacaaaaaagatgtttaaagaccaaaaactgtgctgagaaagtatgccccacctatctttggtatatgataggttacataaaaggaaggtattggctgaactgaatagaggtcttgatctttggaatgcatgccagtaatgtattttacagtacatgtttattatgttcaatatttgtatttgtgttctcttttgttatttttaattagggtatatgaatattttgcaataattttaataattattaagctgtttgaaggaaagaatatggatttttcatgtcttgaggttttgttcatgccccctttgactgatcagtgtgataaggactttaggaaaaaaagcatgtatgttttttactgtttgtaataagtactttcgttaatcttgctgcttatgtgccaatttagtggaaaaaaacaacccttgctgaaaaattccctctttccattctctttcaattctgtgatattgtccaagaatgtatcaataa

SEQ ID NO: 137551 - DNA, 3020 bp, Homo sapiens
  Payload ID: 6931
  Gene Symbol: GRM7
  Gene Name: glutamate receptor, metabotropic 7
  Uniprot ID: Q14831
  ENST ID: ENST00000389335
  CDS Start-End: 150-2885
ggtcgcccctccccggattcccccaccctccgtgcctgcaggagcccctgggctttcccggaggagctcgccctgaagggcccggacctcggcgagcccaccaccgttccctccagcgccgccgccgccaccgcagcagccggagcagcatggtccagctgaggaagctgctccgcgtcctgactttgatgaagttcccctgctgcgtgctggaggtgctcctgtgcgcgctggcggcggcggcgcgcggccaggagatgtacgccccgcactcaatccggatcgagggggacgtcaccctcggggggctgttccccgtgcacgccaagggtcccagcggagtgccctgcggcgacatcaagagggaaaacgggatccacaggctggaagcgatgctctacgccctggaccagatcaacagtgatcccaacctactgcccaacgtgacgctgggcgcgcggatcctggacacttgttccagggacacttacgcgctcgaacagtcgcttactttcgtccaggcgctcatccagaaggacacctccgacgtgcgctgcaccaacggcgaaccgccggttttcgtcaagccggagaaagtagttggagtgattggggcttcggggagttcggtctccatcatggtagccaacatcctgaggctcttccagatcccccagattagttatgcatcaacggcacccgagctaagtgatgaccggcgctatgacttcttctctcgcgtggtgccacccgattccttccaagcccaggccatggtagacattgtaaaggccctaggctggaattatgtgtctaccctcgcatcggaaggaagttatggagagaaaggtgtggagtccttcacgcagatttccaaagaggcaggtggactctgcattgcccagtccgtgagaatcccccaggaacgcaaagacaggaccattgactttgatagaattatcaaacagctcctggacacccccaactccagggccgtcgtgatttttgccaacgatgaggatataaagcagatccttgcagcagccaaaagagctgaccaagttggccattttctttgggtgggatcagacagctggggatccaaaataaacccactgcaccagcatgaagatatcgcagaaggggccatcaccattcagcccaagcgagccacggtggaagggtttgatgcctactttacgtcccgtacacttgaaaacaacagaagaaatgtatggtttgccgaatactgggaggaaaacttcaactgcaagttgacgattagtgggtcaaaaaaagaagacacagatcgcaaatgcacaggacaggagagaattggaaaagattccaactatgagcaggagggtaaagtccagttcgtgattgacgcagtctatgctatggctcacgcccttcaccacatgaacaaggatctctgtgctgactaccggggtgtctgcccagagatggagcaagctggaggcaagaagttgctgaagtatatacgcaatgttaatttcaatggtagtgctggcactccagtgatgtttaacaagaacggggatgcacctgggcgttatgacatctttcagtaccagaccacaaacaccagcaacccgggttaccgtctgatcgggcagtggacagacgaacttcagctcaatatagaagacatgcagtggggtaaaggagtccgagagatacccgcctcagtgtgcacactaccatgtaagccaggacagagaaagaagacacagaaaggaactccttgctgttggacctgtgagccttgcgatggttaccagtaccagtttgatgagatgacatgccagcattgcccctatgaccagaggcccaatgaaaatcgaaccggatgccaggatattcccatcatcaaactggagtggcactccccctgggctgtgattcctgtcttcctggcaatgttggggatcattgccaccatctttgtcatggccactttcatccgctacaatgacacgcccattgtccgggcatctgggcgggaactcagctatgttcttttgacgggcatctttctttgctacatcatcactttcctgatgattgccaaaccagatgtggcagtgtgttctttccggcgagttttcttgggcttgggtatgtgcatcagttatgcagccctcttgacgaaaacaaatcggatttatcgcatatttgagcagggcaagaaatcagtaacagctcccagactcataagcccaacatcacaactggcaatcacttccagtttaatatcagttcagcttctaggggtgttcatttggtttggtgttgatccacccaacatcatcatagactatgatgaacacaagacaatgaaccctgagcaagccagaggggttctcaagtgtgacattacagatctccaaatcatttgctccttgggatatagcattcttctcatggtcacatgtactgtgtatgccatcaagactcggggtgtacccgagaattttaacgaagccaagcccattggattcactatgtacacgacatgtatagtatggcttgccttcattccaattttttttggcaccgctcaatcagcggaaaagctctacatacaaactaccacgcttacaatctccatgaacctaagtgcatcagtggcgctggggatgctatacatgccgaaagtgtacatcatcattttccaccctgaactcaatgtccagaaacggaagcgaagcttcaaggcggtagtcacagcagccaccatgtcatcgaggctgtcacacaaacccagtgacagacccaacggtgaggcaaagaccgagctctgtgaaaacgtagacccaaacataacctctgaggacctcagcttgcacaaagaggattgagataacatttccaaagcttgttcttcttgagctgacccaacacttaggaaaacatgacatggatcagcaactccattttctgtgagaagtgcaactgctactgaccatctgcactggcatctagtcaagcgattg

SEQ ID NO: 137552 - DNA, 2901 bp, Homo sapiens
  Payload ID: 6931
  Gene Symbol: GRM7
  Gene Name: glutamate receptor, metabotropic 7
  Uniprot ID: Q14831
  ENST ID: ENST00000389336
  CDS Start-End: 150-2870
ggtcgcccctccccggattcccccaccctccgtgcctgcaggagcccctgggctttcccggaggagctcgccctgaagggcccggacctcggcgagcccaccaccgttccctccagcgccgccgccgccaccgcagcagccggagcagcatggtccagctgaggaagctgctccgcgtcctgactttgatgaagttcccctgctgcgtgctggaggtgctcctgtgcgcgctggcggcggcggcgcgcggccaggagatgtacgccccgcactcaatccggatcgagggggacgtcaccctcggggggctgttccccgtgcacgccaagggtcccagcggagtgccctgcggcgacatcaagagggaaaacgggatccacaggctggaagcgatgctctacgccctggaccagatcaacagtgatcccaacctactgcccaacgtgacgctgggcgcgcggatcctggacacttgttccagggacacttacgcgctcgaacagtcgcttactttcgtccaggcgctcatccagaaggacacctccgacgtgcgctgcaccaacggcgaaccgccggttttcgtcaagccggagaaagtagttggagtgattggggcttcggggagttcggtctccatcatggtagccaacatcctgaggctcttccagatcccccagattagttatgcatcaacggcacccgagctaagtgatgaccggcgctatgacttcttctctcgcgtggtgccacccgattccttccaagcccaggccatggtagacattgtaaaggccctaggctggaattatgtgtctaccctcgcatcggaaggaagttatggagagaaaggtgtggagtccttcacgcagatttccaaagaggcaggtggactctgcattgcccagtccgtgagaatcccccaggaacgcaaagacaggaccattgactttgatagaattatcaaacagctcctggacacccccaactccagggccgtcgtgatttttgccaacgatgaggatataaagcagatccttgcagcagccaaaagagctgaccaagttggccattttctttgggtgggatcagacagctggggatccaaaataaacccactgcaccagcatgaagatatcgcagaaggggccatcaccattcagcccaagcgagccacggtggaagggtttgatgcctactttacgtcccgtacacttgaaaacaacagaagaaatgtatggtttgccgaatactgggaggaaaacttcaactgcaagttgacgattagtgggtcaaaaaaagaagacacagatcgcaaatgcacaggacaggagagaattggaaaagattccaactatgagcaggagggtaaagtccagttcgtgattgacgcagtctatgctatggctcacgcccttcaccacatgaacaaggatctctgtgctgactaccggggtgtctgcccagagatggagcaagctggaggcaagaagttgctgaagtatatacgcaatgttaatttcaatggtagtgctggcactccagtgatgtttaacaagaacggggatgcacctgggcgttatgacatctttcagtaccagaccacaaacaccagcaacccgggttaccgtctgatcgggcagtggacagacgaacttcagctcaatatagaagacatgcagtggggtaaaggagtccgagagatacccgcctcagtgtgcacactaccatgtaagccaggacagagaaagaagacacagaaaggaactccttgctgttggacctgtgagccttgcgatggttaccagtaccagtttgatgagatgacatgccagcattgcccctatgaccagaggcccaatgaaaatcgaaccggatgccaggatattcccatcatcaaactggagtggcactccccctgggctgtgattcctgtcttcctggcaatgttggggatcattgccaccatctttgtcatggccactttcatccgctacaatgacacgcccattgtccgggcatctgggcgggaactcagctatgttcttttgacgggcatctttctttgctacatcatcactttcctgatgattgccaaaccagatgtggcagtgtgttctttccggcgagttttcttgggcttgggtatgtgcatcagttatgcagccctcttgacgaaaacaaatcggatttatcgcatatttgagcagggcaagaaatcagtaacagctcccagactcataagcccaacatcacaactggcaatcacttccagtttaatatcagttcagcttctaggggtgttcatttggtttggtgttgatccacccaacatcatcatagactatgatgaacacaagacaatgaaccctgagcaagccagaggggttctcaagtgtgacattacagatctccaaatcatttgctccttgggatatagcattcttctcatggtcacatgtactgtgtatgccatcaagactcggggtgtacccgagaattttaacgaagccaagcccattggattcactatgtacacgacatgtatagtatggcttgccttcattccaattttttttggcaccgctcaatcagcggaaaagctctacatacaaactaccacgcttacaatctccatgaacctaagtgcatcagtggcgctggggatgctatacatgccgaaagtgtacatcatcattttccaccctgaactcaatgtccagaaacggaagcgaagcttcaaggcggtagtcacagcagccaccatgtcatcgaggctgtcacacaaacccagtgacagacccaacggtgaggcaaagaccgagctctgtgaaaacgtagacccaaacagtgagaagtgcaactgctactgaccatctgcactggcatctagtcaagcgattg

SEQ ID NO: 137553 - DNA, 2034 bp, Homo sapiens
  Payload ID: 6931
  Gene Symbol: GRM7
  Gene Name: glutamate receptor, metabotropic 7
  ENST ID: ENST00000402647
  CDS Start-End: 1-2034
ggtggactctgcattgcccagtccgtgagaatcccccaggaacgcaaagacaggaccattgactttgatagaattatcaaacagctcctggacacccccaactccagggccgtcgtgatttttgccaacgatgaggatataaagcagatccttgcagcagccaaaagagctgaccaagttggccattttctttgggtgggatcagacagctggggatccaaaataaacccactgcaccagcatgaagatatcgcagaaggggccatcaccattcagcccaagcgagccacggtggaagggtttgatgcctactttacgtcccgtacacttgaaaacaacagaagaaatgtatggtttgccgaatactgggaggaaaacttcaactgcaagttgacgattagtgggtcaaaaaaagaagacacagatcgcaaatgcacaggacaggagagaattggaaaagattccaactatgagcaggagggtaaagtccagttcgtgattgacgcagtctatgctatggctcacgcccttcaccacatgaacaaggatctctgtgctgactaccggggtgtctgcccagagatggagcaagctggaggcaagaagttgctgaagtatatacgcaatgttaatttcaatggtagtgctggcactccagtgatgtttaacaagaacggggatgcacctgggcgttatgacatctttcagtaccagaccacaaacaccagcaacccgggttaccgtctgatcgggcagtggacagacgaacttcagctcaatatagaagacatgcagtggggtaaaggagtccgagagatacccgcctcagtgtgcacactaccatgtaagccaggacagagaaagaagacacagaaaggaactccttgctgttggacctgtgagccttgcgatggttaccagtaccagtttgatgagatgacatgccagcattgcccctatgaccagaggcccaatgaaaatcgaaccggatgccaggatattcccatcatcaaactggagtggcactccccctgggctgtgattcctgtcttcctggcaatgttggggatcattgccaccatctttgtcatggccactttcatccgctacaatgacacgcccattgtccgggcatctgggcgggaactcagctatgttcttttgacgggcatctttctttgctacatcatcactttcctgatgattgccaaaccagatgtggcagtgtgttctttccggcgagttttcttgggcttgggtatgtgcatcagttatgcagccctcttgacgaaaacaaatcggatttatcgcatatttgagcagggcaagaaatcagtaacagctcccagactcataagcccaacatcacaactggcaatcacttccagtttaatatcagttcagcttctaggggtgttcatttggtttggtgttgatccacccaacatcatcatagactatgatgaacacaagacaatgaaccctgagcaagccagaggggttctcaagtgtgacattacagatctccaaatcatttgctccttgggatatagcattcttctcatggtcacatgtactgtgtatgccatcaagactcggggtgtacccgagaattttaacgaagccaagcccattggattcactatgtacacgacatgtatagtatggcttgccttcattccaattttttttggcaccgctcaatcagcggaaaagctctacatacaaactaccacgcttacaatctccatgaacctaagtgcatcagtggcgctggggatgctatacatgccgaaagtgtacatcatcattttccaccctgaactcaatgtccagaaacggaagcgaagcttcaaggcggtagtcacagcagccaccatgtcatcgaggctgtcacacaaacccagtgacagacccaacggtgaggcaaagaccgagctctgtgaaaacgtagacccaaacaactgtataccaccagtaagaaagagtgtacaaaagtctgttacttggtacactatcccaccaacagtatag

SEQ ID NO: 137554 - DNA, 595 bp, Homo sapiens
  Payload ID: 6931
  Gene Symbol: GRM7
  Gene Name: glutamate receptor, metabotropic 7
  ENST ID: ENST00000448328
  CDS Start-End: 230-595
agatggaaatgcagaaatcacccgtattcggccatcttggctcctcccccgaaacatccatgtctgattagcatgaaggttatgaggagaacgtgatcacagccaaggtagtcttctcaaaaagatcccccagattagttatgcatcaacggcacccgagctaagtgatgaccggcgctatgacttcttctctcgcgtggtgccacccgattccttccaagcccaggccatggtagacattgtaaaggccctaggctggaattatgtgtctaccctcgcatcggaaggaagttatggagagaaaggtgtggagtccttcacgcagatttccaaagaggcaggtggactctgcattgcccagtccgtgagaatcccccaggaacgcaaagacaggaccattgactttgatagaattatcaaacagctcctggacacccccaactccagggccgtcgtgatttttgccaacgatgaggatataaagcagatccttgcagcagccaaaagagctgaccaagttggccattttctttgggtgggatcagacagctggggatccaaaataaacccactgcaccagcatgaagatatcgca

SEQ ID NO: 137555 - DNA, 683 bp, Homo sapiens
  Payload ID: 6931
  Gene Symbol: GRM7
  Gene Name: glutamate receptor, metabotropic 7
  ENST ID: ENST00000445087
  CDS Start-End: 129-683
aaaatgaagatggtaaccaggcaacatggttcttctatagttattaaaaataaaacgtgaagcttctacaatgcacaataattttctgacaagtttgtctggctttctttctgtcattgcctggagaaatggggtttgatgcctactttacgtcccgtacacttgaaaacaacagaagaaatgtatggtttgccgaatactgggaggaaaacttcaactgcaagttgacgattagtgggtcaaaaaaagaagacacagatcgcaaatgcacaggacaggagagaattggaaaagattccaactatgagcaggagggtaaagtccagttcgtgattgacgcagtctatgctatggctcacgcccttcaccacatgaacaaggatctctgtgctgactaccggggtgtctgcccagagatggagcaagctggaggcaagaagttgctgaagtatatacgcaatgttaatttcaatggtagtgctggcactccagtgatgtttaacaagaacggggatgcacctgggcgttatgacatctttcagtaccagaccacaaacaccagcaacccgggttaccgtctgatcgggcagtggacagacgaacttcagctcaatatagaagacatgcagtggggtaaaggagtccgagagatacccgcctcagtgtgcacactaccatgtaag

SEQ ID NO: 137556 - DNA, 579 bp, Homo sapiens
  Payload ID: 6931
  Gene Symbol: GRM7
  Gene Name: glutamate receptor, metabotropic 7
  ENST ID: ENST00000443259
  CDS Start-End: 53-259
acggtgcgcgcacccactgacctgcgcccactgtctggcgctccctagtgagatgaacccggtacctcagatggaaatgcagaaatcacccgtattcggccatcttggctcctcccccgaagtgttatggaatacaaggtattacacagaagcagcaatttggaaagaccatcttgagagattcttcataaaaacagaaccccagtctataaggaaacatccatgtctgattagcatgaaggttatgaggagaacgtgatcacagccaaggtagtcttctcaaaaaggtagaactagatgacattgcaggcagtgagatgttatcatgtttgacccctggaactgtccaaaaatggaagaagctgcctcatcagatcccccagattagttatgcatcaacggcacccgagctaagtgatgaccggcgctatgacttcttctctcgcgtggtgccacccgattccttccaagcccaggccatggtagacattgtaaaggccctaggctggaattatgtgtctaccctcgcatcggaaggaagttatggagagaaaggtgtggagtccttcacgcagattt

SEQ ID NO: 137557 - DNA, 826 bp, Homo sapiens
  Payload ID: 6931
  Gene Symbol: GRM7
  Gene Name: glutamate receptor, metabotropic 7
  ENST ID: ENST00000435689
  CDS Start-End: 239-352
actatctccctgacgcagaccccaagccaaatcctcggcttggaggacgattcccggagcgaggcatgaaggcgcccgttgggaggcagaggggtgcgtgaagcggggccccgtggtcctcctgctccggtgccggagggagacggagaaaaaatgggaggaaggcggatccggggccgctgagcggtgggttctgccgcagtgttctctcgcctcctgctccagcagcctctgccccatggctcctgagctgcactggggagatgcccttctatcctgtctcagtttcccaatcctaaacgtccttcaaaaatcccccagattagttatgcatcaacggcacccgagctaagtgatgaccggcgctatgacttcttctctcgcgtggtgccacccgattccttccaagcccaggccatggtagacattgtaaaggccctaggctggaattatgtgtctaccctcgcatcggaaggaagttatggagagaaaggtgtggagtccttcacgcagatttccaaagaggcaggtggactctgcattgcccagtccgtgagaatcccccaggaacgcaaagacaggaccattgactttgatagaattatcaaacagctcctggacacccccaactccagggccgtcgtgatttttgccaacgatgaggatataaagcagatccttgcagcagccaaaagagctgaccaagttggccattttctttgggtgggatcagacagctggggatccaaaataaacccactgcaccagcatgaagatatcgcagaaggggccatcaccattcagcccaagcgagccacggtggaag

SEQ ID NO: 137558 - DNA, 3088 bp, Homo sapiens
  Payload ID: 6931
  Gene Symbol: GRM7
  Gene Name: glutamate receptor, metabotropic 7
  ENST ID: ENST00000440923
  CDS Start-End: 150-2891
ggtcgcccctccccggattcccccaccctccgtgcctgcaggagcccctgggctttcccggaggagctcgccctgaagggcccggacctcggcgagcccaccaccgttccctccagcgccgccgccgccaccgcagcagccggagcagcatggtccagctgaggaagctgctccgcgtcctgactttgatgaagttcccctgctgcgtgctggaggtgctcctgtgcgcgctggcggcggcggcgcgcggccaggagatgtacgccccgcactcaatccggatcgagggggacgtcaccctcggggggctgttccccgtgcacgccaagggtcccagcggagtgccctgcggcgacatcaagagggaaaacgggatccacaggctggaagcgatgctctacgccctggaccagatcaacagtgatcccaacctactgcccaacgtgacgctgggcgcgcggatcctggacacttgttccagggacacttacgcgctcgaacagtcgcttactttcgtccaggcgctcatccagaaggacacctccgacgtgcgctgcaccaacggcgaaccgccggttttcgtcaagccggagaaagtagttggagtgattggggcttcggggagttcggtctccatcatggtagccaacatcctgaggctcttccagatcccccagattagttatgcatcaacggcacccgagctaagtgatgaccggcgctatgacttcttctctcgcgtggtgccacccgattccttccaagcccaggccatggtagacattgtaaaggccctaggctggaattatgtgtctaccctcgcatcggaaggaagttatggagagaaaggtgtggagtccttcacgcagatttccaaagaggcaggtggactctgcattgcccagtccgtgagaatcccccaggaacgcaaagacaggaccattgactttgatagaattatcaaacagctcctggacacccccaactccagggccgtcgtgatttttgccaacgatgaggatataaagcagatccttgcagcagccaaaagagctgaccaagttggccattttctttgggtgggatcagacagctggggatccaaaataaacccactgcaccagcatgaagatatcgcagaaggggccatcaccattcagcccaagcgagccacggtggaagggtttgatgcctactttacgtcccgtacacttgaaaacaacagaagaaatgtatggtttgccgaatactgggaggaaaacttcaactgcaagttgacgattagtgggtcaaaaaaagaagacacagatcgcaaatgcacaggacaggagagaattggaaaagattccaactatgagcaggagggtaaagtccagttcgtgattgacgcagtctatgctatggctcacgcccttcaccacatgaacaaggatctctgtgctgactaccggggtgtctgcccagagatggagcaagctggaggcaagaagttgctgaagtatatacgcaatgttaatttcaatggtagtgctggcactccagtgatgtttaacaagaacggggatgcacctgggcgttatgacatctttcagtaccagaccacaaacaccagcaacccgggttaccgtctgatcgggcagtggacagacgaacttcagctcaatatagaagacatgcagtggggtaaaggagtccgagagatacccgcctcagtgtgcacactaccatgtaagccaggacagagaaagaagacacagaaaggaactccttgctgttggacctgtgagccttgcgatggttaccagtaccagtttgatgagatgacatgccagcattgcccctatgaccagaggcccaatgaaaatcgaaccggatgccaggatattcccatcatcaaactggagtggcactccccctgggctgtgattcctgtcttcctggcaatgttggggatcattgccaccatctttgtcatggccactttcatccgctacaatgacacgcccattgtccgggcatctgggcgggaactcagctatgttcttttgacgggcatctttctttgctacatcatcactttcctgatgattgccaaaccagatgtggcagtgtgttctttccggcgagttttcttgggcttgggtatgtgcatcagttatgcagccctcttgacgaaaacaaatcggatttatcgcatatttgagcagggcaagaaatcagtaacagctcccagactcataagcccaacatcacaactggcaatcacttccagtttaatatcagttcagcttctaggggtgttcatttggtttggtgttgatccacccaacatcatcatagactatgatgaacacaagacaatgaaccctgagcaagccagaggggttctcaagtgtgacattacagatctccaaatcatttgctccttgggatatagcattcttctcatggtcacatgtactgtgtatgccatcaagactcggggtgtacccgagaattttaacgaagccaagcccattggattcactatgtacacgacatgtatagtatggcttgccttcattccaattttttttggcaccgctcaatcagcggaaaagctctacatacaaactaccacgcttacaatctccatgaacctaagtgcatcagtggcgctggggatgctatacatgccgaaagtgtacatcatcattttccaccctgaactcaatgtccagaaacggaagcgaagcttcaaggcggtagtcacagcagccaccatgtcatcgaggctgtcacacaaacccagtgacagacccaacggtgaggcaaagaccgagctctgtgaaaacgtagacccaaacaatttttttttttggctgtacagtggaacttggattacactttaaattaactttctctaggaatcaaagtaacctctgaggacctcagcttgcacaaagaggattgagataacatttccaaagcttgttcttcttgagctgacccaacacttaggaaaacatgacatggatcagcaactccattttctgtgagaagtgcaactgctactgaccatctgcactggcatctagtcaagcgattg

SEQ ID NO: 137559 - DNA, 4241 bp, Homo sapiens
  Payload ID: 6931
  Gene Symbol: GRM7
  Gene Name: glutamate receptor, metabotropic 7
  Uniprot ID: Q14831
  ENST ID: ENST00000486284
  CDS Start-End: 275-3043
agtgctgggctgttggagagagcgagcagcaagccggtgagcgcgagcgcggcgcgccggccggctaacccgagagcgcgaggcgccccaggctggcaggcgccgcgggacccctcaccctctctggtcgcccctccccggattcccccaccctccgtgcctgcaggagcccctgggctttcccggaggagctcgccctgaagggcccggacctcggcgagcccaccaccgttccctccagcgccgccgccgccaccgcagcagccggagcagcatggtccagctgaggaagctgctccgcgtcctgactttgatgaagttcccctgctgcgtgctggaggtgctcctgtgcgcgctggcggcggcggcgcgcggccaggagatgtacgccccgcactcaatccggatcgagggggacgtcaccctcggggggctgttccccgtgcacgccaagggtcccagcggagtgccctgcggcgacatcaagagggaaaacgggatccacaggctggaagcgatgctctacgccctggaccagatcaacagtgatcccaacctactgcccaacgtgacgctgggcgcgcggatcctggacacttgttccagggacacttacgcgctcgaacagtcgcttactttcgtccaggcgctcatccagaaggacacctccgacgtgcgctgcaccaacggcgaaccgccggttttcgtcaagccggagaaagtagttggagtgattggggcttcggggagttcggtctccatcatggtagccaacatcctgaggctcttccagatcccccagattagttatgcatcaacggcacccgagctaagtgatgaccggcgctatgacttcttctctcgcgtggtgccacccgattccttccaagcccaggccatggtagacattgtaaaggccctaggctggaattatgtgtctaccctcgcatcggaaggaagttatggagagaaaggtgtggagtccttcacgcagatttccaaagaggcaggtggactctgcattgcccagtccgtgagaatcccccaggaacgcaaagacaggaccattgactttgatagaattatcaaacagctcctggacacccccaactccagggccgtcgtgatttttgccaacgatgaggatataaagcagatccttgcagcagccaaaagagctgaccaagttggccattttctttgggtgggatcagacagctggggatccaaaataaacccactgcaccagcatgaagatatcgcagaaggggccatcaccattcagcccaagcgagccacggtggaagggtttgatgcctactttacgtcccgtacacttgaaaacaacagaagaaatgtatggtttgccgaatactgggaggaaaacttcaactgcaagttgacgattagtgggtcaaaaaaagaagacacagatcgcaaatgcacaggacaggagagaattggaaaagattccaactatgagcaggagggtaaagtccagttcgtgattgacgcagtctatgctatggctcacgcccttcaccacatgaacaaggatctctgtgctgactaccggggtgtctgcccagagatggagcaagctggaggcaagaagttgctgaagtatatacgcaatgttaatttcaatggtagtgctggcactccagtgatgtttaacaagaacggggatgcacctgggcgttatgacatctttcagtaccagaccacaaacaccagcaacccgggttaccgtctgatcgggcagtggacagacgaacttcagctcaatatagaagacatgcagtggggtaaaggagtccgagagatacccgcctcagtgtgcacactaccatgtaagccaggacagagaaagaagacacagaaaggaactccttgctgttggacctgtgagccttgcgatggttaccagtaccagtttgatgagatgacatgccagcattgcccctatgaccagaggcccaatgaaaatcgaaccggatgccaggatattcccatcatcaaactggagtggcactccccctgggctgtgattcctgtcttcctggcaatgttggggatcattgccaccatctttgtcatggccactttcatccgctacaatgacacgcccattgtccgggcatctgggcgggaactcagctatgttcttttgacgggcatctttctttgctacatcatcactttcctgatgattgccaaaccagatgtggcagtgtgttctttccggcgagttttcttgggcttgggtatgtgcatcagttatgcagccctcttgacgaaaacaaatcggatttatcgcatatttgagcagggcaagaaatcagtaacagctcccagactcataagcccaacatcacaactggcaatcacttccagtttaatatcagttcagcttctaggggtgttcatttggtttggtgttgatccacccaacatcatcatagactatgatgaacacaagacaatgaaccctgagcaagccagaggggttctcaagtgtgacattacagatctccaaatcatttgctccttgggatatagcattcttctcatggtcacatgtactgtgtatgccatcaagactcggggtgtacccgagaattttaacgaagccaagcccattggattcactatgtacacgacatgtatagtatggcttgccttcattccaattttttttggcaccgctcaatcagcggaaaagctctacatacaaactaccacgcttacaatctccatgaacctaagtgcatcagtggcgctggggatgctatacatgccgaaagtgtacatcatcattttccaccctgaactcaatgtccagaaacggaagcgaagcttcaaggcggtagtcacagcagccaccatgtcatcgaggctgtcacacaaacccagtgacagacccaacggtgaggcaaagaccgagctctgtgaaaacgtagacccaaacaactgtataccaccagtaagaaagagtgtacaaaagtctgttacttggtacactatcccaccaacagtatagcttttgactgctttcccaaaggccctgctgcaaaaaagaagtatgtcagttataataacctggttatctaacctgttccattccatggaaccatggaggaggaagaccctcagttattttgtcacccaacctggcataggactctttggtcctacccgcttcccatcaccggaggagcttccccggccgggagaccagtgttagaggatccaagcgacctaaacagctgctttatgaaatatccttactttatctgggcttaataagtcactgacatcagcactgccaactcggctgcaattgtggaccttccctaccaaagggagtgttgaaactcaagtcccgccctggctctttagaatggaccactgagagccacaggaccgttttggggctgacctgtcttattacgtatgtacttctaggttgcaaggttttgaaattttctgtacagtttgtgaggacctttgcactttgccatctgatgtcgtacctcggttcactgtttgttttcgaatgccttgttttcatagagccctattctctcagacggtggaatatttggaaaaattttaaaacaattaaaattttaaagcaatcttggcagactaaaacaagtacatctgtacatgactgtataattacgattatagtaccactgcacatcatgtttttttttttaagacaaaaaagatgtttaaagaccaaaaactgtgctgagaaagtatgccccacctatctttggtatatgataggttacataaaaggaaggtattggctgaactgaatagaggtcttgatctttggaatgcatgccagtaatgtattttacagtacatgtttattatgttcaatatttgtatttgtgttctcttttgttatttttaattagggtatatgaatattttgcaataattttaataattattaagctgtttgaaggaaagaatatggatttttcatgtcttgaggttttgttcatgccccctttgactgatcagtgtgataaggactttaggaaaaaaagcatgtatgttttttactgtttgtaataagtactttcgttaatcttgctgcttatgtgccaatttagtggaaaaaaacaacccttgctgaaaaattccctctttccattctctttcaattctgtgatattgtccaagaatgtatcaataaaatactttggttaactttttta

SEQ ID NO: 137560 - DNA, 3289 bp, Homo sapiens
  Payload ID: 6931
  Gene Symbol: GRM7
  Gene Name: glutamate receptor, metabotropic 7
  Uniprot ID: Q14831
  ENST ID: ENST00000467425
  CDS Start-End: 275-3043
agtgctgggctgttggagagagcgagcagcaagccggtgagcgcgagcgcggcgcgccggccggctaacccgagagcgcgaggcgccccaggctggcaggcgccgcgggacccctcaccctctctggtcgcccctccccggattcccccaccctccgtgcctgcaggagcccctgggctttcccggaggagctcgccctgaagggcccggacctcggcgagcccaccaccgttccctccagcgccgccgccgccaccgcagcagccggagcagcatggtccagctgaggaagctgctccgcgtcctgactttgatgaagttcccctgctgcgtgctggaggtgctcctgtgcgcgctggcggcggcggcgcgcggccaggagatgtacgccccgcactcaatccggatcgagggggacgtcaccctcggggggctgttccccgtgcacgccaagggtcccagcggagtgccctgcggcgacatcaagagggaaaacgggatccacaggctggaagcgatgctctacgccctggaccagatcaacagtgatcccaacctactgcccaacgtgacgctgggcgcgcggatcctggacacttgttccagggacacttacgcgctcgaacagtcgcttactttcgtccaggcgctcatccagaaggacacctccgacgtgcgctgcaccaacggcgaaccgccggttttcgtcaagccggagaaagtagttggagtgattggggcttcggggagttcggtctccatcatggtagccaacatcctgaggctcttccagatcccccagattagttatgcatcaacggcacccgagctaagtgatgaccggcgctatgacttcttctctcgcgtggtgccacccgattccttccaagcccaggccatggtagacattgtaaaggccctaggctggaattatgtgtctaccctcgcatcggaaggaagttatggagagaaaggtgtggagtccttcacgcagatttccaaagaggcaggtggactctgcattgcccagtccgtgagaatcccccaggaacgcaaagacaggaccattgactttgatagaattatcaaacagctcctggacacccccaactccagggccgtcgtgatttttgccaacgatgaggatataaagcagatccttgcagcagccaaaagagctgaccaagttggccattttctttgggtgggatcagacagctggggatccaaaataaacccactgcaccagcatgaagatatcgcagaaggggccatcaccattcagcccaagcgagccacggtggaagggtttgatgcctactttacgtcccgtacacttgaaaacaacagaagaaatgtatggtttgccgaatactgggaggaaaacttcaactgcaagttgacgattagtgggtcaaaaaaagaagacacagatcgcaaatgcacaggacaggagagaattggaaaagattccaactatgagcaggagggtaaagtccagttcgtgattgacgcagtctatgctatggctcacgcccttcaccacatgaacaaggatctctgtgctgactaccggggtgtctgcccagagatggagcaagctggaggcaagaagttgctgaagtatatacgcaatgttaatttcaatggtagtgctggcactccagtgatgtttaacaagaacggggatgcacctgggcgttatgacatctttcagtaccagaccacaaacaccagcaacccgggttaccgtctgatcgggcagtggacagacgaacttcagctcaatatagaagacatgcagtggggtaaaggagtccgagagatacccgcctcagtgtgcacactaccatgtaagccaggacagagaaagaagacacagaaaggaactccttgctgttggacctgtgagccttgcgatggttaccagtaccagtttgatgagatgacatgccagcattgcccctatgaccagaggcccaatgaaaatcgaaccggatgccaggatattcccatcatcaaactggagtggcactccccctgggctgtgattcctgtcttcctggcaatgttggggatcattgccaccatctttgtcatggccactttcatccgctacaatgacacgcccattgtccgggcatctgggcgggaactcagctatgttcttttgacgggcatctttctttgctacatcatcactttcctgatgattgccaaaccagatgtggcagtgtgttctttccggcgagttttcttgggcttgggtatgtgcatcagttatgcagccctcttgacgaaaacaaatcggatttatcgcatatttgagcagggcaagaaatcagtaacagctcccagactcataagcccaacatcacaactggcaatcacttccagtttaatatcagttcagcttctaggggtgttcatttggtttggtgttgatccacccaacatcatcatagactatgatgaacacaagacaatgaaccctgagcaagccagaggggttctcaagtgtgacattacagatctccaaatcatttgctccttgggatatagcattcttctcatggtcacatgtactgtgtatgccatcaagactcggggtgtacccgagaattttaacgaagccaagcccattggattcactatgtacacgacatgtatagtatggcttgccttcattccaattttttttggcaccgctcaatcagcggaaaagctctacatacaaactaccacgcttacaatctccatgaacctaagtgcatcagtggcgctggggatgctatacatgccgaaagtgtacatcatcattttccaccctgaactcaatgtccagaaacggaagcgaagcttcaaggcggtagtcacagcagccaccatgtcatcgaggctgtcacacaaacccagtgacagacccaacggtgaggcaaagaccgagctctgtgaaaacgtagacccaaacaactgtataccaccagtaagaaagagtgtacaaaagtctgttacttggtacactatcccaccaacagtatagcttttgactgctttcccaaagatttttttttttggctgtacagtggaacttggattacactttaaattaactttctctaggaatcaaagtaacctctgaggacctcagcttgcacaaagaggattgagataacatttccaaagcttgttcttcttgagctgacccaacacttaggaaaacatgacatggatcagcaactccattttctgtgagaagtgcaactgctactgaccatctgcactggca

SEQ ID NO: 137561 - DNA, 4057 bp, Homo sapiens
  Payload ID: 6932
  Gene Symbol: GRM8
  Gene Name: glutamate receptor, metabotropic 8
  Uniprot ID: O00222
  ENST ID: ENST00000339582
  CDS Start-End: 810-3536
gatttttaaaaatcagaactattgacatttctggtctcctcgtcgcttcaggctgaagagcggagggggatccgcgggccgagggtccccctccctgcccgcgccagggccgctgggtgacaccgaaatccagaggctcccgcccctcgggggttcctcctcccgcttcccgaggtgactggttggcgcgaagcgattggcgatcccgggcgcgatcctggccgcggctccccgcgccgcgccgggtgaatggccgcgggcggaggatcgggaggcgccgggcgcagaccaatcgcggccgccggtgggagtatttgttattcacatggaagagacttggcgcctgctaggccagctcagccccctcagcccagagatcagccacaagtgcggccgctgtgctcgcctcacgcggcggcggcggcggcggcggcggcgctgacatggagctgcgggcccccggcgggcttcctcaccgcgccctctgcggggagcagggaataattctgctacaaggctgatttcaaggacatgaattgttgacctcatcccaacatcagaacctcagatgttctaatttttgcaccattccaggcaagttgatcttataaggaaataaaattgaaccttaggggtctgatggaaattcactgtgacattcaaatcaagaaaacttgctaatgcccacagagccttttccccatgggccctgatggtagcctccagaaggtgcagcctcaggtggtgccctttcttctgtggcaagaataaactttgggtcttggattgcaataccacctgtggagaaaatggtatgcgagggaaagcgatcagcctcttgcccttgtttcttcctcttgaccgccaagttctactggatcctcacaatgatgcaaagaactcacagccaggagtatgcccattccatacgggtggatggggacattattttggggggtctcttccctgtccacgcaaagggagagagaggggtgccttgtggggagctgaagaaggaaaaggggattcacagactggaggccatgctttatgcaattgaccagattaacaaggaccctgatctcctttccaacatcactctgggtgtccgcatcctcgacacgtgctctagggacacctatgctttggagcagtctctaacattcgtgcaggcattaatagagaaagatgcttcggatgtgaagtgtgctaatggagatccacccattttcaccaagcccgacaagatttctggcgtcataggtgctgcagcaagctccgtgtccatcatggttgctaacattttaagactttttaagatacctcaaatcagctatgcatccacagccccagagctaagtgataacaccaggtatgactttttctctcgagtggttccgcctgactcctaccaagcccaagccatggtggacatcgtgacagcactgggatggaattatgtttcgacactggcttctgaggggaactatggtgagagcggtgtggaggccttcacccagatctcgagggagattggtggtgtttgcattgctcagtcacagaaaatcccacgtgaaccaagacctggagaatttgaaaaaattatcaaacgcctgctagaaacacctaatgctcgagcagtgattatgtttgccaatgaggatgacatcaggaggatattggaagcagcaaaaaaactaaaccaaagtgggcattttctctggattggctcagatagttggggatccaaaatagcacctgtctatcagcaagaggagattgcagaaggggctgtgacaattttgcccaaacgagcatcaattgatggatttgatcgatactttagaagccgaactcttgccaataatcgaagaaatgtgtggtttgcagaattctgggaggagaattttggctgcaagttaggatcacatgggaaaaggaacagtcatataaagaaatgcacagggctggagcgaattgctcgggattcatcttatgaacaggaaggaaaggtccaatttgtaattgatgctgtatattccatggcttacgccctgcacaatatgcacaaagatctctgccctggatacattggcctttgtccacgaatgagtaccattgatgggaaagagctacttggttatattcgggctgtaaattttaatggcagtgctggcactcctgtcacttttaatgaaaacggagatgctcctggacgttatgatatcttccagtatcaaataaccaacaaaagcacagagtacaaagtcatcggccactggaccaatcagcttcatctaaaagtggaagacatgcagtgggctcatagagaacatactcacccggcgtctgtctgcagcctgccgtgtaagccaggggagaggaagaaaacggtgaaaggggtcccttgctgctggcactgtgaacgctgtgaaggttacaactaccaggtggatgagctgtcctgtgaactttgccctctggatcagagacccaacatgaaccgcacaggctgccagcttatccccatcatcaaattggagtggcattctccctgggctgtggtgcctgtgtttgttgcaatattgggaatcatcgccaccacctttgtgatcgtgacctttgtccgctataatgacacacctatcgtgagggcttcaggacgcgaacttagttacgtgctcctaacggggatttttctctgttattcaatcacgtttttaatgattgcagcaccagatacaatcatatgctccttccgacgggtcttcctaggacttggcatgtgtttcagctatgcagcccttctgaccaaaacaaaccgtatccaccgaatatttgagcaggggaagaaatctgtcacagcgcccaagttcattagtccagcatctcagctggtgatcaccttcagcctcatctccgtccagctccttggagtgtttgtctggtttgttgtggatcccccccacatcatcattgactatggagagcagcggacactagatccagagaaggccaggggagtgctcaagtgtgacatttctgatctctcactcatttgttcacttggatacagtatcctcttgatggtcacttgtactgtttatgccattaaaacgagaggtgtcccagagactttcaatgaagccaaacctattggatttaccatgtataccacctgcatcatttggttagctttcatccccatcttttttggtacagcccagtcagcagaaaagatgtacatccagacaacaacacttactgtctccatgagtttaagtgcttcagtatctctgggcatgctctatatgcccaaggtttatattataatttttcatccagaacagaatgttcaaaaacgcaagaggagcttcaaggctgtggtgacagctgccaccatgcaaagcaaactgatccaaaaaggaaatgacagaccaaatggcgaggtgaaaagtgaactctgtgagagtcttgaaaccaacacttcctctaccaagacaacatatatcagttacagcaatcattcaatctgaaacagggaaatggcacaatctgaagagatgtggtatatgatcttaaatgatgaacatgagaccgcaaaaattcactcctggagatctccgtagactacaatcaatcaaatcaatagtcagtcttgtaaggaacaaaaattagccatgagccaaaagtatcaataaacggggagtgaagaaacccgttttatacaataaaaccaatgagtgtcaagctaaagtattgcttattcatgagcagttaaaacaaatcacaaaaggaaaactaatgttagctcgtgaaaaaaaatgctgttgaaataaataatgtctgatgttattcttgtatttttctgtgattgtgagaactcccgttcctgtcccacattgtttaacttgtataagacaatgagtctgtttcttgtaatggctgaccagattgaagccctgggttgtgctaaaaataaatgcaatgattgatgcatgcaattttttatacaaataatttatttctaataataaaggaatgttttgcaaatgtt

SEQ ID NO: 137562 - DNA, 3240 bp, Homo sapiens
  Payload ID: 6932
  Gene Symbol: GRM8
  Gene Name: glutamate receptor, metabotropic 8
  Uniprot ID: O00222
  ENST ID: ENST00000341617
  CDS Start-End: 16-1521
ccacctgtggagaaaatggtatgcgagggaaagcgatcagcctcttgcccttgtttcttcctcttgaccgccaagttctactggatcctcacaatgatgcaaagaactcacagccaggagtatgcccattccatacgggtggatggggacattattttggggggtctcttccctgtccacgcaaagggagagagaggggtgccttgtggggagctgaagaaggaaaaggggattcacagactggaggccatgctttatgcaattgaccagattaacaaggaccctgatctcctttccaacatcactctgggtgtccgcatcctcgacacgtgctctagggacacctatgctttggagcagtctctaacattcgtgcaggcattaatagagaaagatgcttcggatgtgaagtgtgctaatggagatccacccattttcaccaagcccgacaagatttctggcgtcataggtgctgcagcaagctccgtgtccatcatggttgctaacattttaagactttttaagatacctcaaatcagctatgcatccacagccccagagctaagtgataacaccaggtatgactttttctctcgagtggttccgcctgactcctaccaagcccaagccatggtggacatcgtgacagcactgggatggaattatgtttcgacactggcttctgaggggaactatggtgagagcggtgtggaggccttcacccagatctcgagggagattggtggtgtttgcattgctcagtcacagaaaatcccacgtgaaccaagacctggagaatttgaaaaaattatcaaacgcctgctagaaacacctaatgctcgagcagtgattatgtttgccaatgaggatgacatcaggaggatattggaagcagcaaaaaaactaaaccaaagtgggcattttctctggattggctcagatagttggggatccaaaatagcacctgtctatcagcaagaggagattgcagaaggggctgtgacaattttgcccaaacgagcatcaattgatggatttgatcgatactttagaagccgaactcttgccaataatcgaagaaatgtgtggtttgcagaattctgggaggagaattttggctgcaagttaggatcacatgggaaaaggaacagtcatataaagaaatgcacagggctggagcgaattgctcgggattcatcttatgaacaggaaggaaaggtccaatttgtaattgatgctgtatattccatggcttacgccctgcacaatatgcacaaagatctctgccctggatacattggcctttgtccacgaatgagtaccattgatgggaaagagctacttggttatattcgggctgtaaattttaatggttgccgaagagggatccagatgtctctaccctggccaactctttttactccttcattttccagtagttgggcagtgctggcactcctgtcacttttaatgaaaacggagatgctcctggacgttatgatatcttccagtatcaaataaccaacaaaagcacagagtacaaagtcatcggccactggaccaatcagcttcatctaaaagtggaagacatgcagtgggctcatagagaacatactcacccggcgtctgtctgcagcctgccgtgtaagccaggggagaggaagaaaacggtgaaaggggtcccttgctgctggcactgtgaacgctgtgaaggttacaactaccaggtggatgagctgtcctgtgaactttgccctctggatcagagacccaacatgaaccgcacaggctgccagcttatccccatcatcaaattggagtggcattctccctgggctgtggtgcctgtgtttgttgcaatattgggaatcatcgccaccacctttgtgatcgtgacctttgtccgctataatgacacacctatcgtgagggcttcaggacgcgaacttagttacgtgctcctaacggggatttttctctgttattcaatcacgtttttaatgattgcagcaccagatacaatcatatgctccttccgacgggtcttcctaggacttggcatgtgtttcagctatgcagcccttctgaccaaaacaaaccgtatccaccgaatatttgagcaggggaagaaatctgtcacagcgcccaagttcattagtccagcatctcagctggtgatcaccttcagcctcatctccgtccagctccttggagtgtttgtctggtttgttgtggatcccccccacatcatcattgactatggagagcagcggacactagatccagagaaggccaggggagtgctcaagtgtgacatttctgatctctcactcatttgttcacttggatacagtatcctcttgatggtcacttgtactgtttatgccattaaaacgagaggtgtcccagagactttcaatgaagccaaacctattggatttaccatgtataccacctgcatcatttggttagctttcatccccatcttttttggtacagcccagtcagcagaaaagatgtacatccagacaacaacacttactgtctccatgagtttaagtgcttcagtatctctgggcatgctctatatgcccaaggtttatattataatttttcatccagaacagaatgttcaaaaacgcaagaggagcttcaaggctgtggtgacagctgccaccatgcaaagcaaactgatccaaaaaggaaatgacagaccaaatggcgaggtgaaaagtgaactctgtgagagtcttgaaaccaacacttcctctaccaagacaacatatatcagttacagcaatcattcaatctgaaacagggaaatggcacaatctgaagagatgtggtatatgatcttaaatgatgaacatgagaccgcaaaaattcactcctggagatctccgtagactacaatcaatcaaatcaatagtcagtcttgtaaggaacaaaaattagccatgagccaaaagtatcaataaacggggagtgaagaaacccgttttatacaataaaaccaatgagtgtcaagctaaagtattgcttattcatgagcagttaaaacaaatcacaaaaggaaaactaatgttagctcgtgaaaaaaaatgctgttgaaataaataatgtctgatgttattcttgtatttttctgtgattgtgagaactcccgttcctgtcccacattgtttaacttgtataagacaatgagtctgtttcttgtaatggctgaccagattgaagccc

SEQ ID NO: 137563 - DNA, 3850 bp, Homo sapiens
  Payload ID: 6932
  Gene Symbol: GRM8
  Gene Name: glutamate receptor, metabotropic 8
  Uniprot ID: O00222
  ENST ID: ENST00000358373
  CDS Start-End: 565-3291
acattacagtaaagaggttcagaaaagagggagactttacccggaactcccaaggcttggagatgtgatcccccaaaagtttagtcggcgaatgggagactgaagggtgacgggaagggggcaggcgcgctcggcgctctgactgggcgtgcggcggcaggattttaaagcgctctgcctcggatcgtctgccctgggtgacctcccggacctgccctggtggaatccggacttgccccgccgagatgacgaggaataattctgctacaaggctgatttcaaggacatgaattgttgacctcatcccaacatcagaacctcagatgttctaatttttgcaccattccaggcaagttgatcttataaggaaataaaattgaaccttaggggtctgatggaaattcactgtgacattcaaatcaagaaaacttgctaatgcccacagagccttttccccatgggccctgatggtagcctccagaaggtgcagcctcaggtggtgccctttcttctgtggcaagaataaactttgggtcttggattgcaataccacctgtggagaaaatggtatgcgagggaaagcgatcagcctcttgcccttgtttcttcctcttgaccgccaagttctactggatcctcacaatgatgcaaagaactcacagccaggagtatgcccattccatacgggtggatggggacattattttggggggtctcttccctgtccacgcaaagggagagagaggggtgccttgtggggagctgaagaaggaaaaggggattcacagactggaggccatgctttatgcaattgaccagattaacaaggaccctgatctcctttccaacatcactctgggtgtccgcatcctcgacacgtgctctagggacacctatgctttggagcagtctctaacattcgtgcaggcattaatagagaaagatgcttcggatgtgaagtgtgctaatggagatccacccattttcaccaagcccgacaagatttctggcgtcataggtgctgcagcaagctccgtgtccatcatggttgctaacattttaagactttttaagatacctcaaatcagctatgcatccacagccccagagctaagtgataacaccaggtatgactttttctctcgagtggttccgcctgactcctaccaagcccaagccatggtggacatcgtgacagcactgggatggaattatgtttcgacactggcttctgaggggaactatggtgagagcggtgtggaggccttcacccagatctcgagggagattggtggtgtttgcattgctcagtcacagaaaatcccacgtgaaccaagacctggagaatttgaaaaaattatcaaacgcctgctagaaacacctaatgctcgagcagtgattatgtttgccaatgaggatgacatcaggaggatattggaagcagcaaaaaaactaaaccaaagtgggcattttctctggattggctcagatagttggggatccaaaatagcacctgtctatcagcaagaggagattgcagaaggggctgtgacaattttgcccaaacgagcatcaattgatggatttgatcgatactttagaagccgaactcttgccaataatcgaagaaatgtgtggtttgcagaattctgggaggagaattttggctgcaagttaggatcacatgggaaaaggaacagtcatataaagaaatgcacagggctggagcgaattgctcgggattcatcttatgaacaggaaggaaaggtccaatttgtaattgatgctgtatattccatggcttacgccctgcacaatatgcacaaagatctctgccctggatacattggcctttgtccacgaatgagtaccattgatgggaaagagctacttggttatattcgggctgtaaattttaatggcagtgctggcactcctgtcacttttaatgaaaacggagatgctcctggacgttatgatatcttccagtatcaaataaccaacaaaagcacagagtacaaagtcatcggccactggaccaatcagcttcatctaaaagtggaagacatgcagtgggctcatagagaacatactcacccggcgtctgtctgcagcctgccgtgtaagccaggggagaggaagaaaacggtgaaaggggtcccttgctgctggcactgtgaacgctgtgaaggttacaactaccaggtggatgagctgtcctgtgaactttgccctctggatcagagacccaacatgaaccgcacaggctgccagcttatccccatcatcaaattggagtggcattctccctgggctgtggtgcctgtgtttgttgcaatattgggaatcatcgccaccacctttgtgatcgtgacctttgtccgctataatgacacacctatcgtgagggcttcaggacgcgaacttagttacgtgctcctaacggggatttttctctgttattcaatcacgtttttaatgattgcagcaccagatacaatcatatgctccttccgacgggtcttcctaggacttggcatgtgtttcagctatgcagcccttctgaccaaaacaaaccgtatccaccgaatatttgagcaggggaagaaatctgtcacagcgcccaagttcattagtccagcatctcagctggtgatcaccttcagcctcatctccgtccagctccttggagtgtttgtctggtttgttgtggatcccccccacatcatcattgactatggagagcagcggacactagatccagagaaggccaggggagtgctcaagtgtgacatttctgatctctcactcatttgttcacttggatacagtatcctcttgatggtcacttgtactgtttatgccattaaaacgagaggtgtcccagagactttcaatgaagccaaacctattggatttaccatgtataccacctgcatcatttggttagctttcatccccatcttttttggtacagcccagtcagcagaaaagatgtacatccagacaacaacacttactgtctccatgagtttaagtgcttcagtatctctgggcatgctctatatgcccaaggtttatattataatttttcatccagaacagaatgttcaaaaacgcaagaggagcttcaaggctgtggtgacagctgccaccatgcaaagcaaactgatccaaaaaggaaatgacagaccaaatggcgaggtgaaaagtgaactctgtgagagtcttgaaaccaacagtaagtcatctgtagagtttccgatggtcaagagcgggagcacttcctaatagatcttcctctaccaagacaacatatatcagttacagcaatcattcaatctgaaacagggaaatggcacaatctgaagagatgtggtatatgatcttaaatgatgaacatgagaccgcaaaaattcactcctggagatctccgtagactacaatcaatcaaatcaatagtcagtcttgtaaggaacaaaaattagccatgagccaaaagtatcaataaacggggagtgaagaaacccgttttatacaataaaaccaatgagtgtcaagctaaagtattgcttattcatgagcagttaaaacaaatcacaaaaggaaaactaatgttagctcgtgaaaaaaaatgctgttgaaataaataatgtctgatgttattcttgtatttttctgtgattgtgagaactcccgttcctgtcccacattgtttaacttgtataagacaatgagtctgtttcttgtaatggctgaccagattgaagccctgggttgtgctaaaaataaatgcaatgattgatgcatgcaattttttatacaaataatttatttctaataataaagg

SEQ ID NO: 137564 - DNA, 551 bp, Homo sapiens
  Payload ID: 6932
  Gene Symbol: GRM8
  Gene Name: glutamate receptor, metabotropic 8
  ENST ID: ENST00000412160
  CDS Start-End: 490-551
aagaatacactagagtctgggctactaccgcgattgaatacaaatcctgccaactgacagaactggaaaacagggttggtggtggagatacaagaaaaatcatgaacgggagaaaagcattcctatggtagcttgtattttgcttgaaagaaaaatagagaaaaagagccaccagcaggaataattctgctacaaggctgatttcaaggacatgaattgttgacctcatcccaacatcagaacctcagatgttctaatttttgcaccattccaggcaagttgatcttataaggaaataaaattgaaccttaggggtctgatggaaattcactgtgacattcaaatcaagaaaacttgctaatgcccacagagccttttccccatgggccctgatggtagcctccagaaggtgcagcctcaggtggtgccctttcttctgtggcaagaataaactttgggtcttggattgcaataccacctgtggagaaaatggtatgcgagggaaagcgatcagcctcttgcccttgtttcttcctcttgaccgccaagtt

SEQ ID NO: 137565 - DNA, 1251 bp, Homo sapiens
  Payload ID: 6932
  Gene Symbol: GRM8
  Gene Name: glutamate receptor, metabotropic 8
  ENST ID: ENST00000444921
  CDS Start-End: 1-1251
aattttttatacccacaggtggaagacatgcagtgggctcatagagaacatactcacccggcgtctgtctgcagcctgccgtgtaagccaggggagaggaagaaaacggtgaaaggggtcccttgctgctggcactgtgaacgctgtgaaggttacaactaccaggtggatgagctgtcctgtgaactttgccctctggatcagagacccaacatgaaccgcacaggctgccagcttatccccatcatcaaattggagtggcattctccctgggctgtggtgcctgtgtttgttgcaatattgggaatcatcgccaccacctttgtgatcgtgacctttgtccgctataatgacacacctatcgtgagggcttcaggacgcgaacttagttacgtgctcctaacggggatttttctctgttattcaatcacgtttttaatgattgcagcaccagatacaatcatatgctccttccgacgggtcttcctaggacttggcatgtgtttcagctatgcagcccttctgaccaaaacaaaccgtatccaccgaatatttgagcaggggaagaaatctgtcacagcgcccaagttcattagtccagcatctcagctggtgatcaccttcagcctcatctccgtccagctccttggagtgtttgtctggtttgttgtggatcccccccacatcatcattgactatggagagcagcggacactagatccagagaaggccaggggagtgctcaagtgtgacatttctgatctctcactcatttgttcacttggatacagtatcctcttgatggtcacttgtactgtttatgccattaaaacgagaggtgtcccagagactttcaatgaagccaaacctattggatttaccatgtataccacctgcatcatttggttagctttcatccccatcttttttggtacagcccagtcagcagaaaagatgtacatccagacaacaacacttactgtctccatgagtttaagtgcttcagtatctctgggcatgctctatatgcccaaggtttatattataatttttcatccagaacagaatgttcaaaaacgcaagaggagcttcaaggctgtggtgacagctgccaccatgcaaagcaaactgatccaaaaaggaaatgacagaccaaatggcgaggtgaaaagtgaactctgtgagagtcttgaaaccaacacttcctctaccaagacaacatatatcagttacagcaatcattcaatctga

SEQ ID NO: 137566 - DNA, 1247 bp, Homo sapiens
  Payload ID: 6932
  Gene Symbol: GRM8
  Gene Name: glutamate receptor, metabotropic 8
  ENST ID: ENST00000457830
  CDS Start-End: 367-1247
gcccaaactgtgaagcctggtgtcagagagtgtctgcgcacccaagatagcgggggaataattctgctacaaggctgatttcaaggacatgaattgttgacctcatcccaacatcagaacctcagatgttctaatttttgcaccattccaggcaagttgatcttataaggaaataaaattgaaccttaggggtctgatggaaattcactgtgacattcaaatcaagaaaacttgctaatgcccacagagccttttccccatgggccctgatggtagcctccagaaggtgcagcctcaggtggtgccctttcttctgtggcaagaataaactttgggtcttggattgcaataccacctgtggagaaaatggtatgcgagggaaagcgatcagcctcttgcccttgtttcttcctcttgaccgccaagttctactggatcctcacaatgatgcaaagaactcacagccaggagtatgcccattccatacgggtggatggggacattattttggggggtctcttccctgtccacgcaaagggagagagaggggtgccttgtggggagctgaagaaggaaaaggggattcacagactggaggccatgctttatgcaattgaccagattaacaaggaccctgatctcctttccaacatcactctgggtgtccgcatcctcgacacgtgctctagggacacctatgctttggagcagtctctaacattcgtgcaggcattaatagagaaagatgcttcggatgtgaagtgtgctaatggagatccacccattttcaccaagcccgacaagatttctggcgtcataggtgctgcagcaagctccgtgtccatcatggttgctaacattttaagactttttaagatacctcaaatcagctatgcatccacagccccagagctaagtgataacaccaggtatgactttttctctcgagtggttccgcctgactcctaccaagcccaagccatggtggacatcgtgacagcactgggatggaattatgtttcgacactggcttctgaggggaactatggtgagagcggtgtggaggccttcacccagatctcgagggagattggtggtgtttgcattgctcagtcacagaaaatcccacgtgaaccaagacctggagaatttgaaaaaattatcaaacgcctgctagaaacacctaatgctcgagcagtgattatgtttgccaatgaggatgacatcaggaggatattggaagcagc

SEQ ID NO: 137567 - DNA, 429 bp, Homo sapiens
  Payload ID: 6932
  Gene Symbol: GRM8
  Gene Name: glutamate receptor, metabotropic 8
  ENST ID: ENST00000465844
  CDS Start-End: 1-276
tttttctctcgagtggttccgcctgactcctaccaagcccaagccatggtggacatcgtgacagcactgggatggaattatgtttcgacactggcttctgaggggaactatggtgagagcggtgtggaggccttcacccagatctcgagggagattggttatccatccctgtttgggattcagggctgccttcatgaatgttttgctatactatgtcaagttgtttaccaatttctgcttctaatgcagctgtcagatgctcaaactgtctattagtcgaagaggctctctactgaccacctttctcaagtttcttcttcttacatacaatgtttttgacaagactaagcatatcaaaccatcttttaacaattgtaaagcctaatattggccagcatacaattcaattcattaaacattgtagcactg

SEQ ID NO: 137568 - DNA, 3650 bp, Homo sapiens
  Payload ID: 6932
  Gene Symbol: GRM8
  Gene Name: glutamate receptor, metabotropic 8
  Uniprot ID: O00222
  ENST ID: ENST00000472701
  CDS Start-End: 609-3335
gatcccgggcgcgatcctggccgcggctccccgcgccgcgccgggtgaatggccgcgggcggaggatcgggaggcgccgggcgcagaccaatcgcggccgccggtgggagtatttgttattcacatggaagagacttggcgcctgctaggccagctcagccccctcagcccagagatcagccacaagtgcggccgctgtgctcgcctcacgcggcggcggcggcggcggcggcggcgctgacatggagctgcgggcccccggcgggcttcctcaccgcgccctctgcggggagcagggaataattctgctacaaggctgatttcaaggacatgaattgttgacctcatcccaacatcagaacctcagatgttctaatttttgcaccattccaggcaagttgatcttataaggaaataaaattgaaccttaggggtctgatggaaattcactgtgacattcaaatcaagaaaacttgctaatgcccacagagccttttccccatgggccctgatggtagcctccagaaggtgcagcctcaggtggtgccctttcttctgtggcaagaataaactttgggtcttggattgcaataccacctgtggagaaaatggtatgcgagggaaagcgatcagcctcttgcccttgtttcttcctcttgaccgccaagttctactggatcctcacaatgatgcaaagaactcacagccaggagtatgcccattccatacgggtggatggggacattattttggggggtctcttccctgtccacgcaaagggagagagaggggtgccttgtggggagctgaagaaggaaaaggggattcacagactggaggccatgctttatgcaattgaccagattaacaaggaccctgatctcctttccaacatcactctgggtgtccgcatcctcgacacgtgctctagggacacctatgctttggagcagtctctaacattcgtgcaggcattaatagagaaagatgcttcggatgtgaagtgtgctaatggagatccacccattttcaccaagcccgacaagatttctggcgtcataggtgctgcagcaagctccgtgtccatcatggttgctaacattttaagactttttaagatacctcaaatcagctatgcatccacagccccagagctaagtgataacaccaggtatgactttttctctcgagtggttccgcctgactcctaccaagcccaagccatggtggacatcgtgacagcactgggatggaattatgtttcgacactggcttctgaggggaactatggtgagagcggtgtggaggccttcacccagatctcgagggagattggtggtgtttgcattgctcagtcacagaaaatcccacgtgaaccaagacctggagaatttgaaaaaattatcaaacgcctgctagaaacacctaatgctcgagcagtgattatgtttgccaatgaggatgacatcaggaggatattggaagcagcaaaaaaactaaaccaaagtgggcattttctctggattggctcagatagttggggatccaaaatagcacctgtctatcagcaagaggagattgcagaaggggctgtgacaattttgcccaaacgagcatcaattgatggatttgatcgatactttagaagccgaactcttgccaataatcgaagaaatgtgtggtttgcagaattctgggaggagaattttggctgcaagttaggatcacatgggaaaaggaacagtcatataaagaaatgcacagggctggagcgaattgctcgggattcatcttatgaacaggaaggaaaggtccaatttgtaattgatgctgtatattccatggcttacgccctgcacaatatgcacaaagatctctgccctggatacattggcctttgtccacgaatgagtaccattgatgggaaagagctacttggttatattcgggctgtaaattttaatggcagtgctggcactcctgtcacttttaatgaaaacggagatgctcctggacgttatgatatcttccagtatcaaataaccaacaaaagcacagagtacaaagtcatcggccactggaccaatcagcttcatctaaaagtggaagacatgcagtgggctcatagagaacatactcacccggcgtctgtctgcagcctgccgtgtaagccaggggagaggaagaaaacggtgaaaggggtcccttgctgctggcactgtgaacgctgtgaaggttacaactaccaggtggatgagctgtcctgtgaactttgccctctggatcagagacccaacatgaaccgcacaggctgccagcttatccccatcatcaaattggagtggcattctccctgggctgtggtgcctgtgtttgttgcaatattgggaatcatcgccaccacctttgtgatcgtgacctttgtccgctataatgacacacctatcgtgagggcttcaggacgcgaacttagttacgtgctcctaacggggatttttctctgttattcaatcacgtttttaatgattgcagcaccagatacaatcatatgctccttccgacgggtcttcctaggacttggcatgtgtttcagctatgcagcccttctgaccaaaacaaaccgtatccaccgaatatttgagcaggggaagaaatctgtcacagcgcccaagttcattagtccagcatctcagctggtgatcaccttcagcctcatctccgtccagctccttggagtgtttgtctggtttgttgtggatcccccccacatcatcattgactatggagagcagcggacactagatccagagaaggccaggggagtgctcaagtgtgacatttctgatctctcactcatttgttcacttggatacagtatcctcttgatggtcacttgtactgtttatgccattaaaacgagaggtgtcccagagactttcaatgaagccaaacctattggatttaccatgtataccacctgcatcatttggttagctttcatccccatcttttttggtacagcccagtcagcagaaaagatgtacatccagacaacaacacttactgtctccatgagtttaagtgcttcagtatctctgggcatgctctatatgcccaaggtttatattataatttttcatccagaacagaatgttcaaaaacgcaagaggagcttcaaggctgtggtgacagctgccaccatgcaaagcaaactgatccaaaaaggaaatgacagaccaaatggcgaggtgaaaagtgaactctgtgagagtcttgaaaccaacagtaagtcatctgtagagtttccgatggtcaagagcgggagcacttcctaatagattccacccaggaaaaagcacatgataacaatacacagaaatctgtgctcaaccagtagaatttaactgatctattgaagcccatcttggtatctatgaaagagtggcaaataatttgaagatttgtatggtaaaataccaggaagctgaatatggtaaacattacaacctttaccttactaggttctacagatgaatcaaaaaagaaagaaaagcaaagcttcctctaccaagacaacatatatcagttacagcaatcattcaatctgaaacagggaaatggcacaatctgaagagatgtggtatatgatc

SEQ ID NO: 137569 - DNA, 4719 bp, Homo sapiens
  Payload ID: 6933
  Gene Symbol: GLUL
  Gene Name: glutamate-ammonia ligase
  Uniprot ID: P15104
  ENST ID: ENST00000311223
  CDS Start-End: 898-2019
gtaaaactattccccgtgaaggcggcagggcagaggtccagggcgggctttgctgggagcctcgggaccccgggttgggggccgtggggcggcacctggcgagctggcgggtgggcggcgagccgaggcttcccggcctggcggcaactcgcccctctgccctcagccctcccggctccgctcccttcccccacgccgccctgcccctcccccacgcccctttctctttctttctttctttcccagttcgcttgcccccaccccagcggcgcccgccgggctcctcgcccaatggccgcggggcccgggaccgcatcagctgatcggcccgggctcctggccgctgggagccaatcagggcaccgggggcggccccgggccgcggataaagggtgcggggctgctggcggctctgcagagtcgagagtgggagaagagcggagcgtgtgagcagtactgcggcctcctctcctctcctaacctcgctctcgcggcctagctttacccgcccgcctgctcggcgaccagcggggatcctcccccagccgcaagtccacgaagaaagcaacgaatgaaaattatgaagacaacgagaagtcagactcctccgggtcgcgctccagctgcttcggcttcgtcgcctactctgtgaactccggggagagatctcgagtcaagattaagaccttaacccaccaacctgcctgttcggacaccccccgggccggccgctgtctgtccccttctccatcgccctctcccagaaagctccggtgcttggaccagctagagtctgagaaagaggagaggcgcgaacgccactccaaaaagagaagggttaaagagggcaaccctaacgatacgcttgactttctgtggctgggaacaccttccaccatgaccacctcagcaagttcccacttaaataaaggcatcaagcaggtgtacatgtccctgcctcagggtgagaaagtccaggccatgtatatctggatcgatggtactggagaaggactgcgctgcaagacccggaccctggacagtgagcccaagtgtgtggaagagttgcctgagtggaatttcgatggctctagtactttacagtctgagggttccaacagtgacatgtatctcgtgcctgctgccatgtttcgggaccccttccgtaaggaccctaacaagctggtgttatgtgaagttttcaagtacaatcgaaggcctgcagagaccaatttgaggcacacctgtaaacggataatggacatggtgagcaaccagcacccctggtttggcatggagcaggagtataccctcatggggacagatgggcacccctttggttggccttccaacggcttcccagggccccagggtccatattactgtggtgtgggagcagacagagcctatggcagggacatcgtggaggcccattaccgggcctgcttgtatgctggagtcaagattgcggggactaatgccgaggtcatgcctgcccagtgggaatttcagattggaccttgtgaaggaatcagcatgggagatcatctctgggtggcccgtttcatcttgcatcgtgtgtgtgaagactttggagtgatagcaacctttgatcctaagcccattcctgggaactggaatggtgcaggctgccataccaacttcagcaccaaggccatgcgggaggagaatggtctgaagtacatcgaggaggccattgagaaactaagcaagcggcaccagtaccacatccgtgcctatgatcccaagggaggcctggacaatgcccgacgtctaactggattccatgaaacctccaacatcaacgacttttctgctggtgtagccaatcgtagcgccagcatacgcattccccggactgttggccaggagaagaagggttactttgaagatcgtcgcccctctgccaactgcgaccccttttcggtgacagaagccctcatccgcacgtgtcttctcaatgaaaccggcgatgagcccttccagtacaaaaattaagtggactagacctccagctgttgagcccctcctagttcttcatcccactccaactcttccccctctcccagttgtcccgattgtaactcaaagggtggaatatcaaggtcgtttttttcattccatgtgcccagttaatcttgctttctttgtttggctgggatagaggggtcaagttattaatttcttcacacctaccctcctttttttccctatcactgaagctttttagtgcattagtggggaggagggtggggagacataaccactgcttccatttaatggggtgcacctgtccaataggcgtagctatccggacagagcacgtttgcagaagggggtctcttcttccaggtagctgaaaggggaagacctgacgtactctggttaggttaggacttgccctcgtggtggaaacttttcttaaaaagttataaccaacttttctattaaaagtgggaattaggagagaaggtaggggttgggaatcagagagaatggctttggtctcttgcttgtgggactagcctggcttgggactaaatgccctgctctgaacacgaagcttagtataaactgatggatatccctaccttgaaagaagaaaaggttcttactgcttggtccttgatttatcacacaaagcagaatagtatttttatatttaaatgtaaagacaaaaaactatatgtatggttttgtggattatgtgtgttttgctaaaggaaaaaaccatccaggtcacggggcaccaaatttgagacaaatagtcggattagaaataaagcatctcattttgagtagagagcaagggaagtggttcttagatggtgatctgggattaggccctcaagacccttttgggtttctgccctgcccaccctctggagaaggtgggcactggattagttaacagacaacacgttactagcagtcacttgatctccgtggctttggtttaaaagacacacttgtccacataggtttagagataagagttggctggtcaacttgagcatgttactgacagagggggtattggggttattttctggtaggaatagcatgtcactaaagcaggccttttgatattaaattttttaaaaagcaaaattatagaagtttagattttaatcaaatttgtagggtttctaggtaatttttacagaattgcttgtttgcttcaactgtctcctacctctgctcttggaggagatggggacagggctggagtcaaaacacttgtaattttgtatcttgatgtctttgttaagactgctgaagaattattttttttcttttataataaggaataaaccccacctttattccttcatttcatctaccattttctggttcttgtgttggctgtggcaggccagctgtggttttcttttgccatgacaacttctaattgccatgtacagtatgttcaaagtcaaataactcctcattgtaaacaaactgtgtaactgcccaaagcagcacttataaatcagcctaacataagatctctctgatgtgtttgtgattctttcaaatccctatgtgccattatatttctttatttcctaaaacaggcaaaataagctcaagtttatgtactctgagtttttaaaacactggagtgatgttgctgaccagccgtttcctgtacctctctaagttgggtatttgggacttaagggattaagtttttcacctagacttagttacacacaatcttggcatttcctagcctagaggtttgtagcagggtacaagccccactcctcccccttcctttgctcccctgagtttggttttggcttaccataacattgttttgaccattcctagcctaatacaatagcctaacataatgtaagattaactggctttacgatttctattctctgctctcagtgataagaaacaaatattagctaccctgctaccctggttgaagccttccaaggctggctatgccctaggcatgggctcatccttgggtgtatcttgccttgcaggaagaccagtggaccgattgtgattctcaaaagctctgtgttgtcacctgtgcccttgccccttgctcttatcttggtccgtgtatctgggagttcttccaccttatcttggccaattcctaccttcgttcattcctcatgaggttgggtaaaagctccctccggctcccatgatgctgtgcatatacctagcaaaaagcaattattggacacattggagtgcaatattattaatagcattaatactactaataatgtgggcaatagtgattgtttttaaaaggcagtatactcttaccagtgcgaggtagctggggcctgtgatagtttttagagataagttcttcaggcaactgtgtattttacactagtcaagtaatcctagatatccgtggtttttcttaagaaagttggctcgtaatatgatttaatattcaaagtagagtcatctacctattagcttgctggcgtggtcctagtttatgcctgtttcagcatgattgttgagtaccctgtttcatccttagcattttcttgattttgttgttaaatgatgtatacccttatttccattgaatctgtgcttccacccccccaactgaagttgtcttccctttgcttggccacccttacagcctcttggatggtgtatcctacagtgtaagcactaaactgaagaggcagtgacctg

SEQ ID NO: 137570 - DNA, 3942 bp, Homo sapiens
  Payload ID: 6933
  Gene Symbol: GLUL
  Gene Name: glutamate-ammonia ligase
  Uniprot ID: P15104
  ENST ID: ENST00000339526
  CDS Start-End: 1310-2431
gcagagtcgagagtgggagaagagcggagcgtgtgagcagtactgcggcctcctctcctctcctaacctcgctctcgcggcctagctttacccgcccgcctgctcggcgaccaggtaagcccccggacggcccggtgtcacgcaagcgaggcgcgccgcccctgctaccccgcgaggcgcgccgcccagcctcttttttcggctgcctgcccctccagtcccagccctacgctgcggcctctccggcccatgcctgagatccggcatgagtgctcctcccgcgtgcttccgccgctggtggcttggacccgtcggggctggcgctggtggggcgcgcccttggccaggctctgggaagggcggggtgagttgttttgatcttcttttcactacttgcggccgaagcgccgcccctggaggccgttgggccggcctgcgccctggggctcgcagtggtttgtttgcgctgtggatggagtggcggtgcggtcccctgtggagcgcaaacaaggcgcttggttggcgcgggcgcctggctgccttcctcgtggtggggccttcggagcaatcgtcctggttctggcgatggttgagacgcctcgattgcggcgtgtaacggtgagcgttgtttgggcggccggctcccgcctcggggtcccgggggccttccaatgtgaccgaacaatggagagcccgggcctcggcgcagtcagtggagaagccggtccgggcggaggcagcagcagcgcgcagtccctacggcctgcgcccccaccctcccccggaccccccaacccctcggcggcagggtatggccacctccgtgaggccctgagattcggacgggggcccgaggggcagggcgcccactttagggacatttcagtgggaaggggctgctctcaaagtggataattataactccctcgggggcgggaagcggggatcctcccccagccgcaagtccacgaagaaagcaacgaatgaaaattatgaagacaacgagaagtcagactcctccgggtcgcgctccagctgcttcggcttcgtcgcctactctgtgaactccggggagagatctcgagtcaagattaagaccttaacccaccaacctgcctgttcggacaccccccgggccggccgctgtctgtccccttctccatcgccctctcccagaaagctccggtgcttggaccagctagagtctgagaaagaggagaggcgcgaacgccactccaaaaagagaagggttaaagagggcaaccctaacgatacgcttgactttctgtggctgggaacaccttccaccatgaccacctcagcaagttcccacttaaataaaggcatcaagcaggtgtacatgtccctgcctcagggtgagaaagtccaggccatgtatatctggatcgatggtactggagaaggactgcgctgcaagacccggaccctggacagtgagcccaagtgtgtggaagagttgcctgagtggaatttcgatggctctagtactttacagtctgagggttccaacagtgacatgtatctcgtgcctgctgccatgtttcgggaccccttccgtaaggaccctaacaagctggtgttatgtgaagttttcaagtacaatcgaaggcctgcagagaccaatttgaggcacacctgtaaacggataatggacatggtgagcaaccagcacccctggtttggcatggagcaggagtataccctcatggggacagatgggcacccctttggttggccttccaacggcttcccagggccccagggtccatattactgtggtgtgggagcagacagagcctatggcagggacatcgtggaggcccattaccgggcctgcttgtatgctggagtcaagattgcggggactaatgccgaggtcatgcctgcccagtgggaatttcagattggaccttgtgaaggaatcagcatgggagatcatctctgggtggcccgtttcatcttgcatcgtgtgtgtgaagactttggagtgatagcaacctttgatcctaagcccattcctgggaactggaatggtgcaggctgccataccaacttcagcaccaaggccatgcgggaggagaatggtctgaagtacatcgaggaggccattgagaaactaagcaagcggcaccagtaccacatccgtgcctatgatcccaagggaggcctggacaatgcccgacgtctaactggattccatgaaacctccaacatcaacgacttttctgctggtgtagccaatcgtagcgccagcatacgcattccccggactgttggccaggagaagaagggttactttgaagatcgtcgcccctctgccaactgcgaccccttttcggtgacagaagccctcatccgcacgtgtcttctcaatgaaaccggcgatgagcccttccagtacaaaaattaagtggactagacctccagctgttgagcccctcctagttcttcatcccactccaactcttccccctctcccagttgtcccgattgtaactcaaagggtggaatatcaaggtcgtttttttcattccatgtgcccagttaatcttgctttctttgtttggctgggatagaggggtcaagttattaatttcttcacacctaccctcctttttttccctatcactgaagctttttagtgcattagtggggaggagggtggggagacataaccactgcttccatttaatggggtgcacctgtccaataggcgtagctatccggacagagcacgtttgcagaagggggtctcttcttccaggtagctgaaaggggaagacctgacgtactctggttaggttaggacttgccctcgtggtggaaacttttcttaaaaagttataaccaacttttctattaaaagtgggaattaggagagaaggtaggggttgggaatcagagagaatggctttggtctcttgcttgtgggactagcctggcttgggactaaatgccctgctctgaacacgaagcttagtataaactgatggatatccctaccttgaaagaagaaaaggttcttactgcttggtccttgatttatcacacaaagcagaatagtatttttatatttaaatgtaaagacaaaaaactatatgtatggttttgtggattatgtgtgttttgctaaaggaaaaaaccatccaggtcacggggcaccaaatttgagacaaatagtcggattagaaataaagcatctcattttgagtagagagcaagggaagtggttcttagatggtgatctgggattaggccctcaagacccttttgggtttctgccctgcccaccctctggagaaggtgggcactggattagttaacagacaacacgttactagcagtcacttgatctccgtggctttggtttaaaagacacacttgtccacataggtttagagataagagttggctggtcaacttgagcatgttactgacagagggggtattggggttattttctggtaggaatagcatgtcactaaagcaggccttttgatattaaattttttaaaaagcaaaattatagaagtttagattttaatcaaatttgtagggtttctaggtaatttttacagaattgcttgtttgcttcaactgtctcctacctctgctcttggaggagatggggacagggctggagtcaaaacacttgtaattttgtatcttgatgtctttgttaagactgctgaagaattattttttttcttttataataaggaataaaccccacctttattccttcatttcatctaccattttctggttcttgtgttggctgtggcaggccagctgtggttttcttttgccatgacaacttctaattgccatgtacagtatgttcaaagtcaaataactcctcattgtaaacaaactgtgtaactgcccaaagcagcacttataaatcagcctaacataaga

SEQ ID NO: 137571 - DNA, 4364 bp, Homo sapiens
  Payload ID: 6933
  Gene Symbol: GLUL
  Gene Name: glutamate-ammonia ligase
  Uniprot ID: P15104
  ENST ID: ENST00000331872
  CDS Start-End: 542-1663
gtaaaactattccccgtgaaggcggcagggcagaggtccagggcgggctttgctgggagcctcgggaccccgggttgggggccgtggggcggcacctggcgagctggcgggtgggcggcgagccgaggcttcccggcctggcggcaactcgcccctctgccctcagccctcccggctccgctcccttcccccacgccgccctgcccctcccccacgcccctttctctttctttctttctttcccagttcgcttgcccccaccccagcggcgcccgccgggctcctcgcccaatggccgcggggcccgggaccgcatcagctgatcggcccgggctcctggccgctgggagccaatcagggcaccgggggcggccccgggccgcggataaagggtgcggggctgctggcggctctgcagagtcgagagtgggagaagagcggagcgtgtgagcagtactgcggcctcctctcctctcctaacctcgctctcgcggcctagctttacccgcccgcctgctcggcgaccagaacaccttccaccatgaccacctcagcaagttcccacttaaataaaggcatcaagcaggtgtacatgtccctgcctcagggtgagaaagtccaggccatgtatatctggatcgatggtactggagaaggactgcgctgcaagacccggaccctggacagtgagcccaagtgtgtggaagagttgcctgagtggaatttcgatggctctagtactttacagtctgagggttccaacagtgacatgtatctcgtgcctgctgccatgtttcgggaccccttccgtaaggaccctaacaagctggtgttatgtgaagttttcaagtacaatcgaaggcctgcagagaccaatttgaggcacacctgtaaacggataatggacatggtgagcaaccagcacccctggtttggcatggagcaggagtataccctcatggggacagatgggcacccctttggttggccttccaacggcttcccagggccccagggtccatattactgtggtgtgggagcagacagagcctatggcagggacatcgtggaggcccattaccgggcctgcttgtatgctggagtcaagattgcggggactaatgccgaggtcatgcctgcccagtgggaatttcagattggaccttgtgaaggaatcagcatgggagatcatctctgggtggcccgtttcatcttgcatcgtgtgtgtgaagactttggagtgatagcaacctttgatcctaagcccattcctgggaactggaatggtgcaggctgccataccaacttcagcaccaaggccatgcgggaggagaatggtctgaagtacatcgaggaggccattgagaaactaagcaagcggcaccagtaccacatccgtgcctatgatcccaagggaggcctggacaatgcccgacgtctaactggattccatgaaacctccaacatcaacgacttttctgctggtgtagccaatcgtagcgccagcatacgcattccccggactgttggccaggagaagaagggttactttgaagatcgtcgcccctctgccaactgcgaccccttttcggtgacagaagccctcatccgcacgtgtcttctcaatgaaaccggcgatgagcccttccagtacaaaaattaagtggactagacctccagctgttgagcccctcctagttcttcatcccactccaactcttccccctctcccagttgtcccgattgtaactcaaagggtggaatatcaaggtcgtttttttcattccatgtgcccagttaatcttgctttctttgtttggctgggatagaggggtcaagttattaatttcttcacacctaccctcctttttttccctatcactgaagctttttagtgcattagtggggaggagggtggggagacataaccactgcttccatttaatggggtgcacctgtccaataggcgtagctatccggacagagcacgtttgcagaagggggtctcttcttccaggtagctgaaaggggaagacctgacgtactctggttaggttaggacttgccctcgtggtggaaacttttcttaaaaagttataaccaacttttctattaaaagtgggaattaggagagaaggtaggggttgggaatcagagagaatggctttggtctcttgcttgtgggactagcctggcttgggactaaatgccctgctctgaacacgaagcttagtataaactgatggatatccctaccttgaaagaagaaaaggttcttactgcttggtccttgatttatcacacaaagcagaatagtatttttatatttaaatgtaaagacaaaaaactatatgtatggttttgtggattatgtgtgttttgctaaaggaaaaaaccatccaggtcacggggcaccaaatttgagacaaatagtcggattagaaataaagcatctcattttgagtagagagcaagggaagtggttcttagatggtgatctgggattaggccctcaagacccttttgggtttctgccctgcccaccctctggagaaggtgggcactggattagttaacagacaacacgttactagcagtcacttgatctccgtggctttggtttaaaagacacacttgtccacataggtttagagataagagttggctggtcaacttgagcatgttactgacagagggggtattggggttattttctggtaggaatagcatgtcactaaagcaggccttttgatattaaattttttaaaaagcaaaattatagaagtttagattttaatcaaatttgtagggtttctaggtaatttttacagaattgcttgtttgcttcaactgtctcctacctctgctcttggaggagatggggacagggctggagtcaaaacacttgtaattttgtatcttgatgtctttgttaagactgctgaagaattattttttttcttttataataaggaataaaccccacctttattccttcatttcatctaccattttctggttcttgtgttggctgtggcaggccagctgtggttttcttttgccatgacaacttctaattgccatgtacagtatgttcaaagtcaaataactcctcattgtaaacaaactgtgtaactgcccaaagcagcacttataaatcagcctaacataagatctctctgatgtgtttgtgattctttcaaatccctatgtgccattatatttctttatttcctaaaacaggcaaaataagctcaagtttatgtactctgagtttttaaaacactggagtgatgttgctgaccagccgtttcctgtacctctctaagttgggtatttgggacttaagggattaagtttttcacctagacttagttacacacaatcttggcatttcctagcctagaggtttgtagcagggtacaagccccactcctcccccttcctttgctcccctgagtttggttttggcttaccataacattgttttgaccattcctagcctaatacaatagcctaacataatgtaagattaactggctttacgatttctattctctgctctcagtgataagaaacaaatattagctaccctgctaccctggttgaagccttccaaggctggctatgccctaggcatgggctcatccttgggtgtatcttgccttgcaggaagaccagtggaccgattgtgattctcaaaagctctgtgttgtcacctgtgcccttgccccttgctcttatcttggtccgtgtatctgggagttcttccaccttatcttggccaattcctaccttcgttcattcctcatgaggttgggtaaaagctccctccggctcccatgatgctgtgcatatacctagcaaaaagcaattattggacacattggagtgcaatattattaatagcattaatactactaataatgtgggcaatagtgattgtttttaaaaggcagtatactcttaccagtgcgaggtagctggggcctgtgatagtttttagagataagttcttcaggcaactgtgtattttacactagtcaagtaatcctagatatccgtggtttttcttaagaaagttggctcgtaatatgatttaatattcaaagtagagtcatctacctattagcttgctggcgtggtcctagtttatgcctgtttcagcatgattgttgagtaccctgtttcatccttagcattttcttgattttgttgttaaatgatgtatacccttatttccattgaatctgtgcttccacccccccaactgaagttgtcttccctttgcttggccacccttacagcctcttggatggtgtatcctacagtgtaagcactaaactgaagaggcagtgacctga

SEQ ID NO: 137572 - DNA, 4065 bp, Homo sapiens
  Payload ID: 6933
  Gene Symbol: GLUL
  Gene Name: glutamate-ammonia ligase
  Uniprot ID: P15104
  ENST ID: ENST00000417584
  CDS Start-End: 244-1365
actacttgcggccgaagcgccgcccctggaggccgttgggccggcctgcgccctggggctcgcagtggtttgtttgcgctgtggatggagtggcggtgcggtcccctgtggagcgcaaacaaggcgcttggttggcgcgggcgcctggctgccttcctcgtggtggggccttcggagcaatcgtcctggttctggcgatggttgagacgcctcgattgcggcgtgtaacgaacaccttccaccatgaccacctcagcaagttcccacttaaataaaggcatcaagcaggtgtacatgtccctgcctcagggtgagaaagtccaggccatgtatatctggatcgatggtactggagaaggactgcgctgcaagacccggaccctggacagtgagcccaagtgtgtggaagagttgcctgagtggaatttcgatggctctagtactttacagtctgagggttccaacagtgacatgtatctcgtgcctgctgccatgtttcgggaccccttccgtaaggaccctaacaagctggtgttatgtgaagttttcaagtacaatcgaaggcctgcagagaccaatttgaggcacacctgtaaacggataatggacatggtgagcaaccagcacccctggtttggcatggagcaggagtataccctcatggggacagatgggcacccctttggttggccttccaacggcttcccagggccccagggtccatattactgtggtgtgggagcagacagagcctatggcagggacatcgtggaggcccattaccgggcctgcttgtatgctggagtcaagattgcggggactaatgccgaggtcatgcctgcccagtgggaatttcagattggaccttgtgaaggaatcagcatgggagatcatctctgggtggcccgtttcatcttgcatcgtgtgtgtgaagactttggagtgatagcaacctttgatcctaagcccattcctgggaactggaatggtgcaggctgccataccaacttcagcaccaaggccatgcgggaggagaatggtctgaagtacatcgaggaggccattgagaaactaagcaagcggcaccagtaccacatccgtgcctatgatcccaagggaggcctggacaatgcccgacgtctaactggattccatgaaacctccaacatcaacgacttttctgctggtgtagccaatcgtagcgccagcatacgcattccccggactgttggccaggagaagaagggttactttgaagatcgtcgcccctctgccaactgcgaccccttttcggtgacagaagccctcatccgcacgtgtcttctcaatgaaaccggcgatgagcccttccagtacaaaaattaagtggactagacctccagctgttgagcccctcctagttcttcatcccactccaactcttccccctctcccagttgtcccgattgtaactcaaagggtggaatatcaaggtcgtttttttcattccatgtgcccagttaatcttgctttctttgtttggctgggatagaggggtcaagttattaatttcttcacacctaccctcctttttttccctatcactgaagctttttagtgcattagtggggaggagggtggggagacataaccactgcttccatttaatggggtgcacctgtccaataggcgtagctatccggacagagcacgtttgcagaagggggtctcttcttccaggtagctgaaaggggaagacctgacgtactctggttaggttaggacttgccctcgtggtggaaacttttcttaaaaagttataaccaacttttctattaaaagtgggaattaggagagaaggtaggggttgggaatcagagagaatggctttggtctcttgcttgtgggactagcctggcttgggactaaatgccctgctctgaacacgaagcttagtataaactgatggatatccctaccttgaaagaagaaaaggttcttactgcttggtccttgatttatcacacaaagcagaatagtatttttatatttaaatgtaaagacaaaaaactatatgtatggttttgtggattatgtgtgttttgctaaaggaaaaaaccatccaggtcacggggcaccaaatttgagacaaatagtcggattagaaataaagcatctcattttgagtagagagcaagggaagtggttcttagatggtgatctgggattaggccctcaagacccttttgggtttctgccctgcccaccctctggagaaggtgggcactggattagttaacagacaacacgttactagcagtcacttgatctccgtggctttggtttaaaagacacacttgtccacataggtttagagataagagttggctggtcaacttgagcatgttactgacagagggggtattggggttattttctggtaggaatagcatgtcactaaagcaggccttttgatattaaattttttaaaaagcaaaattatagaagtttagattttaatcaaatttgtagggtttctaggtaatttttacagaattgcttgtttgcttcaactgtctcctacctctgctcttggaggagatggggacagggctggagtcaaaacacttgtaattttgtatcttgatgtctttgttaagactgctgaagaattattttttttcttttataataaggaataaaccccacctttattccttcatttcatctaccattttctggttcttgtgttggctgtggcaggccagctgtggttttcttttgccatgacaacttctaattgccatgtacagtatgttcaaagtcaaataactcctcattgtaaacaaactgtgtaactgcccaaagcagcacttataaatcagcctaacataagatctctctgatgtgtttgtgattctttcaaatccctatgtgccattatatttctttatttcctaaaacaggcaaaataagctcaagtttatgtactctgagtttttaaaacactggagtgatgttgctgaccagccgtttcctgtacctctctaagttgggtatttgggacttaagggattaagtttttcacctagacttagttacacacaatcttggcatttcctagcctagaggtttgtagcagggtacaagccccactcctcccccttcctttgctcccctgagtttggttttggcttaccataacattgttttgaccattcctagcctaatacaatagcctaacataatgtaagattaactggctttacgatttctattctctgctctcagtgataagaaacaaatattagctaccctgctaccctggttgaagccttccaaggctggctatgccctaggcatgggctcatccttgggtgtatcttgccttgcaggaagaccagtggaccgattgtgattctcaaaagctctgtgttgtcacctgtgcccttgccccttgctcttatcttggtccgtgtatctgggagttcttccaccttatcttggccaattcctaccttcgttcattcctcatgaggttgggtaaaagctccctccggctcccatgatgctgtgcatatacctagcaaaaagcaattattggacacattggagtgcaatattattaatagcattaatactactaataatgtgggcaatagtgattgtttttaaaaggcagtatactcttaccagtgcgaggtagctggggcctgtgatagtttttagagataagttcttcaggcaactgtgtattttacactagtcaagtaatcctagatatccgtggtttttcttaagaaagttggctcgtaatatgatttaatattcaaagtagagtcatctacctattagcttgctggcgtggtcctagtttatgcctgtttcagcatgattgttgagtaccctgtttcatccttagcattttcttgattttgttgttaaatgatgtatacccttatttccattgaatctgtgcttccacccccccaactgaagttgtcttccctttgcttggccacccttacagcctcttggatggtgtatcctacagtgtaagcactaaactgaagaggcagtgacctg

SEQ ID NO: 137573 - DNA, 1244 bp, Homo sapiens
  Payload ID: 6933
  Gene Symbol: GLUL
  Gene Name: glutamate-ammonia ligase
  ENST ID: ENST00000621524
  CDS Start-End: 57-758
aagagggcaaccctaacgatacgcttgactttctgtggctgggaacaccttccaccatgaccacctcagcaagttcccacttaaataaaggcatcaagcaggtgtacatgtccctgcctcagggtgagaaagtccaggccatgtatatctggatcgatggtactggagaaggactgcgctgcaagacccggaccctggacagtgagcccaagtgtgtggaagagttgcctgagtggaatttcgatggctctagtactttacagtctgagggttccaacagtgacatgtatctcgtgcctgctgccatgtttcgggaccccttccgtaaggaccctaacaagctggtgttatgtgaagttttcaagtacaatcgaaggcctgcagagaccaatttgaggcacacctgtaaacggataatggacatggtgagcaaccagcacccctggtttggcatggagcaggagtataccctcatggggacagatgggcacccctttggttggccttccaacggcttccagggccccagggtccatattactgtggtgtgggagcagacagagcctatggcagggacatcgtggaggcccattaccgggcctgcttgtatgctggagtcaagattgcggggactaatgccgaggtcatgcctgcccagtgggaatttcagattggaccttgtgaaggaatcagcatgggagatcatctctgggtggcccgtttcatcttgcatcgtgtgtgtgaagactttggagtgatagcaacctttgatcctaagcccattcctgggaactggaatggtgcaggctgccataccaacttcagcaccaaggccatgcgggaggagaatggtctgaagtacatcgaggaggccattgagaaactaagcaagcggcaccagtaccacatccgtgcctatgatcccaagggaggcctggacaatgcccgacgtctaactggattccatgaaacctccaacatcaacgacttttctgctggtgtagccaatcgtagcgccagcatacgcattccccggactgttggccaggagaagaagggttactttgaagatcgtcgcccctctgccaactgcgaccccttttcggtgacagaagccctcatccgcacgtgtcttctcaatgaaaccggcgatgagcccttccagtacaaaaattaagtggactagacctccagctgttgagcccctcctagttcttcatcccactccaactcttccccctctc

SEQ ID NO: 137574 - DNA, 3813 bp, Homo sapiens
  Payload ID: 6934
  Gene Symbol: GCLC
  Gene Name: glutamate-cysteine ligase, catalytic subunit
  Uniprot ID: P48506
  ENST ID: ENST00000229416
  CDS Start-End: 485-2398
ataaaacctggagcgcaggatcgcgcccaggagcggcgagctagcggacgcaaagactgggcatgctccgcggcggcgcaggttttggtcacaagtaggaagaagccagtgcaccagaccggcaaagagaagcgggagccgccgcggcagcgcggccgtggggtccgccgccgccgcatcggagcgggaggaggagcagcggggagggcgaggccgccgggccgagagccgtcccgcctgctctcggtcttctgccttcgcctccgcgcggtgcgtcggacccagggtctgtcacctgggcgccaggggccgccgccggggagccggagcgggcaggaccctccctccgccgactgcggcccgagagcgcccccgcggggtggagcggcagccgccttctgcgggcggctgagtgtccgtctcgcgcccggagcgggcgaccgccgtcagcccggaggaggaggaggaggaggagggggcggccatggggctgctgtcccagggctcgccgctgagctgggaggaaaccaagcgccatgccgaccacgtgcggcggcacgggatcctccagttcctgcacatctaccacgccgtcaaggaccggcacaaggacgttctcaagtggggcgatgaggtggaatacatgttggtatcttttgatcatgaaaataaaaaagtccggttggtcctgtctggggagaaagttcttgaaactctgcaagagaagggggaaaggacaaacccaaaccatcctaccctttggagaccagagtatgggagttacatgattgaagggacaccaggacagccctacggaggaacaatgtccgagttcaatacagttgaggccaacatgcgaaaacgccggaaggaggctacttctatattagaagaaaatcaggctctttgcacaataacttcatttcccagattaggctgtcctgggttcacactgcccgaggtcaaacccaacccagtggaaggaggagcttccaagtccctcttctttccagatgaagcaataaacaagcaccctcgcttcagtaccttaacaagaaatatccgacataggagaggagaaaaggttgtcatcaatgtaccaatatttaaggacaagaatacaccatctccatttatagaaacatttactgaggatgatgaagcttcaagggcttctaagccggatcatatttacatggatgccatgggatttggaatgggcaattgctgtctccaggtgacattccaagcctgcagtatatctgaggccagatacctttatgatcagttggctactatctgtccaattgttatggctttgagtgctgcatctcccttttaccgaggctatgtgtcagacattgattgtcgctggggagtgatttctgcatctgtagatgatagaactcgggaggagcgaggactggagccattgaagaacaataactataggatcagtaaatcccgatatgactcaatagacagctatttatctaagtgtggtgagaaatataatgacatcgacttgacgatagataaagagatctacgaacagctgttgcaggaaggcattgatcatctcctggcccagcatgttgctcatctctttattagagacccactgacactgtttgaagagaaaatacacctggatgatgctaatgagtctgaccattttgagaatattcagtccacaaattggcagacaatgagatttaagccccctcctccaaactcagacattggatggagagtagaatttcgacccatggaggtgcaattaacagactttgagaactctgcctatgtggtgtttgtggtactgctcaccagagtgatcctttcctacaaattggattttctcattccactgtcaaaggttgatgagaacatgaaggtagcacagaaaagagatgctgtcttgcagggaatgttttatttcaggaaagatatttgcaaaggtggcaatgcagtggtggatggttgtggcaaggcccagaacagcacggagctcgctgcagaggagtacaccctcatgagcatagacaccatcatcaatgggaaggaaggtgtgtttcctggactgatcccaattctgaactcttaccttgaaaacatggaagtggatgtggacaccagatgtagtattctgaactacctaaagctaattaagaagagagcatctggagaactaatgacagttgccagatggatgagggagtttatcgcaaaccatcctgactacaagcaagacagtgtcataactgatgaaatgaattatagccttattttgaagtgtaaccaaattgcaaatgaattatgtgaatgcccagagttacttggatcagcatttaggaaagtaaaatatagtggaagtaaaactgactcatccaactagacattctacagaaagaaaaatgcattattgacgaactggctacagtaccatgcctctcagccagcccgtgtgtataatatgaagaccaaatgatagaactgtactgttttctgggccagtgagccagaaattgattaaggctttctttggtaggtaaatctagagtttatacagtgtacatgtacatagtaaagtatttttgattaacaatgtattttaataacatatctaaagtcatcatgaactggcttgtacatttttaaattcttactctggagcaacctactgtctaagcagttttgtaaatgtactggtaattgtacaatacttgcattccagagttaaaatgtttactgtaaatttttgttcttttaaagactacctgggacctgatttattgaaatttttctctttaaaaacattttctctcgttaattttcctttgtcatttcctttgttgtctacattaaatcacttgaatccattgaaagtgcttcaagggtaatcttgggtttctagcaccttatctatgatgtttcttttgcaattggaataatcacttggtcaccttgccccaagctttcccctctgaataaatacccattgaactctgatggctgttatcaaaggaacttttctttgtttaaatttgctgatgcaggaattaagtttaaacacaactctatagaaagaaaggagattattacccagaattcacatgtagtgattattaaggacaatttttttttttaactaaaaaagttggcggcaggggtggggggtggcaatcatttttcttcctatacatacaaaggatattgtcaaaaatggcgttcttctcttgtggcctgttattctgattgctgctgtatacagttttgtcactctttagtttttagttaagcatactgatagactttcctctaaaagccattcactccagattttacctggggaatattctacatactgcttactttctctataaaactcatcaataaatcatgaaaggcactgagttttgtaaatcaggaccctaaatgtttaattgtaaataagtttcagataattattatagctttgcgttgaagtttgttgttttttttctcaactagttaagtcaactgcttctgaaataactctgtattgtagattatgcagatctttacaggcataaatatttaaactgtaatatgctaacttgaagagattgcaataaagctgcttcagctaaccctgtttatgtttaaatactagggtttgttctatattttatacatgcattttggatgattaaagaatgcctggttttcgtttgcaatttgcttgtgtaaatcaggttgtaaaaaggcagataaattgaaatgtttgtggtatgaggaaataaaagaatggaattagctttcattcagaaa

SEQ ID NO: 137575 - DNA, 1011 bp, Homo sapiens
  Payload ID: 6934
  Gene Symbol: GCLC
  Gene Name: glutamate-cysteine ligase, catalytic subunit
  ENST ID: ENST00000504525
  CDS Start-End: 444-608
tagcggacgcaaagactgggcatgctccgcggcggcgcaggttttggtcacaagtaggaagaagccagtgcaccagaccggcaaagagaagcgggagccgccgcggcagcgcggccgtggggtccgccgccgccgcatcggagcgggaggaggagcagcggggagggcgaggccgccgggccgagagccgtcccgcctgctctcggtcttctgccttcgcctccgcgcggtgcgtcggacccagggtctgtcacctgggcgccaggggccgccgccggggagccggagcgggcaggaccctccctccgccgactgcggcccgagagcgcccccgcggggtggagcggcagccgccttctgcgggcggctgagtgtccgtctcgcgcccggagcgggcgaccgccgtcagcccggaggaggaggaggaggaggagggggcggccatggggctgctgtcccagggctcgccgctgagctgggaggaaaccaagcgccatgccgaccacgtgcggcggcacgggatcctccagttcctgcacatctaccacgccgtcaaggaccggcacaaggacgttctcaagtggggcgatgaggtgaccaatttatgacgtttggttgtctgttttagtaccttaacaagaaatatccgacataggagaggagaaaaggttgtcatcaatgtaccaatatttaaggacaagaatacaccatctccatttatagaaacatttactgaggatgatgaagcttcaagggcttctaagccggatcatatttacatggatgccatgggatttggaatgggcaattgctgtctccaggtgacattccaagcctgcagtatatctgaggccagatacctttatgatcagttggctactatctgtccaattgttatggctttgagtgctgcatctcccttttaccgaggctatgtgtcagacattgattgtcgctggggagtgatttctgcatctgtagatgatagaactcgggaggagcgaggactgg

SEQ ID NO: 137576 - DNA, 847 bp, Homo sapiens
  Payload ID: 6934
  Gene Symbol: GCLC
  Gene Name: glutamate-cysteine ligase, catalytic subunit
  ENST ID: ENST00000505294
  CDS Start-End: 262-630
tcgacctttccataggatattaagtaggacagaggaaagaagggatggaagtggcactactgactgatcctttctacaggtttccatattatgcatatgaacacttatgtgctgtactgtaaacaaatgtgactgtctggagttactgtggatcctttacagacttcacgtttccctgcctttttcttctggaggccacactgaaaacaagtctggaagaatgttaatttttctcacctttattttcaataggtggaatacatgttggtatcttttgatcatgaaaataaaaaagtccggttggtcctgtctggggagaaagttcttgaaactctgcaagagaagggggaaaggacaaacccaaaccatcctaccctttggagaccagagtatgggagttacatgattgaagggacaccaggacagccctacggaggaacaatgtccgagttcaatacagttgaggccaacatgcgaaaacgccggaaggaggctacttctatattagaagaaaatcaggctctttgcacaataacttcatttcccaggctgtcctgggttcacactgcccgaggtcaaacccaacccagtggaaggaggagcttccaagtccctcttctttccagatgaagcaataaacaagcaccctcgcttcagtaccttaacaagaaatatccgacataggagaggagaaaaggttgtcatcaatgtaccaatatttaaggacaagaatacaccatctccatttatagaaacatttactgaggatgatgaagcttcaagggcttctaagccggatcatatttacatggatgccatgggatttggaatgggcaattgctgtctc

SEQ ID NO: 137577 - DNA, 2356 bp, Homo sapiens
  Payload ID: 6934
  Gene Symbol: GCLC
  Gene Name: glutamate-cysteine ligase, catalytic subunit
  ENST ID: ENST00000514004
  CDS Start-End: 389-1147
aggaagaagccagtgcaccagaccggcaaagagaagcgggagccgccgcggcagcgcggccgtggggtccgccgccgccgcatcggagcgggaggaggagcagcggggagggcgaggccgccgggccgagagccgtcccgcctgctctcggtcttctgccttcgcctccgcgcggtgcgtcggacccagggtctgtcacctgggcgccaggggccgccgccggggagccggagcgggcaggaccctccctccgccgactgcggcccgagagcgcccccgcggggtggagcggcagccgccttctgcgggcggctgagtgtccgtctcgcgcccggagcgggcgaccgccgtcagcccggaggaggaggaggaggaggagggggcggccatggggctgctgtcccagggctcgccgctgagctgggaggaaaccaagcgccatgccgaccacgtgcggcggcacgggatcctccagttcctgcacatctaccacgccgtcaaggaccggcacaaggacgttctcaagtggggcgatgaggtggaatacatgttggtatcttttgatcatgaaaataaaaaagtccggttggtcctgtctggggagaaagttcttgaaactctgcaagagaagggggaaaggacaaacccaaaccatcctaccctttggagaccagagtatgggagttacatgattgaagggacaccaggacagccctacggaggaacaatgtccgagttcaatacagttgaggccaacatgcgaaaacgccggaaggaggctacttctatattagaagaaaatcaggctctttgcacaataacttcatttcccagattaggctgtcctgggttcacactgcccgaggtcaaacccaacccagtggaaggaggagcttccaagtccctcttctttccagatgaagcaataaacaagcaccctcgcttcagtaccttaacaagaaatatccgacataggagaggagaaaaggttgtcatcaatgtaccaatatttaaggacaagaatacaccatctccatttatagaaacatttactgaggatgatgaagcttcaagggcttctaagccggatcatatttacatggatgccatgggatttggaatgggcaattgctgtctccaggtatagtttcaaatatacagagaggcaaagtgttccatccatttctgttttttaacttctttatatatgcatgtttcctgttccaaaaatcacattttaatgaggttgaaatggtagctggtatgcctttctgaaaaacatgaagttatattagtaaattcattggaagctgtctatgactaatagttctacagactctgttgttcaccacaaaggtatatacggtatatatacctttataactgtaatttcagttaacttaaaatgcaatatattctgtcattgtttcccttctctttttatatgcctagtttttactgccatctcgtgacaggctagtgaggtggtttaaatattgttcaaaactctgaaaatgagctctgatggaagtattccaatgattttgtgatccaagggatttgtgcaaagctgtctagcggtacaaaaagaataaatatttagcagcttgtgtttgtcttgcccctgagtaaagtatacaggagcctgtctctgtttacccatttaaaaattttcctggatctgtttaaatgatggtgcccctggcagtgagtgtgtccaagctcacttaggaccagagtggaagagcatggaacccatcaggtggccacacaaaagcctgcagttggcttttggctctgtcactactcaggtttttgggcaactccctttacttcttttggctcagatttttcatcagttgaaagaagggctgatattaagtccccttctaggtctgactctaagctaatatttattttattgccttaactaacagaagtaaaagagagaggctgcttgttatttaatgtccaaggaaattttatccagttgtgattacttcagctgattcaaaacagcgtccttagaggcacagggccgtgcagagcctggacccatgtaagacccctctgagccgccagcctgactgctctcagtgcaaagacccagaacccagccttccttcacctgaaacagctgcagcgtgcacacacacttcttgtgcatatatctctggtctatttattttcaaaactaagtataatccaaattgaatgctggaatcagatttttccattctgaatgtgtttaaataacatggccaaggataatttctttctgttttcttgacatttataggtagtataagatatgtgacttccaaataaacataaaccatcacacttcacgaaaaaa

SEQ ID NO: 137578 - DNA, 542 bp, Homo sapiens
  Payload ID: 6934
  Gene Symbol: GCLC
  Gene Name: glutamate-cysteine ligase, catalytic subunit
  ENST ID: ENST00000514933
  CDS Start-End: 80-542
gtgattcataatcttcactgctcacgccaactgtcatgattgaaagcttgtaacttcaggaaaaacaaaagtggaatacatgttggtatcttttgatcatgaaaataaaaaagtccggttggtcctgtctggggagaaagttcttgaaactctgcaagagaagggggaaaggacaaacccaaaccatcctaccctttggagaccagagtatgggagttacatgattgaagggacaccaggacagccctacggaggaacaatgtccgagttcaatacagttgaggccaacatgcgaaaacgccggaaggaggctacttctatattagaagaaaatcaggctctttgcacaataacttcatttcccagattaggctgtcctgggttcacactgcccgaggtcaaacccaacccagtggaaggaggagcttccaagtccctcttctttccagatgaagcaataaacaagcaccctcgcttcagtaccttaacaagaaatatccgacataggagaggagaaaaggttgtcatcaatgtaccaatat

SEQ ID NO: 137579 - DNA, 519 bp, Homo sapiens
  Payload ID: 6934
  Gene Symbol: GCLC
  Gene Name: glutamate-cysteine ligase, catalytic subunit
  ENST ID: ENST00000513939
  CDS Start-End: 1-519
aggaaaccaagcgccatgccgaccacgtgcggcggcacgggatcctccagttcctgcacatctaccacgccgtcaaggaccggcacaaggacgttctcaagtggggcgatgaggtggaatacatgttggtatcttttgatcatgaaaataaaaaagtccggttggtcctgtctggggagaaagttcttgaaactctgcaagagaagggggaaaggacaaacccaaaccatcctaccctttggagaccagagtatgggagttacatgattgaagggacaccaggacagccctacggaggaacaatgtccgagttcaatacagttgaggccaacatgcgaaaacgccggaaggaggctacttctatattagaagaaaatcaggctctttgcacaataacttcatttcccagtaccttaacaagaaatatccgacataggagaggagaaaaggttgtcatcaatgtaccaatatttaaggacaagaatacaccatctccatttatagaaacatttactgagg

SEQ ID NO: 137580 - DNA, 329 bp, Homo sapiens
  Payload ID: 6934
  Gene Symbol: GCLC
  Gene Name: glutamate-cysteine ligase, catalytic subunit
  ENST ID: ENST00000514373
  CDS Start-End: 1-282
aatattcagtccacaaattggcagacaatgagatttaagccccctcctccaaactcagacattggatggagagtagaatttcgacccatggaggtgcaattaacagactttgagaactctgcctatgtggtgtttgtggtactgctcaccagagtgatcctttcctacaaattggattttctcattccactgtcaaaggtaaggatatgtttctttatggtgatgggtatagatctatctgtagatatatttatttatatatgctatttatttcccacctaatttcatttgaaattgtttaccctttgcaataaaatgtttctccatca

SEQ ID NO: 137581 - DNA, 592 bp, Homo sapiens
  Payload ID: 6934
  Gene Symbol: GCLC
  Gene Name: glutamate-cysteine ligase, catalytic subunit
  ENST ID: ENST00000505197
  CDS Start-End: 539-592
actttgccttcttccatgattggaagcttcctgaggccaccccagagtcagaagccgctatgcttcctggacagcttgcagaacccaatgtgaggaaagtggaatgaacttggactttgaaggcaaactaacctggaatcaaatactggctctgctgtttgcaagtgtgatctttgggtatgcttcctaatctgtgagcttcaacttcctcctctgtaaaccaagatcaaagacaaacagggaaacctacttgtctggtgcccatccccttggcagaacactcctctgaaggatgacagtttggctgtgccagggcagagctgccgacaccaaatgagccttcatagcaactatctgatgaggaactcactggcctacctttccttgacagctggggcctgccagccttgaagcatgactccacaacgcccctacccaaggccatggaggttgctgctgatgagcaagctgttttatatttaatccaggtttctgcttggagaggaagaaggtagaggagccagcgaaggtggaatacatgttggtatcttttgatcatgaaaataaaaaagtccggttggtcctgtctggg

SEQ ID NO: 137582 - DNA, 3694 bp, Homo sapiens
  Payload ID: 6934
  Gene Symbol: GCLC
  Gene Name: glutamate-cysteine ligase, catalytic subunit
  ENST ID: ENST00000616923
  CDS Start-End: 485-2284
ataaaacctggagcgcaggatcgcgcccaggagcggcgagctagcggacgcaaagactgggcatgctccgcggcggcgcaggttttggtcacaagtaggaagaagccagtgcaccagaccggcaaagagaagcgggagccgccgcggcagcgcggccgtggggtccgccgccgccgcatcggagcgggaggaggagcagcggggagggcgaggccgccgggccgagagccgtcccgcctgctctcggtcttctgccttcgcctccgcgcggtgcgtcggacccagggtctgtcacctgggcgccaggggccgccgccggggagccggagcgggcaggaccctccctccgccgactgcggcccgagagcgcccccgcggggtggagcggcagccgccttctgcgggcggctgagtgtccgtctcgcgcccggagcgggcgaccgccgtcagcccggaggaggaggaggaggaggagggggcggccatggggctgctgtcccagggctcgccgctgagctgggaggaaaccaagcgccatgccgaccacgtgcggcggcacgggatcctccagttcctgcacatctaccacgccgtcaaggaccggcacaaggacgttctcaagtggggcgatgaggtggaatacatgttggtatcttttgatcatgaaaataaaaaagtccggttggtcctgtctggggagaaagttcttgaaactctgcaagagaagggggaaaggacaaacccaaaccatcctaccctttggagaccagagtatgggagttacatgattgaagggacaccaggacagccctacggaggaacaatgtccgagttcaatacagttgaggccaacatgcgaaaacgccggaaggaggctacttctatattagaagaaaatcaggctctttgcacaataacttcatttcccagtaccttaacaagaaatatccgacataggagaggagaaaaggttgtcatcaatgtaccaatatttaaggacaagaatacaccatctccatttatagaaacatttactgaggatgatgaagcttcaagggcttctaagccggatcatatttacatggatgccatgggatttggaatgggcaattgctgtctccaggtgacattccaagcctgcagtatatctgaggccagatacctttatgatcagttggctactatctgtccaattgttatggctttgagtgctgcatctcccttttaccgaggctatgtgtcagacattgattgtcgctggggagtgatttctgcatctgtagatgatagaactcgggaggagcgaggactggagccattgaagaacaataactataggatcagtaaatcccgatatgactcaatagacagctatttatctaagtgtggtgagaaatataatgacatcgacttgacgatagataaagagatctacgaacagctgttgcaggaaggcattgatcatctcctggcccagcatgttgctcatctctttattagagacccactgacactgtttgaagagaaaatacacctggatgatgctaatgagtctgaccattttgagaatattcagtccacaaattggcagacaatgagatttaagccccctcctccaaactcagacattggatggagagtagaatttcgacccatggaggtgcaattaacagactttgagaactctgcctatgtggtgtttgtggtactgctcaccagagtgatcctttcctacaaattggattttctcattccactgtcaaaggttgatgagaacatgaaggtagcacagaaaagagatgctgtcttgcagggaatgttttatttcaggaaagatatttgcaaaggtggcaatgcagtggtggatggttgtggcaaggcccagaacagcacggagctcgctgcagaggagtacaccctcatgagcatagacaccatcatcaatgggaaggaaggtgtgtttcctggactgatcccaattctgaactcttaccttgaaaacatggaagtggatgtggacaccagatgtagtattctgaactacctaaagctaattaagaagagagcatctggagaactaatgacagttgccagatggatgagggagtttatcgcaaaccatcctgactacaagcaagacagtgtcataactgatgaaatgaattatagccttattttgaagtgtaaccaaattgcaaatgaattatgtgaatgcccagagttacttggatcagcatttaggaaagtaaaatatagtggaagtaaaactgactcatccaactagacattctacagaaagaaaaatgcattattgacgaactggctacagtaccatgcctctcagccagcccgtgtgtataatatgaagaccaaatgatagaactgtactgttttctgggccagtgagccagaaattgattaaggctttctttggtaggtaaatctagagtttatacagtgtacatgtacatagtaaagtatttttgattaacaatgtattttaataacatatctaaagtcatcatgaactggcttgtacatttttaaattcttactctggagcaacctactgtctaagcagttttgtaaatgtactggtaattgtacaatacttgcattccagagttaaaatgtttactgtaaatttttgttcttttaaagactacctgggacctgatttattgaaatttttctctttaaaaacattttctctcgttaattttcctttgtcatttcctttgttgtctacattaaatcacttgaatccattgaaagtgcttcaagggtaatcttgggtttctagcaccttatctatgatgtttcttttgcaattggaataatcacttggtcaccttgccccaagctttcccctctgaataaatacccattgaactctgatggctgttatcaaaggaacttttctttgtttaaatttgctgatgcaggaattaagtttaaacacaactctatagaaagaaaggagattattacccagaattcacatgtagtgattattaaggacaatttttttttttaactaaaaaagttggcggcaggggtggggggtggcaatcatttttcttcctatacatacaaaggatattgtcaaaaatggcgttcttctcttgtggcctgttattctgattgctgctgtatacagttttgtcactctttagtttttagttaagcatactgatagactttcctctaaaagccattcactccagattttacctggggaatattctacatactgcttactttctctataaaactcatcaataaatcatgaaaggcactgagttttgtaaatcaggaccctaaatgtttaattgtaaataagtttcagataattattatagctttgcgttgaagtttgttgttttttttctcaactagttaagtcaactgcttctgaaataactctgtattgtagattatgcagatctttacaggcataaatatttaaactgtaatatgctaacttgaagagattgcaataaagctgcttcagctaaccctgtttatgtttaaatactagggtttgttctatattttatacatgcattttggatgattaaagaatgcctggttttcgtttgcaatttgcttgtgtaaatcaggttgtaaaaaggcagataaattgaaatgtttgtggtatgaggaaataaaagaatggaattagctttcattc

SEQ ID NO: 137583 - DNA, 4857 bp, Homo sapiens
  Payload ID: 6935
  Gene Symbol: GCLM
  Gene Name: glutamate-cysteine ligase, modifier subunit
  Uniprot ID: P48507
  ENST ID: ENST00000370238
  CDS Start-End: 248-1072
gctgcggccgcagtagccggagccggagccgcagccaccggtgccttcctttcccgccgccgcccagccgccgtccggcctccctcgggcccgagcgcagaccaggctccagccgcgcggcgccggcagcctcgcgctccctctcgggtctctctcgggcctcgggcaccgcgtcctgtggggcggccgcctgcctgcccgcccgcccgcagccccttcgctgcgcggcccctgggcggccgctgccatgggcaccgacagccgcgcggccaaggcgctcctggcgcgggcccgcaccctgcacctgcagacggggaacctgctgaactggggccgcctgcggaagaagtgcccgtccacgcacagcgaggagcttcatgattgtatccaaaaaaccttgaatgaatggagttcccaaatcaacccagatttggtcagggagtttccagatgtcttggaatgcactgtatctcatgcagtagaaaagataaatcctgatgaaagagaagaaatgaaagtttctgcaaaactgttcattgtagaatcaaactcttcatcatcaactagaagtgcagttgacatggcctgttcagtccttggagttgcacagctggattctgtgatcattgcttcacctcctattgaagatggagttaatctttccttggagcatttacagccttactgggaggaattagaaaacttagttcagagcaaaaagattgttgccataggtacctctgatctagacaaaacacagttggaacagctgtatcagtgggcacaggtaaaaccaaatagtaaccaagttaatcttgcctcctgctgtgtgatgccaccagatttgactgcatttgctaaacaatttgacatacagctgttgactcacaatgatccaaaagaactgctttctgaagcaagtttccaagaagctcttcaggaaagcattcctgacattcaagcgcacgagtgggtgccgctgtggctactgcggtattcggtcattgtgaaaagtagaggaattatcaaatcaaaaggctacattttacaagctaaaagaaggggttcttaactgacttaggagcataacttacctgtaatttccttcaatatgagagaaaattgagatgtgtaaaaatctagttactgcctgtaaatggtgtcattgaggcagatattctttcgtcatatttgacagtatgttgtctgtcaagttttaaatacttatcttgcctccatatcaatccattctcatgaacctctgtattgctttccttaaactattgttttctaattgaaattgtctataaagaaaatacttgcaatatatttttcctttatttttatgactaatataaatcaagaaaatttgttgttagatatattttggcctaggtatcagggtaatgtatatacatattttttatttccaaaaaaaattcattaattgcttcttaactcttattataaccaagcaatttaattacaattgttaaaactgaaatactggaagaagatatttttcctgtcattgatgagatatatcagagtaactggagtagctgggatttactagtagtgtaaataaaattcactcttcaatacatgaatggaaacttaaatttttttttatgtgtccttgcttatagtttagctgtaataatttaaccttgtattcttgtgccatattctgtctttttattacttataaagacaaaccaaagtaaatctgaaaggagactagaagctttgaaattattgtttgggggttttataaaagcaactactgtcacctccatccagattcttttaaattattgatccatccatagtatatattgctactcattcaagaatcctcaataagtattgagtatttaccatatgttgggatactgtgggctctggagagaggagggggcaatagagctaggaattaagaatcagttgagtaaaatgtgtaatatttattccccattaataactgactaggaaggactaaaagccagaaaggggatgaaaaaaaaatccttaattcagggccgacattatctacttaaacaactttgagatatggtcttaattattttaaagcagaataatataattgaaagtttatagctaaaagagactatataggtcatttagtataattcttcattagtttacgaaccacaaaattgcaaataaataagctatgaactttgatgtacactataaatctccttaattctataaatttgtgtctgtaacctgaatagtttgaaaacttctttaaaaatctcttgtatttcatccgggcgcagtggctcacacctgtaatcccagcactttgggaggccgaggtgggcagatcacgaggtcaggagtttgagaccagcctgaccaacatggtaaaaccccatctctactaaaatacaaaaattggctgggcgtggtggcactcgcctgtaatctcagctacttgggaggctgaggcaggagaatcgcttgaacccgggaggcggaggttacagtgagccgagatcacatcactgcactccagcctgggcgacagagcgagactccatctcaaaaaaaaaaaaaaactcttgtatctcaatatttttaaaccacaggcctaaataaaactaattttgctcaagttttctcaacctagggaaaaagaactatggttccatattcaaaataaatattatagacccttttcctaagtaggattttgtggtttactgattgggtaatttgatcattaaaattatgtgaaatctgcccgggcacacctcatgcctgtaatcccagcactctgggaggccaaggcagatgatcacctgaggtcaggagttctagaccagcctggctaacatggtgaaaccctgtatctgctaaaaatacaaaaattagccaggcgtggtggcgggctcctgtaatcccagctactttggaggcgaggcacgagaatcgcttgaacctgggaggcggagtttgcagtgagccgagatcacgccattgcactccagcctgggcgacagagcgagactgcgtctcaaaaaaaaaaaaaaaagaaaaattatgtgaaatcatgtgatttgcctgggaaaacttgtttagatattgagctacttatgccttctagcctttatattaattgtatgtaatgttattaaatatatatatagttcatctttacatttggaaatgcccaacatttttttcatataagtccttaaacaagcgttcattttattttaaatctatacagtgaactggccaagatattttaagagggaactttaatatcccatttattgtttttataaccctggacttataaaaatgggttgtttgaagggttattttgaaagtgggggaaaaaaaaacttagttgctaatgtatctaaacttcagcagagctttttggtgatctcctacctgcaccctcaactcttgacaaagaagcaagactatagattcattttctgaaggggatcatgtatggaattttttgatgagtttttacttttacctctctactcttgattttctattattgaatactcttttaaaacactgatttttaaggctttatatatgttttccaggctgatgttcacatctttttttcatgaactatcagaatatagtgaacacttttcaaatatttaaggacttaatgtttaaaaagccataaaatagagagtggtaatactaccaaataattacttaaaactgaaagctaagttatcaatagtttatataagagatgttttctgaggagatgtgcatccagtgagaccaaggtagaaagtttatataattgttttttttccagtaaatatgaaaaaaaaagctgtagcttgtttattacatgtccaaaatacagtggagccttactttaacacaatgtactgtaacttggaatttgttctgttatgagtctatcttgaattcccatccatgaaactgtagtcaccaaaagcaacaagtattttcacatgatgtaaaagaccatactatgatggccattgctagaaattgaatcacaaataatagctaataatttttcatttttcaaaaaagatcatttggatagcagctatgtataaaatggaaaataaaaaattattctattttgcatgaatagttcagactttcccataccacagccaagcagtaactaaaattaggatcttaattttcaatgataaaaggtctaaggttcatttaattatgctcctttaacactgtctttctagatttttcacccagtattttcaaaatttgggaatgtaaacaattgatatatttattgtatgttggctagcagttcatccttctgcaaaatatgcattcagagaaatgtgaagcttgttttaatgaagacttaaaccatttgtgtcatttgtgttttcatattcaaatacaccaaattaaaattctgaacctatatttttcatcattaacttcctaatataccagaacatatacctttttcatgtaaagttggcaatgggatatggcagttttatttttgaaaaatatgtaacatgactttaatatttttatagttttcagaattagaaacataggaagggaaaatgttttaattagataagtcaactttttatgtgtctgtagtggtgtactataatagcaaattataaagcattattaaatgtttataataatttttaatattacctacattatgaatttaactaaaataaagtgtgagttgtatattttttaattgggttgtttcaatagctggaagcatcctgaagcattatattgatttttgaactatttgaactcaaactgagtatgatttgaaaataaattaataatttaaaaaca

SEQ ID NO: 137584 - DNA, 3008 bp, Homo sapiens
  Payload ID: 6935
  Gene Symbol: GCLM
  Gene Name: glutamate-cysteine ligase, modifier subunit
  Uniprot ID: P48507
  ENST ID: ENST00000615724
  CDS Start-End: 294-1052
attgtcttccaggaaacagctccctcagtttggaatcagctctcccgctgcggccgcagtagccggagccggagccgcagccaccggtgccttcctttcccgccgccgcccagccgccgtccggcctccctcgggcccgagcgcagaccaggctccagccgcgcggcgccggcagcctcgcgctccctctcgggtctctctcgggcctcgggcaccgcgtcctgtggggcggccgcctgcctgcccgcccgcccgcagccccttcgctgcgcggcccctgggcggccgctgccatgggcaccgacagccgcgcggccaaggcgctcctggcgcgggcccgcaccctgcacctgcagacggggaacctgctgaactggggccgcctgcggaagaagtgcccgtccacgcacagcgaggaggagtttccagatgtcttggaatgcactgtatctcatgcagtagaaaagataaatcctgatgaaagagaagaaatgaaagtttctgcaaaactgttcattgtagaatcaaactcttcatcatcaactagaagtgcagttgacatggcctgttcagtccttggagttgcacagctggattctgtgatcattgcttcacctcctattgaagatggagttaatctttccttggagcatttacagccttactgggaggaattagaaaacttagttcagagcaaaaagattgttgccataggtacctctgatctagacaaaacacagttggaacagctgtatcagtgggcacaggtaaaaccaaatagtaaccaagttaatcttgcctcctgctgtgtgatgccaccagatttgactgcatttgctaaacaatttgacatacagctgttgactcacaatgatccaaaagaactgctttctgaagcaagtttccaagaagctcttcaggaaagcattcctgacattcaagcgcacgagtgggtgccgctgtggctactgcggtattcggtcattgtgaaaagtagaggaattatcaaatcaaaaggctacattttacaagctaaaagaaggggttcttaactgacttaggagcataacttacctgtaatttccttcaatatgagagaaaattgagatgtgtaaaaatctagttactgcctgtaaatggtgtcattgaggcagatattctttcgtcatatttgacagtatgttgtctgtcaagttttaaatacttatcttgcctccatatcaatccattctcatgaacctctgtattgctttccttaaactattgttttctaattgaaattgtctataaagaaaatacttgcaatatatttttcctttatttttatgactaatataaatcaagaaaatttgttgttagatatattttggcctaggtatcagggtaatgtatatacatattttttatttccaaaaaaaattcattaattgcttcttaactcttattataaccaagcaatttaattacaattgttaaaactgaaatactggaagaagatatttttcctgtcattgatgagatatatcagagtaactggagtagctgggatttactagtagtgtaaataaaattcactcttcaatacatgaatggaaacttaaatttttttttatgtgtccttgcttatagtttagctgtaataatttaaccttgtattcttgtgccatattctgtctttttattacttataaagacaaaccaaagtaaatctgaaaggagactagaagctttgaaattattgtttgggggttttataaaagcaactactgtcacctccatccagattcttttaaattattgatccatccatagtatatattgctactcattcaagaatcctcaataagtattgagtatttaccatatgttgggatactgtgggctctggagagaggagggggcaatagagctaggaattaagaatcagttgagtaaaatgtgtaatatttattccccattaataactgactaggaaggactaaaagccagaaaggggatgaaaaaaaaatccttaattcagggccgacattatctacttaaacaactttgagatatggtcttaattattttaaagcagaataatataattgaaagtttatagctaaaagagactatataggtcatttagtataattcttcattagtttacgaaccacaaaattgcaaataaataagctatgaactttgatgtacactataaatctccttaattctataaatttgtgtctgtaacctgaatagtttgaaaacttctttaaaaatctcttgtatttcatccgggcgcagtggctcacacctgtaatcccagcactttgggaggccgaggtgggcagatcacgaggtcaggagtttgagaccagcctgaccaacatggtaaaaccccatctctactaaaatacaaaaattggctgggcgtggtggcactcgcctgtaatctcagctacttgggaggctgaggcaggagaatcgcttgaacccgggaggcggaggttacagtgagccgagatcacatcactgcactccagcctgggcgacagagcgagactccatctcaaaaaaaaaaaaaaactcttgtatctcaatatttttaaaccacaggcctaaataaaactaattttgctcaagttttctcaacctagggaaaaagaactatggttccatattcaaaataaatattatagacccttttcctaagtaggattttgtggtttactgattgggtaatttgatcattaaaattatgtgaaatctgcccgggcacacctcatgcctgtaatcccagcactctgggaggccaaggcagatgatcacctgaggtcaggagttctagaccagcctggctaacatggtgaaaccctgtatctgctaaaaatacaaaaattagccaggcgtggtggcgggctcctgtaatcccagctactttggaggcgaggcacgagaatcgcttgaacctgggaggcggagtttgcagtgagccgagatcacgccattgcactccagcctgggcg

SEQ ID NO: 137585 - DNA, 1813 bp, Homo sapiens
  Payload ID: 6936
  Gene Symbol: ERICH1
  Gene Name: glutamate-rich 1
  Uniprot ID: Q86X53
  ENST ID: ENST00000262109
  CDS Start-End: 79-1410
aggagggcggaacccggaaggcacggcgctcagctcaggaccgcgcgccgtggtctgaggtccgcggcagggtcccgcatggcggcgcacaggaagcacgtgtttgtggagaaggtgctgcagagactttttcctcctgttccaagtggccaaggaaagagggaaccccagacgctggccgtccaaaatccaccaaagaaagtgacctctgagaaagtgagccagaaacatgctgagcctttgacagacactggctctgagaccccgactgcccgacggctctacactgccagcgggcctcctgagggctacgtcccctgttggccggagcccagcagctgtgggagccccgagaacgcctccagcggggatgacacagaagatcaggatcctcatgaccagccaaagagaagaagaattaggaagcataaatcaaagaaaaaatttaaaaatcccaataatgttcttatagaacaagcagaattagagaaacagcagagtctgttacaggagaaatctcagcgacagcacacagatggcaccacaataagcaaaaataaaaaaaggaaactgaaaaagaaacagcaaattaaaaggaagaaagcagccggcttggcagcaaaggctgctggtgtcagtttcatgtaccagcccgaggacagcagcaatgaaggggaaggcgtgggagaggcttgtgaggaggatggtgtggacaccagcgaggaagacccgacactggccggggaggaagacgttaaagataccagggaggaagatggtgcggacgctagcgaggaagacctgacacgggccaggcaggaagagggtgcggacgccagtgaggaagatccgacaccggccggggaggaagacgttaaagacgccagggaggaggacggtgtggacaccattgaggaagacctgacacgggccggggaggaagacggtaaagacaccagggaggaggacggtgcggacgccagcgaggaagacccgacatgggctggggaggaagagggtgcagactccggggaggaggacggtgcagacgccagcgaggaagatgatacaattaccaatgaaaaggcacacagtattctaaattttttgaagtcaacacaggaaatgtatttttatgacggtgtctccagagatgcagcttcagctgccctcgcagatgccgctgaggagctgctggaccgccttgcgtcacacagcatgctgccctcagacgtgtccatcctgtaccacatgaaaacgctgctgctcctgcaagatactgagagattgaagcatgctctggaaatgttcccagaacattgcacgatgcctcctgaccatgccagagtaatctcagctttctttagttactggatcacacatatccttcctgagaagagcagtgactaaaatggaatatctctttaagaacagctcctctttaacaaaaaaacttaaaagacaaatgtgagatgggcttagagttagttctctgggaacttgaaagacatttatgccatattatttattcacgtgtttgttcctggtgggcaagatgccatctgaggcttcagatgagaaattggggtaaaatggaaatttttcacttatttgcaattatatatatcttgaattactacataaaacttgattctgtttctctacttattgtaaaaattgaaaatggacattctgttaagttaaatgtatagtttgaagctcatatatttttatgaagttttgaatcaccttgtatctgaaagtctctgctttaagaatgctttctgggtattaaaatgttctagtttaagta

SEQ ID NO: 137586 - DNA, 3170 bp, Homo sapiens
  Payload ID: 6936
  Gene Symbol: ERICH1
  Gene Name: glutamate-rich 1
  ENST ID: ENST00000522893
  CDS Start-End: 1-671
aagatggtgcggacgctagcgaggaagacctgacacgggccaggcaggaagagggtgcggacgccagtgaggaagatccgacaccggccggggaggaagacgttaaagacgccagggaggaggacggtgtggacaccattgaggaagacctgacacgggccggggaggaagacggtaaagacaccagggaggaggacggtgcggacgccagcgaggaagacccgacatgggctggggaggaagagggtgcagactccggggaggaggacggtgcagacgccagcgaggaagatgatacaattaccaatgaaaaggcacacagtattctaaattttttgaagtcaacacaggaaatgtatttttatgacggtgtctccagagatgcagcttcagctgccctcgcagatgccgctgaggagctgctggaccgccttgcgtcacacagcatgctgccctcagacgtgtccatcctgtaccacatgaaaacgctgctgctcctgcaagatactgagagattgaagcatgctctggaaatgttcccagaacattgcacgatgcctcctggtaagtaccgtacgatttattcaaggtcctgcttaagatactctcatcgaggtttgcctctgaaagacttacacgccaccaaaacagcaatgagttggaaaatatgacactgcacatatggcatgggagaatagagtcccagagagaaacaggcttcctgcatctctgcttgatataaaaatatttcacataatatatgcagaaatgcatgtgcagtctaagtttccggacttgggagctgtcaactcttggagccaaattttcctaagtttaaatagaaatgaattcatttcttcctcttttccttctcctctactgctgtggtagatggtaaatttttgcttacctccaactctctggtaccttattgaacccctgacgtggtgatgacgacttttattttctgccaccttcaccgggcatccttttcatgcaaactgttgtgtgctggagcagctgtgctcatgtcttcccaatgccgtgtgcggtgacacaagctgtggtgagggtattcaggccacagaaacctgcaaatgctgaaaatcagaaattcaggctgttgagccattcacctgcacaccactgagtgcagagcagcccacctggcccagggctggcgtcccagaggaggagtggaggagggtccgtggcacccgtcagtggcacctatcccagaggaggagtgaaggtgggtccgtggcacccgtcccagagaaggagtgaaggaggctctgcagattttgtggagggagtttcagagtaagtgtcgggagtggtttctgtccgtagaaaccacattgctgaggggtcaagaccagcatgttagagaagccaggtagcaaacagttacataaccacggtatgatgatgccgtggcactggtgcagggagccgggggctgcagggaccacaaggctggagtcacagcgtgcagagcatatgggtgctggaggagctgccttcatgcagaacgccctcatccgtcaaggagctgttggctttgtgttgccctgcatggtgctgtgggctgtgcagcctaccactggggaaggctggtggggaccccaccctggggcgcttgctccctagctgaggagctggaaaagaagccagatactcggtgagatgcgtcatagagctgcagatagatcctggagatgaggctgtggaggagcgggaagaggagggtgttgttgcagccaagtgcgcatgcgctgagatgggtgaacccatgtgtttgggaactgcgaggagcccggtggctggaccaggggatggatgtgagttgcagaaggtggagaaggtgaagaggtgacagggccaggcacatgggaggagcccggtggctggaccaggggatgcacgtgacagggcgagaggcattgagtgagtctcagaagggggaaaggtgacaggaccaggcacatgggaccccgggcatgtgagccttgtgggcttctacgcagacagagacaggaggttcctggaagctatgaggcttctgggctgttatcttgaggctggatggaggagatagagaatggagaccagtctggggctgctgaggacctgctgagagatacctgcagcgtggaccaggtgggggtggctgaggatttgccaagaggtacttgcagcatggaccaggttggggttgctgaggacctgctgagaggggcctgcagcgtggaccaaggtgcagccacaggttaggcagctgtagccaacgtccaggtggaccatggaggtagaaccagtgggagctgccgagtggccggtgaggcactgggaggaccaggtcaccgcgaggaggaggaggggctcccagaaagatagggtttgaggtgagaggccctgcccagagcgcagtgctgggcagctatgcaggtgccagtcagacctcaggttccagctgaggctcaagagggccataaggcccggagtgcagggaggagagagatcagggacagtgagtacagatgcccaccaggagcgtgaccagggaccatgagaaacgacactggaggaggaagcagggcccgcgggcgacggaagagagaggaggggccccagcaggaaggtggcagtgctcctgagaaggcacctgtgtgtgcggagagggcggcgttggccccaggcgggcatctgtttctggtgggttgtcaggcctcttacagcaagtacttaacaaacttagatttccataatcagatttatctcaaaccgcaaaaaaaagctgattttattatgttaaactgataggagatttttatgagagatgaaagtaagcgattttaactttttaatttttttaatttttgctctgtttctcacacttgaggcttttctgaaattcaccaaaagagttttggcagttgtggggaatttaccagaaccccccattattaaaacaattggtttcttatattaaaatcatcagacaggttttgtgtacacagacatttatgttaagccactgatagaactaaactgtgtgtaggaacctgttttctctaagaaaggactcctttgagttctgtaggatatgtgcttaaaggttttctgtgtcaagctattttatgaaataaaattttacaaacaatgaa

SEQ ID NO: 137587 - DNA, 1551 bp, Homo sapiens
  Payload ID: 6936
  Gene Symbol: ERICH1
  Gene Name: glutamate-rich 1
  ENST ID: ENST00000522706
  CDS Start-End: 37-1074
gcgcgccgtggtctgaggtccgcggcagggtcccgcatggcggcgcacaggaagcacgatcaggatcctcatgaccagccaaagagaagaagaattaggaagcataaatcaaagaaaaaatttaaaaatcccaataatgttcttatagaacaagcagaattagagaaacagcagagtctgttacaggagaaatctcagcgacagcacacagatggcaccacaataagcaaaaataaaaaaaggaaactgaaaaagaaacagcaaattaaaaggaagaaagcagccggcttggcagcaaaggctgctggtgtcagtttcatgtaccagcccgaggacagcagcaatgaaggggaaggcgtgggagaggcttgtgaggaggatggtgtggacaccagcgaggaagacccgacactggccggggaggaagacgttaaagataccagggaggaagatggtgcggacgctagcgaggaagacctgacacgggccaggcaggaagagggtgcggacgccagtgaggaagatccgacaccggccggggaggaagacgttaaagacgccagggaggaggacggtgtggacaccattgaggaagacctgacacgggccggggaggaagacggtaaagacaccagggaggaggacggtgcggacgccagcgaggaagacccgacatgggctggggaggaagagggtgcagactccggggaggaggacggtgcagacgccagcgaggaagatgatacaattaccaatgaaaaggcacacagtattctaaattttttgaagtcaacacaggaaatgtatttttatgacggtgtctccagagatgcagcttcagctgccctcgcagatgccgctgaggagctgctggaccgccttgcgtcacacagcatgctgccctcagacgtgtccatcctgtaccacatgaaaacgctgctgctcctgcaagatactgagagattgaagcatgctctggaaatgttcccagaacattgcacgatgcctcctggagtcctaagcagacttaaagccaagaaaataagaagaggaaagagagaggggctgccttaaccagctgtggtgctgacttggacaattccaggtcaagaggaactgtctactttcgactttgtgtgatagtaactttttaagcagtggaccgggagcccaagactcagatgcagcaagctttgcaaggctgacgagagctgagatcttcagtggccgatgggtacagggctgctgggagcgtagccacgtctgctccaaggtggcttgaatgaggcagtgcccaagtccttttgactggctgaggtgagcctgtggctcagtcacagtttgtccctctcctaataagtgcatttcccagacagcagctccttggtgtcatgcaactgaggaacctaattggctgggtgggttgttcccatccaacttccacctgtcacgaaggatgctttttcagatcagtctccacagctaccatcttgtcgggcacagagccgggcatcaacaagtgtatgttgaataaagaatgaattgatgaaa

SEQ ID NO: 137588 - DNA, 3630 bp, Homo sapiens
  Payload ID: 6936
  Gene Symbol: ERICH1
  Gene Name: glutamate-rich 1
  ENST ID: ENST00000523415
  CDS Start-End: 1-373
ttttttgaagtcaacacaggaaatgtatttttatgacggtgtctccagagatgcagcttcagctgccctcgcagatgccgctgaggagctgctggaccgccttgcgtcacacagcatgctgccctcagacgtgtccatcctgtaccacatgaaaacgctgctgctcctgcaagatactgagagattgaagcatgctctggaaatgttcccagaacattgcacgatgcctcctggtgggaagtctgaagctcagagagcctgggccaatggtacaggtcacacagcacatcagtggctacatgtgagctcagacctgggtctgctgctgtctgtcttcccaatatccatgaccttgactgatgcaggtgtctagggatacgtccatccccgtcctgctggagcccagagcacggaagcctggccctccgaggagacagaagggagtgtcggacaccatgacgagagcttggtgagtaccaggccaagctgtgctttcctcctccacggcacagctcgggttggggttccagagggtcccagctggccctggaaggtaccttactctaggcaagaatgaacaggttccaaccgccagcatttccttagctctccctggacagcctccgagattaagagaccaaaaactccatgatgtgatataaatcagcaaatataaaaaacaaaatcttcactctgcaactgagagacaggacaggagtccaggggctcaggatgaggatggcatcgcgatgagagacagacgccagctggaacaccctctaggcaggccaccctctgggcaggccgtcagccacagttccatgtttaggaggaccttgacaaggtcattcataataaaattattccccggcagagcatcacttctcggagggaactgtgtctctgaactgtgttcagtttttgtcccggggagctctgtctggtgctcacctttgtacctgcagcaggtgcactgggcaccatgttattagtgtctcagagctgagttcatgtgcatttcttcacctaagaacccactcacaatgaccccaccccagctcctgcagacccggcagaggctaggacgtggctcaggagacaagtagggtctttagagaagccccccggtcactccctttcaagccataagttcccaggtcctcaatagttggctctgagtagaattgtcagagaatgggattttcttaaccatcacaatttccaagtagactcaggcctaactcccagcaatttgtatgtcagactctacagacaattctgtgctgtctatttttgctcatctttaaaacagccacgaaatatgcagcttcctttccctgagaaaatggcaaagaaaattcaacacagaaggccagggagggtgtgtggaaacgattcacatgttcaaaagatttatatgtgtagaagaaagctgtgaagtgtgaagtatattttctattgtagaatggatgaaaatggaataaaaataatatcctttgctaggcagaataaataacttctttaaacaattttacggcatgaagaaatctggaccagtttattaaatgggatttctgccacaaaccttggaagaatcacatcatcttagcccaaggtgaaaactgtgttgcgtaacaaagaacatgactgcgctccacacatacatcattgcccggcgaggcgggacacaagtcaacgacggaacacttgagacaggcctacaactgtgcacggttcagaagcaggtttaagccatacttgctgcagtgagactacatttctgtctaaagaagatgtccctgacttgatctgtttttcagctccagttcccagatgtgcgtgttgtggtccccaggtatcaactccaaattcctgggagcagtgctctggccgtacctgtctgggtttgttggccagcgctgaatccgcttagccaggagagcatggggtgtgcggggttcggtcagcctcacacacgtggcaggagtttctctctggacggcggccgcccacacctggccgacaggagcctgtcttcagcaactttcagttaacgcgtccctcttgccccatgcttgtcctgccacacaaatgtgaaaatgcaacgttacaaagatctgtgcctcagacaccatttgaacacagagaaactcgtgggcttatgtgactacacttttcaggttacggaatttctttaaggtgtacccttgagtttaatatacttattaataacttatcattacagagaaaaaattaccagaagtacagggtgtttttaacggactttcttctcttgcacattgctgggcatggcgtgtactgtgacagggcggagtgatgggctgagaatgtgtgtgtgtctccaacagttcccaaacgtctacattttcaagaaaaaggcaatctacatcatctggaaaattgtaacttagtaattaattaggataatttccctaggttctctgtgctgcatgagaccacagcgtattcattaaagaggaaagctgaatattggcggaaaacagggttgtaaatttgtaacaagtttttctatcagaaaatgaaatgcaattttctgtcctctctgagcttttaccacatagctcttagcaatgggtgttttttctgtcattccactcaattctcactcgagtaaacctccaagcaataagaatgttgtctttcctgtttagactagactgactacctttccaggacagtccattaagttgatttccaatggtgaagggtcagacacgcctcccctgggcagatcagggatagttcatagcatttgccaaatagctgtctgcagctgcagccatcacctccgtaatcaacactgccattgtctgagccttccctttgcaggaatggtgtcagtgcacccaggcctcgtagagatgacagccaccccaggcactattgtgaccattgctttgatcattgttctgtttatgactgaggaaagcagggcttaggaagactaatcttagttatctctttatcccagcaatcggcacacatctgtggatcaataaacattgtattaaaatgatgaacacaactgatctcccttaacctgattttccaggagtcctaagcagacttaaagccaagaaaataagaagaggaaagagagaggggctgccttaaccagctgtggtgctgacttggacaattccaggtcaagaggaactgtctactttcgactttgtgtgatagtaactttttaagcagtggaccgggagcccaagactcagatgcagcaagctttgcaaggctgacgagagctgagatcttcagtggccgatgggtacagggctgctgggagcgtagccacgtctgctccaaggtggcttgaatgaggcagtgcccaagtccttttgactggctgaggtgagcctgtggctcagtcacagtttgtccctctcctaataagtgcatttcccagacagcagctccttggtgtcatgcaactgaggaacctaattggctgggtgggttgttcccatccaacttccacctgtcacgaaggatgctttttcagatcagtctccacagctaccatcttgtcgggcacagagccgggcatcaacaagtgtatgttgaataaagaatgaattgatg

SEQ ID NO: 137589 - DNA, 58 bp, Homo sapiens
  Payload ID: 6936
  Gene Symbol: ERICH1
  Gene Name: glutamate-rich 1
  ENST ID: ENST00000631596
  CDS Start-End: 37-58
gcgcgccgtggtctgaggtccgcggcagggtcccgcatggcggcgcacaggaagcacg

SEQ ID NO: 137590 - DNA, 100 bp, Homo sapiens
  Payload ID: 6936
  Gene Symbol: ERICH1
  Gene Name: glutamate-rich 1
  ENST ID: ENST00000632053
  CDS Start-End: 79-100
aggagggcggaacccggaaggcacggcgctcagctcaggaccgcgcgccgtggtctgaggtccgcggcagggtcccgcatggcggcgcacaggaagcacg

SEQ ID NO: 137591 - DNA, 601 bp, Homo sapiens
  Payload ID: 6937
  Gene Symbol: ERICH2
  Gene Name: glutamate-rich 2
  Uniprot ID: A1L162
  ENST ID: ENST00000409885
  CDS Start-End: 54-524
gagtcagtctacaggctaggtgcacactggacagtcagggtggttgtgagctgatggagactgtaaatgaaccagaaacaggtgaagtgagcaaagatgcagtcattgtaaagcaggagaaaaataatgaatattgccttcaggatattgatgataaattgtcagaatcagcagaggatgatggtgaagatgataccaatgatgaagatgatgatgaagatagtaaccctaaaaagaatactcaggccccactagagttaatggcagaatttctgagagcagaaatggcccgagagtaccagctggcaaaaaaattatgtcagatgatcctaatctatgaaccagaaaatcctgaggccaaggagtttttcacacttattgaagaaatgttgctgatggagaaaactcagaatcatgagcaagacggtgaaaacagtgatgaagacagcagtggtgagagtaaaggagaaagcgatgaggagctgagtgacgagagctctgacgaaggtgaagatggatcatgagtgttgctgcaatacttgaagcttcatgtattttcattaatgtataccatgcaaatataaagacaagtgacatttta

SEQ ID NO: 137592 - DNA, 7159 bp, Homo sapiens
  Payload ID: 6938
  Gene Symbol: ERICH3
  Gene Name: glutamate-rich 3
  Uniprot ID: Q5RHP9
  ENST ID: ENST00000326665
  CDS Start-End: 220-4812
aacagggaagctgtggataccaacggagggtgggagcccgggaggctgcgggtagcccgggcgcccaggggcggcggcggcccagcccaggtgcccgcgcacaggggacctcggtgcggagccacccctcgagcgcgactgtcgcagcgccagcgcgcacggggccccacgcacccaccctccgcacctgccgcggggtccaaaagggatcctgcaaaaatgagccattctcaccccgctgggttacttgctgcatataatagccttatggataaacacctggctgggtattttaacaatacaaggataaggcgtcatctcttaagatcaggactgatcacaagaagtggaagaatactttctgaaaaagaatataaactaaatatgatgaagcgggatcatcaaaaatatatccgggaatgcttagcccaggcaatttttcataaagttcttgatatggagcgttaccatcagcttgaaataaaaaagaaattggagaccttagctaggaaggagcgaatccagaggtttaagggagagcacacaagaaggtctgttgaaaataacatgccaatcctgtctccccacccaccagttggcccaaagagtaatcgtggccatagtgttctggttgatgaaggacattccagtccgttagcactgacagcccctcgaccatatactgctccaggaaatatgcagcctccaattcgattacagcctcttcccagtaatcctgcagtagaaactgttccaaaggtaacttcaaggtccagatcaaaaacctcattgctggaaaatgaagctctgtttcccattgggggcaagaaggcagtgatgaagttcaggaactccataggcaattcacagagaatgaattcatatcaacttccaaacattaacagttacatgatgcctattcctcctccacttcccccaactgggaaaatcacaagagaaaatagatctgaaacatggagaaggagaagatttcgtccaaccactgctccaaatggcttagaacctcttttgacaaaggattcaagaaggattcataaaacatccttacatagtaatgcagctattacaatgatctatttggggaaaaatgtgcacctatcttctgataatcctgacttccgggatgaaattaaagtttatcagcagcactgtggtggggaaaacctttgtgtctacaaaggcaaactacttgaaaaagagacctttcagtttatttccaaaaggcatcatggtttccccttcagtctcacctttttcctgaatgggatgcaggtgaacaggttaagctcctgttgtgaatacaagcatcggaaaggttccaggcttggaggcaaacgaggctactttgggtttgtgtgtgttgagagatcatctccttgctacaagtgcattattgcaatgggccttgacaaaaaaccgtctttgccgaaatctaggaaagaaaagagcactgagaaaggagaggaactgaagaaggctgaggggaaagtgaggaaagagagagagtatgtgataccaaaaagaaatgagatcaaggagaacaaaacctctgtttcagccaaattttcagctcaagaaataaaaacagggctcaaagaagtggtaactgctgtggaggaaatgacaagtaaaggaaaaccaggacaagaagtcttggaagacgaccaggaaaatactttaaaatatgagtatgaagaagactttgaagtagatgaggagaaacaaggtgaaaaatctaatgaagaaggacaggctgatgttcaaatgaatggaataccgcagtcacctttggatgataaaaaagataatttagaccctgaaaaagagagtgaaacctcatcacagaaggcaccagatgcccgtgacaatgtgaaagatgagaatgatggatgctctgagagtgaactggaagaggataaacaagatatgaaaactgcttcatcaacctcatccagaagtcacccttattctagtgacagtgaggatgaatctgcagtgggggacagggaagcccacactgacagcagcacagatgaaagtgccagaaggtcatcttctcaggaactgagtgaaaatgataagccaagaaagtctcaccttccaattgaggaatccttagaaattgaaattgaagaccaagaaataacaaaagcagatgtggagaccaagccgatgccaatagacgaaagctttgagaatgttcttaaagaaggaacggagaaaggaacccaagagattgcagagggtttatctgagaagtccgggaaacatgtttctgcagaagaaaaggaaaaggataagagtaagctttgggaagaaagcactgctcaggtgaaggacaaaaaggcaggtctccctgggttggaggaaggtggaaaggattcattgccattagcctatgtcctggctcttggtgcaccaacaatgaatttcatggtggatgaaacagcagcaatcaactcaaacaaggaatcccagcaattggtgcaaaaaacgtatacactggagaagaaagaagcaatggaggaagatgaagcgccccagcacagagatgctgacatagtacagggaaaaggggaggcagcactgtggggagaagcaggagctgttcatgaggctcccttgagggcgtggaagccaacagcagagcagccagaattggcagaagagtttacagaaaaaagggagatccctccaggcatagaaaggggggcagagggagcagcagaagcagaaggggtcagaaggctgggtgaaggggggtcagaccccataggacaagcagcagcaaaagatgctgtgggtctgagtaaagatgaggctcctgaaaagcaagccttgatgctcacagtgcttgagacagacaaagcagcttctgaaggggaacagggtttagagaaggcagtgcttgcaaatgaagcagcagccctgaacttggagcatcttcatgaagtagcagccctgagagaggcagcgacatcggaggagggagaggctgagggtggggtggctgtgagtgatgtcggagaaagtgaagaggaagcatccatagacctagaggacacaggacccatggaggacacagcatcaaagagagaggacggttctgaagaggcaattcttgggggagaggaaccagccaaagagagaaaagaggttatgagaacagaaacacgcttgagccccttcacaggagaggcagaggcaagccggatgcaggtttcggagggcagccctgaggaaggaagccttgcaaaggaagccttcctttgcaaggaagatgtggaaggggaagagatggtgactgaggcagaagctaatagggaagatgataggaaagaaattttacccaaggaattagatttagcaagagagcgaaggaaagctgagaggccaaaaacatctctgaggaaaactgactctgagagagaagaggtgacaagggcaaatgcactcaaggatgaagatgcttttaaagaagagcaaaaacttaaagcggaagaaggggaaacagagacagaagtaagagctgaggaagagacaaaagctcccccaaatgaaatgggatctgatgctgagaacgaagcacctgtggaggcttctgagttgtctgacaatccagggcttctaggagaagattcactaaaagagacagtggttcccatatttgaagcaacgcctggatttgaaaagtcgctggaaaacataacagctctgaggaaagaaggaggaggggaaagactgagtgaagccagagacacagagcacaaagacagagaagagctgtccagcagggagaatagggccctgaaggaagggcaccgccaagatggagagggggccttagcagctcctgaagctgagccagcaggaaaggtgcaggcccctgaggggctgatcccagccacaggccaggcagaggagctagcagccaaagatcacgactcctgcgcaggactggaggggagagctgaagggcaaggaggagtggatgtcgtgctaaggacccaggaagctgttgctgaggaagatcccataatggcagaaaagttcagggaggaagcggtggatgaggacccagaggaggaagaggacaaagagtgcactctggagacagaagcgatgcaggacaggaactcggaaggggacggggacatggaaggagaaggaaacacacaaaagaatgagggcatgggaggaggaagggttgtggctgtggaagttctacacggaggtggtgaaacggcagaaacagccgcagaggagagggaggtgttggcaggttcggagacagccgaggagaaaacaatagcaaataaagcctcctccttttcagatgttgctgaggaagaaacctggcaccaacaggatgagttagtaggaaaaacagcagctgcagggaaggtggtggtagaggaattagcacggagtggggaggaagtgccagcagcagaggagatgacagtgacatatacaacagaggctggggtgggcactccaggagccctggagcggaagacctcagggctaggacaggagcaagaggaagggtcagagggccaggaggcagccactgggagtggcgatgggaggcaggagacaggagcagctgaaaaattccgattaggattatcacgggagggagagagggaattgagtccggagagtctacaggcgatggcaacacttccagtgaagcctgatttcactgaaacccgagagaagcaacagcatatggtgcaaggagaaagcgagactgcagatgtttcccccaacaacgtgcaggtctaggagacttgctggcagacagataatttaaagatgtcttctgaagatgtaaagagtggagaaagattcacgcaagcatctcaccaggattcttgattttctctctctcctctttagttgctggttgcgcttgtctgagatgattcccaatctgtcagccctggtcagtagctcagtaagcaccttgagaatagctcaagtagatctgtaggacccttcttagaagcagtggttcctcatggagaaacttgtgaggctgttacacattctacacacctaacattattttcaaacaaaaatgataattttcagatgcttgacttttaccaaagatcactggaaggcccagtcctaatgttaggggtttgtttaaagtcctttttattttacaatacagagccccagtcaattccacaatctcaatttcatacatgggaattttatttaaaaatctgtggtttggggctttaatgaattggcctgtgaaaatgagctctaaatttcctcccacgtacactcaaaactcaagattgctccaaatctctaagttcttccagcaaaagatttcttggcatgtatattcacttatacttagaaatattcattcttttaatttatgccagaataacaaagtggaaatcttatttcaaaatgctctttgtttttttgtgtgtgtttctgtagttctgctttctggggtagactagtaaaatggtagcttccagcattttgtccctggggccttctttatagggccactcaaatttaaataaaagtagtaaataatttagctaagtggaataagtataataattatagtggtaagcatagcacatcagcattatgccaacattctagactctttagttgatgtcattaaatggaaaagaaacttggattaaatgagtgtgctgctcaccttcccaagttctgttatttcaaacctgtgaactaaccttgcagttcattataaatcaacagtaacaactgcattctaaattactccctgatattattttctagttgtgtatcagcctgtctcctaggggttttcatttccctgaagacatacaagtgccccagagcgcatgtatatgtctaccatttctctatatgagaaggtaaaaaaaatttccttaagcagtgattttccagccagaatatacattagattttcatgggacgcttttataaatgactcaacccttttccccaccccagagattcagacttaattcgttttagatggatctacacatcagtatatatatatttttaacttttcacttgattcttctctgtagccaaggttgagaaccgctgttctaaatcatcatataatccatgctggccacattacactcaaggtccctagggaccaggcatattatcatagtaggtattttccattttaatgtgtaatggagccattcaatgatcaaaaatacactggaccagatagtagactggtcccttgatcagaagcatcagcacatcagcatcacctggaaattgttcccagcctttgtctcctacctactaaattagaaactcttggtgggttccagtaatccatagcttaacaagccctgcagttaatactgatgtacactgatgtccaaaaactgctgtcatggactattgattgtattgaggattagtctcagttggaaagccaactacagaggcattttgaactttctttctttgcctctctatgtctctctgtcttttcctgtcttctgatttatctgtctttctttctctagtaaatggcactcaatataaaagtggtggagtcaatcttaaacttatttttattatgattgtattgatacatgcacgaagtccctctgccctactccctattcaaggatattactcactgcacatcataaatctccatcatctgtcttaaagttttatgagtagatttcatctacattatattcaagttcatttattactgagctgtattactgtggagctctaacagtatttgtttcctgatttcaaactcaatgctacagagcactttgaatacatcacaccttataggaaagatagtaaatgtattaatcccattgaaaaattagttttgtacaatgtgctaaatagtattgcattggattacttttatatttaacacactccatcaaaacatcccataacataattttacaatctgcatgtgaatttaactgtgaaattcagtattgtgatattttgaataagtgaattctttctctgcaaatactatgttgataaaattacttgtatgttcccctgaaatggtttgtttcctgtttcttcattattaaaacataaatcaatcatatgtttacagata

SEQ ID NO: 137593 - DNA, 2068 bp, Homo sapiens
  Payload ID: 6938
  Gene Symbol: ERICH3
  Gene Name: glutamate-rich 3
  Uniprot ID: Q5RHP9
  ENST ID: ENST00000420661
  CDS Start-End: 180-1781
cctgatacacccatctcatcttgggaatgggctagccaaaggtaccagaaaactcaaaggtctttggctaaaatcctctgtatcctccagcagtaactttgccattaggactagaaatactcaaagtccaatgagtaggatttcctctcccctagatagtacttggatgggtgctttccatgcttgccaagggcaagaaggcagtgatgaagttcaggaactccataggcaattcacagagaatgaattcatatcaacttccaaacattaacagttacatgatgcctattcctcctccacttcccccaactgggaaaatcacaagagaaaatagatctgaaacatggagaaggagaagatttcgtccaaccactgctccaaatggcttagaacctcttttgacaaaggattcaagaaggattcataaaacatccttacatagtaatgcagctattacaatgatctatttggggaaaaatgtgcacctatcttctgataatcctgacttccgggatgaaattaaagtttatcagcagcactgtggtggggaaaacctttgtgtctacaaaggcaaactacttgaaaaagagacctttcagtttatttccaaaaggcatcatggtttccccttcagtctcacctttttcctgaatgggatgcaggtgaacaggttaagctcctgttgtgaatacaagcatcggaaaggttccaggcttggaggcaaacgaggctactttgggtttgtgtgtgttgagagatcatctccttgctacaagtgcattattgcaatgggccttgacaaaaaaccgtctttgccgaaatctaggaaagaaaagagcactgagaaaggagaggaactgaagaaggctgaggggaaagtgaggaaagagagagagtatgtgataccaaaaagaaatgagatcaaggagaacaaaacctctgtttcagccaaattttcagctcaagaaataaaaacagggctcaaagaagtggtaactgctgtggaggaaatgacaagtaaaggaaaaccaggacaagaagtcttggaagacgaccaggaaaatactttaaaatatgagtatgaagaagactttgaagtagatgaggagaaacaaggtgaaaaatctaatgaagaaggacaggctgatgttcaaatgaatggaataccgcagtcacctttggatgataaaaaagataatttagaccctgaaaaagagagtgaaacctcatcacagaaggcaccagatgcccgtgacaatgtgaaagatgagaatgatggatgctctgagagtgaactggaagaggataaacaagatatgaaaactgcttcatcaacctcatccagaagtcacccttattctagtgacagtgaggatgaatctgcagtgggggacagggaagcccacactgacagcagcacagatgaaagtgccagaaggtcatcttctcaggaactgagtgaaaatgataagccaagaaagtctcaccttccaattgaggaatccttagaaattgaaattgaagaccaagaaataacaaaagcagatgtggagaccaagccgatgccaatagacgaaagctttgagaatgttcttaaagaaggaacggagaaaggaacccaagagattgcagagggtttatctgagaagtccgggaaacatgtttctgcagaagaaaaggaaaaggataagagtaagctttgggaagaaagcactgctcaggtgaaggacaaaaaggcaggtctccctgggttggaggaaggtggtaagtatggccgttgagttgagctgccatcatcctcatgcatggaagctgattttggtcattgcactatgccaaagcttgggaaatactactgtgacaatgctttagggattcaagattttttgctgtgtctctctttgtcacataatcatacatgtattttcagtttgctgtttgccttctcttgcacttaaaaaattactcgataatttctatccagcctgtttcctattttcggtaaattccctcctatgggaattccatctcaggaatgaaataaagcacagtatgtgtctgaaggcaa

SEQ ID NO: 137594 - DNA, 738 bp, Homo sapiens
  Payload ID: 6938
  Gene Symbol: ERICH3
  Gene Name: glutamate-rich 3
  ENST ID: ENST00000479666
  CDS Start-End: 66-398
aaatactcaaagtccaatgagtaggatttcctctcccctagatagtacttggatgggtgctttccatgcttgccaagggcaagaaggcagtgatgaagttcaggaactccataggcaattcacagagaatgaattcatatcaacttccaaacattaacagttacatgatgcctattcctcctccacttcccccaactgggaaaatcacaagagaaaatagatctgaaacatggagaaggagaagatttcgtccaaccactgctccaaatggcttagaacctcttttgacaaagctcagttgtacttgcctgagaaatctgaaaagaaatgagaaggaaagtcataagcaactggtgaaggaaatcagaaagaagagctttagttatgcaggggcatgaggccttgttcctgttcttcaaatggaactgaattttcatggaaggttttgatacttacttgaggatagcagaaagggccgagaaaccttattaaagtttcatttgtctctggtcattatatctttgcaagatggattcaagaaggattcataaaacatccttacatagtaatgcagctattacaatgatctatttggggaaaaatgtgcacctatcttctgataatcctgacttccgggatgaaattaaagtttatcagcagcactgtggtggggaaaacctttgtgtctacaaaggcaaactacttgaaaaagagacctttcagtttatttccaaaagg

SEQ ID NO: 137595 - DNA, 946 bp, Homo sapiens
  Payload ID: 6939
  Gene Symbol: ERICH4
  Gene Name: glutamate-rich 4
  Uniprot ID: A6NGS2
  ENST ID: ENST00000378187
  CDS Start-End: 13-405
agctcagagacgatggaactgtggaggcagctgaatcaggctggactggtgcctccggggctgggcccacccccccaggccctgagggaggtctccccagtggaaatccctggtcagaccctcaggactgcaggggcagacactggaggtgcctgcgatagtctgctgtggatcagggaggagctggggaacctgcgccgagtggatgtccagctgctgggacagctgtgcagcctggggctggagatgggggcgctgcgggaggaactggtcaccatattggaggaggaggaggagagcagcaaggaagaggaggaggatcaagagccccagaggaagcaggaggaggaacacctggaggcctgcccagccccacatccacctgactttgagatgatgatctgaggctctgccagtggatttagattgacatacaaatgagatgcaaatgtatgtaaaggagaagggagatttgcaggtcaaagcagatgtggaatcaagtatacccctttagtaagtgctttctctgaaggtgcctgcaatgatatttaggcattggcctgtgagctatgggtgtgtttgcagatgacatgaggatgtgtttggaggtgatgtgggaggttgtagagaagttgcaggtgctttcgcagatgagcctcaggtgtgctgctgagatggggatctctgcaaatatgctggtgatgcatacagatgcgatttcagatcaacgctgtccagtatggtagccaccggacacacatggttatttagtgcttgaaacatggggactgcaaattgagatgtgctgtgagtgtaaaatacacaccaaatattaaaggcttagtatgatgaaaagaacataagacatctcaataatttttagattacttattgaaataataatattttgagcatatcagtattagtaaaaatattactaaaatta

SEQ ID NO: 137596 - DNA, 1761 bp, Homo sapiens
  Payload ID: 6940
  Gene Symbol: ERICH5
  Gene Name: glutamate-rich 5
  Uniprot ID: Q6P6B1
  ENST ID: ENST00000318528
  CDS Start-End: 360-1484
ccccctgacatcctccctatccctgctttaggggcttttcctctcttactgtgccataccctccaccgtctcccctcctgtctcctgggctctactcctccctgccctcctctgcgtcctggccctcccgctctcttccgctttgcgctcccaggctccttccacctcctgccagctcccttcctcctccaggtgcgcaccccctaccattagccccgctgcgcgcttgcgctctacgcccaagggagccgggctgcagagctggagaaacttccgcggctacgggtgcagttgccttcggttcccggttccgggccgacacccgcgcagggctgagacaggtgtctgcgctccccgcaatgggctgctccagcagcgccctcaacaaggccggcgacagcagcaggttccccagcgtaacttcaaatgagcatttttcaactgcagaagaaagtgagtcctgctttgcccaaccaaagccacatgcactgggaagagaatctactgttgatggcaatgtacaaagggaaagccgtcctcccttacaaaagctcaaggtttcagcagagcctacagctaatggtgttaaacccctccaagaacagcccctggccaaggacgtagcccctggaagggatgccacagaccaatcagggtccacagaaaagactcagcctggagagggactggaggaatctgggccgcctcaaccaggtggcaaagaggatgccccagcagcagaaggaaagaagaaagatgcaggagcagggacagaggccgagtctctaaaaggaaatgctgaagctcagcctttaggaccagaagccaagggtcagcctttgcaggcagcagtagagaaggactctctcagagcagtggaggtcactgagaatccacaaactgctgcagagatgaagcctctaggaacaactgagaacgttctgactctgcaaatagctggagagctacaacctcagggcacagtgggaaaggatgagcaggccccgcttctagaaacaatttccaaagagaatgaatctccagaaatattggaaggaagtcagtttgtggaaacagctgaagagcagcaacttcaggcaacattgggaaaagaggagcagccccagcttctagaaagaattcccaaagagaatgtaacaccagaagtattggacagaagtcagcttgtggaaaagcctgttatgaatgatccattccataaaactcctgaaggtccaggaaacatggagcagattcaacctgaaggaatagttggaagcatggagcatccagcacgaaatgtagaggcaggagcatatgtggaaatgatcaggaacatccatactaatgaagaggaccaacgcattgaaggtgagacaggggaaaaggtggaaacagacatggagaatgagaaagtgagtgaaggggctgaaaccaaagaagaagaaacaggagaagtggtggacctttcagcagccacatagatagaagagtgaaccgacacagtgtgttatcatagaggagacaaaaatggtagtgaagcttgtggttatgtatcttatctttctacatttacatgttttctgtaaggagtgtggttatagagagactgttggaaccatgagaaggatgtttctgtgttcttgattatattgttctgcaaaactgctaagccatgaacagttttcttagctacttagaatggttatacatttaaaagtataaaaaccaaagccaataaaaatgatgtgattatttaag

SEQ ID NO: 137597 - DNA, 596 bp, Homo sapiens
  Payload ID: 6940
  Gene Symbol: ERICH5
  Gene Name: glutamate-rich 5
  Uniprot ID: Q6P6B1
  ENST ID: ENST00000545282
  CDS Start-End: 149-319
agccccgctgcgcgcttgcgctctacgcccaagggagccgggctgcagagctggagaaacttccgcggctacgggtgcagttgccttcggttcccggttccgggccgacacccgcgcagggctgagacaggtgtctgcgctccccgcaatgggctgctccagcagcgccctcaacaaggccggcgacagcagcaggttccccagcggtgagacaggggaaaaggtggaaacagacatggagaatgagaaagtgagtgaaggggctgaaaccaaagaagaagaaacaggagaagtggtggacctttcagcagccacatagatagaagagtgaaccgacacagtgtgttatcatagaggagacaaaaatggtagtgaagcttgtggttatgtatcttatctttctacatttacatgttttctgtaaggagtgtggttatagagagactgttggaaccatgagaaggatgtttctgtgttcttgattatattgttctgcaaaactgctaagccatgaacagttttcttagctacttagaatggttatacatttaaaagtataaaaaccaaagccaataaaaatgatgtgattatttaag

SEQ ID NO: 137598 - DNA, 2052 bp, Homo sapiens
  Payload ID: 6941
  Gene Symbol: ERICH6
  Gene Name: glutamate-rich 6
  Uniprot ID: Q7L0X2
  ENST ID: ENST00000295910
  CDS Start-End: 54-2045
gccgaccggggccgcggccaaagagctggctgtaatcccgcctcccgccagccatggcccacttgcgctcgcctagcggcttcggagacccggggaagaaggaccagaaggagtcagaggaggagttagaggaggaggaggaggaggaagaggtggaggaggaggaggaagaggtggaggaggaggaggaagaggtggaggaggaggaggaggaggtggtggaggaggagttggtgggggaagagcaggagttggaggcccctgagacgttcagcgaagagtacctctggaaggtcacggacatcggtgactacgacgacgacttcccagacgtgcgcccccgcttagccagcatcgtcagccctagcctgacctctacgttcgtgcccagccagagcgcgaccagcactgaaacgccgagcgcaagcccaccctccagcacctcctcgcataaaagtttccctaaaatatttcagacatttaggaaagacatgtctgaaatgagtatagatagaaatattcatcgcaatttgtctccaggaattccagtatcagtacaaacagaagaaagttggctccaagatttgtctgataaagtgcaatcgaggaagaaagcctctaaagagaaagctgaacctgaatgtctggcatctaagttaagagaaaaatgggtaattaatccagaagagtcgaaactaaatattttatatgagctggagtttaaggaagacttcataacactgttcgagccttctctaagaacgttacccagcatcggaccaccatccattctggcatacaaagaagagagctccaatttaggcattaacttcaaggatgaagaggaggagacatcacccaaatgtgaattttgtggcagcgatctaagagcatttttttctaatgtggatgtttcctctgaaccaaaagggcatgcctcctgttgtattgctttccaaaatctgattgactatatctatgaggagcaaataaaaaccaaaccccctaaagctgaattaattgctattgaccctcatgcagcccatggtagtgaggtcgacagactcaaggcaaaagaaaaagccctgcaaaggaaacaggagcaacgaatggccagacattttgcaataatatcaagggaacagactcatttctctgaagatgattcaaagcgcttaaaaacaatttcttatcaactttctgtggatattccagaaaaacagataattgatgacattgtatttgattttcaactaagaaacagtaacatgtctatcatttgttgtgattctcggatagcatgtggaaaggttgtcaggaatgagctcttagagaagcactacaaacatgggagcaagtttctgacttcatttccagatgggacaacacaaatattctatccatctggaaacctagccatcattcgagtgcccaacaaggtaaatggttttacttgtatagtccaagaagatatgcccactaaccctgctatcctagcagtgctggattcctctggcagaagttcctgctatcatcccaatggaaatgtctgggtatacatcaatatcttgggaggtcaatattcagatcaagccggcaacagaataagggcttggaattggtcaaattccatcacttcctcaccctttgtttcatttaaacctgtctttctggctttgaaccgttatattggagtccgcatcttagaacaagacaagatttctataacttttctagcaatgggccaacaggcaagaatcagtgttggaaccaaagtgaagctaccaaaccctgaggagattccaatcctccgatacgtaagtggagatgaccttcttctgctggccagtttaataaagatccgtcgcctgtttcataaacttgaaggatgtgtgaattttccctcaagccaggtttgggaaaaattaaagcaaccttcctacctttcttcactttctctaaaactaattgccctttgtcacagttctggtataaagcaagatataatgaagacaataagaaatataataaatgaagaaatttaactaagaa

SEQ ID NO: 137599 - DNA, 479 bp, Homo sapiens
  Payload ID: 6941
  Gene Symbol: ERICH6
  Gene Name: glutamate-rich 6
  ENST ID: ENST00000498386
  CDS Start-End: 74-479
agaggctcgcgctcgcgagagccgaccggggccgcggccaaagagctggctgtaatcccgcctcccgccagccatggcccacttgcgctcgcctagcggcttcggagacccggggaagaaggaccagaaggagtcagaggaggagttagaggaggaggaggaggaggaagaggtggaggaggaggaggaagaggtcacggacatcggtgactacgacgacgacttcccagacgtgcgcccccgcttagccagcatcgtcagccctagcctgacctctacgttcgtgcccagccagagcgcgaccagcactgaaacgccgagcgcaagcccaccctccagcacctcctcgcataaaagtttccctaaaatatttcagacatttaggaaagacatgtctgaaatgagtatagatagaaatattcatcgcaatttgtctccaggaattccagtatcagtacaaacagaagaaagttggctcc

SEQ ID NO: 137600 - DNA, 526 bp, Homo sapiens
  Payload ID: 6941
  Gene Symbol: ERICH6
  Gene Name: glutamate-rich 6
  ENST ID: ENST00000474463
  CDS Start-End: 35-526
aaagagctggctgtaatcccgcctcccgccagccatggcccacttgcgctcgcctagcggcttcggagacccggggaagaaggaccagaaggagtcagaggaggagttagaggaggaggaggaggaggaagaggtggaggaggaggaggaagaggtggaggaggaggaggaagaggtggaggaggaggaggaggaggtcacggacatcggtgactacgacgacgacttcccagacgtgcgcccccgcttagccagcatcgtcagccctagcctgacctctacgttcgtgcccagccagagcgcgaccagcactgaaacgccgagcgcaagcccaccctccagcacctcctcgcataaaagtttccctaaaatatttcagacatttaggaaagacatgtctgaaatgagtatagatagaaatattcatcgcaatttgtctccaggaattccagtatcagtacaaacagaagaaagttggctccaagatttgtctgataaagtgcaatcgaggaagaaagcctctaaa

SEQ ID NO: 137601 - DNA, 1755 bp, Homo sapiens
  Payload ID: 6941
  Gene Symbol: ERICH6
  Gene Name: glutamate-rich 6
  Uniprot ID: Q7L0X2
  ENST ID: ENST00000491361
  CDS Start-End: 195-1748
cgcgagagccgaccggggccgcggccaaagagctggctgtaatcccgcctcccgccagccatggcccacttgcgctcgcctagcggcttcggagacccggggaagaaggaccagaaggagtcagaggaggagttagaggaggaggaggaggaggaagaggtttccctaaaatatttcagacatttaggaaagacatgtctgaaatgagtatagatagaaatattcatcgcaatttgtctccaggaattccagtatcagtacaaacagaagaaagttggctccaagatttgtctgataaagtgcaatcgaggaagaaagcctctaaagagaaagctgaacctgaatgtctggcatctaagttaagagaaaaatgggtaattaatccagaagagtcgaaactaaatattttatatgagctggagtttaaggaagacttcataacactgttcgagccttctctaagaacgttacccagcatcggaccaccatccattctggcatacaaagaagagagctccaatttaggcattaacttcaaggatgaagaggaggagacatcacccaaatgtgaattttgtggcagcgatctaagagcatttttttctaatgtggatgtttcctctgaaccaaaagggcatgcctcctgttgtattgctttccaaaatctgattgactatatctatgaggagcaaataaaaaccaaaccccctaaagctgaattaattgctattgaccctcatgcagcccatggtagtgaggtcgacagactcaaggcaaaagaaaaagccctgcaaaggaaacaggagcaacgaatggccagacattttgcaataatatcaagggaacagactcatttctctgaagatgattcaaagcgcttaaaaacaatttcttatcaactttctgtggatattccagaaaaacagataattgatgacattgtatttgattttcaactaagaaacagtaacatgtctatcatttgttgtgattctcggatagcatgtggaaaggttgtcaggaatgagctcttagagaagcactacaaacatgggagcaagtttctgacttcatttccagatgggacaacacaaatattctatccatctggaaacctagccatcattcgagtgcccaacaaggtaaatggttttacttgtatagtccaagaagatatgcccactaaccctgctatcctagcagtgctggattcctctggcagaagttcctgctatcatcccaatggaaatgtctgggtatacatcaatatcttgggaggtcaatattcagatcaagccggcaacagaataagggcttggaattggtcaaattccatcacttcctcaccctttgtttcatttaaacctgtctttctggctttgaaccgttatattggagtccgcatcttagaacaagacaagatttctataacttttctagcaatgggccaacaggcaagaatcagtgttggaaccaaagtgaagctaccaaaccctgaggagattccaatcctccgatacgtaagtggagatgaccttcttctgctggccagtttaataaagatccgtcgcctgtttcataaacttgaaggatgtgtgaattttccctcaagccaggtttgggaaaaattaaagcaaccttcctacctttcttcactttctctaaaactaattgccctttgtcacagttctggtataaagcaagatataatgaagacaataagaaatataataaatgaagaaatttaactaagaa

SEQ ID NO: 137602 - DNA, 2421 bp, Homo sapiens
  Payload ID: 6942
  Gene Symbol: ERICH6B
  Gene Name: glutamate-rich 6B
  Uniprot ID: Q5W0A0
  ENST ID: ENST00000298738
  CDS Start-End: 166-2256
cacaaacgccggggcctgagatcgcggtggatgcacgcgcgggagcctggcttggctgttattgttgaaaactctcttggcttggactcagtttaccccctgacattgataataaagtgacgttggctgctgcagaaggagttcaccacctacgacttccccagcatgtctgctgaaaataatcagttatcaggagcatcacctcctcaccctcccacaactccccaatattccacacagaacttgccttcagagaaagaggatactgaagtagaactagatgaggaaagtctacaggatgaatctccattttctccagagggagagtctctggaggacaaagagtatctggaggaggaagaggatctggaagaggaagagtatctggggaaagaagaatacttgaaggaggaagagtatctggggaaggaagagcatctggaggaggaagagtatctggagaaggcagggtatctggaggaggaagagtatattgaagaggaagagtatctggggaaggaagggtatctggaggaggaagagtacctggggaaggaagagcatctggaggaggaagagtatctggggaaggaagggtatctggagaaggaagattatattgaggaggtagattatctggggaagaaagcgtatctggaggaggaggagtatctggggaagaaatcatatctagaagaggaaaaggctctggagaaggaagagaatctggaggaggaagaagctctggagaaggaagagaatctggatggaaaagaaaatctgtataaaaagtatctgaaagaacccaaggcaagttattcatcacaaaccatgcttcttcgtgatgcaaggagtccagacgctggcccctctcaggtgaccaccttcttgactgtcccgttgactttcgctaccccttctcctgtctctgaatctgccacagagtcttctgagttgcttctgacattgtacaggaggagccaggccagtcagacagactggtgctacgacagaactgccgtaaaatctttaaaatcgaaatcagaaacagagcaagaaaccaccacgaagctggctccggaagagcatgttaacactaaagtacagcaaaaaaaggaagaaaatgtcctggagtttgcttctaaagagaacttttgggatggtataacagatgagtccattgacaagctggaagtggaagatttagatgaaaactttttgaacagctcctatcagacagtatttaaaacaataatcaaagaaatggctgctcacaatgaactggaagaggattttgacattcccctaactaagctactggaaagtgaaaacagatggaaactggtaattatgctgaagaaaaattatgaaaagttcaaggaaacaatcttacggattaagaggagacgtgaagctcaaaagttaacagagatgaccagtttcacatttcatttaatgagcaaaccaacacctgagaagcctgagacagaagaaatccaaaagcctcaacgtgttgttcatcataggaagaaattagaacgagataaggaatggatacagaagaagacagtggtgcatcaaggtgatggaaaattaattctctaccccaacaagaatgtctatcaaattctctttcctgatgggacaggccagatacattatccatcaggaaacctggctatgctcatcttatatgcgaaaatgaaaaagttcacatacatcattctggaagacagtctagaagggaggatccgggcccttatcaacaactcaggcaatgctaccttctatgatgaaaatagtgatatctggttgaacctgagctccaacctgggctactacttccccaaagacaaacgccagaaggcctggaactggtggaatctgaacatccatgtccacgcaccccctgtccagcccatctccttgaaaatcaatgagtacatccaggtacaaataaggagccaggataagatcatcttctgcttcacctatgaacagaagcagatttgtttaaacctgggcaccaggtacaagtttgtgatcccagaggtgctgagcgaaatgaagaagaaaaccatcctggaggcagaacccggcccaacagcccagaagatccgggtccttctggggaaaatgaataggctcctgaattacgcgaccacccctgatctggaaaacttcatagaggccgtcagtatatcactgatggacaacaagtacctgaagaagatgctctctaaactctggttttaaggcggggcttatctggcatccaccaaatgccttaggaagttggagaccttgggagctccagggaaaaaaaacccaaagacctgttgaccttttatgagagttggtttgtaatttgggacctgtcgtggctccttgatttgaagtaaacatttttggcagaagggc

SEQ ID NO: 137603 - DNA, 5571 bp, Homo sapiens
  Payload ID: 6943
  Gene Symbol: GRWD1
  Gene Name: glutamate-rich WD repeat containing 1
  Uniprot ID: Q9BQ67
  ENST ID: ENST00000253237
  CDS Start-End: 234-1574
actaccgcgaggaacagcgcccaaagtcacgcgaagatgcagtttctccgtatccgcaggcttctttcgctggcgccattacctgagttctcctccagcgtttccgcaccctctccgattagcggtcccaggagtttccaaggtaaccgcgcagtagggcggatctcattaggcggaaagcgaaacccggaagtgacgctcttaccgggtgtcagcagcgagagggttcgaagatggcggcgcgcaagggtcggcggcgcacgtgtgaaaccggggaacccatggaagccgagtccggcgacacaagttccgagggcccggcccaggtctacctgcccggccgggggccgccgctacgcgaaggggaggagctggtcatggacgaggaggcctatgtgctctaccaccgagcgcagactggcgccccctgtctcagctttgacatagtccgggatcacctgggagacaaccggacagagcttcctcttacactttacttgtgtgctgggacccaggctgagagcgcccagagcaacagactgatgatgcttcggatgcacaatctgcatgggacaaagcccccaccctcagagggcagtgatgaagaagaagaggaggaagatgaagaggatgaagaagagcggaaacctcagctggagctggccatggtgccccactatggtggcatcaaccgagttcgggtgtcatggctgggtgaagagcctgtggctggggtgtggtcagagaagggccaggtggaggtgtttgcgctgcggcggcttctgcaggtggtggaggagccccaggccctggcagccttcctccgggatgagcaggcccaaatgaagcccatcttctccttcgctggacacatgggcgagggctttgcccttgactggtccccccgggtgaccggtcgcctgctgaccggtgactgtcaaaagaacatccacctctggacacctacggacggcggctcctggcacgtggaccagcggccattcgtgggccacacacgctctgtggaggacctgcagtggtcaccgactgagaacacggtgtttgcctcctgctcagctgacgcctccatccgcatctgggacatccgggcagcccccagcaaggcctgcatgctcaccacagccaccgcccatgatggggacgtcaatgtcatcagctggagccgccgggagcccttcctgctcagtggcggggatgatggggccctcaagatctgggaccttcggcagttcaagtctggttccccagtggccaccttcaagcagcacgtggcccccgtgacctccgtcgagtggcacccccaggacagcggggtctttgcagcctcgggtgcagaccaccagatcacacagtgggacctggcagtggagcgggaccctgaggcgggcgacgtggaggccgaccccggactggccgacctcccgcagcagctgctgttcgtgcaccagggcgagaccgagctgaaggagctgcactggcacccgcagtgcccagggctcctggtcagcacggcgctgtcaggcttcaccatcttccgcaccatcagcgtctgaggcgtcccactggctctgatcttgcttcctgcttggaaactgaagtcgaattgggctcccctggaaggggttcattcaggtctgttgactgagactggccggcctgtgggctgccgtgatggattctgtttgacgtattgttctctagaaggcctggctctgatccagtgacccctctcaccaaagaactcggtttaaccagggctctgtaagaccactcccacccagagacttgtgtggcctggtgtggcctgtgtgtcggattccttcctgtcagctgtgacccatttgacctgtgtccccagaacccagttttttgtttgtttgtttgagacggagtcttggtctgtcgcccaggctggagtgcagtagcacgatcttggctcactgcaacctccgcctcctgggttaaagtgattctctcagctcagtctcccaggtagctgggattacaggcatgtgccaccacaccccgttaatttttgtatttttagtagagacggggtttcaccatgttggccaggctggtctcaaattcttgatctcaagtgatctgtccgccccggcctcccagagtgctgggttgggattacaggcgtgagccaccgcgtccggctcaggacccagttttggctgctggttcccagcaggggactcgggggatatacagtggctgcaccaaattggaggtgtgggttcctccaacacaatttgcttctgcccgttgtcttcctgccagctgggtttggccaggatttctccgtgtgggggctacatgcgaccctctcccctcctccctgactttagaggctggtgctgtgtcgggaggaaggtcagggctcctgagcagcaataaaggaccaggaagaggcctgaggtgtatttgagactctggtcctttggccacagccctatgaggaaacggggtgtggggggagtttgggggtggggaggaatttggcaccagctgcccccaggccgctaggctgggggaggccactgggagtccagtgcaacccaaccttccgcccactgggtgccgccgcgttctgccttctctaagtgtccttccatctggaactcactctggcttagtgaaaggggcctcatccctgacccccaccagcttatgaaggcttcatctcagggaactctggaccccccatttctccctccgtccatctcccctttatcacgtttctttctttcttctctgtgtccccctctttcagagtctcccgtcccccactgccagtctccctgccccctagtcgctgtctcgctcctccgccgctgtctcctgtccagcctgcctgggctgtggcccagccgctctgcctggctggcctccctggctccccctctgcggctctgagctagccccacccccggcccccctccatccagcctctgatccatctgtggactccgaggtcgggtgcccgtcacacggcccctgggaccaaggacagactacagcccctcagcacccacagaggcttcccctcagccctagccgaggagcccccagcggagggcatgggggtgggccgccccaacaggtacgtgcctccatgcaaggcaccgctgagccatcccctcctgctctgctgcgtcgcccccatccacccctgccccagcatccctgtcctcagcttgtccccttcaagaaggccttgtcttcccatcagtgacaggctcagcgccaggagaatccacccccaggttcagtgcctccaactctcaccccatccccattttatgcattttctcactggcttccatcctttcagagaaaccctctcagtctgtctgtctctgtctctgtctctctcccccatctctgtctctcccatctctctctgcctctctctgtcttcacaatttcatctccccatgtcgccatttcttaaaacatttcttttctccttttcgttttcccaattgccctgtccgcctctatcttctctgtccccctccatctaggtctctgtccccccctctctctgggtctctgtccccctctgtctctgagtctctatcctctcaaggtctctgttcccctctctctgggtctctgtcctctctcaaggtctctgtccctttctctctggatcaatgtccctttcctgctgccctctctgggtctctgtccccctctctctcagggtccctgtcctgcttggtccctgtactttttcttggggcaccctctcaacacccctcctcctgcctatctctgcatctctttgtctttctgtagtctctgctttccaacctgctgtccagcccccaccagtaggtggggagtggtggggaacacccctggtttcggaagagtgagagtgttgatttgggagggtgagggtggggcctgggggcggggcttcttggcctcagattagacagtgactttgacacgaagttgaagcaccttaagccctgtatctcctttatatggaaacattaagctgctctcgcaggtcaggtggaggatccctttccctcccgccctgcttttgctaggggaggggggtgccctgagcctgagtcgcagccagcctgggagctgggccatgttggccgcagatggccccctggtgaaggttcccgttggctttgggaagtagacaacgggtctgcctcacggggctgaggtgggactggaggatttcgagggcagaactctgggaaggaaagaaaggcttaggacccaaccagcattccccctggcactgcgggggcctggccagctcatggcgttccctgagcctgttccccaactgtgaaagggggtgatgatcttcacctcccggcatcctgagcggccaaggtgagcagtggggtctgagagtccagtgggggctgtgggcatgtcgggagctcatcacgaggcctcgtacataccaggtgtgtttgaaaccagagtgctcttgagaagactgtggtttgtcactcgggccgtggctcccaggaggcctgggtgggaggctagcttttgccactcctctccccactggctgagagacctgcgacaagggactaacctcagccccagttggcttttctgtgaaaagccaggtcccttcatcaaagggctttggtgagagatgggcaagtgggggtgagaggcccaggctggggcctggggagcacaggtcagtgtcagtgcccacctgcccccccagcccacgggggtggttcctgagggtggagtcagtgctgagtggggatccccaggctggggagggctgcaggtgtagatgctgcatcctgatgttgacctccaggccgcccccttgggcaacgagcctatttcccctttttgggagaacagtctctaacatgcagggttgtcaggggtgagatagagtcaaggttggggtacactgtgggcactggacacagccaggctggtcccctcacctcagccttgcctctgtcaagtgggcctaatgaaccctcgcgaatggccaggctgcctgcgtggttgtgggaagcaggtgcagggctttgggagacccagttggtgccaaacttgacattgtctcatggtcttctttccaaatggagtgtgccaggccctgccaagaagcccctgaggatccccaggttccagcacaaattatttaacccctggaatggtttgtcctgatccagccagttcctgggaagttccccaccacagggccaagcgtttggtaacgttgcagtgaaccctgaaggcaatgaggggtgcgggtccatgcccagccctttcctttggtccaccctgacaggctgctgcgattccctccatttcttttcttcctttattttttatttttaattatttatttattttttagagacagggttttgctgtcttccccaggctggttctcaaacccctggcctcacgcattcctcctgagttggactcccaaagtgctaggattacaggtgtgagccaccgcacctgccctcttttttttttttttttctttaagagataggg

SEQ ID NO: 137604 - DNA, 881 bp, Homo sapiens
  Payload ID: 6943
  Gene Symbol: GRWD1
  Gene Name: glutamate-rich WD repeat containing 1
  ENST ID: ENST00000598711
  CDS Start-End: 197-881
gctggcgccattacctgagttctcctccagcgtttccgcaccctctccgattagcggtcccaggagtttccaaggcgccccctgtctcagctttgacatagtccgggatcacctgggagacaaccggacagagcttcctcttacactttacttgtgtgctgggacccaggctgagagcgcccagagcaacagactgatgatgcttcggatgcacaatctgcatgggacaaagcccccaccctcagagggcagtgatgaagaagaagaggaggaagatgaagaggatgaagaagagcggaaacctcagctggagctggccatggtgccccactatggtggcatcaaccgagttcgggtgtcatggctgggtgaagagcctgtggctggggtgtggtcagagaagggccaggtggaggtgtttgcgctgcggcggcttctgcaggtggtggaggagccccaggccctggcagccttcctccgggatgagcaggcccaaatgaagcccatcttctccttcgctggacacatgggcgagggctttgcccttgactggtccccccgggtgaccggtcgcctgctgaccggtgactgtcaaaagaacatccacctctggacacctacggacggcggctcctggcacgtggaccagcggccattcgtgggccacacacgctctgtggaggacctgcagtggtcaccgactgagaacacggtgtttgcctcctgctcagctgacgcctccatccgcatctgggacatccgggcagcccccagcaaggcctgcatgctcaccacagccaccgcccatgatggggacgtcaatgtcatcagctggagccgccgggagcccttcctgctcagtggcggggatgatggggccc

SEQ ID NO: 137605 - DNA, 3984 bp, Homo sapiens
  Payload ID: 6944
  Gene Symbol: GPT2
  Gene Name: glutamic pyruvate transaminase (alanine aminotransferase) 2
  Uniprot ID: Q8TD30
  ENST ID: ENST00000340124
  CDS Start-End: 113-1684
gcggggatgcggctgtgggcgccggggccgggtagctgctccaggcgcgcgagctaaccgagtgcggcgagggcctaccaggggcgacagggtttctctccgcaagcgcgcgatgcagcgggcggcggcgctggtccggcggggctgtggtccccggacccccagctcctggggccgcagccagagcagcgcggccgccgaggcctcggcggtgctcaaggtgcggcccgagcgcagccggcgcgagcgcatcctcacgctggagtccatgaacccgcaggtgaaggcggtggagtacgccgtgcggggacccatcgtgctcaaggccggcgagatcgagctcgagctgcagcggggtatcaaaaagccattcacagaggtcatccgagccaacatcggggacgcccaggctatggggcagcagccaatcaccttcctccggcaggtgatggcactatgcacctacccaaacctgctggacagccccagcttcccagaagatgctaagaaacgtgcccggcggatcctgcaggcttgtggcgggaacagcctggggtcctacagtgctagccagggtgtcaactgcatccgtgaagatgtggctgcctacatcaccaggagggatggcggtgtgcctgcggaccccgacaacatctacctgaccacgggagctagtgacggcatttctacgatcctgaagatcctcgtctccgggggcggcaagtcacggacaggtgtgatgatccccatcccacaatatcccctctattcagctgtcatctctgagctcgacgccatccaggtgaattactacctggacgaggagaactgctgggcgctgaatgtgaatgagctccggcgggcggtgcaggaggccaaagaccactgtgatcctaaggtgctctgcataatcaaccctgggaaccccacaggccaggtacaaagcagaaagtgcatagaagatgtgatccactttgcctgggaagagaagctctttctcctggctgatgaggtgtaccaggacaacgtgtactctccagattgcagattccactccttcaagaaggtgctgtacgagatggggcccgagtactccagcaacgtggagctcgcctccttccactccacctccaagggctacatgggcgagtgtggttacagaggaggctacatggaggtgatcaacctgcaccctgagatcaagggccagctggtgaagctgctgtcggtgcgcctgtgccccccagtgtctgggcaggccgccatggacattgtcgtgaaccccccggtggcaggagaggagtcctttgagcaattcagccgagagaaggagtcggtcctgggtaatctggccaaaaaagcaaagctgacggaagacctgtttaaccaagtcccaggaattcactgcaaccccttgcagggggccatgtacgccttccctcggatcttcattcctgccaaagctgtggaggctgctcaggcccatcaaatggctccagacatgttctactgcatgaagctcctggaggagactggcatctgtgtcgtgcccggcagtggctttgggcagagggaaggcacttaccacttcaggatgactatcctccctccagtggagaagctgaaaacggtgctgcagaaggtgaaagacttccacatcaacttcctggagaagtacgcgtgaggacgcctgagccccagcgggagacctgtccttggctcttcctcccaatgcccgtcaggctgaactcgcctcccccgtgactctgcctcgggcctcgcagaggccgctggtcacttcgtcatcattttgcccctggagacgtctttctttgtgccttgatgttgagagcgcctctcttttgagcaaacaagcattctatatgcaaccagagtagaggggacctgctcagcaggtgtgaccagggttctctgaatctgttattgtttttgcttctggaaagttcatttggggtttacaacaactaggatgtgttgggtgagatgtttcagatctggagaaatgagcaggtgtcgggaaatgtgtgacttaaccgtggtgagggctggaaatccaaactcaccaccatgatctgtgaaataaagcccttagcggtgtgaagcatccggtcctttgaacagaagggcctggaaggcccctggggctgagaaagggtccgcccggtggcctggaggcaggcgccgggagcgcagtagcacgtggactgggcaggatgttgcactagcttggggtagatgctgggggctgcggccacggtcagagggccccactgtgaggcgtgggtgtgagccaggctgcaggaggaactgggcctccgcttcccagcaacgcagccaggcctgagaattctgtgcgcccggcgggctttgggaatgaggggttcccttgaacatgcgtaggctggaaccccgtctgagaggtctccctgaatttcagtgacacatagtgcagcccggcagtgtcccacttccgtggagagagccgctggaatggtgtggacccatcccgcgggtgaccggtgcctgttctcccctgaccgagcctgtgagcacatcgccccctgctggcgacagcggggaaatgagggctgaaaatatcctccccacaagggcaatccccgggacctgccgagcagccaaggccctgtcctttcttgaatggtggcgagctgaatctggtcggtttcctagcttttaggtggtaaaagtgcctggcagcttggctgccgtggaggagtcagtcgtggttggaggttcattgccgtgctttcatgcagagtgttttgccttcatgttagcttccggctcccctcccaggctgcagactctgacctgtggcatcaggcttctcccagtacaggagggtgccatcccccagcatgcggcttctctgccattagcagccctgggcgggccgaccacactcgaggctgcggtgctacgggcttagccctcgcctccctcactgggagcttccccatcctccctgccttccccagtgggaagttagggaagctcaggagcctgggaccccgcatgtcccaaaatgggattggagaagctggagagaaagcagaagaggccgaggagtgaggcagcagcctctatgctgtgatttccacaccgggtccgtgcagaggaaacagaaactcccaactgtccttacccaccgacatcacagcccctatgaagaaagtagccacaatctcaaataacaaaagggaatgttctaaaactttttcttccttaaaaaatggagaaaattgcacttgtgcttgctgtgtggtatataaaccaggattagtcccagggtcgtgaggtttctggtgaaaaggttaaatcgtagaagctagtatattttttatatttttgtaacaattgcttttttcatgggggaggcggggttagtatttatagtcctaacaagtccagtaattttttataaatcttcagattataaacagcccctaaaaactttacaacgtttacacagttttttaaaaagagactgtatacacttgatttgctttcaaaataaataaggtcagctagtctaggaggttaacgtcgggtaggaatgctgatcatgataggtttggttttctacagattctgttccggtgcctttcctatccaggcaccacctgagaaagttgtcatttgaggtcgcacttggaagttacatctgtgaagtttctgtcattcgtccagatctgtgtgtgtagcatgtgctgaggaagcacgtgctgggctgtgcctcagacagtgcatcaccgggcacccagaggcttgcctggctattcctgttctggtgtgtgtggagtgttggggaggaacagatgcagatcaacctgtggctgttttcccgtctaggttctcacaggtatctcctgacagaggtacttaacaatggctctgctggaaatttctataaataaaatgtccaaaatggtgactgcgttt

SEQ ID NO: 137606 - DNA, 4228 bp, Homo sapiens
  Payload ID: 6944
  Gene Symbol: GPT2
  Gene Name: glutamic pyruvate transaminase (alanine aminotransferase) 2
  Uniprot ID: Q8TD30
  ENST ID: ENST00000440783
  CDS Start-End: 666-1937
gcgcagccggcgcgagcgcatcctcacgctggagtccatgaacccgcaggtgaaggcggtggagtacgccgtgcggggacccatcgtgctcaaggccggcgagatcgagctcgagctgcagcgggtgagcgcgcgctgggccccggggaggctggggccgctgagcaagggaaaaaccgcagcagccccagctggggtccttcccacgacgtccacccccatggccagctcctcagtcagccaagcctggctaaaacgagagaatgccccctcccgcccgttcacttactggtgcccagcaccgggcactcagtgaggccttgcaatacggttcacttgttgaattgaattcgtcaattgttgagcgggccgtgctgccaggcaccgcacgttgtgtgtctgccctactctcgtggaaccaaggtccagtggagagaggaacataagcgaatgaagaaagaagcaatagagtctcagtgataagttcttggaaaaaaggtctttgccaatcctgattcccggaagagagtcggcagaattccttcctttaggcccctctggagccttggccgaccagccacttctgtggtctggggacagtcaccgagggtatcaaaaagccattcacagaggtcatccgagccaacatcggggacgcccaggctatggggcagcagccaatcaccttcctccggcaggtgatggcactatgcacctacccaaacctgctggacagccccagcttcccagaagatgctaagaaacgtgcccggcggatcctgcaggcttgtggcgggaacagcctggggtcctacagtgctagccagggtgtcaactgcatccgtgaagatgtggctgcctacatcaccaggagggatggcggtgtgcctgcggaccccgacaacatctacctgaccacgggagctagtgacggcatttctacgatcctgaagatcctcgtctccgggggcggcaagtcacggacaggtgtgatgatccccatcccacaatatcccctctattcagctgtcatctctgagctcgacgccatccaggtgaattactacctggacgaggagaactgctgggcgctgaatgtgaatgagctccggcgggcggtgcaggaggccaaagaccactgtgatcctaaggtgctctgcataatcaaccctgggaaccccacaggccaggtacaaagcagaaagtgcatagaagatgtgatccactttgcctgggaagagaagctctttctcctggctgatgaggtgtaccaggacaacgtgtactctccagattgcagattccactccttcaagaaggtgctgtacgagatggggcccgagtactccagcaacgtggagctcgcctccttccactccacctccaagggctacatgggcgagtgtggttacagaggaggctacatggaggtgatcaacctgcaccctgagatcaagggccagctggtgaagctgctgtcggtgcgcctgtgccccccagtgtctgggcaggccgccatggacattgtcgtgaaccccccggtggcaggagaggagtcctttgagcaattcagccgagagaaggagtcggtcctgggtaatctggccaaaaaagcaaagctgacggaagacctgtttaaccaagtcccaggaattcactgcaaccccttgcagggggccatgtacgccttccctcggatcttcattcctgccaaagctgtggaggctgctcaggcccatcaaatggctccagacatgttctactgcatgaagctcctggaggagactggcatctgtgtcgtgcccggcagtggctttgggcagagggaaggcacttaccacttcaggatgactatcctccctccagtggagaagctgaaaacggtgctgcagaaggtgaaagacttccacatcaacttcctggagaagtacgcgtgaggacgcctgagccccagcgggagacctgtccttggctcttcctcccaatgcccgtcaggctgaactcgcctcccccgtgactctgcctcgggcctcgcagaggccgctggtcacttcgtcatcattttgcccctggagacgtctttctttgtgccttgatgttgagagcgcctctcttttgagcaaacaagcattctatatgcaaccagagtagaggggacctgctcagcaggtgtgaccagggttctctgaatctgttattgtttttgcttctggaaagttcatttggggtttacaacaactaggatgtgttgggtgagatgtttcagatctggagaaatgagcaggtgtcgggaaatgtgtgacttaaccgtggtgagggctggaaatccaaactcaccaccatgatctgtgaaataaagcccttagcggtgtgaagcatccggtcctttgaacagaagggcctggaaggcccctggggctgagaaagggtccgcccggtggcctggaggcaggcgccgggagcgcagtagcacgtggactgggcaggatgttgcactagcttggggtagatgctgggggctgcggccacggtcagagggccccactgtgaggcgtgggtgtgagccaggctgcaggaggaactgggcctccgcttcccagcaacgcagccaggcctgagaattctgtgcgcccggcgggctttgggaatgaggggttcccttgaacatgcgtaggctggaaccccgtctgagaggtctccctgaatttcagtgacacatagtgcagcccggcagtgtcccacttccgtggagagagccgctggaatggtgtggacccatcccgcgggtgaccggtgcctgttctcccctgaccgagcctgtgagcacatcgccccctgctggcgacagcggggaaatgagggctgaaaatatcctccccacaagggcaatccccgggacctgccgagcagccaaggccctgtcctttcttgaatggtggcgagctgaatctggtcggtttcctagcttttaggtggtaaaagtgcctggcagcttggctgccgtggaggagtcagtcgtggttggaggttcattgccgtgctttcatgcagagtgttttgccttcatgttagcttccggctcccctcccaggctgcagactctgacctgtggcatcaggcttctcccagtacaggagggtgccatcccccagcatgcggcttctctgccattagcagccctgggcgggccgaccacactcgaggctgcggtgctacgggcttagccctcgcctccctcactgggagcttccccatcctccctgccttccccagtgggaagttagggaagctcaggagcctgggaccccgcatgtcccaaaatgggattggagaagctggagagaaagcagaagaggccgaggagtgaggcagcagcctctatgctgtgatttccacaccgggtccgtgcagaggaaacagaaactcccaactgtccttacccaccgacatcacagcccctatgaagaaagtagccacaatctcaaataacaaaagggaatgttctaaaactttttcttccttaaaaaatggagaaaattgcacttgtgcttgctgtgtggtatataaaccaggattagtcccagggtcgtgaggtttctggtgaaaaggttaaatcgtagaagctagtatattttttatatttttgtaacaattgcttttttcatgggggaggcggggttagtatttatagtcctaacaagtccagtaattttttataaatcttcagattataaacagcccctaaaaactttacaacgtttacacagttttttaaaaagagactgtatacacttgatttgctttcaaaataaataaggtcagctagtctaggaggttaacgtcgggtaggaatgctgatcatgataggtttggttttctacagattctgttccggtgcctttcctatccaggcaccacctgagaaagttgtcatttgaggtcgcacttggaagttacatctgtgaagtttctgtcattcgtccagatctgtgtgtgtagcatgtgctgaggaagcacgtgctgggctgtgcctcagacagtgcatcaccgggcacccagaggcttgcctggctattcctgttctggtgtgtgtggagtgttggggaggaacagatgcagatcaacctgtggctgttttcccgtctaggttctcacaggtatctcctgacagaggtacttaacaatggctctgctggaaatttctataaataaaatgtccaaaatggtg

SEQ ID NO: 137607 - DNA, 554 bp, Homo sapiens
  Payload ID: 6944
  Gene Symbol: GPT2
  Gene Name: glutamic pyruvate transaminase (alanine aminotransferase) 2
  ENST ID: ENST00000562132
  CDS Start-End: 22-554
gtttctctccgcaagcgcgcgatgcagcggggtatcaaaaagccattcacagaggtcatccgagccaacatcggggacgcccaggctatggggcagcagccaatcaccttcctccggcaggtgatggcactatgcacctacccaaacctgctggacagccccagcttcccagaagatgctaagaaacgtgcccggcggatcctgcaggcttgtggcgggaacagcctggggtcctacagtgctagccagggtgtcaactgcatccgtgaagatgtggctgcctacatcaccaggagggatggcggtgtgcctgcggaccccgacaacatctacctgaccacgggagctagtgacggcatttctacgatcctgaagatcctcgtctccgggggcggcaagtcacggacaggtgtgatgatccccatcccacaatatcccctctattcagctgtcatctctgagctcgacgccatccaggtgaattactacctggacgaggagaactgctgggcgctgaatgtgaatgagctccggcgggcggtgcaggaggccaa

SEQ ID NO: 137608 - DNA, 1947 bp, Homo sapiens
  Payload ID: 6945
  Gene Symbol: GOT1
  Gene Name: glutamic-oxaloacetic transaminase 1, soluble
  Uniprot ID: P17174
  ENST ID: ENST00000370508
  CDS Start-End: 29-1270
gaaatctcttgattcctagtctctcgatatggcacctccgtcagtctttgccgaggttccgcaggcccagcctgtcctggtcttcaagctcactgccgacttcagggaggatccggacccccgcaaggtcaacctgggagtgggagcatatcgcacggatgactgccatccctgggttttgccagtagtgaagaaagtggagcagaagattgctaatgacaatagcctaaatcacgagtatctgccaatcctgggcctggctgagttccggagctgtgcttctcgtcttgcccttggggatgacagcccagcactcaaggagaagcgggtaggaggtgtgcaatctttggggggaacaggtgcacttcgaattggagctgatttcttagcgcgttggtacaatggaacaaacaacaagaacacacctgtctatgtgtcctcaccaacctgggagaatcacaatgctgtgttttccgctgctggttttaaagacattcggtcctatcgctactgggatgcagagaagagaggattggacctccagggcttcctgaatgatctggagaatgctcctgagttctccattgttgtcctccacgcctgtgcacacaacccaactgggattgacccaactccggagcagtggaagcagattgcttctgtcatgaagcaccggtttctgttccccttctttgactcagcctatcagggcttcgcatctggaaacctggagagagatgcctgggccattcgctattttgtgtctgaaggcttcgagttcttctgtgcccagtccttctccaagaacttcgggctctacaatgagagagtcgggaatctgactgtggttggaaaagaacctgagagcatcctgcaagtcctttcccagatggagaagatcgtgcggattacttggtccaatccccccgcccagggagcacgaattgtggccagcaccctctctaaccctgagctctttgaggaatggacaggtaatgtgaagacaatggctgaccggattctgaccatgagatctgaactcagggcacgactagaagccctcaaaacccctgggacctggaaccacatcactgatcaaattggcatgttcagcttcactgggttgaaccccaagcaggttgagtatctggtcaatgaaaagcacatctacctgctgccaagtggtcgaatcaacgtgagtggcttaaccaccaaaaatctagattacgtggccacctccatccatgaagcagtcaccaaaatccagtgaagaaacaccacccgtccagtaccaccaaagtagttctctgtcatgtgtgttccctgcctgcacaaacctacatgtacataccatggattagagacacttgcaggactgaaaggctgctctggtgaggcagcctctgtttaaaccggccccacatgaagagaacatcccttgagacgaatttggagactgggattagagcctttggaggtcaaagcaaattaagatttttatttaagaataaaagagtactttgatcatgagacataggtatcttgtccctctcactaaaaaggagtgttgtgtgtggcggccacgtgcttctatgtggtgtttgactctgtacaaattctagtcccaaagatcaagttgtctgaaggagccaaagtgtgaatgtgggtgtcggctgcggcattaaattcatcatctcaacccagagtgtctggtctccctgctctttctgcatggttgtgtccctagtcctaagctttggttctttagggtgactgtggtaagaaggatatttaatcatgacatgcacggacacgtacatatttaactgaaacaagttttaccaaacagtatttactcgtgatgtgcgtagtgcattctgatatttttgagccattctattgtgttctacttcacctaaaaaaataaaataaaaatgttgatcaaga

SEQ ID NO: 137609 - DNA, 1378 bp, Homo sapiens
  Payload ID: 6946
  Gene Symbol: GOT1L1
  Gene Name: glutamic-oxaloacetic transaminase 1-like 1
  Uniprot ID: Q8NHS2
  ENST ID: ENST00000307599
  CDS Start-End: 101-1366
gaggcaggactgcccggcccagccttggaggaagacttctgggcagaagcggaacacaggagcagagacacatagtcttggctccagtttcgtttcagttatgcccaccctttcagtgttcatggatgtgcccctcgcccacaagctagagggcagcttgttaaagacctacaaacaagatgattacccgaacaagatattcttagcctatagagtctgcatgacaaatgaaggccatccctgggtttctctcgtggtgcagaagactcgactacagatttcacaggatccctccctgaattatgagtacttgcccaccatgggcctgaaatcattcatccaggcctctctagcactcctctttggaaagcacagccaagccattgtggagaacagggtagggggtgtacacactgttggtgacagtggtgccttccagcttggcgtccagtttctcagagcttggcataaggatgctcgtatagtttacatcatctcttctcaaaaagaactgcatggactcgtcttccaggacatgggctttacagtttatgaatactctgtctgggaccccaagaagctatgcatggaccccgacatactcctcaatgtggtggagcagatcccacatggctgtgtccttgtgatggggaacattatcgactgcaagttgacaccaagtgggtgggcaaagttgatgtccatgataaagagcaagcagatattcccattttttgatattccctgtcaaggtttatacaccagtgacttggaagaagatactagaatcttacaatactttgtgtctcaaggctttgagttcttctgcagccagtctctgtccaagaattttggcatttatgatgaaggagtggggatgctagtggtggtggcagtcaacaaccagcagctgctgtgtgtcctctcccagctggaaggattagcccaggccctgtggctaaacccccccaacacgggtgcacgtgtcatcacctccatcctctgcaaccctgctctgctgggagaatggaagcagagtctaaaagaagttgtagagaacatcatgctaaccaaggaaaaagtgaaggagaaactccagctcctgggaacccctgggtcctggggtcacatcaccgagcagagtgggacccacggctatcttggactcaactcccagcaggtggaatacctggtcaggaagaagcacatctatatccccaagaacggtcagattaacttcagctgtatcaatgccaacaacataaattacatcactgagggcatcaatgaggctgtcctcctcacagagagctcagagatgtgtcttccaaaggaaaaaaaaacactgattggaataaaactttagtctttgcaaaaa

SEQ ID NO: 137610 - DNA, 497 bp, Homo sapiens
  Payload ID: 6946
  Gene Symbol: GOT1L1
  Gene Name: glutamic-oxaloacetic transaminase 1-like 1
  ENST ID: ENST00000518826
  CDS Start-End: 109-474
ttggaagaagatactagaatcttacaatactttgtgtctcaaggctttgagttcttctgcagccagtctctgtccaagaattttggcatttatgatgaaggagtggggatgctagtggtggtggcagtcaacaaccagcagctgctgtgtgtcctctcccagctggaaggattagcccaggccctgtggctaaacccccccaacacgggtgcacgtgtcatcacctccatcctctgcaaccctgctctgctgggagaatggaagcagagtctaaaagaagttgtagagaacatcatgctaaccaaggaaaaagtgaaggagaaactccagctcctgggaacccctgggtcctggggtcacatcaccgagcagagtgggacccacggctatcttggactcaactgtaagggtctagggggctggtgtcccccctttctgacctttggcctgtatttgagcattaaacttcactgactaggtgaccagttcctagcttc

SEQ ID NO: 137611 - DNA, 600 bp, Homo sapiens
  Payload ID: 6946
  Gene Symbol: GOT1L1
  Gene Name: glutamic-oxaloacetic transaminase 1-like 1
  ENST ID: ENST00000524298
  CDS Start-End: 96-600
ggaggaagacttctgggcagaagcggaacacaggagcagagacacatagtcttggctccagtttcgtttcagttatgcccaccctttcagtgttcatggatgtgcccctcgcccacaagctagagggcagcttgttaaagacctacaaacaagatgattacccgaacaagatattcttagcctatagaggcaccttcccacagccccatggagtccaggagagatttgtttgcaggctgtctgcagagctcagccctgggggcccaaaccaggcatctggagctccctctgtggttttcctcacagtctgcatgacaaatgaaggccatccctgggtttctctcgtggtgcagaagactcgactacagatttcacaggatccctccctgaattatgagtacttgcccaccatgggcctgaaatcattcatccaggcctctctagcactcctctttggaaagcacagccaagccattgtggagaacagggtagggggtgtacacactgttggtgacagtggtgccttccagcttggcgtccagtttctcagagcttggcataaggatgctcgtatagtttacatcatctcttctcaaaaag

SEQ ID NO: 137612 - DNA, 2462 bp, Homo sapiens
  Payload ID: 6947
  Gene Symbol: GOT2
  Gene Name: glutamic-oxaloacetic transaminase 2, mitochondrial
  Uniprot ID: P00505
  ENST ID: ENST00000245206
  CDS Start-End: 130-1422
ccagcacgcggccgctctggcccagggaagtccctgtccttaccttcagcaggagccggttccctgtgtgtgtgtccgctcgccctctgctccgtcctgcggctgcccactgccctcctacggtccaccatggccctgctgcactccggccgcgtcctccccgggatcgccgccgccttccacccgggcctcgccgccgcggcctctgccagagccagctcctggtggacccatgtggaaatgggacctccagatcccattctgggagtcactgaagcctttaagagggacaccaatagcaaaaagatgaatctgggagttggtgcctaccgggatgataatggaaagccttacgttctgcctagcgtccgcaaggcagaggcccagattgccgcaaaaaatttggacaaggaatacctgcccattgggggactggctgaattttgcaaggcatctgcagaactagccctgggtgagaacagcgaagtcttgaagagtggccggtttgtcactgtgcagaccatttctggaactggagccttaaggatcggagccagttttctgcaaagattttttaagttcagccgagatgtctttctgcccaaaccaacctggggaaaccacacacccatcttcagggatgctggcatgcagctacaaggttatcggtattatgaccccaagacttgcggttttgacttcacaggcgctgtggaggatatttcaaaaataccagagcagagtgttcttcttctgcatgcctgcgcccacaatcccacgggagtggacccgcgtccggaacagtggaaggaaatagcaacagtggtgaagaaaaggaatctctttgcgttctttgacatggcctaccaaggctttgccagtggtgatggtgataaggatgcctgggctgtgcgccacttcatcgaacagggcattaatgtttgcctctgccaatcatatgccaagaacatgggcttatatggtgagcgtgtaggagccttcactatggtctgcaaagatgcggatgaagccaaaagggtagagtcacagttgaagatcttgatccgtcccatgtattccaaccctcccctcaatggggcccggattgctgctgccattctgaacaccccagatttgcgaaaacaatggctgcaagaagtgaaagtcatggctgaccgcatcattggcatgcggactcaactggtctccaacctcaagaaggagggttccacccacaattggcaacacatcaccgaccaaattggcatgttctgtttcacagggctaaagcctgaacaggtggagcggctgatcaaggagttctccatctacatgacaaaagatggccgcatctctgtggcaggggtcacctccagcaacgtgggctaccttgcccatgccattcaccaggtcaccaagtaatgtccctggtgcgaggaaacagagacaacctttctgtcttcagcctctgctattgagagcttcacacagacaatgagagagggtggatggtggtgagtggatcatttctttcagccacagtgtgtaacactcagcatttgaatgtttctcagaaaagaacatgtagtgacacagggcagaggcatccatggctggcgtctggaatattaaaccaaactctccccggtccttttttctccaacttttctcaaagagtttacatgtgcaagaaagtcatcgcaccaaaaaacctgtcaattatgccattgcaatatttcagaagctttaactgaagtgtcaggttcctcgtgagaaacagcacacgttagaggctttgagagaaggcctagttctgtcatgagtagtcggcctcgtgtctgtcctcccatcttggaacaaccttatcaacaggccgcactgcagaaatgatgttttatgaaaaccaatgaggctgctgccactccagcaagggaaataatgcagtttcctgtcttatttaagaaaaagagaaggctctcttttctcccttgtcattgccgttcttttccttacacgcaaagattttttaactattgcagattttcatcccattctactgcttgattgaccatcaactccatcctatcgagatttatttaagaatgaagaacataattttctgctgatgctgtaccctcacccttttcagcaaagaatagtggagagtaggaaactgtactttatctcggcatcctcttgaatgatagtgcaagtttctccagttgggatgttgtctctgcccggttggacctcctccctttgttgaatgtggtgtgcagcctctcatctcacactgtgagtccagcggcgcagggtggtaccaggaaagaggatattctaggctttgcgtgctgctagctgggttcaggcttcacccactggaaagaaccaccatctgctctaaccatgtagacttattgcggcctggtttctctgttacaataaaattactgtagacccaa

SEQ ID NO: 137613 - DNA, 1615 bp, Homo sapiens
  Payload ID: 6947
  Gene Symbol: GOT2
  Gene Name: glutamic-oxaloacetic transaminase 2, mitochondrial
  Uniprot ID: P00505
  ENST ID: ENST00000434819
  CDS Start-End: 99-1262
ccctgtccttaccttcagcaggagccggttccctgtgtgtgtgtccgctcgccctctgctccgtcctgcggctgcccactgccctcctacggtccaccatggccctgctgcactccggccgcgtcctccccgggatcgccgccgccttccacccgggcctcgccgccgcggcctctgccagagccagctcctggtggacccatgtggaaatgggacctccagatcccattctgggagtcactgaagcctttaagagggacaccaatagcaaaaagatgaatctgggagttggtgcctaccgggatgataatggaaagccttacgttctgcctagcgtccgcaagtttgtcactgtgcagaccatttctggaactggagccttaaggatcggagccagttttctgcaaagattttttaagttcagccgagatgtctttctgcccaaaccaacctggggaaaccacacacccatcttcagggatgctggcatgcagctacaaggttatcggtattatgaccccaagacttgcggttttgacttcacaggcgctgtggaggatatttcaaaaataccagagcagagtgttcttcttctgcatgcctgcgcccacaatcccacgggagtggacccgcgtccggaacagtggaaggaaatagcaacagtggtgaagaaaaggaatctctttgcgttctttgacatggcctaccaaggctttgccagtggtgatggtgataaggatgcctgggctgtgcgccacttcatcgaacagggcattaatgtttgcctctgccaatcatatgccaagaacatgggcttatatggtgagcgtgtaggagccttcactatggtctgcaaagatgcggatgaagccaaaagggtagagtcacagttgaagatcttgatccgtcccatgtattccaaccctcccctcaatggggcccggattgctgctgccattctgaacaccccagatttgcgaaaacaatggctgcaagaagtgaaagtcatggctgaccgcatcattggcatgcggactcaactggtctccaacctcaagaaggagggttccacccacaattggcaacacatcaccgaccaaattggcatgttctgtttcacagggctaaagcctgaacaggtggagcggctgatcaaggagttctccatctacatgacaaaagatggccgcatctctgtggcaggggtcacctccagcaacgtgggctaccttgcccatgccattcaccaggtcaccaagtaatgtccctggtgcgaggaaacagagacaacctttctgtcttcagcctctgctattgagagcttcacacagacaatgagagagggtggatggtggtgagtggatcatttctttcagccacagtgtgtaacactcagcatttgaatgtttctcagaaaagaacatgtagtgacacagggcagaggcatccatggctggcgtctggaatattaaaccaaactctccccggtccttttttctccaacttttctcaaagagtttacatgtgcaagaaagtcatcgcaccaaaaaacctgtcaattatgccattgcaatatttcagaagctttaactgaagtgtcaggttcctcgtgaga

SEQ ID NO: 137614 - DNA, 516 bp, Homo sapiens
  Payload ID: 6947
  Gene Symbol: GOT2
  Gene Name: glutamic-oxaloacetic transaminase 2, mitochondrial
  ENST ID: ENST00000568368
  CDS Start-End: 89-268
accttcagcaggagccggttccctgtgtgtgtgtccgctcgccctctgctccgtcctgcggctgcccactgccctcctacggtccaccatggccctgctgcactccggccgcgtcctccccgggatcgccgccgccttccacccgggcctcgccgccgcggcctctgccagagccaggcagaggcccagattgccgcaaaaaatttggacaaggaatacctgcccattgggggactggctgaattttgcaaggcatctgcagaactagccctgggtgagaacagcgaagtcttgaagagtggccgggtaagctgagcaggctctggcatcatcccagtttgtcactgtgcagaccatttctggaactggagccttaaggatcggagccagttttctgcaaagattttttaagttcagccgagatgtctttctgcccaaaccaacctggggaaaccacacacccatcttcagggatgctggcatgcagctacaaggttatcggtattatgaccccaa

SEQ ID NO: 137615 - DNA, 1885 bp, Homo sapiens
  Payload ID: 6948
  Gene Symbol: GPT
  Gene Name: glutamic-pyruvate transaminase (alanine aminotransferase)
  Uniprot ID: P24298
  ENST ID: ENST00000394955
  CDS Start-End: 224-1714
agacgggtggggcggggcccaactgtccccagctccttcagccctttctgtccctcccagtgaggccagctgcggtgaagagggtgctctcttgcctggagttccctctgctacggctgccccctcccagccctggcccactaagccagacccagctgtcgccattcccacttctggtcctgccacctcctgagctgccttcccgcctggtctgggtagagtcatggcctcgagcacaggtgaccggagccaggcggtgaggcatggactgagggcgaaggtgctgacgctggacggcatgaacccgcgtgtgcggagagtggagtacgcagtgcgtggccccatagtgcagcgagccttggagctggagcaggagctgcgccagggtgtgaagaagcctttcaccgaggtcatccgtgccaacatcggggacgcacaggctatggggcagaggcccatcaccttcctgcgccaggtcttggccctctgtgttaaccctgatcttctgagcagccccaacttccctgacgatgccaagaaaagggcggagcgcatcttgcaggcgtgtgggggccacagtctgggggcctacagcgtcagctccggcatccagctgatccgggaggacgtggcgcggtacattgagaggcgtgacggaggcatccctgcggaccccaacaacgtcttcctgtccacaggggccagcgatgccatcgtgacggtgctgaagctgctggtggccggcgagggccacacacgcacgggtgtgctcatccccatcccccagtacccactctactcggccacgctggcagagctgggcgcagtgcaggtggattactacctggacgaggagcgtgcctgggcgctggacgtggccgagcttcaccgtgcactgggccaggcgcgtgaccactgccgccctcgtgcgctctgtgtcatcaaccctggcaaccccaccgggcaggtgcagacccgcgagtgcatcgaggccgtgatccgcttcgccttcgaagagcggctctttctgctggcggacgaggtgtaccaggacaacgtgtacgccgcgggttcgcagttccactcattcaagaaggtgctcatggagatggggccgccctacgccgggcagcaggagcttgcctccttccactccacctccaagggctacatgggcgagtgcgggttccgcggcggctatgtggaggtggtgaacatggacgctgcagtgcagcagcagatgctgaagctgatgagtgtgcggctgtgcccgccggtgccaggacaggccctgctggacctggtggtcagcccgcccgcgcccaccgacccctcctttgcgcagttccaggctgagaagcaggcagtgctggcagagctggcggccaaggccaagctcaccgagcaggtcttcaatgaggctcctggcatcagctgcaacccagtgcagggcgccatgtactccttcccgcgcgtgcagctgcccccgcgggcggtggagcgcgctcaggagctgggcctggcccccgatatgttcttctgcctgcgcctcctggaggagaccggcatctgcgtggtgccagggagcggctttgggcagcgggaaggcacctaccacttccggatgaccattctgccccccttggagaaactgcggctgctgctggagaagctgagcaggttccatgccaagttcaccctcgagtactcctgagcaccccagctggggccaggctgggtcgccctggactgtgtgctcaggagccctgggaggctctggagcccactgtacttgctcttgatgcctggcggggtggggtggggggggtgctgggcccctgcctctctgcaggtccctaataaagctgtgtggcagtctgactcc

SEQ ID NO: 137616 - DNA, 1822 bp, Homo sapiens
  Payload ID: 6948
  Gene Symbol: GPT
  Gene Name: glutamic-pyruvate transaminase (alanine aminotransferase)
  Uniprot ID: P24298
  ENST ID: ENST00000528431
  CDS Start-End: 158-1648
agggctgccacttggactcccttgccagggggcgggcaggggctggctctgcctggggccaggcccatgttaacctgtgccccggcctgggggccagaggggcaggcctgcgcacggggaggctgttgtggcagcggaacagagacgtgcacgagtcatggcctcgagcacaggtgaccggagccaggcggtgaggcatggactgagggcgaaggtgctgacgctggacggcatgaacccgcgtgtgcggagagtggagtacgcagtgcgtggccccatagtgcagcgagccttggagctggagcaggagctgcgccagggtgtgaagaagcctttcaccgaggtcatccgtgccaacatcggggacgcacaggctatggggcagaggcccatcaccttcctgcgccaggtcttggccctctgtgttaaccctgatcttctgagcagccccaacttccctgacgatgccaagaaaagggcggagcgcatcttgcaggcgtgtgggggccacagtctgggggcctacagcgtcagctccggcatccagctgatccgggaggacgtggcgcggtacattgagaggcgtgacggaggcatccctgcggaccccaacaacgtcttcctgtccacaggggccagcgatgccatcgtgacggtgctgaagctgctggtggccggcgagggccacacacgcacgggtgtgctcatccccatcccccagtacccactctactcggccacgctggcagagctgggcgcagtgcaggtggattactacctggacgaggagcgtgcctgggcgctggacgtggccgagcttcaccgtgcactgggccaggcgcgtgaccactgccgccctcgtgcgctctgtgtcatcaaccctggcaaccccaccgggcaggtgcagacccgcgagtgcatcgaggccgtgatccgcttcgccttcgaagagcggctctttctgctggcggacgaggtgtaccaggacaacgtgtacgccgcgggttcgcagttccactcattcaagaaggtgctcatggagatggggccgccctacgccgggcagcaggagcttgcctccttccactccacctccaagggctacatgggcgagtgcgggttccgcggcggctatgtggaggtggtgaacatggacgctgcagtgcagcagcagatgctgaagctgatgagtgtgcggctgtgcccgccggtgccaggacaggccctgctggacctggtggtcagcccgcccgcgcccaccgacccctcctttgcgcagttccaggctgagaagcaggcagtgctggcagagctggcggccaaggccaagctcaccgagcaggtcttcaatgaggctcctggcatcagctgcaacccagtgcagggcgccatgtactccttcccgcgcgtgcagctgcccccgcgggcggtggagcgcgctcaggagctgggcctggcccccgatatgttcttctgcctgcgcctcctggaggagaccggcatctgcgtggtgccagggagcggctttgggcagcgggaaggcacctaccacttccggatgaccattctgccccccttggagaaactgcggctgctgctggagaagctgagcaggttccatgccaagttcaccctcgagtactcctgagcaccccagctggggccaggctgggtcgccctggactgtgtgctcaggagccctgggaggctctggagcccactgtacttgctcttgatgcctggcggggtggggtggggggggtgctgggcccctgcctctctgcaggtccctaataaagctgtgtggcagtctgactccagg

SEQ ID NO: 137617 - DNA, 4834 bp, Homo sapiens
  Payload ID: 6949
  Gene Symbol: GLS
  Gene Name: glutaminase
  Uniprot ID: O94925
  ENST ID: ENST00000320717
  CDS Start-End: 259-2268
gagccttaggcggagcgaagagaaccggtcgcggcaatcctagcgcgcagcagcagcagcagcagcagcagcagcagcagcagcagcagcagcacccgcatccgctgcgggagtccgagccggaaccacacccaagtagctgccctttcctcttctgtcatctcaccgccccaccacagaccgcgttccccgaggaaaccggccgcccacgcccggagcatcctcccctgttgagcgggcgctgacggacccggcggcatgatgcggctgcgaggctcggggatgctgcgggacctgctcctgcggtcgcccgccggcgtgagcgcgactctgcggcgggcacagcccttggtcaccctgtgccggcgtccccgaggcgggggacggccggccgcgggcccggctgccgccgcgcgactccacccgtggtggggcgggggcggctggccggcggagcccctcgcgcggggcctgtccagctctccttcggagatcttgcaggagctgggcaaggggagcacgcatccgcagcccggggtgtcgccacccgctgccccggcggcgcccggccccaaggacggccccggggagacggacgcgtttggcaacagcgagggcaaagagctggtggcctcaggtgaaaataaaataaaacagggtctgttacctagcttggaagatttgctgttctatacaattgctgaaggacaagagaaaatacctgttcataaatttattacagcactcaaatctacaggattgcgaacgtctgatcccaggttgaaagagtgtatggatatgttaagattaactcttcaaacaacatcagatggtgtcatgctagacaaagatctttttaaaaaatgtgttcagagcaacattgttttgttgacacaagcatttagaagaaagtttgtgattcctgactttatgtcttttacctcacacattgatgagttatatgaaagtgctaaaaagcagtctggaggaaaggttgcagattatattcctcaactggccaaattcagtcccgatttgtggggtgtgtctgtttgtacagtagatggacagaggcattctactggagataccaaagttcccttctgtcttcagtcctgtgtaaaacctttgaaatatgccattgctgttaatgatcttggaactgaatatgtgcatcgatatgttggaaaagagccgagtggactaagattcaacaaactatttttgaatgaagatgataaaccacataatcctatggtaaatgctggagcaattgttgtgacttcactaataaagcaaggagtaaataatgctgaaaaatttgactatgtcatgcagtttttgaataagatggctggtaatgaatatgttggattcagtaatgcaacgtttcagtctgaaagagaaagtggagatcgaaattttgcaataggatattacttaaaagaaaagaagtgttttccagaaggcacagacatggttggtatattagacttctacttccagctgtgctccattgaagtgacttgtgaatcagccagtgtgatggctgcgacactggctaatggtggtttctgcccaattactggtgaaagagtactgagccctgaagcagttcgaaatacattgagtttgatgcattcctgtggcatgtatgacttctcagggcagtttgctttccatgttggtcttcctgcaaaatctggagttgctgggggcattcttttagttgtccccaatgttatgggtatgatgtgctggtctcctcctctggataagatgggcaacagtgttaagggaattcacttttgtcacgatcttgtttctctgtgtaatttccataactatgataatttgagacactttgcaaaaaaacttgatcctcgaagagaaggtggtgatcaaagggtaaagtcagtgataaatcttttgtttgctgcatatactggagatgtgtctgcacttcgaagatttgctttgtcagctatggacatggaacagcgggactatgattctagaacagcactccatgtagctgctgcagagggtcatgttgaagttgttaaatttttgctggaagcctgcaaagtaaaccctttccccaaggacaggtggaataacactcccatggatgaagcactgcactttggacaccatgatgtatttaaaattctccaagaataccaagtccagtacacacctcaaggagattctgacaacgggaaggaaaatcaaaccgtccataagaatcttgatggattgttgtaatggtctcaaatcccaagatttaaatcacttacctatttaattgtggaaaatgattatgaagaacatgtgtatttctatctggtagtgatgtatattttacatttgtcatttcagtgttactggagttttcttcattgtgcacacaggacaaatctgatctctttgggaaaaaatagaaataaaacaatctccctccataatgtgagcaatattacctcgtgcattgtataatttgatgtaaaagaaatagttaccaatgctagcttgtgtggtcttccatgatttatttgtgttttgtgaattttcaatttatggtgatgatctgctgatatgcatttataaagtaagctctgttgtacagtctgtccaaatgggtcaaggttgcctttagaagcaaatagtgtgattttcaagacttcaaatacaaatttagtttaagtgtttgaacaactatatgcacttacggttgtgtgtttaaaatgtctctctcaccccctagcttcatgatgtgactcttaaaaaactataatagttaacaactgttagtaagatagaccaattctgattagactttatcagggaatctgtttaagatatgtttggtgaccaaaacgtatgtgtgaatgtagttataatgcttttgaaaaattttcctttttctatatccccttagtccagcctctcttctcagacatttagctatctgcctctttcctttagctgggaaagtgagagctggcatactatgcagtttttatgttttccatagtaagtcagaaaatgcctcctatttctggcatcagaactttgccatttgtctacagaagacgaaccagagacaaaattactaagtataaattagtcaagtttatcagtctaaaaaacgaagggatgtgcaactgcagctctttaagaagttttttttttttagcttctagggtaaagataaattcagaaatgctctaagctaccaaagttattctgaaagtatgggaactgctacaactaacaaacatttgtttccaagcctgtcattaagagtctgcatcaagagatttgtcctccttgggggaccactggatcattccagatttcttgtgatttttctattgtgtaattcttggtgggctctgtagtttaataataagaaaaaggccatttcattttaaattgtgacctataattctttgtcttgggttggtaattcaggattcatttggaaagtgggtaaaaggggcttcaaaaaacggatagaacaggattttctaggagttacacatacattttatcctgtcatacctcgagataaagtggcatgttagtgaggagttctgatattaagcacacacacacatgcacacaaatggacttctctgaagctgtgtttagtgaaatgagctcaagtacatgaatgttagttgttatcacatacagcaaattcctttttttttctttttctatgagcacactctgctgcttctaaactttacatgcctgatggcaccttactccagcagcctccaggtgctttcattttcacttccagtctaagccagtggctcctgccactgccctcccattacctagatggcacctcctttggtgaaaccacggccaatgttccttagctgcaccaggcccgaagctgttcccatgcttgagcttccatggggaggatgctgagtgagcagtttcctaccccgtggatctagcaagccatggagacaggtagcatttgtaagatgctgcacaggagcagcattatccccaaagatattacagggtagacacgttttaactgaaatcaatcaagataactttattcaaagagcagcccgctttgtgtgactaaaatgaaacaagacagttgaattgtgtgacttgaagattaccaatgattttgaggcttttctataataaaaagaggttctaaccattatttgggaacaaagagagttttcatcttttttcagatcaaaaccattctgtaaaatctttgttgtttaattaaatgtgccgttatttacccctgatgttatttatgactatgtgccgattcctgctcgggctgtttgctgttggctggtaataatatatttgatttaaatgctgttgactgtgctattaactgctgccgtcagtaaactccaaagatctttttgttttggctttagtatcatatgtgctttttctgtatcctgagcgctctatatgatcatgttaatttaaagctttatacacattgttgtttttgctggtctcatctttggtaatatgctataccccactgctgcccgacactgccctttagctgcagagctggattagctgttgaccatttgatgctgttgtctgtctggcagggactgaatgacctgatgtcagatttagattcttcctggggattacacagctatgaatgtatttgcttctaaaacctcccaaagtgaatctaatcttaaaactacaagttgtaagtattctgaaattgggaaacatttattttaaatgcaatcaggtagtgttgctttttacagcataataaatatatgtatcaaaaaaaaaa

SEQ ID NO: 137618 - DNA, 4475 bp, Homo sapiens
  Payload ID: 6949
  Gene Symbol: GLS
  Gene Name: glutaminase
  Uniprot ID: O94925
  ENST ID: ENST00000338435
  CDS Start-End: 252-2048
aggcggagcgaagagaaccggtcgcggcaatcctagcgcgcagcagcagcagcagcagcagcagcagcagcagcagcagcagcagcacccgcatccgctgcgggagtccgagccggaaccacacccaagtagctgccctttcctcttctgtcatctcaccgccccaccacagaccgcgttccccgaggaaaccggccgcccacgcccggagcatcctcccctgttgagcgggcgctgacggacccggcggcatgatgcggctgcgaggctcggggatgctgcgggacctgctcctgcggtcgcccgccggcgtgagcgcgactctgcggcgggcacagcccttggtcaccctgtgccggcgtccccgaggcgggggacggccggccgcgggcccggctgccgccgcgcgactccacccgtggtggggcgggggcggctggccggcggagcccctcgcgcggggcctgtccagctctccttcggagatcttgcaggagctgggcaaggggagcacgcatccgcagcccggggtgtcgccacccgctgccccggcggcgcccggccccaaggacggccccggggagacggacgcgtttggcaacagcgagggcaaagagctggtggcctcaggtgaaaataaaataaaacagggtctgttacctagcttggaagatttgctgttctatacaattgctgaaggacaagagaaaatacctgttcataaatttattacagcactcaaatctacaggattgcgaacgtctgatcccaggttgaaagagtgtatggatatgttaagattaactcttcaaacaacatcagatggtgtcatgctagacaaagatctttttaaaaaatgtgttcagagcaacattgttttgttgacacaagcatttagaagaaagtttgtgattcctgactttatgtcttttacctcacacattgatgagttatatgaaagtgctaaaaagcagtctggaggaaaggttgcagattatattcctcaactggccaaattcagtcccgatttgtggggtgtgtctgtttgtacagtagatggacagaggcattctactggagataccaaagttcccttctgtcttcagtcctgtgtaaaacctttgaaatatgccattgctgttaatgatcttggaactgaatatgtgcatcgatatgttggaaaagagccgagtggactaagattcaacaaactatttttgaatgaagatgataaaccacataatcctatggtaaatgctggagcaattgttgtgacttcactaataaagcaaggagtaaataatgctgaaaaatttgactatgtcatgcagtttttgaataagatggctggtaatgaatatgttggattcagtaatgcaacgtttcagtctgaaagagaaagtggagatcgaaattttgcaataggatattacttaaaagaaaagaagtgttttccagaaggcacagacatggttggtatattagacttctacttccagctgtgctccattgaagtgacttgtgaatcagccagtgtgatggctgcgacactggctaatggtggtttctgcccaattactggtgaaagagtactgagccctgaagcagttcgaaatacattgagtttgatgcattcctgtggcatgtatgacttctcagggcagtttgctttccatgttggtcttcctgcaaaatctggagttgctgggggcattcttttagttgtccccaatgttatgggtatgatgtgctggtctcctcctctggataagatgggcaacagtgttaagggaattcacttttgtcacgatcttgtttctctgtgtaatttccataactatgataatttgagacactttgcaaaaaaacttgatcctcgaagagaaggtggtgatcaaaggcattcctttggaccattggactatgaaagtctccaacaagaacttgctttaaaagagacagtatggaaaaaagtgtcacctgagtcaaatgaggacatctctacaactgtagtatatagaatggaaagtctgggagagaaaagctaaagaaatgggttctagtttcagaatgtttcttcatttaatctttcaaacatctttagcttttttttgcaagttataaatatttatttgaggtattttttgttctcaatcttgggtgctggagccataaagcttttttttccttttaatctttgtataaaggcagtagattaagaagtgcatttgttggtctttaaaaagtatttacaagtacataaatttgctttatttttaaaaatacaaaaaggaaaaatttaaattttttttgatgtaattaaaatgttaactatgtggtcagataatcccattttacaatagtaacagaaaattgtaattcttagttctaaaattcacaaattaaactcataagttttgttgcattttgttttttcttttccatttttaaaactaatgtgatgtctttagtggcaatagaaggtacttctatgctaaatacaaaactaaaaaggcaaaataatgaaccccaaattattttatttaaaatagcagtggattataaaattagcttgtgtttacatttatgccatttttggtgatagattggctttacattttaaaaaatttatttaaaaatttatcaaatgctttaaaatatgactcctactttttttattttgcaactcctctgttctgtcagagttgttatatacaggagtgtcttatgttactaaaacattccagccaaagaatttcagatgtgagataatgatgtttcatcaataaaaagctataatggttagttactcagaaggagaaacagtgagtgtcttcaagtgaattgttcacctaaacaattttattttcatattatccacataactttttctatgttatatttaaatatgaatggcaaattttggtttttagcttttacattttattatcttaattttataaatgctaatatttcttttgtgataagttatagcatctcataaagtttgttctatttgaagttttttagagtacttgagaaatgaatttagtctgcaggtagtaagtatgctactaaaatacgttagatctaaatccttttatttggtataaaaatgcaatattgagaatcaaaacttgtttttaagagaactatagattctacacaacctgatttcaagtaattattcatagtatttatagttgtcttggcaaagtgattgtaaaattctgtaggacctattcacacttcttccttcttccatatacttctctggttttccccatagttcccctataatttcaagtttgttgaaacctgttaattttagtgggggattagaagaaaaacttggtggtttcttagcatgatggtgtatgtatgtggtaatggaaagtctgtaaaagtaaatatagtgtagcaaaaaagatttcactgagtattttagatactagtgcaaataaagatagaaaatcttgatcataatgtcttaagtttgggaactgtgatattaagaaaagaaattcccttctagaggtgctggccaaaaagccttttgggctaacttaagtattaaatttatatatttaaataattatattttaagttgtagaggattttcccaaggattttatgcttacttgaatgttctttgaatgttcagatgcatatcctaactggatgcttctcaaggccttactgcatatttgtgttgcatatttatgttagttgcaccagggccatttgtagtttgggcaaccgaatgccttaattggaaaaaaggcattgtggtttcccctatgatctaaattgttacattttaccatttcattccgaagttggttttactttattaaatgaagatttagttttcatatcgtatacatagctgtatagatttcaaaattaggttgttaatttgtgtcacttactatttttgtgttggtaatgctttaaatgcatacttaaaaatgaagtactgttatctaagctactgtgtttagaaaatgttaagaatgagcagaaatttttatagaaaagtataaacggaagaagagataagatactgcgaataggccctcaaacttaaaaaagaaaaaactttgccagttttaaggacatattttgattctttcagtattcttaacacctttttaaacaaagttcttgatagtacccactattattgggtttgttttatgccattattgattcttgatattcaagcatttacaatgtagcatatttgattttcttttttctttctttttttggcatcattaacatttcatttgaaatgcatattgttcttgaagtactttgtttttagcataaatgttgtgcattttatcttagtgtttggatgaaaacatttgtgttgtttagctttcatttgctttgtatatttaataatgtacctttattttccagtatgcctacattttgtattgcacaataaatttattttaagctga

SEQ ID NO: 137619 - DNA, 997 bp, Homo sapiens
  Payload ID: 6949
  Gene Symbol: GLS
  Gene Name: glutaminase
  ENST ID: ENST00000409626
  CDS Start-End: 342-851
atttaagcaaatttgaatatcacatgggataataacaaatcttagtgtttagaggctggcacttcctagtctagttctgccattaaaagactgagtatctttggccaaatcagggtaaatcttaaaagtgggtaggacttcggtcaactaaaatcttcagaatgtcctcaagtttatattaaagtaatctctttggaagaaatatttcagatctgtatgaaataccaaataaaatagattatcttaaaagtgaacagtaatattaaaagtagtatgagaattctgctttttctttgtgttagctgtgctccattgaagtgacttgtgaatcagccagtgtgatggctgcgacactggctaatggtggtttctgcccaattactggtgaaagagtactgagccctgaagcagttcgaaatacattgagtttgatgcattcctgtggcatgtatgacttctcagggcagtttgctttccatgttggtcttcctgcaaaatctggagttgctgggggcattcttttagttgtccccaatgttatgggtatgatgtgctggtctcctcctctggataagatgggcaacagtgttaagggaattcacttttgtcacgatcttgtttctctgtgtaatttccataactatgataatttgagacactttgcaaaaaaacttgatcctcgaagagaaggtggtgatcaaaggcattcctttggaccattggactatgaaagtctccaacaagaacttgctttaaaagagacagtatggaaaaaagtgtcacctgagtcaaatgaggacatctctacaactgtagtatatagaatggaaagtctgggagagaaaagctaaagaaatgggttctagtttcagaatgtttcttcatttaatctttcaaacatctttagcttttttttgcaagttataaatatttatttgaggtattttttgttctcaatcttgggtgctggagccataaagcttttttttccttttaa

SEQ ID NO: 137620 - DNA, 632 bp, Homo sapiens
  Payload ID: 6949
  Gene Symbol: GLS
  Gene Name: glutaminase
  ENST ID: ENST00000409215
  CDS Start-End: 99-410
ctcatcccttctgcttttaaggcaatccagtgtacaaggttggtcttcctgcaaaatctggagttgctgggggcattcttttagttgtccccaatgttatgggtatgatgtgctggtctcctcctctggataagatgggcaacagtgttaagggaattcacttttgtcacgatcttgtttctctgtgtaatttccataactatgataatttgagacactttgcaaaaaaacttgatcctcgaagagaaggtggtgatcaaaggcattcctttggaccattggactatgaaagtctccaacaagaacttgctttaaaagagacagtatggaaaaaagtgtcacctgagtcaaatgaggacatctctacaactgtagtatatagaatggaaagtctgggagagaaaagctaaagaaatgggttctagtttcagaatgtttcttcatttaatctttcaaacatctttagcttttttttgcaagttataaatatttatttgaggtattttttgttctcaatcttgggtgctggagccataaagcttttttttccttttaatctttgtataaaggcagtagattaagaagtgcatttgttggtctttaaaaagtatttacaagtacataaatttgct

SEQ ID NO: 137621 - DNA, 816 bp, Homo sapiens
  Payload ID: 6949
  Gene Symbol: GLS
  Gene Name: glutaminase
  ENST ID: ENST00000409428
  CDS Start-End: 120-644
tggaagtttgatttatagaacctcatcccttctgcttttaaggcaatccagtgtacaaggttggtcttcctgcaaaatctggagttgctgggggcattcttttagttgtccccaatgttatgggtatgatgtgctggtctcctcctctggataagatgggcaacagtgttaagggaattcacttttgtcacgatcttgtttctctgtgtaatttccataactatgataatttgagacactttgcaaaaaaacttgatcctcgaagagaaggtggtgatcaaagggtaaagtcagtgataaatcttttgtttgctgcatatactggagatgtgtctgcacttcgaagatttgctttgtcagctatggacatggaacagcgggactatgattctagaacagcactccatgtagctgctgcagagggtcatgttgaagttgttaaatttttgctggaagcctgcaaagtaaaccctttccccaaggacaggtggaataacactcccatggatgaagcactgcactttggacaccatgatgtatttaaaattctccaagaataccaagtccagtacacacctcaaggagattctgacaacgggaaggaaaatcaaaccgtccataagaatcttgatggattgttgtaatggtctcaaatcccaagatttaaatcacttacctatttaattgtggaaaatgattatgaagaacatgtgtatttctatctggtagtgatgtatattttacatttgtcatttcagtgttactggagttttcttcattgtgcacacaggacaaatctgatctctttgggaaaaa

SEQ ID NO: 137622 - DNA, 837 bp, Homo sapiens
  Payload ID: 6949
  Gene Symbol: GLS
  Gene Name: glutaminase
  ENST ID: ENST00000417154
  CDS Start-End: 1-345
gaaagtgctaaaaagcagtctggaggaaaggttgcagattatattcctcaactggccaaattcagtcccgatttgtggggtgtgtctgtttgtacagtagatggacagaggcattctactggagataccaaagttcccttctgtcttcagtcctgtgtaaaacctttgaaatatgccattgctgttaatgatcttggaactgaatatgtgcatcgatatgttggaaaagagccgagtggactaagattcaacaaactatttttgaatgaagatgataaaccacataatcctatggtaaatgctggagcaattgttgtgacttcactaataaaggattggtggtgatcctcaggaaatgggggaagaggcagagcaaatgttcaaaaggattagcagattgtggaaaaaaggagaatttggacagaaggagcctgttgcataaattcttaactactaagcttataggaaaactccaatatttaaaattttaaacaaagctatatagatctacaacttactgctttgtaaacttcgccgagcaaggagtaaataatgctgaaaaatttgactatgtcatgcagtttttgaataagatggctggtaatgaatatgttggattcagtaatgcaacgtttcagtctgaaagagaaagtggagatcgaaattttgcaataggatattacttaaaagaaaagaagtgttttccagaaggcacagacatggttggtatattagacttctacttccagctgtgctccattgaagtgacttgtgaatcagccagtgtgatggctgcgacactggctaatggtggtttctgcccaattactggtgaaa

SEQ ID NO: 137623 - DNA, 821 bp, Homo sapiens
  Payload ID: 6949
  Gene Symbol: GLS
  Gene Name: glutaminase
  ENST ID: ENST00000457316
  CDS Start-End: 330-821
ttgaatatcacatgggataataacaaatcttagtgtttagaggctggcacttcctagtctagttctgccattaaaagactgagtatctttggccaaatcagggtaaatcttaaaagtgggtaggacttcggtcaactaaaatcttcagaatgtcctcaagtttatattaaagtaatctctttggaagaaatatttcagatctgtatgaaataccaaataaaatagattatcttaaaagtgaacagtaatattaaaagtagtatgagaattctgctttttctttgtgttagctgtgctccattgaagtgacttgtgaatcagccagtgtgatggctgcgacactggctaatggtggtttctgcccaattactggtgaaagagtactgagccctgaagcagttcgaaatacattgagtttgatgcattcctgtggcatgtatgacttctcagggcagtttgctttccatgttggtcttcctgcaaaatctggagttgctgggggcattcttttagttgtccccaatgttatgggtatgatgtgctggtctcctcctctggataagatgggcaacagtgttaagggaattcacttttgtcacgatcttgtttctctgtgtaatttccataactatgataatttgagacactttgcaaaaaaacttgatcctcgaagagaaggtggtgatcaaagggtaaagtcagtgataaatcttttgtttgctgcatatactggagatgtgtctgcacttcgaagatttgctttgtcagctatggacatggaacagcgggactatgattctagaacagcactccatgtagct

SEQ ID NO: 137624 - DNA, 693 bp, Homo sapiens
  Payload ID: 6949
  Gene Symbol: GLS
  Gene Name: glutaminase
  ENST ID: ENST00000412247
  CDS Start-End: 1-549
gcaaaatctggagttgctgggggcattcttttagttgtccccaatgttatgggtatgatgtgctggtctcctcctctggataagatgggcaacagtgttaagggaattcacttttgtcacgatcttgtttctctgtgtaatttccataactatgataatttgagacactttgcaaaaaaacttgatcctcgaagagaaggtggtgatcaaagggtaaagtcagtgataaatcttttgtttgctgcatatactggagatgtgtctgcacttcgaagatttgctttgtcagctatggacatggaacagcgggactatgattctagaacagcactccatgtagctgctgcagagggtggaataacactcccatggatgaagcactgcactttggacaccatgatgtatttaaaattctccaagaataccaagtccagtacacacctcaaggagattctgacaacgggaaggaaaatcaaaccgtccataagaatcttgatggattgttgtaatggtctcaaatcccaagatttaaatcacttacctatttaattgtggaaaatgattatgaagaacatgtgtatttctatctggtagtgatgtatattttacatttgtcatttcagtgttactggagttttcttcattgtgcacacaggacaaatctgatctctttgggaaaaaatagaaataaaa

SEQ ID NO: 137625 - DNA, 2623 bp, Homo sapiens
  Payload ID: 6950
  Gene Symbol: GLS2
  Gene Name: glutaminase 2 (liver, mitochondrial)
  Uniprot ID: Q9UI32
  ENST ID: ENST00000311966
  CDS Start-End: 280-2088
cacccactagaaagccacccgggttctccttcatccccaacgctcctcacctagcccctgtcctgagggtgcccctaaccctggagccagctttaaaggggcaggccccttctcctgccccagccccagccccacccaccgggcccacattctccgtcttccaggtccagcgctccctcacagaactcccccgcaccttgtctcgctcgctccgcccctccttcccagccacagctagaggtcccgggcgcacctgcagagccggaggcttgctggggcatgcgctccatgaaggctctgcagaaggccctgagccgggctggcagtcactgcgggcgaggaggctggggtcacccgagccggagccccctccttggcgggggcgtccggcaccacctcagtgaggccgcggcgcagggcagagagacgccacacagccaccagccgcagcaccaggatcatgattcatcagaaagtggcatgctgtcccgcctgggtgatttgctcttttacactattgctgaaggacaggaacgaatccctatccacaagttcaccactgcactaaaggccactggactgcagacatcagatcctcggctccgagactgcatgagcgagatgcaccgcgtggtccaagagtccagtagtggtggcctcttggaccgagatctcttccgaaagtgtgtgagcagcaacattgtgctcctgacccaggcattccgaaagaagtttgtcattcctgattttgaggagttcacgggccatgtggatcgcatctttgaggatgtcaaagagctcactggaggcaaagtggcagcctacatccctcagctggccaagtcaaacccagacctgtggggtgtctccctgtgcactgtggatggtcaacggcactctgtgggccacacaaagatccccttctgcctgcagtcctgtgtgaagcccctcacctatgccatctccataagcaccctaggcactgactacgtgcacaagtttgtgggcaaagagccaagtggcctgcgctacaacaagctctccctcaatgaggaaggaatcccccataaccccatggtcaatgctggtgccattgttgtcagctccctgatcaagatggactgtaacaaagcagagaagtttgattttgtgttgcagtatctcaacaaaatggctgggaatgaatacatgggtttcagcaatgccacattccagtcagagaaggaaacaggggatcggaattatgccatcggctattatctcaaggaaaagaagtgctttcctaagggggtggacatgatggctgcccttgatctctacttccagctgtgttctgtggaggtcacttgtgaatcaggcagtgtcatggcagccaccctcgccaacggtgggatctgccccatcacaggcgagagtgtgctgagtgctgaagcagtgcgcaacaccctcagcctcatgcattcctgcggcatgtatgacttctctggccagtttgccttccacgtgggcctgccagccaagtcagctgtatcaggagccatcctcctggtggtacccaatgtcatgggaatgatgtgcctgtcacccccattggacaagctggggaacagccatagggggaccagcttctgccagaagttggtgtctctcttcaatttccacaactatgacaacctgaggcactgtgctcggaagttagacccacggcgtgaaggggcagaaattcggaacaagactgtggtcaacctgttatttgctgcctatagtggcgatgtctcagctcttcgaaggtttgccttgtcagccatggatatggaacagaaagactatgactcgcgcacagctctgcatgttgctgcagctgaaggacacatcgaagttgttaaattcctgatcgaggcttgcaaagtgaatccttttgccaaggacaggtggggcaacattcccctggatgatgctgtgcagttcaaccatctggaggtggtcaaactgcttcaagattaccaggactcctacacactctctgaaactcaggctgaggcagcagctgaggccctgtccaaagagaacttagaaagcatggtatgagcacaggtcatggacagcccctgctcaagaaaaagcatgagctggccacacatgtaatccataaccaccaaaaatactatggagagctacactgcttcagtggggaccaagcagtcatttggtgacttaggctagtgctttctatgggagtcaaaataccccattccctcagcagacagagtacagagaagggcctcagaggacacctgcagtacagctatccagagagactgggcttcaaggtacagcctaatggcttgccccactcaaaaccatcccagctcttcacccaggtctcctcttcctctccctgaagaaaccatcatgagagagatactctggtggagggactctagctaccatgcacatgtacatatccacagaatatgggaagtgggaatggctatatacatggctttagtagtctggagaaatctactccccttggccaggacatgctgctgctactgctaacagccaattttatagacagagaaagtattttgtgttcaaataaactttaattaccaaatca

SEQ ID NO: 137626 - DNA, 2225 bp, Homo sapiens
  Payload ID: 6950
  Gene Symbol: GLS2
  Gene Name: glutaminase 2 (liver, mitochondrial)
  ENST ID: ENST00000424141
  CDS Start-End: 12-545
cttgctggggcatgcgctccatgaaggctctgcagaaggccctgagccgggctggcagtcactgcgggcgaggaggctggggtcacccgagccggagccccctccttggcgggggcgtccggcaccacctcagtgaggccgcggcgcagggcagagagacgccacacagccaccagccgcagcaccaggatcatgattcatcagaaagtggcatgctgtcccgcctgggtgatttgctcttttacactattgctgaaggacaggaacgaatccctatccacaagttcaccactgcactaaaggccactggactgcagacatcagatcctcggctccgagactgcatgagcgagatgcaccgcgtggtccaagagtccagtagtggtggcctcttggaccgagatctcttccgaaagtggcagcctacatccctcagctggccaagtcaaacccagacctgtggggtgtctccctgtgcactgtggatggtcaacggcactctgtgggccacacaaagatccccttctgcctgcagtcctgtgtgaagcccctcacctatgccatctccataagcaccctaggcactgactacgtgcacaagtttgtgggcaaagagccaagtggcctgcgctacaacaagctctccctcaatgaggaaggaatcccccataaccccatggtcaatgctggtgccattgttgtcagctccctgatcaagatggactgtaacaaagcagagaagtttgattttgtgttgcagtatctcaacaaaatggctgggaatgaatacatgggtttcagcaatgccacattccagtcagagaaggaaacaggggatcggaattatgccatcggctattatctcaaggaaaagaagtgctttcctaagggggtggacatgatggctgcccttgatctctacttccagctgtgttctgtggaggtcacttgtgaatcaggcagtgtcatggcagccaccctcgccaacggtgggatctgccccatcacaggcgagagtgtgctgagtgctgaagcagtgcgcaacaccctcagcctcatgcattcctgcggcatgtatgacttctctggccagtttgccttccacgtgggcctgccagccaagtcagctgtatcaggagccatcctcctggtggtacccaatgtcatgggaatgatgtgcctgtcacccccattggacaagctggggaacagccatagggggaccagcttctgccagaagttggtgtctctcttcaatttccacaactatgacaacctgaggcactgtgctcggaagttagacccacggcgtgaaggggcagaaattcggaacaagactgtggtcaacctgttatttgctgcctatagtggcgatgtctcagctcttcgaaggtttgccttgtcagccatggatatggaacagaaagactatgactcgcgcacagctctgcatgttgctgcagctgaaggacacatcgaagttgttaaattcctgatcgaggcttgcaaagtgaatccttttgccaaggacaggtggggcaacattcccctggatgatgctgtgcagttcaaccatctggaggtggtcaaactgcttcaagattaccaggactcctacacactctctgaaactcaggctgaggcagcagctgaggccctgtccaaagagaacttagaaagcatggtatgagcacaggtcatggacagcccctgctcaagaaaaagcatgagctggccacacatgtaatccataaccaccaaaaatactatggagagctacactgcttcagtggggaccaagcagtcatttggtgacttaggctagtgctttctatgggagtcaaaataccccattccctcagcagacagagtacagagaagggcctcagaggacacctgcagtacagctatccagagagactgggcttcaaggtacagcctaatggcttgccccactcaaaaccatcccagctcttcacccaggtctcctcttcctctccctgaagaaaccatcatgagagagatactctggtggagggactctagctaccatgcacatgtacatatccacagaatatgggaagtgggaatggctatatacatggctttagtagtctggagaaatctactccccttggccaggacatgctgctgctactgctaacagccaattttatagacagagaaagtattttgtgttcaaataaactttaattaccaaatca

SEQ ID NO: 137627 - DNA, 567 bp, Homo sapiens
  Payload ID: 6950
  Gene Symbol: GLS2
  Gene Name: glutaminase 2 (liver, mitochondrial)
  ENST ID: ENST00000461077
  CDS Start-End: 15-567
aggcttgctggggcatgcgctccatgaaggctctgcagaaggccctgagccgggctggcagtcactgcgggcgaggaggctggggtcacccgagccggagccccctccttggcgggggcgtccggcaccacctcagtgaggccgcggcgcagggcagagagacgccacacagccaccagccgcagcaccaggatcatgattcatcagaaagtggcatgctgtcccgcctgggtgatttgctcttttacactattgctgaaggacaggaacgaatccctatccacaagttcaccactgcactaaaggccactggactgcagacatcagatcctcggctccgagactgcatgagcgagatgcaccgcgtggtccaagagtccagtagtggtggcctcttggaccgagatctcttccgaaaatggactgtaacaaagcagagaagtttgattttgtgttgcagtatctcaacaaaatggctgggaatgaatacatgggtttcagcaatgccacattccagtcagagaaggaaacaggggatcggaattatgccatcggctattatctcaa

SEQ ID NO: 137628 - DNA, 798 bp, Homo sapiens
  Payload ID: 6950
  Gene Symbol: GLS2
  Gene Name: glutaminase 2 (liver, mitochondrial)
  ENST ID: ENST00000483347
  CDS Start-End: 297-485
aggcaccgccctctctccacccactagaaagccacccgggttctccttcatccccaacgctcctcacctagcccctgtcctgagggtgcccctaaccctggagccagctttaaaggggcaggccccttctcctgccccagccccagccccacccaccgggcccacattctccgtcttccaggtccagcgctccctcacagaactcccccgcaccttgtctcgctcgctccgcccctccttcccagccacagctagaggtcccgggcgcacctgcagagccggaggcttgctggggcatgcgctccatgaaggctctgcagaaggccctgagccgggctggcagtcactgcgggcgaggaggctggggtcacccgagccggagccccctccttggcgggggcgtccggcaccacctcagtgaggccgcggcgcagggcagagagacgccacacagccaccagccgcagcaccaggatcagcactaaaggccactggactgcagacatcagatcctcggctccgagactgcatgagcgagatgcaccgcgtggtccaagagtccagtagtggtggcctcttggaccgagatctcttccgaaagtgtgtgagcagcaacattgtgctcctgacccaggcattccgaaagaagtttgtcattcctgattttgaggagttcacgggccatgtggatcgcatctttgaggatgtcaaagagctcactggaggcaaagtggcagcctacatccctcagctggccaagtcaaacccagacctgtggggtgtctccctgtgcactgt

SEQ ID NO: 137629 - DNA, 1845 bp, Homo sapiens
  Payload ID: 6950
  Gene Symbol: GLS2
  Gene Name: glutaminase 2 (liver, mitochondrial)
  ENST ID: ENST00000479952
  CDS Start-End: 35-508
gggcgcacctgcagagccggaggcttgctggggcatgcgctccatgaaggctctgcagaaggccctgagccgggctggcagtcactgcgggcgaggaggctggggtcacccgagccggagccccctccttggcgggggcgtccggcaccacctcagtgaggccgcggcgcagggcagagagacgccacacagccaccagccgcagcaccaggatcatgattcatcagaaagtggcatgctgtcccgcctgggtgatttgctcttttacactattgctgaaggacaggaacgaatccctatccacaagttcaccactgcactaaaggccactggactgcagacatcagatcctcggctccgagactgcatgagcgagatgcaccgcgtggtccaagagtccagtagtggtggcctcttggaccgagatctcttccgaaagtgttgcagtatctcaacaaaatggctgggaatgaatacatgggtttcagcaatgccactgctttcctaagggggtggacatgatggctgcccttgatctctacttccagctgtgttctgtggaggtcacttgtgaatcaggcagtgtcatggcagccaccctcgccaacggtgggatctgccccatcacaggcgagagtgtgctgagtgctgaagcagtgcgcaacaccctcagcctcatgcattcctgcggcatgtatgacttctctggccagtttgccttccacgtgggcctgccagccaagtcagctgtatcaggagccatcctcctggtggtacccaatgtcatgggaatgatgtgcctgtcacccccattggacaagctggggaacagccatagggggaccagcttctgccagaagttggtgtctctcttcaatttccacaactatgacaacctgaggcactgtgctcggaagttagacccacggcgtgaaggggcagaaattcggaacaagactgtggtcaacctgttatttgctgcctatagtggcgatgtctcagctcttcgaaggtttgccttgtcagccatggatatggaacagaaagactatgactcgcgcacagctctgcatgttgctgcagctgaaggacacatcgaagttgttaaattcctgatcgaggcttgcaaagtgaatccttttgccaaggacaggtggggcaacattcccctggatgatgctgtgcagttcaaccatctggaggtggtcaaactgcttcaagattaccaggactcctacacactctctgaaactcaggctgaggcagcagctgaggccctgtccaaagagaacttagaaagcatggtatgagcacaggtcatggacagcccctgctcaagaaaaagcatgagctggccacacatgtaatccataaccaccaaaaatactatggagagctacactgcttcagtggggaccaagcagtcatttggtgacttaggctagtgctttctatgggagtcaaaataccccattccctcagcagacagagtacagagaagggcctcagaggacacctgcagtacagctatccagagagactgggcttcaaggtacagcctaatggcttgccccactcaaaaccatcccagctcttcacccaggtctcctcttcctctccctgaagaaaccatcatgagagagatactctggtggagggactctagctaccatgcacatgtacatatccacagaatatgggaagtgggaatggctatatacatggctttagtagtctggagaaatctactccccttggccaggacatgctgctgctactgctaacagccaattttatagacagagaaagtattttgtgttcaaataaactttaattaccaaatca

SEQ ID NO: 137630 - DNA, 1509 bp, Homo sapiens
  Payload ID: 6950
  Gene Symbol: GLS2
  Gene Name: glutaminase 2 (liver, mitochondrial)
  Uniprot ID: Q9UI32
  ENST ID: ENST00000486896
  CDS Start-End: 132-761
attctccgtcttccaggtccagcgctccctcacagaactcccccgcaccttgtctcgctcgctccgcccctccttcccagccacagctagaggtcccgggcgcacctgcagagccggaggcttgctggggcatgcgctccatgaaggctctgcagaaggccctgagccgggctggcagtcactgcgggcgaggaggctggggtcacccgagccggagccccctccttggcgggggcgtccggcaccacctcagtgaggccgcggcgcagggcagagagacgccacacagccaccagccgcagcaccaggatcatgattcatcagaaagtggcatgctgtcccgcctgggtgatttgctcttttacactattgctgaaggacaggaacgaatccctatccacaagttcaccactgcactaaaggccactggactgcagacatcagatcctcggctccgagactgcatgagcgagatgcaccgcgtggtccaagagtccagtagtggtggcctcttggaccgagatctcttccgaaagcattccgaaagaagtttgtcattcctgattttgaggagttcacgggccatgtggatcgcatctttgaggatgtcaaagagctcactggaggcaaagtggcagcctacatccctcagctggccaagtcaaacccagacctgtggggtgtctccctgtgcactgtggatggtcaacggcactctgtgggccacacaaagatccccttctgcctgcagtcctgtgtgaagcccctcacctatgccatctccataagcaccctaggcactgactacgtgcacaagtttgtgggcaaagagccaagtggcctgcgctacaacaagctctccctcaatgaggaaggaatcccccataaccccatggtcaatgctggtgccattgttgtcagctccctgatcaagatggactgtaacaaagcagagaagtttgattttgtaagttcccttgctacttagcccctggctgcatttcgccatggcatgctgtcctctccagctgccccagtggctctctaaccccactaccaggtgcaccagcccatactagaagccttatttccagaaatgtggaaatctgctggcctcagagaggaaagcctcttgacaagacctgagttcagaagggctagtcaacctgtgaggtattaatagagcttcttaaccaagtggagcctcaatgtccctttttctcttccaggtgttgcagtatctcaacaaaatggctgggaatgaatacatgggtttcagcaatgccacggaaggtaatttttccccttctcccaacacccactcctccaacttcaagtactaaattgggtgtttgcttcagattccagtcagagaaggaaacaggggatcggaattatgccatcggctattatctcaaggaaaagaagtgctttcctaagggggtggacatgatggctgcccttgatctctacttccagctgtgttctgtggaggtcacttgtgaatca

SEQ ID NO: 137631 - DNA, 936 bp, Homo sapiens
  Payload ID: 6950
  Gene Symbol: GLS2
  Gene Name: glutaminase 2 (liver, mitochondrial)
  ENST ID: ENST00000494474
  CDS Start-End: 251-562
ttcatccccaacgctcctcacctagcccctgtcctgagggtgcccctaaccctggagccagctttaaaggggcaggccccttctcctgccccagccccagccccacccaccgggcccacattctccgtcttccaggtccagcgctccctcacagaactcccccgcaccttgtctcgctcgctccgcccctccttcccagccacagctagaggtcccgggcgcacctgcagagccggaggcttgctggggcatgcgctccatgaaggctctgcagaaggccctgagccgggctggcagtcactgcgggcgaggaggctggggtcacccgagccggagccccctccttggcgggggcgtccggcaccacctcagtgaggccgcggcgcagggcagagagacgccacacagccaccagccgcagcaccaggatcagtggcagcctacatccctcagctggccaagtcaaacccagacctgtggggtgtctccctgtgcactgtggatggtcaacggcactctgtgggccacacaaagatccccttctgcctgcagtcctgtgtgaagcccctcacctatgccatctccataagcaccctaggcactgactacgtgcacaagtttgtgggcaaagagccaagtggcctgcgctacaacaagctctccctcaatgaggaaggaatcccccataaccccatggtcaatgctggtgccattgttgtcagctccctgatcaagatggactgtaacaaagcagagaagtttgattttgtgttgcagtatctcaacaaaatggctgggaatgaatacatgggtttcagcaatgccacattccagtcagagaaggaaacaggggatcggaattatgccatcggctattatctcaaggaaaagaagtgctttcctaagggggtggacatgatggctgcccttgatctc

SEQ ID NO: 137632 - DNA, 2694 bp, Homo sapiens
  Payload ID: 6950
  Gene Symbol: GLS2
  Gene Name: glutaminase 2 (liver, mitochondrial)
  ENST ID: ENST00000486433
  CDS Start-End: 280-1263
cacccactagaaagccacccgggttctccttcatccccaacgctcctcacctagcccctgtcctgagggtgcccctaaccctggagccagctttaaaggggcaggccccttctcctgccccagccccagccccacccaccgggcccacattctccgtcttccaggtccagcgctccctcacagaactcccccgcaccttgtctcgctcgctccgcccctccttcccagccacagctagaggtcccgggcgcacctgcagagccggaggcttgctggggcatgcgctccatgaaggctctgcagaaggccctgagccgggctggcagtcactgcgggcgaggaggctggggtcacccgagccggagccccctccttggcgggggcgtccggcaccacctcagtgaggccgcggcgcagggcagagagacgccacacagccaccagccgcagcaccaggatcatgattcatcagaaagtggcatgctgtcccgcctgggtgatttgctcttttacactattgctgaaggacaggaacgaatccctatccacaagttcaccactgcactaaaggccactggactgcagacatcagatcctcggctccgagactgcatgagcgagatgcaccgcgtggtccaagagtccagtagtggtggcctcttggaccgagatctcttccgaaagtgtgtgagcagcaacattgtgctcctgacccaggcattccgaaagaagtttgtcattcctgattttgaggagttcacgggccatgtggatcgcatctttgaggatgtcaaagagctcactggaggcaaagtggcagcctacatccctcagctggccaagtcaaacccagacctgtggggtgtctccctgtgcactgtggatggtcaacggcactctgtgggccacacaaagatccccttctgcctgcagtcctgtgtgaagcccctcacctatgccatctccataagcaccctaggcactgactacgtgcacaagtttgtgggcaaagagccaagtggcctgcgctacaacaagctctccctcaatgaggaaggaatcccccataaccccatggtcaatgctggtgccattgttgtcagctccctgatcaagatggactgtaacaaagcagagaagtttgattttgtgttgcagtatctcaacaaaatggctgggaatgaatacatgggtttcagcaatgccacggaaggtaatttttccccttctcccaacacccactcctccaacttcaagtactaaattgggtgtttgcttcagattccagtcagagaaggaaacaggggatcggaattatgccatcggctattatctcaaggaaaagaagtgctttcctaagggggtggacatgatggctgcccttgatctctacttccagctgtgttctgtggaggtcacttgtgaatcaggcagtgtcatggcagccaccctcgccaacggtgggatctgccccatcacaggcgagagtgtgctgagtgctgaagcagtgcgcaacaccctcagcctcatgcattcctgcggcatgtatgacttctctggccagtttgccttccacgtgggcctgccagccaagtcagctgtatcaggagccatcctcctggtggtacccaatgtcatgggaatgatgtgcctgtcacccccattggacaagctggggaacagccatagggggaccagcttctgccagaagttggtgtctctcttcaatttccacaactatgacaacctgaggcactgtgctcggaagttagacccacggcgtgaaggggcagaaattcggaacaagactgtggtcaacctgttatttgctgcctatagtggcgatgtctcagctcttcgaaggtttgccttgtcagccatggatatggaacagaaagactatgactcgcgcacagctctgcatgttgctgcagctgaaggacacatcgaagttgttaaattcctgatcgaggcttgcaaagtgaatccttttgccaaggacaggtggggcaacattcccctggatgatgctgtgcagttcaaccatctggaggtggtcaaactgcttcaagattaccaggactcctacacactctctgaaactcaggctgaggcagcagctgaggccctgtccaaagagaacttagaaagcatggtatgagcacaggtcatggacagcccctgctcaagaaaaagcatgagctggccacacatgtaatccataaccaccaaaaatactatggagagctacactgcttcagtggggaccaagcagtcatttggtgacttaggctagtgctttctatgggagtcaaaataccccattccctcagcagacagagtacagagaagggcctcagaggacacctgcagtacagctatccagagagactgggcttcaaggtacagcctaatggcttgccccactcaaaaccatcccagctcttcacccaggtctcctcttcctctccctgaagaaaccatcatgagagagatactctggtggagggactctagctaccatgcacatgtacatatccacagaatatgggaagtgggaatggctatatacatggctttagtagtctggagaaatctactccccttggccaggacatgctgctgctactgctaacagccaattttatagacagagaaagtattttgtgttcaaataaactttaattaccaaat

SEQ ID NO: 137633 - DNA, 2174 bp, Homo sapiens
  Payload ID: 6950
  Gene Symbol: GLS2
  Gene Name: glutaminase 2 (liver, mitochondrial)
  ENST ID: ENST00000539272
  CDS Start-End: 1-843
atgttgcagaaggaggagcaggtagcagttctcaggccccactttcctccccattctctgcccccaaacagtgattcatcagaaagtggcatgctgtcccgcctgggtgatttgctcttttacactattgctgaaggacaggaacgaatccctatccacaagttcaccactgcactaaaggccactggactgcagacatcagatcctcggctccgagactgcatgagcgagatgcaccgcgtggtccaagagtccagtagtggtggcctcttggaccgagatctcttccgaaagtgtgtgagcagcaacattgtgctcctgacccaggcattccgaaagaagtttgtcattcctgattttgaggagttcacgggccatgtggatcgcatctttgaggatgtcaaagagctcactggaggcaaagtggcagcctacatccctcagctggccaagtcaaacccagacctgtggggtgtctccctgtgcactgtggatggtcaacggcactctgtgggccacacaaagatccccttctgcctgcagtcctgtgtgaagcccctcacctatgccatctccataagcaccctaggcactgactacgtgcacaagtttgtgggcaaagagccaagtggcctgcgctacaacaagctctccctcaatgaggaaggaatcccccataaccccatggtcaatgctggtgccattgttgtcagctccctgatcaagatggactgtaacaaagcagagaagtttgattttgtgttgcagtatctcaacaaaatggctgggaatgaatacatgggtttcagcaatgccactgctttcctaagggggtggacatgatggctgcccttgatctctacttccagctgtgttctgtggaggtcacttgtgaatcaggcagtgtcatggcagccaccctcgccaacggtgggatctgccccatcacaggcgagagtgtgctgagtgctgaagcagtgcgcaacaccctcagcctcatgcattcctgcggcatgtatgacttctctggccagtttgccttccacgtgggcctgccagccaagtcagctgtatcaggagccatcctcctggtggtacccaatgtcatgggaatgatgtgcctgtcacccccattggacaagctggggaacagccatagggggaccagcttctgccagaagttggtgtctctcttcaatttccacaactatgacaacctgaggcactgtgctcggaagttagacccacggcgtgaaggggcagaaattcggaacaagactgtggtcaacctgttatttgctgcctatagtggcgatgtctcagctcttcgaaggtttgccttgtcagccatggatatggaacagaaagactatgactcgcgcacagctctgcatgttgctgcagctgaaggacacatcgaagttgttaaattcctgatcgaggcttgcaaagtgaatccttttgccaaggacaggtggggcaacattcccctggatgatgctgtgcagttcaaccatctggaggtggtcaaactgcttcaagattaccaggactcctacacactctctgaaactcaggctgaggcagcagctgaggccctgtccaaagagaacttagaaagcatggtatgagcacaggtcatggacagcccctgctcaagaaaaagcatgagctggccacacatgtaatccataaccaccaaaaatactatggagagctacactgcttcagtggggaccaagcagtcatttggtgacttaggctagtgctttctatgggagtcaaaataccccattccctcagcagacagagtacagagaagggcctcagaggacacctgcagtacagctatccagagagactgggcttcaaggtacagcctaatggcttgccccactcaaaaccatcccagctcttcacccaggtctcctcttcctctccctgaagaaaccatcatgagagagatactctggtggagggactctagctaccatgcacatgtacatatccacagaatatgggaagtgggaatggctatatacatggctttagtagtctggagaaatctactccccttggccaggacatgctgctgctactgctaacagccaattttatagacagagaaagtattttgtgttcaaataaactttaattaccaaatcatttttgct

SEQ ID NO: 137634 - DNA, 2296 bp, Homo sapiens
  Payload ID: 6950
  Gene Symbol: GLS2
  Gene Name: glutaminase 2 (liver, mitochondrial)
  ENST ID: ENST00000610413
  CDS Start-End: 740-1753
aggcaccgccctctctccacccactagaaagccacccgggttctccttcatccccaacgctcctcacctagcccctgtcctgagggtgcccctaaccctggagccagctttaaaggggcaggccccttctcctgccccagccccagccccacccaccgggcccacattctccgtcttccaggtccagcgctccctcacagaactcccccgcaccttgtctcgctcgctccgcccctccttcccagccacagctagaggtcccgggcgcacctgcagagccggaggcttgctggggcatgcgctccatgaaggctctgcagaaggccctgagccgggctggcagtcactgcgggcgaggaggctggggtcacccgagccggagccccctccttggcgggggcgtccggcaccacctcagtgaggccgcggcgcagggcagagagacgccacacagccaccagccgcagcaccaggatcagtggcagcctacatccctcagctggccaagtcaaacccagacctgtggggtgtctccctgtgcactgtggatggtcaacggcactctgtgggccacacaaagatccccttctgcctgcagtcctgtgtgaagcccctcacctatgccatctccataagcaccctaggcactgactacgtgcacaagtttgtgggcaaagagccaagtggcctgcgctacaacaagctctccctcaatgaggaaggaatcccccataaccccatggtcaatgctggtgccattgttgtcagctccctgatcaagatggactgtaacaaagcagagaagtttgattttgtgttgcagtatctcaacaaaatggctgggaatgaatacatgggtttcagcaatgccacattccagtcagagaaggaaacaggggatcggaattatgccatcggctattatctcaaggaaaagaagtgctttcctaagggggtggacatgatggctgcccttgatctctacttccagctgtgttctgtggaggtcacttgtgaatcaggcagtgtcatggcagccaccctcgccaacggtgggatctgccccatcacaggcgagagtgtgctgagtgctgaagcagtgcgcaacaccctcagcctcatgcattcctgcggcatgtatgacttctctggccagtttgccttccacgtgggcctgccagccaagtcagctgtatcaggagccatcctcctggtggtacccaatgtcatgggaatgatgtgcctgtcacccccattggacaagctggggaacagccatagggggaccagcttctgccagaagttggtgtctctcttcaatttccacaactatgacaacctgaggcactgtgctcggaagttagacccacggcgtgaaggggcagaaattcggaacaagactgtggtcaacctgttatttgctgcctatagtggcgatgtctcagctcttcgaaggtttgccttgtcagccatggatatggaacagaaagactatgactcgcgcacagctctgcatgttgctgcagctgaaggacacatcgaagttgttaaattcctgatcgaggcttgcaaagtgaatccttttgccaaggacaggtggggcaacattcccctggatgatgctgtgcagttcaaccatctggaggtggtcaaactgcttcaagattaccaggactcctacacactctctgaaactcaggctgaggcagcagctgaggccctgtccaaagagaacttagaaagcatggtatgagcacaggtcatggacagcccctgctcaagaaaaagcatgagctggccacacatgtaatccataaccaccaaaaatactatggagagctacactgcttcagtggggaccaagcagtcatttggtgacttaggctagtgctttctatgggagtcaaaataccccattccctcagcagacagagtacagagaagggcctcagaggacacctgcagtacagctatccagagagactgggcttcaaggtacagcctaatggcttgccccactcaaaaccatcccagctcttcacccaggtctcctcttcctctccctgaagaaaccatcatgagagagatactctggtggagggactctagctaccatgcacatgtacatatccacagaatatgggaagtgggaatggctatatacatggctttagtagtctggagaaatctactccccttggccaggacatgctgctgctactgctaacagccaattttatagacagagaaagtattttgtgttcaaataaactttaattaccaaatcatttttgct

SEQ ID NO: 137635 - DNA, 2518 bp, Homo sapiens
  Payload ID: 6950
  Gene Symbol: GLS2
  Gene Name: glutaminase 2 (liver, mitochondrial)
  ENST ID: ENST00000623608
  CDS Start-End: 962-1975
aggcaccgccctctctccacccactagaaagccacccgggttctccttcatccccaacgctcctcacctagcccctgtcctgagggtgcccctaaccctggagccagctttaaaggggcaggccccttctcctgccccagccccagccccacccaccgggcccacattctccgtcttccaggtccagcgctccctcacagaactcccccgcaccttgtctcgctcgctccgcccctccttcccagccacagctagaggtcccgggcgcacctgcagagccggaggcttgctggggcatgcgctccatgaaggctctgcagaaggccctgagccgggctggcagtcactgcgggcgaggaggctggggtcacccgagccggagccccctccttggcgggggcgtccggcaccacctcagtgaggccgcggcgcagggcagagagacgccacacagccaccagccgcagcaccaggatcatgattcatcagaaagtggcatgctgtcccgcctgggtgatttgctcttttacactattgctgaaggacaggaacgaatccctatccacaagttcaccactgcactaaaggccactggactgcagacatcagatcctcggctccgagactgcatgagcgagatgcaccgcgtggtccaagagtccagtagtggtggcctcttggaccgagatctcttccgaaagtggcagcctacatccctcagctggccaagtcaaacccagacctgtggggtgtctccctgtgcactgtggatggtcaacggcactctgtgggccacacaaagatccccttctgcctgcagtcctgtgtgaagcccctcacctatgccatctccataagcaccctaggcactgactacgtgcacaagtttgtgggcaaagagccaagtggcctgcgctacaacaagctctccctcaatgaggaaggaatcccccataaccccatggtcaatgctggtgccattgttgtcagctccctgatcaagatggactgtaacaaagcagagaagtttgattttgtgttgcagtatctcaacaaaatggctgggaatgaatacatgggtttcagcaatgccacattccagtcagagaaggaaacaggggatcggaattatgccatcggctattatctcaaggaaaagaagtgctttcctaagggggtggacatgatggctgcccttgatctctacttccagctgtgttctgtggaggtcacttgtgaatcaggcagtgtcatggcagccaccctcgccaacggtgggatctgccccatcacaggcgagagtgtgctgagtgctgaagcagtgcgcaacaccctcagcctcatgcattcctgcggcatgtatgacttctctggccagtttgccttccacgtgggcctgccagccaagtcagctgtatcaggagccatcctcctggtggtacccaatgtcatgggaatgatgtgcctgtcacccccattggacaagctggggaacagccatagggggaccagcttctgccagaagttggtgtctctcttcaatttccacaactatgacaacctgaggcactgtgctcggaagttagacccacggcgtgaaggggcagaaattcggaacaagactgtggtcaacctgttatttgctgcctatagtggcgatgtctcagctcttcgaaggtttgccttgtcagccatggatatggaacagaaagactatgactcgcgcacagctctgcatgttgctgcagctgaaggacacatcgaagttgttaaattcctgatcgaggcttgcaaagtgaatccttttgccaaggacaggtggggcaacattcccctggatgatgctgtgcagttcaaccatctggaggtggtcaaactgcttcaagattaccaggactcctacacactctctgaaactcaggctgaggcagcagctgaggccctgtccaaagagaacttagaaagcatggtatgagcacaggtcatggacagcccctgctcaagaaaaagcatgagctggccacacatgtaatccataaccaccaaaaatactatggagagctacactgcttcagtggggaccaagcagtcatttggtgacttaggctagtgctttctatgggagtcaaaataccccattccctcagcagacagagtacagagaagggcctcagaggacacctgcagtacagctatccagagagactgggcttcaaggtacagcctaatggcttgccccactcaaaaccatcccagctcttcacccaggtctcctcttcctctccctgaagaaaccatcatgagagagatactctggtggagggactctagctaccatgcacatgtacatatccacagaatatgggaagtgggaatggctatatacatggctttagtagtctggagaaatctactccccttggccaggacatgctgctgctactgctaacagccaattttatagacagagaaagtattttgtgttcaaataaactttaattaccaaatcatttttgct

SEQ ID NO: 137636 - DNA, 9335 bp, Homo sapiens
  Payload ID: 6951
  Gene Symbol: QSER1
  Gene Name: glutamine and serine rich 1
  Uniprot ID: Q2KHR3
  ENST ID: ENST00000399302
  CDS Start-End: 336-5543
cgcccgcgccccccgccgcccccgtccccgccagcgccgctgcgcagccccccgccccagcctgggcgtacgaaccccgagccgccgccgccgccgccagcagcagctgcagcagtggcagctgcagtagcggcagcagccccagcctcaaggccagtttaagctatgaagaaggacatccctcacactctgaaacagatctccttcagagacagagttttgcagcctctcatcagcttcctggatatgctcccacacctcagcctactggtctttctggaatatttgatactagtgtgaacagtgccagcagtaacactaaagagtcttcagtgatgaattttctgtctactgctgaatcccgaactgctcaggctgctgcttcaggaactactctcttaccacaattcagggctccatcctggcagacaggcatgcattcctcagcagcaactgagctgtttgctactggacctttgccaagcactggaacacttccaccatctctctctgcttatcagcatcccaccaccttcagcaatagaaactttgctaccacttcacctttggtgcttcaggattcaacttttaacactacatcaaatggaattttaagtcatcatgaccctttgctacaaatcaagacttcccagggaactgttccaactgctttggcatttgagcgcctgggcagttctgtattaagtaacagcataccacctcagtcttcaacataccgctcagctcaagagtctgcaccccatcttttacaacctcaatttagtttgttgccttcagcacttgggggatcccagcagactcctcaagcctacagttcaactctctttactagttctactgcttccattgaaagagctcttcttcgagaatgtagtgttattaaacaccatcagcggccttcaggtacccagtcaattcaggcacaactgactggttcacagcactccttacatagttatctatcaaattcaagtgtagttaattttcaggaaacaaccaggcagtcatctttatcctgtagcccaattggagattccactcaggtgagcaacggaggattacaacagaagacctcccaggtctcagtggaacttgctcagtcttactcatctgcgattccatcatcagggtatcctccttctactacaaaaataaaaagctgttctacagaacaaccactgacatcaaccaagacccctaaacctcaaagtataattcctcctgtgcaaacactaagctattccaaacctttacataatcagagttctgtaatatcgggccaagcacaaatttattctacagcgcagctaccaagccttttatcagttagtcagtcccaaaattacggtttagtacagccacataatgtgccatctattgttcattcacaggtttataggtccagcaaggttgagaaattgccacccttgtataaaacattgactttttctgggtcatctcagactgtaactcctgaaaatcagacgcttaattattcatctaatcagcaagaggtattgtcttcagttacaaatgagaattaccctgctcaaacaagagatctgtcttcagtaagtcagtctcaaagttactcatctggtcactctcagggtttatcaccagttagccagacacaggttagctattcatctcaatcacaagttttgtcagttgttagtctttcagaaagctatgcttcaggggagtccctaacattaacagccccttctctttcttattcttctgcctctcgggctcagaatttgccagactctagcccgacccagaattatatttctatgcattcttcccaaaatgttcagactcaagagtcatcatctccccagtcccagaagtttttgcctgctgtccagtcatcatcttttgcatcctctactcattgtcagacattacaaaataacataacttcccctgacccaaagtcttatgctgaaagaaagcttgactcagatgtgtatccatcttcaaagcaagaagatggttttccaatgcaagagttacaggtgttgcagccacaagcatctcttgagtcatcaacccaaaggctatctgatggagaaattaatgctcaagaatcaacttataaggtgtcaaaggcagatgacagatattctcagagtgtaatcagaagtaattcccgtcttgaagatcaagttattggggttgctctgcaagcatcaaaaaaagaagaaagtgttgttggttcagtgacacaacttaaccaacaaattggccaagtcaataatgcagctacccttgatcttaagaactcaactaatttaatacagactccacaaataaggttgaatactaaagacttaaagcagcaacatcctctcatacttaaggtgcatgagtccaaggtccaggaacagcacgatcaaataattaatgcttcatctcagattcaaattccaaatcatgctttagggcatggccatcaggcatctcttcctaatacacaggtccttttagattctgcctgtgatttacaaattcttcagcagtcaatactgcaggcaggtttaggtcaagtaaaggcatctttacaagcacagcgtgttcaaagccctcaacaaatagtacatcccttccttcagatggaaggtcatgttattcaaagcaatggtgatcattctcagcagcaactccatcctcaaaattctgaagttatgaaaatggacctctctgagtcttcaaaaccattacaacaacatctaacaacaaagggccattttagtgaaacaaatcaacatgattcaaagaatcagtttgtttctcttggatcgatgtgtttcccagaggcagtgcttcttagtgatgaaagaaatattttatcaaatgtagatgatatcttagcagctacagcagcagcttgtggagttacacctactgatttttccaagtcaacttcaaatgaaaccatgcaggctgttgaagatggtgattctaaatctcattttcagcagtcattagatgtcaggcatgtgacttcagattttaactctatgacagctacagtaggaaagccacagaatataaatgatacttccttaaatggaaatcaggttactgtgaacctttcaccagtacctgcccttcagtcaaaaatgactcttgatcaacagcacattgaaacacctggtcaaaatataccaactaaagtaacttcagcagtggttggaccaagtcatgaagtccaggagcaaagttctggcccattcaagaaacagtctgctaccaatcttgaatctgaagaagacagtgaagctcctgttgatagtacattaaataataacagaaaccaagagtttgtttctagtagtagaagtataagtggagagaatgctacatcagagagtgaatttaccttagggggtgacgacagtggtgtgtcaatgaacccagctaggagtgcacttgcactgttggccatggcccaatctggggatgcagtcagtgtcaagattgaagaagaaaaccaagatttaatgcattttaaccttcaaaagaaaagagctaaaggaaaagggcaagttaaagaggaagacaacagtaatcagaaacagctgaaaagacctgcccaaggcaaacgccagaatccaaggggaacagatatttacttaccgtatactcctccttcctcagaaagctgccatgatggttatcagcatcaagaaaaaatgagacagaagatcaaagaggtggaggaaaaacaaccagaagtcaaaacaggatttattgcttctttcttagattttctgaaatccgggcccaagcagcagttttccactcttgctgtacgaatgcctaacaggactagacggccagggacccagatggttcgtacattttgtcccccaccacttcccaagccttcatctacaacacccacacctttagtgtctgaaactggcggtaacagtccatcagataaagttgataatgaacttaaaaacttggaacatttatcttcattttcttctgatgaagatgatcctggatatagtcaagatgcttataaaagcgtctctactcccttaactactttggatgctacttctgataaaaagaagaaaacagaagccctacaggtggcaactactagcccaactgccaatactactggtactgctactacttcctcaaccactgtgggtgcagttaagcaagaacctctccactctacttcatatgcagtaaatattctggaaaatataagctcttcagaatcctcaaagcccattgaacttgatggtcttccttcagaccagtttgcaaaaggacaggacactgttgccatagaaggttttacagatgaggaggacacagaaagcggaggagaaggccaatacagagagcgtgatgaatttgtggtaaagatagaagacatagagacttttaaggaggctttaaaaacaggaaaagaacctccagctatttggaaagtacaaaaagctttattacagaaatttgttcctgaaattcgagatggtcaaagagaatttgctgctacaaatagttatcttggatattttggagatgcaaagagtaaatacaaaagaatatatgtgaagttcattgaaaatgcaaacaagaaggaatatgtcagagtgtgttctaaaaagccaagaaataaaccttcacaaactatcagaactgttcaagctaagccaagtagtagcagtaaaacttctgatcctctagcatcaaaaactacaactacaaaagccccttccgtgaaacccaaagttaaacagccaaaagtaaaggctgagccaccaccaaagaaacggaaaaaatggaaagaagaattttcatcatcccaatctgactcatctcctgagatccatactagtagtagtgacgatgaggaatttgaacctcccgctccctttgtcactcgctttttgaacacaagagcaatgaaggaaacctttaagagctacatggaattgcttgttagcattgccttggaccctgacacaatgcaagccttagagaagagcaatgatgagctacttttacctcatatgaaaaaaatagatggcatgctaaatgataaccgaaagagacttcttttgaatcttcatttggatcaatcattcaagaatgctttggaaagttttcctgaactaacaataattactcgagattctaaagcaaagagtggaggaactgctatttctaaaatcaaaatgaatggcaaagcctataataagaaaactctaaggacttctaaaacaaccaccaaatctgcacaagagtttgctgtcgatccagagaaaatacagttgtattctttgtatcattcactccatcattataagtaccatgtttatctgatatgtaaggatgagatttcttcggtgcagaaaaaaaatgaagatttaggacaggaggaaattgttcaactttgtatgaaaaatgtaaaatgggtggaggacctctttgaaaaatttggagaacttctaaatcatgtacagcagaaatgttcctgacttttccacaaaaatcccatctttttatagcactaatgaaatggcagatatggggtggtcaaagataatcagatgtcaagtagtggccttctgcaggccggccgcttccatcatggaactgtcattaccacctctgctgaaggacagtggtgcggcctttaggaacgaagttagtcctctggaaatggacctaaatcccaccacatttttaccctaatgaatgatttttctattttgtaaaccattgggtaacttgagtcatattttcagaaacattttttgacaaatgatgaagcatgcactaagtataatttttttttattgctagagaagtaacacttaaagtaacgattttttttttctgactccggctaaacaccagaatgacagagaagtggcagaaaccatatgtttgtactcacatctggccacaaaaccagaaatactgtacattatgtaaagaggtctggtgtggtgtgacatcctgtataagaatatcatcaatttaaaatataaaatttggaaactattctgctttacagactccttttactcttaacatgttcaggaaactggatgtggaattggtgcaattctctgactgctttttgtgtcaaattatattgtgataaaaaaacaatgacatactattttccctatcgcaaagaaaagtattttcgtttatactgttttttcctttggaaaattttcaattgtacattttatttcactgatagttgtatttttcacaaggaaaatgttgtggttataattacgtttgatatatctctacaacaccttttgttattttcagtaaatcttagttatatgttgaatttctaatgtgaattctatcttgaggtaaccatttttttcatacagatttgcttcagtgttatccagaatatgcattcagtactagaattagtttagctttataaatagggctgtgttagacactgcagtaattttctaattcataaaataaacttcttactaaactagcacttgattaacttgttgaggtaaaaatctaactacatttacattttgaagaataaaactgataattagactatttgcagtgttaaacacagcttccttaactcttagaactggaagttgtagagctctccttttggtgcctttccagcctttatacacactattgtagctttcttaggtttgataggtagcgtttcaagtagtttagctgagacagtgaatgtattaggttcaacatgaccttgtgttttatttgtgtttgccaacaggatgccttatttgtttgagaaaaagatgtactagtgtcattctaaactatctccttttttaggattctaaagaagttaatcatcatccttttgtttattttaccaccatttagtgccttaaatcctatcaagaaagcagtgttactgctcaatgcccaaataagacacgcggatattgctattgtcttgcttttgagttaacaggccaactttttatacttaaaacctcagtaaactggcaaagaattgaaggtaatgtgatttgatttgagaataaaacattgtagcattgggtgaaaaatgagtatttgagttaagcttacatatttatttctgatggttatcttattaaaagcaataatccttaatactgtacttgccattagactaggtactcagtaatggaagtttctctcaagggttaaatgttccatttttgaaagttttaaaaaacctgtttgggtggtttattttgaaaacaaaagtaacctattagattcattttgcctaactcatatgagagatgcagagtatcaacagtgggagcatcataaaatgaattttccaagtggagaggagtaggaagcagccatatgatagtattgactctggacagaattgatgtctttcgtttccaaagtgcagagtagggaactacatttcctaatgtggcattgtaaatatacatctttatattactcttccagcctacgttcctaaatcattgataatttaaatattttttaaagccaccttaatttaggtagctcttggaatcgatgtttgaattcactagccacattttcttcatgatatgcctcgtggcaaacaaagatgtttccttaagatgaatcttacatttcccatagaaaataacccatttcctttggcactgcagttgccctcaaactgcttgcagttgtattcattttagtacaacaaaggttttcataatatgggaggccaagtctatgatactgcctcaaagagaccctattgtgtagatgcatcatcttctctcatttgatccatagagcataggcaaagatgtcaacctcaggccttagagaaaagtggaaatgttattatgacagccgtccatgagttatcgctttgtatgaagttaaatacagtcatgcgttgcttaacagcagggatacattctgagaaatgcattgttaggcaattccgttgtgcgaacatcctagtgtacttacacaaacctaggtggcatagcccacaacgtacccaggctatatggtaaacctgtacagcatgttactgtactgaatactgtaggcagttgtaacacaatggtatttgtgtatctagacatagaaaacatacagtaagaatatggtattataatcttacgggaccactgtcaaatacgcggtctgtctttgaaaagttgtaatgcggcgcatgactataaatacctagctggttagcatttacattccttgccagggagtttgaaatttatactatagaaataactttaggttttaggtagagttaaagaggtaaagcacatgttgccacaacccaggaaagtatttttaagaaagattggattttcctacctttagagatctaaaaaaaatttaatataaaaaatcattttgtgttggtgtttattactagttcagatgagtggctgctgaaggggcccccttgtcattttcattataacccaatttccacttatttgaactcttaagtcataaatgtataatgacttatgaattagcacagttaagttgacactagaaactgcccatttctgtattacactatcaaataggaaacattggaaagatggggaaaaaaatcttattttaaaatggcttagaaagttttcagattactttgaaaattctaaacttctttctgtttccaaaacttgaaaatatgtagatggactcatgcattaagactgttttcaaagctttcctcacatttttaaagtgtgattttccttttaatatacatatttattttctttaaagcagctatatcccaacccatgactttggagatatacctataaaaccaatataacagcagggttattgaagcagctttctcaaatgttgcttcagatgtgcaagttgcaaattttattgtatttgtagaatacaatttttgttttaaactgtatttcaatctatttctccaagatgcttttcatatagagtgaaatatcccaggataactgcttctgtgtcagtcgcatttgacgcataactgcacaaatgaacagtgtatactcttggttgtgcattaacttacatgtataatttttggcatctgtgttcacaaatgcatgtgttagcaaatcacctttatttataagtgacaataattgaagttaaggatataaagaaacctgcatttgtagtccagcgttttcatttggtccataacacaatgtatggaaatgtgaaagacaattttgtacatttgtttgttactaactcagatcattaaaatgaaaacaatttttttaaacaag

SEQ ID NO: 137637 - DNA, 2416 bp, Homo sapiens
  Payload ID: 6951
  Gene Symbol: QSER1
  Gene Name: glutamine and serine rich 1
  ENST ID: ENST00000524678
  CDS Start-End: 1-2342
agtctgctaccaatcttgaatctgaagaagacagtgaagctcctgttgatagtacattaaataataacagaaaccaagagtttgtttctagtagtagaagtataagtggagagaatgctacatcagagagtgaatttaccttagggggtgacgacagtggtgtgtcaatgaacccagctaggagtgcacttgcactgttggccatggcccaatctggggatgcagtcagtgtcaagattgaagaagaaaaccaagatttaatgcattttaaccttcaaaagaaaagagctaaaggaaaagggcaagttaaagaggaagacaacagtaatcagaaacagctgaaaagacctgcccaaggcaaacgccagaatccaaggggaacagatatttacttaccgtatactcctccttcctcagaaagctgccatgatggttatcagcatcaagaaaaaatgagacagaagatcaaagaggtggaggaaaaacaaccagaagtcaaaacaggatttattgcttctttcttagattttctgaaatccgggcccaagcagcagttttccactcttgctgtacgaatgcctaacaggactagacggccagggacccagatggttcgtacattttgtcccccaccacttcccaagccttcatctacaacacccacacctttagtgtctgaaactggcggtaacagtccatcagataaagttgataatgaacttaaaaacttggaacatttatcttcattttcttctgatgaagatgatcctggatatagtcaagatgcttataaaagcgtctctactcccttaactactttggatgctacttctgataaaaagaagaaaacagaagccctacaggtggcaactactagcccaactgccaatactactggtactgctactacttcctcaaccactgtgggtgcagttaagcaagaacctctccactctacttcatatgcagtaaatattctggaaaatataagctcttcagaatcctcaaagcccattgaacttgatggtcttccttcagaccagtttgcaaaaggacaggacactgttgccatagaaggttttacagatgaggaggacacagaaagcggaggagaaggccaatacagagagcgtgatgaatttgtggtaaagatagaagacatagagacttttaaggaggctttaaaaacaggaaaagaacctccagctatttggaaagtacaaaaagctttattacagaaatttgttcctgaaattcgagatggtcaaagagaatttgctgctacaaatagttatcttggatattttggagatgcaaagagtaaatacaaaagaatatatgtgaagttcattgaaaatgcaaacaagaaggaatatgtcagagtgtgttctaaaaagccaagaaataaaccttcacaaactatcagaactgttcaagctaagccaagtagtagcagtaaaacttctgatcctctagcatcaaaaactacaactacaaaagccccttccgtgaaacccaaagttaaacagccaaaagtaaaggctgagccaccaccaaagaaacggaaaaaatggaaagaagaattttcatcatcccaatctgactcatctcctgagatccatactagtagtagtgacgatgaggaatttgaacctcccgctccctttgtcactcgctttttgaacacaagagcaatgaaggaaacctttaagagctacatggaattgcttgttagcattgccttggaccctgacacaatgcaagccttagagaagagcaatgatgagctacttttacctcatatgaaaaaaatagatggcatgctaaatgataaccgaaagagacttcttttgaatcttcatttggatcaatcattcaagaatgctttggaaagttttcctgaactaacaataattactcgagattctaaagcaaagagtggaggaactgctatttctaaaatcaaaatgaatggcaaagcctataataagaaaactctaaggacttctaaaacaaccaccaaatctgcacaagagtttgctgtcgatccagagaaaatacagttgtattctttgtatcattcactccatcattataagtaccatgtttatctgatatgtaaggatgaggtaatttcttctcatttacttaaaaaaaatgtttttcagaatgttaaggagactctagccatagtattttggagtgttttaaagagagttgtgaaatacatgtgtgtatgtattttgtctatgtattctgtaaataatgacttgatttattgttctgagtctctctgctatgttttgtgctcagatttacccgagcctcaccacctcttgtaggagctataattggtaatgttttgaagctgttggtgcttgctttacatcgccataataaatgatgttttattgca

SEQ ID NO: 137638 - DNA, 5052 bp, Homo sapiens
  Payload ID: 6951
  Gene Symbol: QSER1
  Gene Name: glutamine and serine rich 1
  Uniprot ID: Q2KHR3
  ENST ID: ENST00000527788
  CDS Start-End: 357-4946
agtcccagctacttgggaggctgaggcaggaggattgcttgagcccaggagttggaggctacaataagctatgatccagctgctgcactctagcttgggtgacagagaccctgtcttcttaagacaaatccagaatttgggacatcttataatttagttgccctggattcttcaaaagtttaagctatgaagaaggacatccctcacactctgaaacagatctccttcagagacagagttttgcagcctctcatcagcttcctggatatgctcccacacctcagcctactggtctttctggaatatttgatactagtgtgaacagtgccagcagtaacactaaagagtcttcagtgatgaattttctgtctactgctgaatcccgaactgctcaggctgctgcttcaggaactactctcttaccacaattcagggctccatcctggcagacaggcatgcattcctcagcagcaactgagctgtttgctactggacctttgccaagcactggaacacttccaccatctctctctgcttatcagcatcccaccaccttcagcaatagaaactttgctaccacttcacctttggtgcttcaggattcaacttttaacactacatcaaatggaattttaagtcatcatgaccctttgctacaaatcaagacttcccagggaactgttccaactgctttggcatttgagcgcctgggcagttctgtattaagtaacagcataccacctcagtcttcaacataccgctcagctcaagagtctgcaccccatcttttacaacctcaatttagtttgttgccttcagcacttgggggatcccagcagactcctcaagcctacagttcaactctctttactagttctactgcttccattgaaagagctcttcttcgagaatgtagtgttattaaacaccatcagcggccttcaggtacccagtcaattcaggcacaactgactggttcacagcactccttacatagttatctatcaaattcaagtgtagttaattttcaggaaacaaccaggcagtcatctttatcctgtagcccaattggagattccactcagaatttgccagactctagcccgacccagaattatatttctatgcattcttcccaaaatgttcagactcaagagtcatcatctccccagtcccagaagtttttgcctgctgtccagtcatcatcttttgcatcctctactcattgtcagacattacaaaataacataacttcccctgacccaaagtcttatgctgaaagaaagcttgactcagatgtgtatccatcttcaaagcaagaagatggttttccaatgcaagagttacaggtgttgcagccacaagcatctcttgagtcatcaacccaaaggctatctgatggagaaattaatgctcaagaatcaacttataaggtgtcaaaggcagatgacagatattctcagagtgtaatcagaagtaattcccgtcttgaagatcaagttattggggttgctctgcaagcatcaaaaaaagaagaaagtgttgttggttcagtgacacaacttaaccaacaaattggccaagtcaataatgcagctacccttgatcttaagaactcaactaatttaatacagactccacaaataaggttgaatactaaagacttaaagcagcaacatcctctcatacttaaggtgcatgagtccaaggtccaggaacagcacgatcaaataattaatgcttcatctcagattcaaattccaaatcatgctttagggcatggccatcaggcatctcttcctaatacacaggtccttttagattctgcctgtgatttacaaattcttcagcagtcaatactgcaggcaggtttaggtcaagtaaaggcatctttacaagcacagcgtgttcaaagccctcaacaaatagtacatcccttccttcagatggaaggtcatgttattcaaagcaatggtgatcattctcagcagcaactccatcctcaaaattctgaagttatgaaaatggacctctctgagtcttcaaaaccattacaacaacatctaacaacaaagggccattttagtgaaacaaatcaacatgattcaaagaatcagtttgtttctcttggatcgatgtgtttcccagaggcagtgcttcttagtgatgaaagaaatattttatcaaatgtagatgatatcttagcagctacagcagcagcttgtggagttacacctactgatttttccaagtcaacttcaaatgaaaccatgcaggctgttgaagatggtgattctaaatctcattttcagcagtcattagatgtcaggcatgtgacttcagattttaactctatgacagctacagtaggaaagccacagaatataaatgatacttccttaaatggaaatcaggttactgtgaacctttcaccagtacctgcccttcagtcaaaaatgactcttgatcaacagcacattgaaacacctggtcaaaatataccaactaaagtaacttcagcagtggttggaccaagtcatgaagtccaggagcaaagttctggcccattcaagaaacagtctgctaccaatcttgaatctgaagaagacagtgaagctcctgttgatagtacattaaataataacagaaaccaagagtttgtttctagtagtagaagtataagtggagagaatgctacatcagagagtgaatttaccttagggggtgacgacagtggtgtgtcaatgaacccagctaggagtgcacttgcactgttggccatggcccaatctggggatgcagtcagtgtcaagattgaagaagaaaaccaagatttaatgcattttaaccttcaaaagaaaagagctaaaggaaaagggcaagttaaagaggaagacaacagtaatcagaaacagctgaaaagacctgcccaaggcaaacgccagaatccaaggggaacagatatttacttaccgtatactcctccttcctcagaaagctgccatgatggttatcagcatcaagaaaaaatgagacagaagatcaaagaggtggaggaaaaacaaccagaagtcaaaacaggatttattgcttctttcttagattttctgaaatccgggcccaagcagcagttttccactcttgctgtacgaatgcctaacaggactagacggccagggacccagatggttcgtacattttgtcccccaccacttcccaagccttcatctacaacacccacacctttagtgtctgaaactggcggtaacagtccatcagataaagttgataatgaacttaaaaacttggaacatttatcttcattttcttctgatgaagatgatcctggatatagtcaagatgcttataaaagcgtctctactcccttaactactttggatgctacttctgataaaaagaagaaaacagaagccctacaggtggcaactactagcccaactgccaatactactggtactgctactacttcctcaaccactgtgggtgcagttaagcaagaacctctccactctacttcatatgcagtaaatattctggaaaatataagctcttcagaatcctcaaagcccattgaacttgatggtcttccttcagaccagtttgcaaaaggacaggacactgttgccatagaaggttttacagatgaggaggacacagaaagcggaggagaaggccaatacagagagcgtgatgaatttgtggtaaagatagaagacatagagacttttaaggaggctttaaaaacaggaaaagaacctccagctatttggaaagtacaaaaagctttattacagaaatttgttcctgaaattcgagatggtcaaagagaatttgctgctacaaatagttatcttggatattttggagatgcaaagagtaaatacaaaagaatatatgtgaagttcattgaaaatgcaaacaagaaggaatatgtcagagtgtgttctaaaaagccaagaaataaaccttcacaaactatcagaactgttcaagctaagccaagtagtagcagtaaaacttctgatcctctagcatcaaaaactacaactacaaaagccccttccgtgaaacccaaagttaaacagccaaaagtaaaggctgagccaccaccaaagaaacggaaaaaatggaaagaagaattttcatcatcccaatctgactcatctcctgagatccatactagtagtagtgacgatgaggaatttgaacctcccgctccctttgtcactcgctttttgaacacaagagcaatgaaggaaacctttaagagctacatggaattgcttgttagcattgccttggaccctgacacaatgcaagccttagagaagagcaatgatgagctacttttacctcatatgaaaaaaatagatggcatgctaaatgataaccgaaagagacttcttttgaatcttcatttggatcaatcattcaagaatgctttggaaagttttcctgaactaacaataattactcgagattctaaagcaaagagtggaggaactgctatttctaaaatcaaaatgaatggcaaagcctataataagaaaactctaaggacttctaaaacaaccaccaaatctgcacaagagtttgctgtcgatccagagaaaatacagttgtattctttgtatcattcactccatcattataagtaccatgtttatctgatatgtaaggatgagatttcttcggtgcagaaaaaaaatgaagatttaggacaggaggaaattgttcaactttgtatgaaaaatgtaaaatgggtggaggacctctttgaaaaatttggagaacttctaaatcataccggaatgttgggagaaatgcaaagcgtctcagttagcagcaccagaagatcagagcagcagaatattctagaggctgggaagtccaagatcaaggtacctgtatctggtgactgttgagagccttcttgctgtgccttagaatgaaagaaggtggagggcaaggtgatatgaacaatgtgcctttacatggcaaaagaatgaaagaaagtaaacctattcccac

SEQ ID NO: 137639 - DNA, 818 bp, Homo sapiens
  Payload ID: 6951
  Gene Symbol: QSER1
  Gene Name: glutamine and serine rich 1
  ENST ID: ENST00000528155
  CDS Start-End: 627-818
attccatagaatactataattagagaggttatggaggttatttcatctggtcctttttttatacagatgaaattagtccaacaataattgagtcccttatttaaattacactgtaagccagaagtagagcctgtacaatgaattcacctctctgttgtccaggatattactttttcttctgtaccacattacctctcccagtaaaaagactcttgtttgaggtagaattgaattaaagaaaatactgtgtattatttttcttactaatgcatcttaaatatatttcctccattgtgatagtattgtcagactgtgtttgatccacgaatctataggtcaggaaattggtcaaaggtttctactacttttatagttgttcttctagaagttttttttatcagatggtttggactgtgtattttggtcactgatttttaatgtcctctagtttaagctatgaagaaggacatccctcacactctgaaacagatctccttcagagacagagttttgcagcctctcatcagcttcctggatatgctcccacacctcagcctactggtctttctggaatatttgatactagtgtgaacagtgccagcagtaacactaaagagtcttcagtgatgaattttctgtctactgctgaatcccgaactgctcaggctgctgcttcaggaactactctcttaccacaattcagggctccatcctggcagacaggcatgcattcctcagcagcaactgagctgtttgctactggacctttgccaagcactggaacacttccaccatctctctctgcttatcagcatccc

SEQ ID NO: 137640 - DNA, 5359 bp, Homo sapiens
  Payload ID: 6952
  Gene Symbol: QRICH2
  Gene Name: glutamine rich 2
  Uniprot ID: Q9H0J4
  ENST ID: ENST00000262765
  CDS Start-End: 181-5172
ggcggccaggtggaggacctgagcaagcagctcaagcgtgtggacggccaggtgcagggcatcgccacgcacgtgcagcacttctcccaggccagcgggcttgacctggccgcgctagagtggccggaggagcaggaggtgggcgtgcgggcgttcgatagggtgcggactgggagtatcatgaaggacgccgccgaggagctcagctttgccagggtacttttacagcgggttgatgaactagagaagctattcaaagatcgggagcaattcctggaactagtcagccggaagctgagtttggttcctggtgcagaagaagtcaccatggtcacctgggaagagctggagcaggcgattacggacggctggagagcctcacaagcgggctcagaaacacttatgggattttctaagcacggagggttcacttccttaacatcacctgaagggactctaagcggagactctaccaagcaaccaagtattgagcaggctctggattctgccagtggtcttggcccggatcggactgcatcaggatctggtggcacagcacacccctctgatggggtttccagtagggaacaaagcaaggtcccctctggtactgggagacagcagcagccgagggcccgtgatgaagctggcgtgccacgactccatcagtcttctacattccaattcaaatcagactcagatcgtcacaggagtagagagaagcttacctcgacacaaccaagaagaaatgcacgtcctggtccagttcaacaggacttacccttggccagagaccagcccagtagtgtgcccgctagccagagtcaggtccatctaaggccagatcgtcgtgggttagaaccaactggcatgaatcagcctggattagtgcctgctagcacttacccacatggtgtggtacccctcagcatgggtcagcttggtgtgccaccacctgaaatggatgatcgggaattgataccatttgtcgtggatgagcaacgtatgttgccaccatcagtacctggcagagaccagcaaggattggaactacctagcacagaccaacatggtctggtttcagtcagtgcatatcagcatggtatgacatttcctggcacagaccaacgcagtatggaaccacttggcatggatcagcgtggatgtgtaatatcaggcatgggtcagcaaggactagtaccccctggtatagaccagcaaggattgacattgcctgtcgtcgatcaacatggcctggttctaccttttacagaccagcatggtttggtatcacctggtttgatgccaattagtgcagatcagcaaggttttgtgcagcccagtttggaagcaactggcttcatacaacctggcacagagcagcatgatttgatccagtctggcagatttcagcgtgctttggtgcagcgtggtgcatatcagcctggcttggtccaacctggtgcagatcagcgtggtttggtccggcctggaatggatcagtctggtttggcccaacctggtgcagatcagcgtggtttggtctggcctggaatggatcagtctggtttggcccaacctggtagagatcagcatggtttgatccagcctggcacaggtcagcatgatttggtccaatctggcacaggtcagggtgtcttggtacagcctggtgtagatcagcctggcatggtccaacctggcagatttcagcgtgctttggtgcagcctggtgcatatcagcctggcttggtccaacctggtgcagatcagattgatgtggtgcaacctggtgcagatcagcatggtttggtacaatctggtgcagatcagagtgatttggctcaacctggtgcagttcagcatggtttggtccaacctggagtagatcagcgtggtttggcacaacctcgtgcagatcatcagcgtggtttggtcccacctggtgcagatcagcgtggtttggtccaacctggtgcagatcagcatggtttggtccaacctggagtggatcagcatggtttggcacaacctggtgaagttcagcgtagtttggtgcaacctggtatagttcagcgtggtttggtgcaacctggtgcagttcagcgtggtttggtgcaacctggtgcagttcagcgtggtttggtccaacctggagtggatcagcgtggtttggttcaacctggtgcagttcagcgtggtttggtccaacctggtgcagttcagcatggtttggtccaacctggtgcagatcagcgtggtttggtccaacctggagtggatcagcgtggtttggtgcaacctggagtggatcagcgtggtttggtccaacctggaatggaccagcgtggtttgatccaacctggtgcagatcagcctggtttggtccagcctggtgcaggtcagctgggtatggtgcagcctggaataggtcagcaaggtatggtgcaacctcaggcagatccacatggcctggtacaacctggtgcctatcctcttggtttggtacaacctggtgcatatttgcatgatttatctcaatctgggacatatccacgtggtctggtgcagccaggaatggatcagtatggtttgagacaacctggtgcatatcagccaggcttgatagcaccaggcacaaagcttcgtggctcttcaacattccaggcagattctacaggttttatatcagtacgtccatatcaacatggtatggtacctcctggcagagaacaatacggccaggtgtcaccactcctagccagtcaaggtttggcatcacctggtatagatcgaaggagtttggtaccaccagaaacttatcagcaaggtttgatgcatcctggcacagaccagcacagcccaataccactgagtacaggtttgggatctacacacccagatcaacagcatgtggcatcacctggcccaggtgagcatgaccaggtatacccagatgcagctcagcatggccatgctttctctctctttgacagtcatgattcaatgtatcctggttatcgtggcccagggtatctaagtgctgatcagcatggccaggaaggtttggatccaaatagaacacgagcctcggaccgacatggaattcctgcccagaaggccccaggccaagatgtcactcttttcaggagtccagactccgtcgaccgagtcttatcagaagggagcgaagtctcgagtgaagtcctgagtgagcgacgcaattcactgcgtagaatgagttctagtttccccacggcagtggagacatttcatctgatgggagagctcagtagcctctatgtggggctaaaggagagtatgaaggatctggatgaggagcaggccggccaaaccgacttggagaagatccagttcctgctggcacagatggtcaaaaggaccatacctcctgaactgcaggagcagctgaagaccgtaaagacgctagccaaagaagtttggcaggagaaagcaaaagtggaaaggctgcagaggatcctggaaggggaagggaatcaagaagcagggaaggaactgaaagctggagagctgagattgcagctgggtgtcctcagagtcaccgtggctgacatagaaaaggagctggccgagttgagggagagccaagacaggggcaaggctgccatggaaaattctgtctctgaagcctccctttacctgcaggaccagttggacaagctcaggatgatcattgagagcatgctgacctcctcctccacgctcctgtccatgagcatggccccgcacaaggcccacaccttggctcctggccagatcgaccctgaggccacctgtccagcctgcagcctggatgtgagccatcaggtcagcacgctggtgcggcgctatgagcaactccaagacatggtcaacagcctggccgtctcccgaccctccaagaaggccaagctccagagacaggacgaggagctgctgggccgtgtgcagagtgccatcctgcaggtgcagggtgactgcgagaagctcaacatcaccaccagcaacctcatcgaggaccatcggcagaaacagaaggacattgctatgctgtaccagggtctggagaagctcgaaaaggaaaaggccaacagggagcacctggagatggagatcgatgtgaaagccgacaagagtgctctggccaccaaagtgagccgtgtccagtttgatgccaccacggagcagctgaaccacatgatgcaggagctggtggccaagatgagcgggcaggagcaggactggcagaagatgctggacaggctgctcacagagatggacaacaagctggaccgcctggagctggacccagtgaagcagttgctggaggatcggtggaaatcgctgcgacagcagctcagggagcgccccccactctaccaggcagacgaggcggctgccatgcggaggcagctcctggcacatttccactgcctctcatgtgaccggcccttggagacacctgtgactggacatgccatccccgtgacccccgcgggtccaggcctacctgggcaccattccatccgcccctacacggtgtttgaactggagcaggtccggcagcatagccgcaacctcaagctgggcagcgccttccctcggggtgacctggcgcagatggagcagagcgtggggcgcctgcgctccatgcactccaagatgctgatgaacattgagaaggtgcagatccacttcgggggctccaccaaggccagcagccagataatccgcgagctgctgcacgcccagtgcctgggctccccctgctacaaacgggtgacagatatggctgattacacctactcaactgtgccccggcgctgcgggggcagccacaccctcacctacccctaccaccgcagccgcccgcagcaccttccccggggcctgtatcctactgaagagatccagattgccatgaagcatgatgaggtggacatcttgggcctggatggccacatttacaagggacggatggacacaaggctgccaggcatcctccgaaaagacagctcagggacctcaaagcgcaagtcccagcagcccaggccccacgtgcacaggccgccatccctcagcagcaatggccagctgccctctcggccacagagcgcccagatttcggctggcaacacctcagaaagatagaccttcctccgagggccgtctctcccagccgaacacagcccacccgcccagctccgccgcggtggcaaacagggggctggagaggcacgtggacatgcctcctggggaggggctcgaggagcccacgcgggggccgcggtccagcaccgctcagtgagcggaggtgtaaataaacattcaggaggaa

SEQ ID NO: 137641 - DNA, 1500 bp, Homo sapiens
  Payload ID: 6952
  Gene Symbol: QRICH2
  Gene Name: glutamine rich 2
  ENST ID: ENST00000447564
  CDS Start-End: 1-1488
gactccgtcgaccgagtcttatcagaagggagcgaagtctcgagtgaagtcctgagtgagcgacgcaattcactgcgtagaatgagttctagtttccccacggcagtggagacatttcatctgatgggagagctcagtagcctctatgtggggctaaaggagagtatgaaggatctggatgaggagcaggccggccaaaccgacttggagaagatccagttcctgctggcacagatggtcaaaaggaccatacctcctgaactgcaggagcagctgaagaccgtaaagacgctagccaaagaagtttggcaggagaaagcaaaagtggaaaggctgcagaggatcctggaaggggaagggaatcaagaagcagggaaggaactgaaagctggagagctgagattgcagctgggtgtcctcagagtcaccgtggctgacatagaaaaggagctggccgagttgagggagagccaagacaggggcaaggctgccatggaaaattctgtctctgaagcctccctttacctgcaggaccagttggacaagctcaggatgatcattgagagcatgctgacctcctcctccacgctcctgtccatgagcatggccccgcacaaggcccacaccttggctcctggccagatcgaccctgaggccacctgtccagcctgcagcctggatgtgagccatcaggtcagcacgctggtgcggcgctatgagcaactccaagacatggtcaacagcctggccgtctcccgaccctccaagaaggccaagctccagagacaggacgaggagctgctgggccgtgtgcagagtgccatcctgcaggtgcagggtgactgcgagaagctcaacatcaccaccagcaacctcatcgaggaccatcggcagaaacagaaggacattgctatgctgtaccagggtctggagaagctcgaaaaggaaaaggccaacagggagcacctggagatggagatcgatgtgaaagccgacaagagtgctctggccaccaaagtgagccgtgtccagtttgatgccaccacggagcagctgaaccacatgatgcaggagctggtggccaagatgagcgggcaggagcaggactggcagaagatgctggacaggctgctcacagagatggacaacaaggctgccaggcatcctccgaaaagacagctcagggacctcaaagcgcaagtcccagcagcccaggccccacgtgcacaggccgccatccctcagcagcaatggccagctgccctctcggccacagagcgcccagatttcggctggcaacacctcagaaagatagaccttcctccgagggccgtctctcccagccgaacacagcccacccgcccagctccgccgcggtggcaaacagggggctggagaggcacgtggacatgcctcctggggaggggctcgaggagcccacgcgggggccgcggtccagcaccgctcagtgagcggaggtgtaaataaacattcaggagg

SEQ ID NO: 137642 - DNA, 2253 bp, Homo sapiens
  Payload ID: 6952
  Gene Symbol: QRICH2
  Gene Name: glutamine rich 2
  ENST ID: ENST00000524722
  CDS Start-End: 66-392
tagagtggccggaggagcaggaggtgggcgtgcgggcgttcgatagggtgcggactgggagtatcatgaaggacgccgccgaggagctcagctttgccagggtacttttacagcgggttgatgaactagagaagctattcaaagatcgggagcaattcctggaactagtcagccggaagctgagtttggttcctggtgcagaagaagtcaccatggtcacctgggaagagctggagcaggcgattacggacggctggagagcctcacaagcggctggagtgcagtggtgtgatctcggctcactgcaaccttcccctctggggctcaagcaatcctcctgcctcagcctccccggtagttgggaccacagtcaaaaggaccatacctcctgaactgcaggagcagctgaagaccgtaaagacgctagccaaagaagtttggcaggagaaagcaaaagtggaaaggctgcagaggatcctggaaggggaagggaatcaagaagcagggaaggaactgaaagctggagagctgagattgcagctgggtgtcctcagagtcaccgtggctgacatagaaaaggagctggccgagttgagggagagccaagacaggggcaaggctgccatggaaaattctgtctctgaagcctccctttacctgcaggaccagttggacaagctcaggatgatcattgagagcatgctgacctcctcctccacgctcctgtccatgagcatggccccgcacaaggcccacaccttggctcctggccagatcgaccctgaggccacctgtccagcctgcagcctggatgtgagccatcaggtcagcacgctggtgcggcgctatgagcaactccaagacatggtcaacagcctggccgtctcccgaccctccaagaaggccaagctccagagacaggacgaggagctgctgggccgtgtgcagagtgccatcctgcaggtgcagggtgactgcgagaagctcaacatcaccaccagcaacctcatcgaggaccatcggcagaaacagaaggacattgctatgctgtaccagggtctggagaagctcgaaaaggaaaaggccaacagggagcacctggagatggagatcgatgtgaaagccgacaagagtgctctggccaccaaagtgagccgtgtccagtttgatgccaccacggagcagctgaaccacatgatgcaggagctggtggccaagatgagcgggcaggagcaggactggcagaagatgctggacaggctgctcacagagatggacaacaagctggaccgcctggagctggacccagtgaagcagttgctggaggatcggtggaaatcgctgcgacagcagctcagggagcgccccccactctaccaggcagacgaggcggctgccatgcggaggcagctcctggcacatttccactgcctctcatgtgaccggcccttggagacacctgtgactggacatgccatccccgtgacccccgcgggtccaggcctacctgggcaccattccatccgcccctacacggtgtttgaactggagcaggtccggcagcatagccgcaacctcaagctgggcagcgccttccctcggggtgacctggcgcagatggagcagagcgtggggcgcctgcgctccatgcactccaagatgctgatgaacattgagaaggtgcagatccacttcgggggctccaccaaggccagcagccagataatccgcgagctgctgcacgcccagtgcctgggctccccctgctacaaacgggtgacagatatggctgattacacctactcaactgtgccccggcgctgcgggggcagccacaccctcacctacccctaccaccgcagccgcccgcagcaccttccccggggcctgtatcctactgaagagatccagattgccatgaagcatgatgaggtggacatcttgggcctggatggccacatttacaagggacggatggacacaaggctgccaggcatcctccgaaaagacagctcagggacctcaaagcgcaagtcccagcagcccaggccccacgtgcacaggccgccatccctcagcagcaatggccagctgccctctcggccacagagcgcccagatttcggctggcaacacctcagaaagatagaccttcctccgagggccgtctctcccagccgaacacagcccacccgcccagctccgccgcggtggcaaacagggggctggagaggcacgtggacatgcctcctgg

SEQ ID NO: 137643 - DNA, 839 bp, Homo sapiens
  Payload ID: 6952
  Gene Symbol: QRICH2
  Gene Name: glutamine rich 2
  ENST ID: ENST00000532549
  CDS Start-End: 1-839
ccaagatgagcgggcaggagcaggactggcagaagatgctggacaggctgctcacagagatggacaacaagctggaccgcctggagctggacccagtgaagcagttgctggaggatcggtggaaatcgctgcgacagcagctcagggagcgccccccactctaccaggcagacgaggcggctgccatgcggaggcagctcctggcacatttccactgcctctcatgtgaccggcccttggagacacctgtgactggacatgccatccccgtgacccccgcgggtccaggcctacctgggcaccattccatccgcccctacacggtgtttgaactggagcaggtccggcagcatagccgcaacctcaagctgggcagcgccttccctcggggtgacctggcgcagatggagcagagcgtggggcgcctgcgctccatgcactccaagatgctgatgaacattgagaaggtgcagatccacttcgggggctccaccaaggccagcagccagataatccgcgagctgctgcacgcccagtgcctgggctccccctgctacaaacgcatgatgaggtggacatcttgggcctggatggccacatttacaagggacggatggacacaaggctgccaggcatcctccgaaaagacagctcagggacctcaaagcgcaagtcccagcagcccaggccccacgtgcacaggccgccatccctcagcagcaatggccagctgccctctcggccacagagcgcccagatttcggctggcaacacctcagaaagatagaccttcctccgagggccgtctctcccagccgaacacagcccacccgcccagc

SEQ ID NO: 137644 - DNA, 8703 bp, Homo sapiens
  Payload ID: 6953
  Gene Symbol: GFPT1
  Gene Name: glutamine--fructose-6-phosphate transaminase 1
  Uniprot ID: Q06210
  ENST ID: ENST00000357308
  CDS Start-End: 184-2283
ggttgctggcggagcccgggaggcggagaaggctgtcgttgccttggccgtcgcatccccgagggagtcgtgtcggcgccaccccggcccccgagcccgcagattgcccaccgaagctcgtgtgtgcacccccgatcccgccagccactcgcccctggcctcgcgggccgtgtctccggcatcatgtgtggtatatttgcttacttaaactaccatgttcctcgaacgagacgagaaatcctggagaccctaatcaaaggccttcagagactggagtacagaggatatgattctgctggtgtgggatttgatggaggcaatgataaagattgggaagccaatgcctgcaaaatccagcttattaagaagaaaggaaaagttaaggcactggatgaagaagttcacaagcaacaagatatggatttggatatagaatttgatgtacaccttggaatagctcatacccgttgggcaacacatggagaacccagtcctgtcaatagccacccccagcgctctgataaaaataatgaatttatcgttattcacaatggaatcatcaccaactacaaagacttgaaaaagtttttggaaagcaaaggctatgacttcgaatctgaaacagacacagagacaattgccaagctcgttaagtatatgtatgacaatcgggaaagtcaagataccagctttactaccttggtggagagagttatccaacaattggaaggtgcttttgcacttgtgtttaaaagtgttcattttcccgggcaagcagttggcacaaggcgaggtagccctctgttgattggtgtacggagtgaacataaactttctactgatcacattcctatactctacagaacagctaggactcagattggatcaaaattcacacggtggggatcacagggagaaagaggcaaagacaagaaaggaagctgcaatctctctcgtgtggacagcacaacctgccttttcccggtggaagaaaaagcagtggagtattactttgcttctgatgcaagtgctgtcatagaacacaccaatcgcgtcatctttctggaagatgatgatgttgcagcagtagtggatggacgtctttctatccatcgaattaaacgaactgcaggagatcaccccggacgagctgtgcaaacactccagatggaactccagcagatcatgaagggcaacttcagttcatttatgcagaaggaaatatttgagcagccagagtctgtcgtgaacacaatgagaggaagagtcaactttgatgactatactgtgaatttgggtggtttgaaggatcacataaaggagatccagagatgccggcgtttgattcttattgcttgtggaacaagttaccatgctggtgtagcaacacgtcaagttcttgaggagctgactgagttgcctgtgatggtggaactagcaagtgacttcctggacagaaacacaccagtctttcgagatgatgtttgctttttccttagtcaatcaggtgagacagcagatactttgatgggtcttcgttactgtaaggagagaggagctttaactgtggggatcacaaacacagttggcagttccatatcacgggagacagattgtggagttcatattaatgctggtcctgagattggtgtggccagtacaaaggcttataccagccagtttgtatcccttgtgatgtttgcccttatgatgtgtgatgatcggatctccatgcaagaaagacgcaaagagatcatgcttggattgaaacggctgcctgatttgattaaggaagtactgagcatggatgacgaaattcagaaactagcaacagaactttatcatcagaagtcagttctgataatgggacgaggctatcattatgctacttgtcttgaaggggcactgaaaatcaaagaaattacttatatgcactctgaaggcatccttgctggtgaattgaaacatggccctctggctttggtggataaattgatgcctgtgatcatgatcatcatgagagatcacacttatgccaagtgtcagaatgctcttcagcaagtggttgctcggcaggggcggcctgtggtaatttgtgataaggaggatactgagaccattaagaacacaaaaagaacgatcaaggtgccccactcagtggactgcttgcagggcattctcagcgtgatccctttacagttgctggctttccaccttgctgtgctgagaggctatgatgttgatttcccacggaatcttgccaaatctgtgactgtagagtgaggaatatctatacaaaatgtacgaaactgtatgattaagcaacacaagacaccttttgtatttaaaaccttgatttaaaatatcaccccttgaagcctttttttagtaaatccttatttatatatcagttataattattccactcaatatgtgatttttgtgaagttacctcttacattttcccagtaatttgtggaggactttgaataatggaatctatattggaatctgtatcagaaagattctagctattattttctttaaagaatgctgggtgttgcatttctggaccctccacttcaatctgagaagacaatatgtttctaaaaattggtacttgtttcaccatacttcattcagaccagtgaaagagtagtgcatttaattggagtatctaaagccagtggcagtgtatgctcatacttggacagttagggaagggtttgccaagttttaagagaagatgtgatttattttgaaatttgtttctgttttgtttttaaatcaaactgtaaaacttaaaactgaaaaattttattggtaggatttatatctaagtttggttagccttagtttctcagacttgttgtctattatctgtaggtggaagaaatttaggaagcgaaatattacagtagtgcattggtgggtctcaatccttaacatatttgcacaattttatagcacaaactttaaattcaagctgctttggacaactgacaatatgattttaaatttgaagatgggatgtgtacatgttgggtatcctactactttgtgttttcatctcctaaaagtggtttttatttccttgtatctgtagtcttttattttttaaatgactgctgaatgacatattttatcttgttctttaaaatcacaacacagagctgctattaaattaatattgatatattcagtattctcttcaactttgtcacgaggaagaatttcctgtagttaattttaactttccttcattacattgttgcataaaactagtcccttagtgccagtttggaagttacttgcaattgtttggaagatttgcaggtcgctgacctcatcatttcactctaagtatatgtggtaggctaagctcagaaaaaggtatgtatgctttacactgataggcaccaaatttagtattgtatcctaagtatttttcctcttctgtattttctgtgctctacccctgaaatatatttaggaataaagaagatataaataaagtgatattggggtatgttcagcttgtaagtgtcagaaatggaagttgacaatttggattaaaatatttaaagtagaatgttattatttgatacccccaaaattgtgagtaataatttcttaatggagcttttctggccagatcttcagggctataggagagtgtgtttgtttttggtgaagtccttctttttcaaaggtttttacttttaaattgtgaagataagctatttagcacaattatttaagtaagctgttttttcctttcttttctttcttttcttgttttaacttctgggtgaggttaagattttctaatagttattgttgttgccagagaagcatagaattctgcttgtgtcttagggttagagaaagatttgttatattttgaggtaatttggaaggactttcatacatggtgactagaaacctgatctttttaagaataaaatagggtcactatttacattatatataatatatggctattatagctatattaatctactttaattgtttctaagattattttgtgtaagtcagctagcgtgtgtatagtgtcatttcttatgttttgtatattaacgttttacaaacacaatttgtgtgggtttgtagcatttcttatagtttaaagtatgattcagcattctaagttaaaactaatatgtgaagtcagtcattagtctgcataatctctgtctccctctgtgtgtgtctttctataaagcacatgtgtacacacacacacacaaatatactgaaagctagggtaagttctaaactgaatatcaaaaaccaaaatcaagaacaaagaagtgatattttccaaacaaacatggattctctgccgggtgcagtggctcagcctgtaataccagcctccactttgggagtctgaggtgggagtattgcttgagctcaagagttggagaacagcctgggcaacatggtgagacctggtctttacaaaaatttttttggccggacgcagtggctcacacctgtaatcccagcactttgggaggccgaggcaggttgatcatgaggtcaagagatcgagaccatcctggccaacatggtgaaaccccgtctttactaaaaatacaaaaattagctgggagtggtggcgtgcgcctgtagtcccaactacttgggaggctgaggcaggagaatcgcttgaacccaggaggcggaggttgcagtgaggcgagatcacgccactacactccagcctggcgacagagcaagactctctcaaaaaaaaaaaaaaaaaattttttttttaaatgggctgggcatggtggcttgtgcctgtagtctcagcaacttgggaggcttaagtagtaggatcgcttgagcctgggaggttgaggctgcagtgagctgtgattgtgccactgtgcttcagcttgagtgacagagtgagaccctcctgactcaaaacaaaaaacatggtttctcctctctctcctgtcttcttactctctatcccatttgatgtagtgatttttaaatgcttttgtaagttaattcttaacacaaaagagacattgtaatgaggcacaccactaaagtgagcatgcccaattaaaaccagtgtaatataggataagaaaatctgatttttcaaaaaagatactctacataaagaatccttcatataaaaagttctttcttgtagtacatttaaagttttaattcactcatgtataactgagagttcctttgagccctttttaggcagggaggcatgtctgtcatctagcgtgtggcccagtaagtgattattacattggaatcagtttttcagtcttttaaaataaattctgtgccataagaataaaagataaagagaaaaattaatgttaactatttttagcttattataactatgtcaacaagtgtttattaatacctattatgggaaagtcactgtggttggcattgaaaattacatcatctttaaagcagtatttgtccccagatggactcatcactagcaaagactaggttcattggaaggcatagggtgagagaatgggaagatgaagtggaggcgggttgttaaagtgctgtcagtgagtgattttgtctacttgaataatggtccatgtttgggggcatattgtgtttcataagaagtgaaaggtatttgcaaagtaagctacaaatgacccataaatctgttaacaacagtccttaatatgcaaagatgaaaaacaagcattactgctacccaaagggaactggtgcttggtgatgtgcagatggggctgttggttaagagagctattacaggttttctctcttaggtttcataggaggtagttactgagatgagattgttttatctttttgaatacagatctcttgtcttgagttagttctgaggatgggagtaataaaggagttttttgtttttttgtttgtttgtttgttttggctccttagtaatactcctctgacatttatttctattattcttcaaagaaaggaaaccaactgaaatgtttgctttaacaaacattttaataagttctctgggtttttttttccccttttaaaaaaattagcatataccatagcaataaaagaactaatgttaactattgtatgctacaacttaagtgatttttctaaagaagcacaatgtcattgaaagtattattgaaaaggatcatagtcacattgaatttgtgaaggccaaagaaattgaagggagtgatattttcattttatgatattcacatatttagtaaattttgtgtacaagaataccaggcagagtgttttacccatggaaacaggtttcagattactttatttttactgttagagtctcaagtttagaaatgctaacacttaaatcagtttttttctcactatacttgaagattgttaatattttgatatcttcctagcttgatgaatttaaacatatcttcagatctgtgacagtgacagccaataggactgataatattagcttcaaaccaataatatccagggttaaaataaaaatcatagtgaaagtacgattgtaaaattatgctatattaacttttaagtctgtaataacttgacatcaaaatgttatgtaattaccataaataatggctagcgagaacatctttggaaattctcaaattacctttcttactacactgtttgcagaatgaatgtagaaatgatcctgttagctttctgaatgttctgtggttgaatgtgtttttgcttaaataaagcttttggtatttgtttaaattacacttcttgagaagtggaaattttaggatcatctttgctttgtttcagttttgtgatttttgaaatgaatgtttagtttactgagccagttggtcatttcttcctcatgtcgttaagtccagtgagtaagcctgaactgtgaataaattaccaaaaacttgcttagaatttcattttgaagcaatttgctaatatttgaagtgtatacacatttgtagttatgttagaaattgtattgtactaagaatgtaatcaatgtctactttagttgtaaacatttctgatgtcaaaactttattcattactgttgattttaagaataagaaatcactgcctaaatattaccaaaagccactgtctctacccgaacttcccagtttgggaaagaatcgttagataaaacaaaggctctgccctttctgataccaaactccacagatactttctcacatcttttaaaacattttgcaataacatattgtttataggaagtttacggggtatgcaatgattaaaacttttaagtgaattgatagttgcaaaagaaaggataatatttaaggtcagtgagtagcaagacaatctaaagtttctgtaatatctggctctctgttaattatagagcaaagtttcccttacagaatccttttatgaacagcaagctagagtctatccctagtggttatagcacctgctgcgtttttcaggagacagttaggccagggtgatttgaatggatagatgtgctgttttgcctgcttgtagaattcagcccagtctttggtctctctctctctctccctcctccacctctccctctctcttcttctgcaccagagcctaaggctgcgccaccaagatgcgtcattttttccagaggcttcttttttttttttttgagatggagttttgctctgttgcccaggctggcatgcagtgctgcaatcttggctgactgcaacttccacctcccgtgttcacacgagtcttttgcctcagcctctggattagctgggattacaggcacgtgccaccatgcctagctaatttttgtgtttttagtagagacggggtttcaccatgttggccaggctagtctcaaactcctgaccttaagtgatctgcccgccttggcctcccaaagtgctgggattacaggcatgagtcaccgtgtcctgcccagacatatcaaatttgacaggtattgtataccctttggatctttaggaattaatttttgcctctgtcactcagctttgtatattttgaaatggagataagtatagggaggtcttggaaggaaaattgccagaattcccaaaccatgtaacactcattgagaattccagatccattatatctaaagggcaagtgaaggaaacagtattgtgaactgggtataactccttggttcttaactagtacattcttaatctgtgagacccaaaggttgataaacaataatttaagattgtacagtactctaaacgtctgcaaaggtctagatgttatcagtatcactagtttttatttctgccagtagctcccttttaggttacattgttgtcctctttccagtgtcgcatctgtcattggtttttcactatggcaagttcattaaaaagcttgctccattgttatcttcaagtaatgcccataaggagatggaagatatctgagacaattaaggctttagcttctaggcaagagaaataacgttgcattaaatttcaagtttctttctgctagacttgaatgtgtctagccactctaatttatgggggcttttggttttttcctattgtactttgtatgtagaattgttttgaaatatcaagcatatttactttgaatttgaactctttcttaattttgtatttatcctttgaataaaatgtaaatccaatatttattatt

SEQ ID NO: 137645 - DNA, 8632 bp, Homo sapiens
  Payload ID: 6953
  Gene Symbol: GFPT1
  Gene Name: glutamine--fructose-6-phosphate transaminase 1
  Uniprot ID: Q06210
  ENST ID: ENST00000361060
  CDS Start-End: 178-2223
tggcggagcccgggaggcggagaaggctgtcgttgccttggccgtcgcatccccgagggagtcgtgtcggcgccaccccggcccccgagcccgcagattgcccaccgaagctcgtgtgtgcacccccgatcccgccagccactcgcccctggcctcgcgggccgtgtctccggcatcatgtgtggtatatttgcttacttaaactaccatgttcctcgaacgagacgagaaatcctggagaccctaatcaaaggccttcagagactggagtacagaggatatgattctgctggtgtgggatttgatggaggcaatgataaagattgggaagccaatgcctgcaaaatccagcttattaagaagaaaggaaaagttaaggcactggatgaagaagttcacaagcaacaagatatggatttggatatagaatttgatgtacaccttggaatagctcatacccgttgggcaacacatggagaacccagtcctgtcaatagccacccccagcgctctgataaaaataatgaatttatcgttattcacaatggaatcatcaccaactacaaagacttgaaaaagtttttggaaagcaaaggctatgacttcgaatctgaaacagacacagagacaattgccaagctcgttaagtatatgtatgacaatcgggaaagtcaagataccagctttactaccttggtggagagagttatccaacaattggaaggtgcttttgcacttgtgtttaaaagtgttcattttcccgggcaagcagttggcacaaggcgaggtagccctctgttgattggtgtacggagtgaacataaactttctactgatcacattcctatactctacagaacaggcaaagacaagaaaggaagctgcaatctctctcgtgtggacagcacaacctgccttttcccggtggaagaaaaagcagtggagtattactttgcttctgatgcaagtgctgtcatagaacacaccaatcgcgtcatctttctggaagatgatgatgttgcagcagtagtggatggacgtctttctatccatcgaattaaacgaactgcaggagatcaccccggacgagctgtgcaaacactccagatggaactccagcagatcatgaagggcaacttcagttcatttatgcagaaggaaatatttgagcagccagagtctgtcgtgaacacaatgagaggaagagtcaactttgatgactatactgtgaatttgggtggtttgaaggatcacataaaggagatccagagatgccggcgtttgattcttattgcttgtggaacaagttaccatgctggtgtagcaacacgtcaagttcttgaggagctgactgagttgcctgtgatggtggaactagcaagtgacttcctggacagaaacacaccagtctttcgagatgatgtttgctttttccttagtcaatcaggtgagacagcagatactttgatgggtcttcgttactgtaaggagagaggagctttaactgtggggatcacaaacacagttggcagttccatatcacgggagacagattgtggagttcatattaatgctggtcctgagattggtgtggccagtacaaaggcttataccagccagtttgtatcccttgtgatgtttgcccttatgatgtgtgatgatcggatctccatgcaagaaagacgcaaagagatcatgcttggattgaaacggctgcctgatttgattaaggaagtactgagcatggatgacgaaattcagaaactagcaacagaactttatcatcagaagtcagttctgataatgggacgaggctatcattatgctacttgtcttgaaggggcactgaaaatcaaagaaattacttatatgcactctgaaggcatccttgctggtgaattgaaacatggccctctggctttggtggataaattgatgcctgtgatcatgatcatcatgagagatcacacttatgccaagtgtcagaatgctcttcagcaagtggttgctcggcaggggcggcctgtggtaatttgtgataaggaggatactgagaccattaagaacacaaaaagaacgatcaaggtgccccactcagtggactgcttgcagggcattctcagcgtgatccctttacagttgctggctttccaccttgctgtgctgagaggctatgatgttgatttcccacggaatcttgccaaatctgtgactgtagagtgaggaatatctatacaaaatgtacgaaactgtatgattaagcaacacaagacaccttttgtatttaaaaccttgatttaaaatatcaccccttgaagcctttttttagtaaatccttatttatatatcagttataattattccactcaatatgtgatttttgtgaagttacctcttacattttcccagtaatttgtggaggactttgaataatggaatctatattggaatctgtatcagaaagattctagctattattttctttaaagaatgctgggtgttgcatttctggaccctccacttcaatctgagaagacaatatgtttctaaaaattggtacttgtttcaccatacttcattcagaccagtgaaagagtagtgcatttaattggagtatctaaagccagtggcagtgtatgctcatacttggacagttagggaagggtttgccaagttttaagagaagatgtgatttattttgaaatttgtttctgttttgtttttaaatcaaactgtaaaacttaaaactgaaaaattttattggtaggatttatatctaagtttggttagccttagtttctcagacttgttgtctattatctgtaggtggaagaaatttaggaagcgaaatattacagtagtgcattggtgggtctcaatccttaacatatttgcacaattttatagcacaaactttaaattcaagctgctttggacaactgacaatatgattttaaatttgaagatgggatgtgtacatgttgggtatcctactactttgtgttttcatctcctaaaagtggtttttatttccttgtatctgtagtcttttattttttaaatgactgctgaatgacatattttatcttgttctttaaaatcacaacacagagctgctattaaattaatattgatatattcagtattctcttcaactttgtcacgaggaagaatttcctgtagttaattttaactttccttcattacattgttgcataaaactagtcccttagtgccagtttggaagttacttgcaattgtttggaagatttgcaggtcgctgacctcatcatttcactctaagtatatgtggtaggctaagctcagaaaaaggtatgtatgctttacactgataggcaccaaatttagtattgtatcctaagtatttttcctcttctgtattttctgtgctctacccctgaaatatatttaggaataaagaagatataaataaagtgatattggggtatgttcagcttgtaagtgtcagaaatggaagttgacaatttggattaaaatatttaaagtagaatgttattatttgatacccccaaaattgtgagtaataatttcttaatggagcttttctggccagatcttcagggctataggagagtgtgtttgtttttggtgaagtccttctttttcaaaggtttttacttttaaattgtgaagataagctatttagcacaattatttaagtaagctgttttttcctttcttttctttcttttcttgttttaacttctgggtgaggttaagattttctaatagttattgttgttgccagagaagcatagaattctgcttgtgtcttagggttagagaaagatttgttatattttgaggtaatttggaaggactttcatacatggtgactagaaacctgatctttttaagaataaaatagggtcactatttacattatatataatatatggctattatagctatattaatctactttaattgtttctaagattattttgtgtaagtcagctagcgtgtgtatagtgtcatttcttatgttttgtatattaacgttttacaaacacaatttgtgtgggtttgtagcatttcttatagtttaaagtatgattcagcattctaagttaaaactaatatgtgaagtcagtcattagtctgcataatctctgtctccctctgtgtgtgtctttctataaagcacatgtgtacacacacacacacaaatatactgaaagctagggtaagttctaaactgaatatcaaaaaccaaaatcaagaacaaagaagtgatattttccaaacaaacatggattctctgccgggtgcagtggctcagcctgtaataccagcctccactttgggagtctgaggtgggagtattgcttgagctcaagagttggagaacagcctgggcaacatggtgagacctggtctttacaaaaatttttttggccggacgcagtggctcacacctgtaatcccagcactttgggaggccgaggcaggttgatcatgaggtcaagagatcgagaccatcctggccaacatggtgaaaccccgtctttactaaaaatacaaaaattagctgggagtggtggcgtgcgcctgtagtcccaactacttgggaggctgaggcaggagaatcgcttgaacccaggaggcggaggttgcagtgaggcgagatcacgccactacactccagcctggcgacagagcaagactctctcaaaaaaaaaaaaaaaaaattttttttttaaatgggctgggcatggtggcttgtgcctgtagtctcagcaacttgggaggcttaagtagtaggatcgcttgagcctgggaggttgaggctgcagtgagctgtgattgtgccactgtgcttcagcttgagtgacagagtgagaccctcctgactcaaaacaaaaaacatggtttctcctctctctcctgtcttcttactctctatcccatttgatgtagtgatttttaaatgcttttgtaagttaattcttaacacaaaagagacattgtaatgaggcacaccactaaagtgagcatgcccaattaaaaccagtgtaatataggataagaaaatctgatttttcaaaaaagatactctacataaagaatccttcatataaaaagttctttcttgtagtacatttaaagttttaattcactcatgtataactgagagttcctttgagccctttttaggcagggaggcatgtctgtcatctagcgtgtggcccagtaagtgattattacattggaatcagtttttcagtcttttaaaataaattctgtgccataagaataaaagataaagagaaaaattaatgttaactatttttagcttattataactatgtcaacaagtgtttattaatacctattatgggaaagtcactgtggttggcattgaaaattacatcatctttaaagcagtatttgtccccagatggactcatcactagcaaagactaggttcattggaaggcatagggtgagagaatgggaagatgaagtggaggcgggttgttaaagtgctgtcagtgagtgattttgtctacttgaataatggtccatgtttgggggcatattgtgtttcataagaagtgaaaggtatttgcaaagtaagctacaaatgacccataaatctgttaacaacagtccttaatatgcaaagatgaaaaacaagcattactgctacccaaagggaactggtgcttggtgatgtgcagatggggctgttggttaagagagctattacaggttttctctcttaggtttcataggaggtagttactgagatgagattgttttatctttttgaatacagatctcttgtcttgagttagttctgaggatgggagtaataaaggagttttttgtttttttgtttgtttgtttgttttggctccttagtaatactcctctgacatttatttctattattcttcaaagaaaggaaaccaactgaaatgtttgctttaacaaacattttaataagttctctgggtttttttttccccttttaaaaaaattagcatataccatagcaataaaagaactaatgttaactattgtatgctacaacttaagtgatttttctaaagaagcacaatgtcattgaaagtattattgaaaaggatcatagtcacattgaatttgtgaaggccaaagaaattgaagggagtgatattttcattttatgatattcacatatttagtaaattttgtgtacaagaataccaggcagagtgttttacccatggaaacaggtttcagattactttatttttactgttagagtctcaagtttagaaatgctaacacttaaatcagtttttttctcactatacttgaagattgttaatattttgatatcttcctagcttgatgaatttaaacatatcttcagatctgtgacagtgacagccaataggactgataatattagcttcaaaccaataatatccagggttaaaataaaaatcatagtgaaagtacgattgtaaaattatgctatattaacttttaagtctgtaataacttgacatcaaaatgttatgtaattaccataaataatggctagcgagaacatctttggaaattctcaaattacctttcttactacactgtttgcagaatgaatgtagaaatgatcctgttagctttctgaatgttctgtggttgaatgtgtttttgcttaaataaagcttttggtatttgtttaaattacacttcttgagaagtggaaattttaggatcatctttgctttgtttcagttttgtgatttttgaaatgaatgtttagtttactgagccagttggtcatttcttcctcatgtcgttaagtccagtgagtaagcctgaactgtgaataaattaccaaaaacttgcttagaatttcattttgaagcaatttgctaatatttgaagtgtatacacatttgtagttatgttagaaattgtattgtactaagaatgtaatcaatgtctactttagttgtaaacatttctgatgtcaaaactttattcattactgttgattttaagaataagaaatcactgcctaaatattaccaaaagccactgtctctacccgaacttcccagtttgggaaagaatcgttagataaaacaaaggctctgccctttctgataccaaactccacagatactttctcacatcttttaaaacattttgcaataacatattgtttataggaagtttacggggtatgcaatgattaaaacttttaagtgaattgatagttgcaaaagaaaggataatatttaaggtcagtgagtagcaagacaatctaaagtttctgtaatatctggctctctgttaattatagagcaaagtttcccttacagaatccttttatgaacagcaagctagagtctatccctagtggttatagcacctgctgcgtttttcaggagacagttaggccagggtgatttgaatggatagatgtgctgttttgcctgcttgtagaattcagcccagtctttggtctctctctctctctccctcctccacctctccctctctcttcttctgcaccagagcctaaggctgcgccaccaagatgcgtcattttttccagaggcttcttttttttttttttgagatggagttttgctctgttgcccaggctggcatgcagtgctgcaatcttggctgactgcaacttccacctcccgtgttcacacgagtcttttgcctcagcctctggattagctgggattacaggcacgtgccaccatgcctagctaatttttgtgtttttagtagagacggggtttcaccatgttggccaggctagtctcaaactcctgaccttaagtgatctgcccgccttggcctcccaaagtgctgggattacaggcatgagtcaccgtgtcctgcccagacatatcaaatttgacaggtattgtataccctttggatctttaggaattaatttttgcctctgtcactcagctttgtatattttgaaatggagataagtatagggaggtcttggaaggaaaattgccagaattcccaaaccatgtaacactcattgagaattccagatccattatatctaaagggcaagtgaaggaaacagtattgtgaactgggtataactccttggttcttaactagtacattcttaatctgtgagacccaaaggttgataaacaataatttaagattgtacagtactctaaacgtctgcaaaggtctagatgttatcagtatcactagtttttatttctgccagtagctcccttttaggttacattgttgtcctctttccagtgtcgcatctgtcattggtttttcactatggcaagttcattaaaaagcttgctccattgttatcttcaagtaatgcccataaggagatggaagatatctgagacaattaaggctttagcttctaggcaagagaaataacgttgcattaaatttcaagtttctttctgctagacttgaatgtgtctagccactctaatttatgggggcttttggttttttcctattgtactttgtatgtagaattgttttgaaatatcaagcatatttactttgaatttgaactctttcttaattttgtatttatcctttgaataaaatgtaaatccaa

SEQ ID NO: 137646 - DNA, 3093 bp, Homo sapiens
  Payload ID: 6954
  Gene Symbol: GFPT2
  Gene Name: glutamine-fructose-6-phosphate transaminase 2
  Uniprot ID: O94808
  ENST ID: ENST00000253778
  CDS Start-End: 171-2219
cgccctctcggagggctccgggttataagggctggaggccgagcggacgggagctggagcccgcggagcccacggagcccacggagcccacggaggagcccacggaggagccccagcgtccgaacgggcagaccccctcgagccgcgaaggagcccgagaagcagccacgatgtgcggaatctttgcctacatgaactacagagtcccccggacgaggaaggagatcttcgaaaccctcatcaagggcctgcagcggctggagtacagaggctacgactcggcaggtgtggcgatcgatgggaataatcacgaagtcaaagaaagacacattcagctggtcaagaaaagggggaaagtcaaggctctcgatgaagaactttacaaacaagacagcatggacttaaaagtggagtttgagacacacttcggcattgcccacacgcgctgggccacccacggggtccccagtgctgtcaacagccaccctcagcgctcagacaaaggcaacgaatttgttgtcatccacaatgggatcatcacaaattacaaagatctgaggaaatttctggaaagcaaaggctacgagtttgagtcagaaacagatacagagaccatcgccaagctgattaaatatgtgttcgacaacagagaaactgaggacattacgttttcaacgttggtcgagagagtcattcagcagttggaaggtgcattcgcgctggttttcaagagtgtccactacccaggagaagccgttgccacacggagaggcagccccctgctcatcggagtccggagcaaatacaagctctccacagaacagatccctatcttatacaggacgtgcactctggagaatgtgaagaatatctgtaagacacggatgaagaggctggacagctccgcctgcctgcatgctgtgggcgacaaggccgtggaattcttctttgcttctgatgcaagcgctatcatagagcacaccaaccgggtcatcttcctggaggacgatgacatcgccgcagtggctgatgggaaactctccattcaccgggtcaagcgctcggccagtgatgacccatctcgagccatccagaccttgcagatggaactgcagcaaatcatgaaaggtaacttcagtgcgtttatgcagaaggagatcttcgaacagccagaatcagttttcaatactatgagaggtcgggtgaattttgaaaccaacacagtgctcctgggtggcttgaaggaccacttgaaggagattcgacgatgccgacggctcatcgtgattggctgtggaaccagctaccacgctgccgtggctacgcggcaagttttggaggaactgactgagcttcctgtgatggttgaacttgctagtgattttctggacaggaacacacctgtgttcagggatgacgtttgctttttcatcagccagtcaggcgagaccgcggacaccctcctggcgctgcgctactgtaaggaccgcggcgctctcaccgtgggcgtcaccaacaccgtgggcagctccatctctcgcgagaccgactgcggcgtccacatcaacgcagggccggagatcggcgtggccagcaccaaggcttataccagtcagttcatctctctggtgatgtttggtttgatgatgtctgaagaccgaatttcactacaaaacaggaggcaagagatcatccgtggcttgagatctttacctgagctgatcaaggaagtgctgtctctggaggagaagatccacgacttggccctggagctctacacgcagagatcgctgctggtgatggggcggggctacaactatgccacctgcctggaaggagccctgaaaattaaagagataacctacatgcactcagaaggcatcctggctggggagctgaagcacgggcccctggcactgattgacaagcagatgcccgtcatcatggtcattatgaaggatccttgcttcgccaaatgccagaacgccctgcagcaagtcacggcccgccagggtcgccccattatactgtgctccaaggacgatactgaaagttccaagtttgcgtataagacaattgagctgccccacactgtggactgcctccagggcatcctgagcgtgattccgctgcagctgctgtccttccacctggctgttctccgaggatatgacgttgacttccccagaaatctggccaagtctgtaactgtggaatgaggctgagaccgtgacaagaccatcaccacctttcatctgattccagacctgtcccaacagcagggatgctacatgggaagagaagtggacatcccacatgttctgcgtgctcctgtagagcttgacagcttccacgtgccttctacccaagtgcttttgcttacagcagatactgtttctctgtgtcctgaagtcgccagaggagaagggaatcattgtttacacatggggatcagagcagacttctccactactgtgcaatagagatacagctctcttcagagtaactgtgaaccttttataaccaacactagagttagttttaaaagacaagatatttataatgacgactgtatagcttttaagttatttttctagtatgtggctttctgtagccgtggtaacggccaaactgttcatcctagctacccatgctctgtgtccaggcttgctcctggcaggtggcattcatctcagatgtgagcacaaggcattggccctctggactcctttctccttttctttcctctctaggctgctcctgaatcctgttctctgacatccgtggagcccctcctgcatccacctatgcctcctataagtccagttgaaatctcagcctccttcaacattttcttctcgtgtgtggcccacatccctccacttctccaacttctgtttaatctgatcacggctctttttaagccctggcagcattttggtccctgctccttgcccatagtaaaacagcttgaaatatcccatgcaagagagtagtttcaagtgggcaactctgctctctatttaaaagcgtgcacaatcaaaagtactatgcaattttaggacaataaagaacatacagtttttttgtgtg

SEQ ID NO: 137647 - DNA, 557 bp, Homo sapiens
  Payload ID: 6954
  Gene Symbol: GFPT2
  Gene Name: glutamine-fructose-6-phosphate transaminase 2
  ENST ID: ENST00000503228
  CDS Start-End: 22-557
taacagaggggtccccaccccatgccgaccgaggtcgctctcctccacgtctcccagtcgcccacaaaggcggccacgcgcaggccggcgcatcccgagtgcggggcgcccatcccgactcagcccgccgcgcccaccgaggagaggagaggcgaccccgccccgccgtccccgcagcccgcccggtcgcccccgctgcgtcagtgcctcaggcagggcctgcgcgtcctcctcgcgaccccaaaggaacgtctggtccctagaagggtcgctgccgcgttaccgcctctttgcgcggggaagaggcagtcactgcccgaacctcggcccgaagccacgagagggagtccggggcggggagcggggccgggcgtccgattcccgcggcgctcccgcgctgtcccgcgtggctgcgggaccgtggggagggcggccgcggcccggagcgcacatctgcaattctttactctcctggctgggccgcctccgctggccgggagagagccgggaacttctgctgggacaaaaggaatctttgcctacatgaactacagagt

SEQ ID NO: 137648 - DNA, 697 bp, Homo sapiens
  Payload ID: 6954
  Gene Symbol: GFPT2
  Gene Name: glutamine-fructose-6-phosphate transaminase 2
  ENST ID: ENST00000518906
  CDS Start-End: 50-697
gtttgcagagagttctcaagccttgaaatcatctctcttcacatctgacatgaacctccttctcaatagcatttctctcttaacttttctttcagaatttgttgtcatccacaatgggatcatcacaaattacaaagatctgaggaaatttctggaaagcaaaggctacgagtttgagtcagaaacagatacagagaccatcgccaagctgattaaatatgtgttcgacaacagagaaactgaggacattacgttttcaacgttggtcgagagagtcattcagcagttggaaggtgcattcgcgctggttttcaagagtgtccactacccaggagaagccgttgccacacggagaggcagccccctgctcatcggagtccggagcaaatacaagctctccacagaacagatccctatcttatacaggacgtgcactctggagaatgtgaagaatatctgtaagacacggatgaagaggctggacagctccgcctgcctgcatgctgtgggcgacaaggccgtggaattcttctttgcttctgatgcaagcgctatcatagagcacaccaaccgggtcatcttcctggaggacgatgacatcgccgcagtggctgatgggaaactctccattcaccgggtcaagcgctcggccagtgatgacccatctcgagccatccagaccttgcagatggaactg

SEQ ID NO: 137649 - DNA, 3083 bp, Homo sapiens
  Payload ID: 6955
  Gene Symbol: QRICH1
  Gene Name: glutamine-rich 1
  Uniprot ID: Q2TAL8
  ENST ID: ENST00000357496
  CDS Start-End: 233-2563
gagggttgaatgtaagatggcgcccagggagctgtgaggagaaaaccctgtcggtcttggagcgacgacggcagaaccagggtccctggcggtgcggcggggccggcgggtgcagcggaggcggcggcggcggcggcagtgacgtcgccggaatattagaagtcttaagaactcaggacaagcagcagaaatacatgcaacatggtgactggaaccctaaggactctgcaatatgaataattccctagagaacaccatctcctttgaagagtacatccgagtaaaggcacggtctgtcccgcaacacaggatgaaggaatttctggactcactggcctctaaggggccagaagcccttcaggagttccagcagacagccaccactaccatggtgtaccaacagggtgggaactgcatatacacagacagcactgaagtggctgggtctttgcttgaacttgcctgtccagtcaccaccagtgttcagccacaaacccagcaagaacagcagatccaggttcagcagccgcagcaggttcaggtccaggtgcaggtacagcagtctccgcaacaggtctcggctcagctctccccacaactcaccgttcaccagcctactgagcaacccatccaggtccaggtgcagatccaaggccaggcaccacagtcagcagccccctccattcagaccccgtctctgcagagtcccagtccctcgcagctgcaagcagctcagatccaggtgcagcacgtgcaagcagcccagcagatccaggctgcagaaatcccggaggagcacatcccacatcagcaaatccaggctcagctggtggctggccagtctcttgctggtggtcagcagatccaaatccagaccgtgggtgccctttccccaccaccatcccagcagggctcaccccgggaaggggagcggcgggttggcacggccagtgtcctccaaccagtgaagaagcgcaaagtggacatgcccatcactgtgtcctacgccatctcagggcagccggtggccaccgtgctggccattccacagggccagcagcagagttatgtgtctttgaggccagacttactgacagtagacagtgcccacctgtacagtgccactgggaccattactagccctacaggagaaacctggaccatccctgtttattctgcccagccccggggggaccctcagcagcagagcattacccacattgccattccccaggaagcctacaacgcagttcacgtcagtggctcacccacagccctggcagctgttaagctggaggatgacaaggagaagatggtgggcaccacatctgtagtgaaaaactcccatgaagaggtagtgcagacccttgcaaactctctctttccagcacagttcatgaatggcaacatccacattccagtggctgtgcaggctgtggcaggcacgtaccagaatacggctcaaactgtccatatatgggacccccaacagcagccgcagcagcaaactccccaggaacagacaccaccaccacagcagcagcagcagcaactccaagttacttgttcagctcaaactgtccaggttgctgaagttgaaccacagtcacagccacagccttccccagaacttctgcttccaaattctttgaagccagaagaagggcttgaagtatggaaaaactgggcccagaccaagaatgctgaactagagaaggatgctcagaacagattggcacccattgggaggcgccaactgctgcgattccaggaagatctcatctcctctgctgtggcagagttgaattatgggctctgtctaatgacacgggaagctcgaaatggagaaggtgaaccctatgacccagatgtgctctactatattttcctgtgtattcaaaagtatctttttgaaaatggaagggtagatgacattttctccgatctttattatgttcggttcacggagtggctacatgaagttctgaaggatgttcagccccgggtcactccacttggctatgtcttgcccagccacgtgactgaggagatgctatgggagtgcaagcagcttggggctcactccccctccaccttgctgaccaccctcatgttctttaataccaagtacttcctattgaagacagtggaccagcacatgaagctggccttctccaaggtcttgcgacagacaaagaagaacccctctaatcccaaggataaaagcacgagtatccggtacttgaaggcccttggaatacaccagactggccagaaagttacagatgacatgtatgcagaacagacggaaaatccagagaatccattgagatgtcccatcaagctctatgatttctacctcttcaaatgcccccagagtgtgaaaggccggaatgacaccttttacctgacacctgagccagtggtggcccccaacagcccaatctggtactcagtccagcctatcagcagagagcagatgggacaaatgctgacgcggatcctggtgataagagaaattcaggaggccatcgcagtggccaatgcaagcactatgcactgagatgccttggccatggcacaagagaaaccagccaggaaaaaccagacagactttcacactaaagaagaggcctccatttttttttttcttttttttattggtgtagttacgaagcctttcaggctgcttctgtttaaaatataaaagaaaactttgccccctttgcatcttcataaacctgctgcggcagactcctcagccgatggtggctctgggtttccttgagtgtcatatgtcctagaaagttgctggctgactcttttttgtctggggcctggggaaagggcttggactgtgaaaagaaatgtggcccctttccatcttcaagagagatggaattaatgatggatggaccctggagggaatctccccagccgacttccactgggctgacagactttgctgaccacaggggaacgatgttcttttctttcttcatgatcagacataaacttagcatcttaatggaagaaaaatgaggggaacttcaattatgatttattaaagacaatttctatta

SEQ ID NO: 137650 - DNA, 3549 bp, Homo sapiens
  Payload ID: 6955
  Gene Symbol: QRICH1
  Gene Name: glutamine-rich 1
  Uniprot ID: Q2TAL8
  ENST ID: ENST00000395443
  CDS Start-End: 474-2804
aaaggaggctctggcgggcgacggaaggtgggtccaaagagctagcttggagccctagccttccgagactccactactaggccaagccacggccctagctccgccccacatggagaggcgtccatgggcggagcgagccgctccataccctaggatccactatccgctctagcggccagaagcgcggccaccttcccctgctgaagcgttcactttaattttggccggtaggcagtcccagatctcgcgggatccgacgccccgattatcgcgagaggagcaatcggctcctattggctgtgagggttgaatgtaagatggcgcccagggagctgtgaggagaaaaccctgtcggtcttggagcgacgacggcagaaccagggtccctggcggtgcggcggggccggcgggtgcagcggaggcggcggcggcggcggcagtgacgtcgccgggaaccctaaggactctgcaatatgaataattccctagagaacaccatctcctttgaagagtacatccgagtaaaggcacggtctgtcccgcaacacaggatgaaggaatttctggactcactggcctctaaggggccagaagcccttcaggagttccagcagacagccaccactaccatggtgtaccaacagggtgggaactgcatatacacagacagcactgaagtggctgggtctttgcttgaacttgcctgtccagtcaccaccagtgttcagccacaaacccagcaagaacagcagatccaggttcagcagccgcagcaggttcaggtccaggtgcaggtacagcagtctccgcaacaggtctcggctcagctctccccacaactcaccgttcaccagcctactgagcaacccatccaggtccaggtgcagatccaaggccaggcaccacagtcagcagccccctccattcagaccccgtctctgcagagtcccagtccctcgcagctgcaagcagctcagatccaggtgcagcacgtgcaagcagcccagcagatccaggctgcagaaatcccggaggagcacatcccacatcagcaaatccaggctcagctggtggctggccagtctcttgctggtggtcagcagatccaaatccagaccgtgggtgccctttccccaccaccatcccagcagggctcaccccgggaaggggagcggcgggttggcacggccagtgtcctccaaccagtgaagaagcgcaaagtggacatgcccatcactgtgtcctacgccatctcagggcagccggtggccaccgtgctggccattccacagggccagcagcagagttatgtgtctttgaggccagacttactgacagtagacagtgcccacctgtacagtgccactgggaccattactagccctacaggagaaacctggaccatccctgtttattctgcccagccccggggggaccctcagcagcagagcattacccacattgccattccccaggaagcctacaacgcagttcacgtcagtggctcacccacagccctggcagctgttaagctggaggatgacaaggagaagatggtgggcaccacatctgtagtgaaaaactcccatgaagaggtagtgcagacccttgcaaactctctctttccagcacagttcatgaatggcaacatccacattccagtggctgtgcaggctgtggcaggcacgtaccagaatacggctcaaactgtccatatatgggacccccaacagcagccgcagcagcaaactccccaggaacagacaccaccaccacagcagcagcagcagcaactccaagttacttgttcagctcaaactgtccaggttgctgaagttgaaccacagtcacagccacagccttccccagaacttctgcttccaaattctttgaagccagaagaagggcttgaagtatggaaaaactgggcccagaccaagaatgctgaactagagaaggatgctcagaacagattggcacccattgggaggcgccaactgctgcgattccaggaagatctcatctcctctgctgtggcagagttgaattatgggctctgtctaatgacacgggaagctcgaaatggagaaggtgaaccctatgacccagatgtgctctactatattttcctgtgtattcaaaagtatctttttgaaaatggaagggtagatgacattttctccgatctttattatgttcggttcacggagtggctacatgaagttctgaaggatgttcagccccgggtcactccacttggctatgtcttgcccagccacgtgactgaggagatgctatgggagtgcaagcagcttggggctcactccccctccaccttgctgaccaccctcatgttctttaataccaagtacttcctattgaagacagtggaccagcacatgaagctggccttctccaaggtcttgcgacagacaaagaagaacccctctaatcccaaggataaaagcacgagtatccggtacttgaaggcccttggaatacaccagactggccagaaagttacagatgacatgtatgcagaacagacggaaaatccagagaatccattgagatgtcccatcaagctctatgatttctacctcttcaaatgcccccagagtgtgaaaggccggaatgacaccttttacctgacacctgagccagtggtggcccccaacagcccaatctggtactcagtccagcctatcagcagagagcagatgggacaaatgctgacgcggatcctggtgataagagaaattcaggaggccatcgcagtggccaatgcaagcactatgcactgagatgccttggccatggcacaagagaaaccagccaggaaaaaccagacagactttcacactaaagaagaggcctccatttttttttttcttttttttattggtgtagttacgaagcctttcaggctgcttctgtttaaaatataaaagaaaactttgccccctttgcatcttcataaacctgctgcggcagactcctcagccgatggtggctctgggtttccttgagtgtcatatgtcctagaaagttgctggctgactcttttttgtctggggcctggggaaagggcttggactgtgaaaagaaatgtggcccctttccatcttcaagagagatggaattaatgatggatggaccctggagggaatctccccagccgacttccactgggctgacagactttgctgaccacaggggaacgatgttcttttctttcttcatgatcagacataaacttagcatcttaatggaagaaaaatgaggggaacttcaattatgatttattaaagacaatttctattacaccctcctttatgacaagtgacattttagatgtaaaagtaaaaactttaccatgccttttttttttttgttggcctaacattgaggccttaaaacctgaggctcctgtgcctgatggaattcttgtaacatacacttgtgtatcatataaagataccactctgtttctcttatgtattcttactctagttgtttattaagaatgacaagcacgtcttttcaaca

SEQ ID NO: 137651 - DNA, 583 bp, Homo sapiens
  Payload ID: 6955
  Gene Symbol: QRICH1
  Gene Name: glutamine-rich 1
  ENST ID: ENST00000430979
  CDS Start-End: 439-583
gtaagatggcgcccagggagctgtgaggagaaaaccctgtcggtcttggagcgacgacggcagaaccagggtccctggcggtgcggcggggccggcgggtgcagcggaggcggcggcggcggcggcagtgacgtcgccggaatattagaagtcttaagaactcaggacaagcagcagaaatacatgcaacatggtgactgaaactattagagatgggatttcaccacgttggccagactggtcttgaactcccaacctcaggtgatccgcccacctcagcctcccaaagtgctggggattacaggcgtgagccactgcaccgggccccatatgaatgtattcaaactggactaagctatgaagagccattgttggagtagatgtgaaccttgaggggcctcaaagcccaaggaagaggaaccctaaggactctgcaatatgaataattccctagagaacaccatctcctttgaagagtacatccgagtaaaggcacggtctgtcccgcaacacaggatgaaggaatttctggactcactggcctctaaggggccagaagcccttcaggagttccagcagacag

SEQ ID NO: 137652 - DNA, 359 bp, Homo sapiens
  Payload ID: 6955
  Gene Symbol: QRICH1
  Gene Name: glutamine-rich 1
  ENST ID: ENST00000411682
  CDS Start-End: 49-359
aaaggaggctctggcgggcgacggaaggaaccctaaggactctgcaatatgaataattccctagagaacaccatctcctttgaagagtacatccgagtaaaggcacggtctgtcccgcaacacaggatgaaggaatttctggactcactggcctctaaggggccagaagcccttcaggagttccagcagacagccaccactaccatggtgtaccaacagggtgggaactgcatatacacagacagcactgaagtggctgggtctttgcttgaacttgcctgtccagtcaccaccagtgttcagccacaaacccagcaagaacagcagatccaggttcagcagccgcagcaggttcaggt

SEQ ID NO: 137653 - DNA, 3009 bp, Homo sapiens
  Payload ID: 6955
  Gene Symbol: QRICH1
  Gene Name: glutamine-rich 1
  Uniprot ID: Q2TAL8
  ENST ID: ENST00000424300
  CDS Start-End: 439-2769
cgcgttcccggcccggatatctctgctctaggagctgtggcccgtgggcaaccgcggctttctggagcgcgcgcccgtgacgacccccagttttggggcgcgcgctctgatatcgggtggcggtgctgcctcgagagcgcgcaggaggcttctgctgagcagagggccggccgcggctcgttgcgctgggaaggttgaggattgggtcctttctggtctggtgacgttcccgggcatccgtggcctcggcctggagagaaaccaaccagctttgctgtctggcttgcggttccgctcctctgtgaggggggcgagattgcccgttctcctcgaagaatgccgttacttgaggcccaaaatattagaagtcttaagaactcaggacaagcagcagaaatacatgcaacatggtgactggaaccctaaggactctgcaatatgaataattccctagagaacaccatctcctttgaagagtacatccgagtaaaggcacggtctgtcccgcaacacaggatgaaggaatttctggactcactggcctctaaggggccagaagcccttcaggagttccagcagacagccaccactaccatggtgtaccaacagggtgggaactgcatatacacagacagcactgaagtggctgggtctttgcttgaacttgcctgtccagtcaccaccagtgttcagccacaaacccagcaagaacagcagatccaggttcagcagccgcagcaggttcaggtccaggtgcaggtacagcagtctccgcaacaggtctcggctcagctctccccacaactcaccgttcaccagcctactgagcaacccatccaggtccaggtgcagatccaaggccaggcaccacagtcagcagccccctccattcagaccccgtctctgcagagtcccagtccctcgcagctgcaagcagctcagatccaggtgcagcacgtgcaagcagcccagcagatccaggctgcagaaatcccggaggagcacatcccacatcagcaaatccaggctcagctggtggctggccagtctcttgctggtggtcagcagatccaaatccagaccgtgggtgccctttccccaccaccatcccagcagggctcaccccgggaaggggagcggcgggttggcacggccagtgtcctccaaccagtgaagaagcgcaaagtggacatgcccatcactgtgtcctacgccatctcagggcagccggtggccaccgtgctggccattccacagggccagcagcagagttatgtgtctttgaggccagacttactgacagtagacagtgcccacctgtacagtgccactgggaccattactagccctacaggagaaacctggaccatccctgtttattctgcccagccccggggggaccctcagcagcagagcattacccacattgccattccccaggaagcctacaacgcagttcacgtcagtggctcacccacagccctggcagctgttaagctggaggatgacaaggagaagatggtgggcaccacatctgtagtgaaaaactcccatgaagaggtagtgcagacccttgcaaactctctctttccagcacagttcatgaatggcaacatccacattccagtggctgtgcaggctgtggcaggcacgtaccagaatacggctcaaactgtccatatatgggacccccaacagcagccgcagcagcaaactccccaggaacagacaccaccaccacagcagcagcagcagcaactccaagttacttgttcagctcaaactgtccaggttgctgaagttgaaccacagtcacagccacagccttccccagaacttctgcttccaaattctttgaagccagaagaagggcttgaagtatggaaaaactgggcccagaccaagaatgctgaactagagaaggatgctcagaacagattggcacccattgggaggcgccaactgctgcgattccaggaagatctcatctcctctgctgtggcagagttgaattatgggctctgtctaatgacacgggaagctcgaaatggagaaggtgaaccctatgacccagatgtgctctactatattttcctgtgtattcaaaagtatctttttgaaaatggaagggtagatgacattttctccgatctttattatgttcggttcacggagtggctacatgaagttctgaaggatgttcagccccgggtcactccacttggctatgtcttgcccagccacgtgactgaggagatgctatgggagtgcaagcagcttggggctcactccccctccaccttgctgaccaccctcatgttctttaataccaagtacttcctattgaagacagtggaccagcacatgaagctggccttctccaaggtcttgcgacagacaaagaagaacccctctaatcccaaggataaaagcacgagtatccggtacttgaaggcccttggaatacaccagactggccagaaagttacagatgacatgtatgcagaacagacggaaaatccagagaatccattgagatgtcccatcaagctctatgatttctacctcttcaaatgcccccagagtgtgaaaggccggaatgacaccttttacctgacacctgagccagtggtggcccccaacagcccaatctggtactcagtccagcctatcagcagagagcagatgggacaaatgctgacgcggatcctggtgataagagaaattcaggaggccatcgcagtggccaatgcaagcactatgcactgagatgccttggccatggcacaagagaaaccagccaggaaaaaccagacagactttcacactaaagaagaggcctccatttttttttttcttttttttattggtgtagttacgaagcctttcaggctgcttctgtttaaaatataaaagaaaactttgccccctttgcatcttcataaacctgctgcggcagactcctcagccgatggtggctctgggtttccttgagtgtcatatgtccta

SEQ ID NO: 137654 - DNA, 426 bp, Homo sapiens
  Payload ID: 6955
  Gene Symbol: QRICH1
  Gene Name: glutamine-rich 1
  ENST ID: ENST00000450685
  CDS Start-End: 116-426
cgagccgctccataccctaggatccactatccgctctagcggccagaagcgcggccaccttcccctgctgaagcgttcactttaattttggccggaaccctaaggactctgcaatatgaataattccctagagaacaccatctcctttgaagagtacatccgagtaaaggcacggtctgtcccgcaacacaggatgaaggaatttctggactcactggcctctaaggggccagaagcccttcaggagttccagcagacagccaccactaccatggtgtaccaacagggtgggaactgcatatacacagacagcactgaagtggctgggtctttgcttgaacttgcctgtccagtcaccaccagtgttcagccacaaacccagcaagaacagcagatccaggttcagcagccgcagcaggttcaggt

SEQ ID NO: 137655 - DNA, 510 bp, Homo sapiens
  Payload ID: 6955
  Gene Symbol: QRICH1
  Gene Name: glutamine-rich 1
  ENST ID: ENST00000437939
  CDS Start-End: 200-510
attggctgtgagggttgaatgtaagatggcgcccagggagctgtgaggagaaaaccctgtcggtcttggagcgacgacggcagaaccagggtccctggcggtgcggcggggccggcgggtgcagcggaggcggcggcggcggcggcagtgacgtcgccgggtgagggctccagtgcgggaaccctaaggactctgcaatatgaataattccctagagaacaccatctcctttgaagagtacatccgagtaaaggcacggtctgtcccgcaacacaggatgaaggaatttctggactcactggcctctaaggggccagaagcccttcaggagttccagcagacagccaccactaccatggtgtaccaacagggtgggaactgcatatacacagacagcactgaagtggctgggtctttgcttgaacttgcctgtccagtcaccaccagtgttcagccacaaacccagcaagaacagcagatccaggttcagcagccgcagcaggttcaggt

SEQ ID NO: 137656 - DNA, 1739 bp, Homo sapiens
  Payload ID: 6956
  Gene Symbol: QPCT
  Gene Name: glutaminyl-peptide cyclotransferase
  Uniprot ID: Q16769
  ENST ID: ENST00000338415
  CDS Start-End: 159-1244
ctgcagcctgcgcgacgcggcgggaggctacccgggggcgatgggaaggcgggcgcagtcgacccaagggtggagaagagggaaggcgaaggacgcgcgttcccgggctcgtgaccgccagcggcccggggaacccgctcccagacagactcggagagatggcaggcggaagacaccggcgcgtcgtgggcaccctccacctgctgctgctggtggccgccctgccctgggcatccaggggggtcagtccgagtgcctcagcctggccagaggagaagaattaccaccagccagccattttgaattcatcggctcttcggcaaattgcagaaggcaccagtatctctgaaatgtggcaaaatgacttacagccattgctgatagagcgatacccgggatcccctggaagctatgctgctcgtcagcacatcatgcagcgaattcagaggcttcaggctgactgggtcttggaaatagacaccttcttgagtcagacaccctatgggtaccggtctttctcaaatatcatcagcaccctcaatcccactgctaaacgacatttggtcctcgcctgccactatgactccaagtatttttcccactggaacaacagagtgtttgtaggagccactgattcagccgtgccatgtgcaatgatgttggaacttgctcgtgccttagacaagaaactcctttccttaaagactgtttcagactccaagccagatttgtcactccagctgatcttctttgatggtgaagaggcttttcttcactggtctcctcaagattctctctatgggtctcgacacttagctgcaaagatggcatcgaccccgcacccacctggagcgagaggcaccagccaactgcatggcatggatttattggtcttattggatttgattggagctccaaacccaacgtttcccaatttttttccaaactcagccaggtggttcgaaagacttcaagcaattgaacatgaacttcatgaattgggtttgctcaaggatcactctttggaggggcggtatttccagaattacagttatggaggtgtgattcaggatgaccatattccatttttaagaagaggtgttccagttctgcatctgataccgtctcctttccctgaagtctggcacaccatggatgacaatgaagaaaatttggatgaatcaaccattgacaatctaaacaaaatcctacaagtctttgtgttggaatatcttcatttgtaatactctgatttagtttaggataattggttctagaattgaattcaaaagtcaaggcatcatttaaaataatctgatttcagacaaatgctgtgtggaaacatctatcctatagatcatcctattcttatgtgtctttggttatcagatcaattacagaataattgtgttgtgatattgtgtcctaaattgctcattaatttttatttacagattgaaaaagagggaccgtgtaaagaaaatggaaaataaatatctttcaaagactcttttagataaacacgatgaggcaaaatcaggttcattcattcaacgatagtttctcaacagtacttaaatagcggttggaaaacgtagccttcattttatgattttttcatatgtggaaatctattacatgtaatacaaaacaaacatgtagtttgaaggcggtcagatttctttgagaaatctttgtagagttaattttatggaaattaaaatcagaattaaatgcta

SEQ ID NO: 137657 - DNA, 992 bp, Homo sapiens
  Payload ID: 6956
  Gene Symbol: QPCT
  Gene Name: glutaminyl-peptide cyclotransferase
  ENST ID: ENST00000404976
  CDS Start-End: 139-992
cgggaggctacccgggggcgatgggaaggcgggcgcagtcgacccaagggtggagaagagggaaggcgaaggacgcgcgttcccgggctcgtgaccgccagcggcccggggaacccgctcccagacagactcggagagatggcaggcggaagacaccggcgcgtcgtgggcaccctccacctgctgctgctggtggccgccctgccctgggcatccaggggggtcagtccgagtgcctcagcctggccagaggagaagcacatcatgcagcgaattcagaggcttcaggctgactgggtcttggaaatagacaccttcttgagtcagacaccctatgggtaccggtctttctcaaatatcatcagcaccctcaatcccactgctaaacgacatttggtcctcgcctgccactatgactccaagtatttttcccactggaacaacagagtgtttgtaggagccactgattcagccgtgccatgtgcaatgatgttggaacttgctcgtgccttagacaagaaactcctttccttaaagactgtttcagactccaagccagatttgtcactccagctgatcttctttgatggtgaagaggcttttcttcactggtctcctcaagattctctctatgggtctcgacacttagctgcaaagatggcatcgaccccgcacccacctggagcgagaggcaccagccaactgcatggcatggatttattggtcttattggatttgattggagctccaaacccaacgtttcccaatttttttccaaactcagccaggtggttcgaaagacttcaagcaattgaacatgaacttcatgaattgggtttgctcaaggatcactctttggaggggcggtatttccagaattacagttatggaggtgtgattcaggatgaccatattccatttttaagaagaggtgttccagttctgcatctgataccgtctcctttccctgaagtctggcacaccatggatga

SEQ ID NO: 137658 - DNA, 714 bp, Homo sapiens
  Payload ID: 6956
  Gene Symbol: QPCT
  Gene Name: glutaminyl-peptide cyclotransferase
  ENST ID: ENST00000444022
  CDS Start-End: 362-714
cccattcctgggcccacactccatccctaatccctcccccgacccctgcatcttctcctgactctgactctcttcccatatttgatcttctttctgtccccacgtcttcactaaccccagcttggaacctcatgctacccttgagacttcactagccccggtgccttcatccctccctgacgctcaccccatctgtgaactgatagcttattcccagcacccccgcttattcctatccattgccctatcactgaccttcgccctataaaagtacaaatggtcacattctgtgtcctctgtgaccctaacacacctcctgttggcatttgctctccctcctgttatccattggcagctcctaatgggccaggggaatgtggatttattggtcttattggatttgattggagctccaaacccaacgtttcccaatttttttccaaactcagccaggtggttcgaaagacttcaagcaattgaacatgaacttcatgaattgggtttgctcaaggatcactctttggaggggcggtatttccagaattacagttatggaggtgtgattcaggatgaccatattccatttttaagaagaggtgttccagttctgcatctgataccgtctcctttccctgaagtctggcacaccatggatgacaatgaagaaaatttggatgaatcaaccattgacaatctaaacaaaatcctacaagt

SEQ ID NO: 137659 - DNA, 2310 bp, Homo sapiens
  Payload ID: 6957
  Gene Symbol: QPCTL
  Gene Name: glutaminyl-peptide cyclotransferase-like
  Uniprot ID: Q9NXS2
  ENST ID: ENST00000012049
  CDS Start-End: 222-1370
catttgggtcgtgccattctcaggggaaccaaccccaatacctaagggaggctgggaggcgtgtcctcaggaccgtagttcttattggtttcgctgctcgctgtggggtgggctggtgcagccgcagctgttgcttattggcccaccgattccatggggaggaacttggctgggcctaaactcaatccgtggtctggtacaggtttcagggcaaagcggccatgcgttccgggggccgcgggcgaccccgcctgcggctgggggaacgtggcctcatggagccactcttgccgccgaagcgccgcctgctaccgcgggttcggctcttgcctctgttgctggcgctggccgtgggctcggcgttctacaccatttggagcggctggcaccgcaggactgaggagctgccgctgggccgggagctgcgggtcccattgatcggaagcctccccgaagcccggctgcggagggtggtgggacaactggatccacagcgtctctggagcacttatctgcgccccctgctggttgtgcgaaccccgggcagcccgggaaatctccaagtcagaaagttcctggaggccacgctgcggtccctgacagcaggttggcacgtggagctggatcccttcacagcctcaacacccctggggccagtggactttggcaatgtggtggccacactggacccaagggctgcccgtcacctcacccttgcctgccattatgactcgaagctcttcccacccggatcgaccccctttgtaggggccacggattcggctgtgccctgtgccctgctgctggagctggcccaagcacttgacctggagctgagcagggccaaaaaacaggcagccccggtgaccctgcaactgctcttcttggatggtgaagaggcgctgaaggagtggggacccaaggactccctttacggttcccggcacctggcccagctcatggagtctatacctcacagccccggccccaccaggatccaggctattgagctctttatgcttcttgatctcctgggagcccccaatcccaccttctacagccacttccctcgcacggtccgctggttccatcggctgaggagcattgagaagcgtctgcaccgtttgaacctgctgcagtctcatccccaggaagtgatgtacttccaacccggggagccctttggctctgtggaagacgaccacatccccttcctccgcagaggggtacccgtgctccatctcatctccacgcccttccctgctgtctggcacacccctgcggacaccgaggtcaatctccacccacccacggtacacaacttgtgccgcattctcgctgtgttcctggctgaatacctggggctctagcgtgcttggccaatgactgtggagaggactgtgagagagaaggtcccagcgggggccagtgaagctcaggcaggatctgcctagggtgtgctggtttgtccttttcatacctttgtctcctaattgtgctacaattggaagaccttctttcttttgattgtctcaagctgccacccttcaaggacagggaagagaccactgtgggatgacagccagaggaataagaacttgctccctccccagaggtaaacacttggtccaaaggtttgcagggaccaaatactgttctttttttttttgagacggagtctcactgtgttgcccaggctggagtgcagtggtgcgatctcggctcactgcaaactccgcctcctgggttcacgccattctcctgcctcagcctcccaagtagctgggactacaggtgcccgccaccacgctggctaattttttgtatttttagtagagacggggtttcaccgtgttagccaggatggtctcgatctcctgaccttgtaatccgccagcctcggcctcccaaagtgctgggattacaggtgtgagccaccgcacctggcaaaatgctgttctttaagtcagcgaactgaaaaagtaaaagactgctgggtgtggtggctcacacctgtaatcccaacactttgagaggctgagggggaaggatcacccgaggtcaggagtttgagaccagcctggtcaacatggcgaaaccctgtctctactaaaaatacaataattagctgggcatggtggtgggcgcctgtaatctcagctgcttgggaggctgaggcaggagaatcacttgtacgcaggaggcggaggttgcagtgagccaagatcacaccactgcactccagcctgggcaacagagcgagactccatctcaataaataaataaataaataaatattttttaaaaaga

SEQ ID NO: 137660 - DNA, 1814 bp, Homo sapiens
  Payload ID: 6957
  Gene Symbol: QPCTL
  Gene Name: glutaminyl-peptide cyclotransferase-like
  Uniprot ID: Q9NXS2
  ENST ID: ENST00000366382
  CDS Start-End: 8-874
agcggccatgcgttccgggggccgcgggcgaccccgcctgcggctgggggaacgtggcctcatggagccactcttgccgccgaagcgccgcctgctaccgcgggttcggctcttgcctctgttgctggcgctggccgtgggctcggcgttctacaccatttggagcggctggcaccgcaggactgaggagctgccgctgggccgggagctgcgggtcccattgatcggaagcctccccgaagcccggctgcggagggtggtgggacaactggatccacagcgtctctggagcacttatctgcgccccctgctggttgtgcgaaccccgggcagcccgggaaatctccaagtcagaaaggcagccccggtgaccctgcaactgctcttcttggatggtgaagaggcgctgaaggagtggggacccaaggactccctttacggttcccggcacctggcccagctcatggagtctatacctcacagccccggccccaccaggatccaggctattgagctctttatgcttcttgatctcctgggagcccccaatcccaccttctacagccacttccctcgcacggtccgctggttccatcggctgaggagcattgagaagcgtctgcaccgtttgaacctgctgcagtctcatccccaggaagtgatgtacttccaacccggggagccctttggctctgtggaagacgaccacatccccttcctccgcagaggggtacccgtgctccatctcatctccacgcccttccctgctgtctggcacacccctgcggacaccgaggtcaatctccacccacccacggtacacaacttgtgccgcattctcgctgtgttcctggctgaatacctggggctctagcgtgcttggccaatgactgtggagaggactgtgagagagaaggtcccagcgggggccagtgaagctcaggcaggatctgcctagggtgtgctggtttgtccttttcatacctttgtctcctaattgtgctacaattggaagaccttctttcttttgattgtctcaagctgccacccttcaaggacagggaagagaccactgtgggatgacagccagaggaataagaacttgctccctccccagaggtaaacacttggtccaaaggtttgcagggaccaaatactgttctttttttttttgagacggagtctcactgtgttgcccaggctggagtgcagtggtgcgatctcggctcactgcaaactccgcctcctgggttcacgccattctcctgcctcagcctcccaagtagctgggactacaggtgcccgccaccacgctggctaattttttgtatttttagtagagacggggtttcaccgtgttagccaggatggtctcgatctcctgaccttgtaatccgccagcctcggcctcccaaagtgctgggattacaggtgtgagccaccgcacctggcaaaatgctgttctttaagtcagcgaactgaaaaagtaaaagactgctgggtgtggtggctcacacctgtaatcccaacactttgagaggctgagggggaaggatcacccgaggtcaggagtttgagaccagcctggtcaacatggcgaaaccctgtctctactaaaaatacaataattagctgggcatggtggtgggcgcctgtaatctcagctgcttgggaggctgaggcaggagaatcacttgtacgcaggaggcggaggttgcagtgagccaagatcacaccactgcactccagcctgggcaacagagcgagactccatctcaataaataaataaataaataaatattttttaaaaaga

SEQ ID NO: 137661 - DNA, 561 bp, Homo sapiens
  Payload ID: 6957
  Gene Symbol: QPCTL
  Gene Name: glutaminyl-peptide cyclotransferase-like
  ENST ID: ENST00000591606
  CDS Start-End: 1-366
atggagccactcttgccgccgaagcgccgcctgctaccgcgggttcggctcttgcctctgttgctggcgctggccgtgggctcggcgttctacaccatttggagcggctggcaccgcaggactgaggagctgccgctgggccgggagctgcgggtcccattgatcggaagcctccccgaagcccggctgcggagggtggtgggacaactggatccacagcgtctctggagcacttatctgcgccccctgctggttgtgcgaaccccgggcagcccgggaaatctccaagtcagaaaggggccacggattcggctgtgccctgtgccctgctgctggagctggcccaagcacttgacctggagctgagcagggccaaaaaacaggcagccccggtgaccctgcaactgctcttcttggatggtgaagaggcgctgaaggagtggggacccaaggactccctttacggttcccggcacctggcccagctcatggagtctatacctcacagccccggccccaccaggatccaggctattgagctctttatgcttcttgatctcc

SEQ ID NO: 137662 - DNA, 2158 bp, Homo sapiens
  Payload ID: 6958
  Gene Symbol: QRSL1
  Gene Name: glutaminyl-tRNA synthase (glutamine-hydrolyzing)-like 1
  ENST ID: ENST00000369044
  CDS Start-End: 69-1028
actagcgaccggtgacctctttttcccccttgcctggctcctgtggtggcaggctgggcacgaggaccatgctgggccggagcctccgagaagtttctgcggcactgaaacaaggccaaattacaccaacagagctctgtcaaaaatgtctctctcttatcaagaagaccaagtttctaaatgcctacattactgtgtcagaagaggtggccttaaaacaagctgaagaatcagaaaagagatataagaatggacagtcacttggggatttagatggaattcctattgcagtaaaagacaatttcagcacttctggcattgagacaacatgtgcatcaaatatgctgaaaggttatataccaccttataatgctacagtagttcagaagttgttggatcagggagctctactaatgggaaaaacaaatttagatgagtttgctatgggatctgggagcacagatggtgtatttggaccagttaaaaacccctggagttattcaaaacaatatagagaaaagaggaagcagaatccccacagcgagaatgaagattcagactggctgataactggaggaagctcaggtgggagtgcagctgctgtatcggcgttcacatgctacgcggctttaggatcagatacaggaggatcgaccagaaatcctgctgcccactgtgggcttgttggtttcaaaccaagctatggcttagtttcccgtcatggtctcattcccctggtgaattcgatggatgtgccaggaatcttaaccagatgtgtggatgatgcagcaattgtgttgggtgcactggccggacctgaccccagggactctaccacagtacatgaacctattaataaaccattcatgcttcccagtttggcagatgtgagcaaactatgtataggaattccaaaggtaactttttcctttcattactttacagaaatactgtcaagtccaatagagagcacagacttgggaggcggattgggtgggtttgaatctctgctctgccacttttattaatcatgtgagttgagtatgtgacttaatctcttttagctcaatttccccatctgtaaaataggaataataaaaatactgacttcagagaggtttgtgaggatcaattagacagtcatgttaagtctgtaaattgtttctgtaatgggcaagatagcaaatattttagattttgtggaccatgcagtctttatcataactgcttaactgccattatagtgagaaagcagccacagacaatatgtaaatgaaaaagtgtgtctctgttccaataaaactttattttcaaaaaccagctggcttgtcacatctggcctatgggccatagtttgcccatccctaatgtaaagaaaggactttagcccaaagccacaacttgcatagtaatgcctcaaaaaatgttaacatctttactgttattattattactactgcatctattacagtagcaattgagtaatgaatacatgaatgttataatgttaaattactaaccttttaaaaatattaagcattgcaatatattaatactttaaatcttttaggaagataagttaccctgcagaataatgaagtttcacaacctcagcactgttggtgtttggggctggtaattgtttgttgtgggagactgtcctgtgcattgtaagatgtttagtagcatccctggcctctacccctacatgcaagtagtaccccaccaccaaaaccacaatcccacaaccaaaaatgtctgcagacattgtcaagtgtctcctggttagggaaaaggagacaaaagtaacccccaggtaagaccactgctatagagaaatactaccttatttaaaatcttccattaaggtaatatatgtaaggccaggtgcgtacacctgtaatcccagcaccttgggaagccaaggcaggaggatcgcttgagatcaggagtttgagaccagcctgggcaacatacagagccctatgtctacaaaaagttttaaaaaaattgtggggtgtggtggtgtgcacctgtggtcctagctgtttgggaggctgaggggggaggattgcttgagtccaggaggttgagactgccgtgagccatgattgcaccactgcactccaccctaggtgacagagcaagaccctatctc

SEQ ID NO: 137663 - DNA, 4106 bp, Homo sapiens
  Payload ID: 6958
  Gene Symbol: QRSL1
  Gene Name: glutaminyl-tRNA synthase (glutamine-hydrolyzing)-like 1
  Uniprot ID: Q9H0R6
  ENST ID: ENST00000369046
  CDS Start-End: 105-1691
agtgacaattaaagatggctgcgcccatgtaacatcactagcgaccggtgacctctttttcccccttgcctggctcctgtggtggcaggctgggcacgaggaccatgctgggccggagcctccgagaagtttctgcggcactgaaacaaggccaaattacaccaacagagctctgtcaaaaatgtctctctcttatcaagaagaccaagtttctaaatgcctacattactgtgtcagaagaggtggccttaaaacaagctgaagaatcagaaaagagatataagaatggacagtcacttggggatttagatggaattcctattgcagtaaaagacaatttcagcacttctggcattgagacaacatgtgcatcaaatatgctgaaaggttatataccaccttataatgctacagtagttcagaagttgttggatcagggagctctactaatgggaaaaacaaatttagatgagtttgctatgggatctgggagcacagatggtgtatttggaccagttaaaaacccctggagttattcaaaacaatatagagaaaagaggaagcagaatccccacagcgagaatgaagattcagactggctgataactggaggaagctcaggtgggagtgcagctgctgtatcggcgttcacatgctacgcggctttaggatcagatacaggaggatcgaccagaaatcctgctgcccactgtgggcttgttggtttcaaaccaagctatggcttagtttcccgtcatggtctcattcccctggtgaattcgatggatgtgccaggaatcttaaccagatgtgtggatgatgcagcaattgtgttgggtgcactggccggacctgaccccagggactctaccacagtacatgaacctattaataaaccattcatgcttcccagtttggcagatgtgagcaaactatgtataggaattccaaaggaatatcttgtaccggaattatcaagtgaagtacagtctctttggtccaaagctgctgacctctttgagtctgagggggccaaagtaattgaagtatcccttcctcacaccagttattcaattgtctgctaccatgtattgtgcacatcagaagtggcatcgaatatggcaagatttgatgggctacaatatggtcacagatgtgacattgatgtgtccactgaagccatgtatgctgcaaccagacgagaagggtttaatgatgtggtgagaggaagaattctctcaggaaactttttcttattaaaagaaaactatgaaaattattttgtcaaagcacagaaagtgagacgcctcattgctaatgactttgtaaatgcttttaactctggagtagatgtcttgctaactcccaccaccttgagtgaggcagtaccatacttggagttcatcaaagaggacaacagaacccgaagtgcccaggatgatatttttacacaagctgtaaatatggcaggattgccagcagtgagtatccctgttgcactctcaaaccaagggttgccaataggactgcagtttattggacgtgcgttttgtgaccagcagcttcttacagtagccaaatggtttgaaaaacaagtacagtttcctgttattcaacttcaagaactcatggatgattgttcagcagtccttgaaaatgaaaagttagcctctgtctctctaaaacagtaaacatatcttacaaattaaaatgacttttaggctgggtgcagtggctcacacctgtaatcccagcactttgggaggccaaggcgagcggatcatgaggtcagaagatctagaacagcctggtcaacatggtgaaaccccgtctctactaaaaatacaaaaattagccaggcttagtggcgggcatctgtagtcccagctactcaggaggctgaggcaggagaatcacttgaaccctggaggtggaggttgcagtgagccgagatcatgccactgcactgcactccagcctgggtgacaaagcaagactgtgtctcaaaataaataaataaaataaaataaaatgacgtacagagattctatattctagagagtcaaatggtcttgctcaattcttgtaattaggttcttgttaatacagtcattccatggaattactttttaaaattcctgtgacaattaataataaataacgtgtcagcatttagtaagcatccactaagtgtacaatacttctacaataacacaagatacctgttcctcaaagacaatgcattctgccataatgttcattaaagagtttacagtaaaaataagattagggataaacttctcaaaaattgtacatctgtgtaactaaagcactaacaaaaacatgaatagtccttctagaggtaacttggatagcctaggcaggcaacttatcatgtggtgaaggccgcctcaggggttgttaaaaatgcacagaaacaattgagtgcgattattggcttctgagcgctgagcagagcaggtggaagaggaactttgagcacaggaggaaatgcaaccagtcagggcccagaatcatgcaaatctcaggggtatgcctctctggggaggagctccacttgcagggactccttttatttccctaagaaagagctgaaatgactgagaactttcctttcctccttagagttacaattttacttctgctattccggagcccatgcctagaagccagaacaactccatgttacactgagttcatgctcctatttactgatcacaaatgagctcattaatgtcatcgaaacatttattgtaacctaacagaccatcacagattggaaacttggtagatagcagagcatggtattagtgaaaaaggttcaaaatacacaagtaacatacactctgaaaaacatgcagataatttgctgatgaagcagaagaggggatgcgcatggcaagaacttgccttaccccagattctctatatctcatggtttccttttcctcttgactgtctttacgagtgttttttatttgggaccctcgagcccagagatattaatggatatctgtattcaatatttgacaaaatctaatggaaaccatccatttactcatgataaggcttcatcactggatttctgtgtcttcactagaacaccattgtcatctcatattgatcaggtattttaatctagcacttacatattgttgataaatgaaagctgaattgttacttaataaattcactttgtttagtaaaaaaaaattgttttctaaatatgacgttcatgaagagaaaataatgagtcagaatcatctgcagaaccactggaatgtttcatcgtcacctgttagttttcataaacagttttctgtcctctctgagatcctcccgctcccaaatactcaacctgattaacttcacataaaagtcttatgtgccaggcttagtaatattcctatagattttgactctgaatccctgaaagaggaagaaatccatgagagaaaattgcattactttatagcaagaggaaaccgttttaagttttttaattgctcagacaccacaacatcctagatggaggaaaccattttagttgaaggagcaaatatgatgtcaaaagcaagtaaataaacaaaccgttgccccaatctgtttttatgtaatgaatttaaaaaaaaagagagagagagagagatgggctctccctgtgttgcccaggctagtctcaaactcctgggctcaagtgatctgcctccctcagcctcccaaagtgctgagattaaagacgtgagccaccacacctggccgaaataataatattcaatattatatattcaatgatattattcagtattcaatattatttcaaataatattaaatctcttgttcctgtatctctacatgagctgcactaataatttgaatctggaaattaaaaagtgaaacatttaccgttctcatatactgatacccaactaccatgaaatgatacctaatttgtttttcttttctcttcatttttactcttaatctagtaggtctcattttgccaagtcactgtctgggaatttaagtggcaaatactttctttgtctcagctaattaaactctaaaattattagcaacagaa

SEQ ID NO: 137664 - DNA, 2827 bp, Homo sapiens
  Payload ID: 6959
  Gene Symbol: QARS
  Gene Name: glutaminyl-tRNA synthetase
  Uniprot ID: P47897
  ENST ID: ENST00000306125
  CDS Start-End: 403-2730
cagggactcgcatttgcccccgaggacaattactatattgagatggagttaccagggctgaagtagaaaagtcagagcaaaaccacgcctgtgtcttcctcctgcctcagggacgaacaccttccttccaggtccgtggcaaatatctccaaaagccctgccgcctgccaacaccccttcaagttcccagttccacggaggcggaagcaaagcccccggaaaggccggtttgtccgccctgtgttgtttaaaggggatagacgaccttggagcgccccgccccctcccgccaaggaaggaccccattggctctccccggaggcttcactctcattggtcagcgagtgaatgccgacctgcagactggggcctaagtttcttttagtttccggtgtctctgcaatggcggctctagactccctgtcgctcttcactagcctcggcctgagcgagcagaaggcccgcgagacgctcaagaactcggctctgagcgcgcagctgcgcgaggccgctactcaggctcagcagaccctgggttccaccattgacaaagctaccgggatcctgttatatggcttggcctcccgactcagggatacccggcgtctctccttccttgtaagctacatagccagtaagaagatccacactgagccccagctaagcgctgcccttgagtatgtgcggagtcaccccttggaccccatcgacactgtggacttcgagcgggaatgtggcgtgggtgtcattgtgaccccagagcagattgaggaggctgtggaggctgctattaacaggcaccggccccagctcctggtggaacgttaccatttcaacatggggctgctgatgggagaggctcgggctgtgctgaagtgggcagatggcaaaatgatcaagaatgaagtggacatgcaggtcctccaccttctgggccccaagttggaggctgatctggagaagaagttcaaggtggcaaaagctcggctagaagaaacagaccggaggacggcaaaggatgtggtggagaatggcgagactgctgaccagaccctgtctctgatggagcagctccggggggaggcccttaagttccacaagcctggtgagaactacaagaccccaggctatgtggtcactccacacaccatgaatctactaaagcagcacctggagattactggtgggcaggtacgtacccggttcccgccagaacccaatggaatcctgcatattggacatgccaaagccatcaatttcaactttggctatgccaaggccaacaatggcatctgttttctgcgttttgatgacaccaaccctgagaaggaggaagcaaagttcttcacggccatctgtgacatggtagcctggctaggctacacaccttacaaagtcacatatgcgtctgactattttgaccagctatatgcgtgggctgtggagctcatccgcaggggtctggcttatgtgtgccaccagcgaggagaggagctcaaaggccataatactctgccttcaccctggagagaccgtcccatggaggagtcactgctgctctttgaggcaatgcgcaagggcaagttttcagagggcgaggccacactacggatgaagctggtgatggaggatggcaagatggaccctgtagcctatcgagtcaagtatacaccacaccaccgcacaggggacaaatggtgcatctatcccacctacgactacacacactgcctctgtgactccatcgagcacatcactcactcactctgcaccaaggaattccaggcccgacgctcttcctacttctggctttgcaatgcactggacgtctattgccctgtgcagtgggagtatggccgcctcaacctgcactatgctgttgtctctaagaggaagatcctccagcttgtagcaactggtgctgtgcgggactgggatgacccacggctctttacactcacggccctgcgacggcggggcttcccacctgaggccatcaacaacttctgtgcccgggtgggagtgactgtggcacaaaccacaatggagccacatcttctagaagcctgtgtgcgtgatgtgctgaatgacacagccccacgagccatggctgtgctggagtcactacgggtcatcatcaccaactttcctgctgccaagtccttggacatccaggtgcccaacttcccagctgatgagaccaaaggcttccatcaggttccctttgcacccattgtcttcattgagaggactgacttcaaggaggagccagagccaggatttaagcgcctggcttggggccagcctgtgggcctgaggcatacaggctacgtcattgagctgcagcatgttgtcaagggccccagtggttgtgtagagagtctggaggtgacctgcagacgggcagatgctggagagaagccaaaggcctttattcactgggtgtcacagcctttgatgtgtgaggttcgcctctatgagcgactattccagcacaagaaccctgaagatcctactgaggtgcctggtggatttttaagtgacctgaacctggcatcactacacgtggtggatgcagcattagtggactgctctgtggccctggcaaaacccttcgacaagttccagtttgagcgtcttggatatttctccgtggatccagacagccatcagggaaagcttgtctttaaccgaactgtcacactgaaggaagacccaggaaaggtgtgagctggaagcactgaacctacctcatcctcctggagggtgtggctaccctcgccaccccaaattccatgtcaataaagaacagctaaattctcctaga

SEQ ID NO: 137665 - DNA, 2399 bp, Homo sapiens
  Payload ID: 6959
  Gene Symbol: QARS
  Gene Name: glutaminyl-tRNA synthetase
  ENST ID: ENST00000430182
  CDS Start-End: 25-327
cttttagtttccggtgtctctgcaatggcggctctagactccctgtcgctcttcactagcctcggcctgagcgagcagaaggcccgcgagacgctcaagaactcggctctgagcgcgcagctgcgcgaggccgctactcaggctcagcagaccctgggttccaccattgacaaagctaccgggatcctgttatatggcttggcctcccgactcagggatacccggcgtctctccttccttctgcccttgagtatgtgcggagtcaccccttggaccccatcgacactgtggacttcgagcgggaatgtggcgtgggtgtcattgtgaccccagagcagattgaggaggctgtggaggctgctattaacaggcaccggccccagctcctggtggaacgttaccatttcaacatggggctgctgatgggagaggctcgggctgtgctgaagtgggcagatggcaaaatgatcaagaatgaagtggacatgcaggtcctccaccttctgggccccaagttggaggctgatctggagaagaagttcaaggtggcaaaagctcggctagaagaaacagaccggaggacggcaaaggatgtggtggagaatggcgagactgctgaccagaccctgtctctgatggagcagctccggggggaggcccttaagttccacaagcctggtgagaactacaagaccccaggctatgtggtcactccacacaccatgaatctactaaagcagcacctggagattactggtgggcaggtacgtacccggttcccgccagaacccaatggaatcctgcatattggacatgccaaagccatcaatttcaactttggctatgccaaggccaacaatggcatctgttttctgcgttttgatgacaccaaccctgagaaggaggaagcaaagttcttcacggccatctgtgacatggtagcctggctaggctacacaccttacaaagtcacatatgcgtctgactattttgaccagctatatgcgtgggctgtggagctcatccgcaggggtctggcttatgtgtgccaccagcgaggagaggagctcaaaggccataatactctgccttcaccctggagagaccgtcccatggaggagtcactgctgctctttgaggcaatgcgcaagggcaagttttcagagggcgaggccacactacggatgaagctggtgatggaggatggcaagatggaccctgtagcctatcgagtcaagtatacaccacaccaccgcacaggggacaaatggtgcatctatcccacctacgactacacacactgcctctgtgactccatcgagcacatcactcactcactctgcaccaaggaattccaggcccgacgctcttcctacttctggctttgcaatgcactggacgtctattgccctgtgcagtgggagtatggccgcctcaacctgcactatgctgttgtctctaagaggaagatcctccagcttgtagcaactggtgctgtgcgggactgggatgacccacggctctttacactcacggccctgcgacggcggggcttcccacctgaggccatcaacaacttctgtgcccgggtgggagtgactgtggcacaaaccacaatggagccacatcttctagaagcctgtgtgcgtgatgtgctgaatgacacagccccacgagccatggctgtgctggagtcactacgggtcatcatcaccaactttcctgctgccaagtccttggacatccaggtgcccaacttcccagctgatgagaccaaaggcttccatcaggttccctttgcacccattgtcttcattgagaggactgacttcaaggaggagccagagccaggatttaagcgcctggcttggggccagcctgtgggcctgaggcatacaggctacgtcattgagctgcagcatgttgtcaagggccccagtggttgtgtagagagtctggaggtgacctgcagacgggcagatgctggagagaagccaaaggcctttattcactgggtgtcacagcctttgatgtgtgaggttcgcctctatgagcgactattccagcacaagaaccctgaagatcctactgaggtgcctggtggatttttaagtgacctgaacctggcatcactacacgtggtggatgcagcattagtggactgctctgtggccctggcaaaacccttcgacaagttccagtttgagcgtcttggatatttctccgtggatccagacagccatcagggaaagcttgtctttaaccgaactgtcacactgaaggaagacccaggaaaggtgtgagctggaagcactgaacctacctcatcctcctggagggtgtggctaccctcgccaccccaaattccatgtcaataaagaacagctaaattctcctag

SEQ ID NO: 137666 - DNA, 2412 bp, Homo sapiens
  Payload ID: 6959
  Gene Symbol: QARS
  Gene Name: glutaminyl-tRNA synthetase
  Uniprot ID: P47897
  ENST ID: ENST00000414533
  CDS Start-End: 26-2320
tcttttagtttccggtgtctctgcaatggcggctctagactccctgtcgctcttcactagcctcggcctgagcgagcagaaggcccgcgagacgctcaagaactcggctctgagcgcgcagctgcgcgaggccgctactcaggctcagcagaccctgggttccaccattgacaaagctaccgggatcctgttatatggcttggcctcccgactcagggatacccggcgtctctccttccttgtaagctacatagccactgcccttgagtatgtgcggagtcaccccttggaccccatcgacactgtggacttcgagcgggaatgtggcgtgggtgtcattgtgaccccagagcagattgaggaggctgtggaggctgctattaacaggcaccggccccagctcctggtggaacgttaccatttcaacatggggctgctgatgggagaggctcgggctgtgctgaagtgggcagatggcaaaatgatcaagaatgaagtggacatgcaggtcctccaccttctgggccccaagttggaggctgatctggagaagaagttcaaggtggcaaaagctcggctagaagaaacagaccggaggacggcaaaggatgtggtggagaatggcgagactgctgaccagaccctgtctctgatggagcagctccggggggaggcccttaagttccacaagcctggtgagaactacaagaccccaggctatgtggtcactccacacaccatgaatctactaaagcagcacctggagattactggtgggcaggtacgtacccggttcccgccagaacccaatggaatcctgcatattggacatgccaaagccatcaatttcaactttggctatgccaaggccaacaatggcatctgttttctgcgttttgatgacaccaaccctgagaaggaggaagcaaagttcttcacggccatctgtgacatggtagcctggctaggctacacaccttacaaagtcacatatgcgtctgactattttgaccagctatatgcgtgggctgtggagctcatccgcaggggtctggcttatgtgtgccaccagcgaggagaggagctcaaaggccataatactctgccttcaccctggagagaccgtcccatggaggagtcactgctgctctttgaggcaatgcgcaagggcaagttttcagagggcgaggccacactacggatgaagctggtgatggaggatggcaagatggaccctgtagcctatcgagtcaagtatacaccacaccaccgcacaggggacaaatggtgcatctatcccacctacgactacacacactgcctctgtgactccatcgagcacatcactcactcactctgcaccaaggaattccaggcccgacgctcttcctacttctggctttgcaatgcactggacgtctattgccctgtgcagtgggagtatggccgcctcaacctgcactatgctgttgtctctaagaggaagatcctccagcttgtagcaactggtgctgtgcgggactgggatgacccacggctctttacactcacggccctgcgacggcggggcttcccacctgaggccatcaacaacttctgtgcccgggtgggagtgactgtggcacaaaccacaatggagccacatcttctagaagcctgtgtgcgtgatgtgctgaatgacacagccccacgagccatggctgtgctggagtcactacgggtcatcatcaccaactttcctgctgccaagtccttggacatccaggtgcccaacttcccagctgatgagaccaaaggcttccatcaggttccctttgcacccattgtcttcattgagaggactgacttcaaggaggagccagagccaggatttaagcgcctggcttggggccagcctgtgggcctgaggcatacaggctacgtcattgagctgcagcatgttgtcaagggccccagtggttgtgtagagagtctggaggtgacctgcagacgggcagatgctggagagaagccaaaggcctttattcactgggtgtcacagcctttgatgtgtgaggttcgcctctatgagcgactattccagcacaagaaccctgaagatcctactgaggtgcctggtggatttttaagtgacctgaacctggcatcactacacgtggtggatgcagcattagtggactgctctgtggccctggcaaaacccttcgacaagttccagtttgagcgtcttggatatttctccgtggatccagacagccatcagggaaagcttgtctttaaccgaactgtcacactgaaggaagacccaggaaaggtgtgagctggaagcactgaacctacctcatcctcctggagggtgtggctaccctcgccaccccaaattccatgtcaataaagaacagctaaattctc

SEQ ID NO: 137667 - DNA, 1044 bp, Homo sapiens
  Payload ID: 6959
  Gene Symbol: QARS
  Gene Name: glutaminyl-tRNA synthetase
  ENST ID: ENST00000452739
  CDS Start-End: 28-1044
tttcttttagtttccggtgtctctgcaatggcggctctagactccctgtcgctcttcactagcctcggcctgagcgagcagaaggcccgcgagacgctcaagaactcggctctgagcgcgcagctgcgcgaggccgctactcaggctcagcagaccctgggttccaccattgacaaagctaccgggatcctgttatatggcttggcctcccgactcagggatacccggcgtctctccttccttgtaagctacatagccagtaagaagatccacactgagccccagctaagcgggtggtggtgccagggcttaacttttcaggaggccagactatccttggagtttcatgagattaggaccctgtctgtccacttcttggagcagagatgccacaaactcacgggctctttcttctcagctgcccttgagtatgtgcggagtcaccccttggaccccatcgacactgtggacttcgagcgggaatgtggcgtgggtgtcattgtgaccccagagcagattgaggaggctgtggaggctgctattaacaggcaccggccccagctcctggtggaacgttaccatttcaacatggggctgctgatgggagaggctcgggctgtgctgaagtgggcagatggcaaaatgatcaagaatgaagtggacatgcaggtcctccaccttctgggccccaagttggaggctgatctggagaagaagttcaaggtggcaaaagctcggctagaagaaacagaccggaggacggcaaaggatgtggtggagaatggcgagactgctgaccagaccctgtctctgatggagcagctccggggggaggcccttaagttccacaagcctggtgagaactacaagaccccaggctatgtggtcactccacacaccatgaatctactaaagcagcacctggagattactggtgggcaggtacgtacccggttcccgccagaacccaatggaatcctgcatattggacatgccaaagccatcaatttcaactttggctatgccaaggccaacaatggcatc

SEQ ID NO: 137668 - DNA, 859 bp, Homo sapiens
  Payload ID: 6959
  Gene Symbol: QARS
  Gene Name: glutaminyl-tRNA synthetase
  ENST ID: ENST00000453392
  CDS Start-End: 1-762
cagtgggagtatggccgcctcaacctgcactatgctgttgtctctaagaggaagatcctccagcttgtagcaactggtgctgtgcgggactgggatgacccacggctctttacactcacggccctgcgacggcggggcttcccacctgaggccatcaacaacttctgtgcccgggtgggagtgactgtggcacaaaccacaatggagccacatcttctagaagcctgtgtgcgtgatgtgctgaatgacacagccccacgagccatggctgtgctggagtcactacgggtcatcatcaccaactttcctgctgccaagtccttggacatccaggtgcccaacttcccagctgatgagaccaaaggcttccatcaggttccctttgcacccattgtcttcattgagaggactgacttcaaggaggagccagagccaggatttaagcgcctggcttggggccagcctgtgggcctgaggcatacaggctacgtcattgagctgcagcatgttgtcaagggccccagtggttgtgtagagagtctggaggtgacctgcagacgggcagatgctggagagaagccaaaggcctttattcactgggtgtcacagcctttgatgtgtgaggttcgcctctatgagcgactattccagcacaagaaccctgaagatcctactgaggtgcctggtggatttttaagtgacctgaacctgcttgtctttaaccgaactgtcacactgaaggaagacccaggaaaggtgtgagctggaagcactgaacctacctcatcctcctggagggtgtggctaccctcgccaccccaaattccatgtcaataaagaacagctaaattctcctaga

SEQ ID NO: 137669 - DNA, 558 bp, Homo sapiens
  Payload ID: 6959
  Gene Symbol: QARS
  Gene Name: glutaminyl-tRNA synthetase
  ENST ID: ENST00000418549
  CDS Start-End: 25-327
cttttagtttccggtgtctctgcaatggcggctctagactccctgtcgctcttcactagcctcggcctgagcgagcagaaggcccgcgagacgctcaagaactcggctctgagcgcgcagctgcgcgaggccgctactcaggctcagcagaccctgggttccaccattgacaaagctaccgggatcctgttatatggcttggcctcccgactcagggatacccggcgtctctccttccttctgcccttgagtatgtgcggagtcaccccttggaccccatcgacactgtggacttcgagcgggaatgtggcgtgggtgtcattgtgaccccagagcagattgaggaggctgtggaggctgctattaacaggcaccggccccagctcctggtggaacgttaccatttcaacatggggctgctgatgggagaggctcgggctgtgctgaagtgggcagatggcaaaatgatcaagaatgaagtggacatgcaggaggcggaggttgcagtgagcggagactgtgccattgcattccagcctgggcaacatgagcaagact

SEQ ID NO: 137670 - DNA, 599 bp, Homo sapiens
  Payload ID: 6959
  Gene Symbol: QARS
  Gene Name: glutaminyl-tRNA synthetase
  ENST ID: ENST00000634802
  CDS Start-End: 25-228
cttttagtttccggtgtctctgcaatggcggctctagactccctgtcgctcttcactagcctcggcctgagcgagcagaaggcccgcgagacgctcaagaactcggctctgagcgcgcagctgcgcgaggccgctactcagctgcccttgagtatgtgcggagtcaccccttggaccccatcgacactgtggacttcgagcgggaatgtggcgtgggtgtcattgtgaccccagagcagattgaggaggctgtggaggctgctattaacaggcaccggccccagctcctggtggaacgttaccatttcaacatggggctgctgatgggagaggctcgggctgtgctgaagtgggcagatggcaaaatgatcaagaatgaagtggacatgcaggtcctccaccttctgggccccaagttggaggctgatctggagaagaagttcaaggtggcaaaagctcggctagaagaaacagaccggaggacggcaaaggatgtggtggagaatggcgagactgctgaccagaccctgtctctgatggagcagctccggggggaggcccttaagttccacaagcctggtgagaactacaagacccca

SEQ ID NO: 137671 - DNA, 582 bp, Homo sapiens
  Payload ID: 6959
  Gene Symbol: QARS
  Gene Name: glutaminyl-tRNA synthetase
  ENST ID: ENST00000635194
  CDS Start-End: 20-582
agtttccggtgtctctgcaatggcggctctagactccctgtcgctcttcactagcctcggcctgagcgagcagaaggcccgcgagacgctcaagaactcggctctgagcgcgcagctgcgcgaggccgctactcagcagaccctgggttccaccattgacaaagctaccgggatcctgttatatggcttggcctcccgactcagggatacccggcgtctctccttccttgtaagctacatagccagtaagaagatccacactgagccccagctaagcgctgcccttgagtatgtgcggagtcaccccttggaccccatcgacactgtggacttcgagcgggaatgtggcgtgggtgtcattgtgaccccagagcagattgaggaggctgtggaggctgctattaacaggcaccggccccagctcctggtggaacgttaccatttcaacatggggctgctgatgggagaggctcgggctgtgctgaagtgggcagatggcaaaatgatcaagaatgaagtggacatgcaggtcctccaccttctgggccccaagttggaggctgatctggagaagaagttcaa

SEQ ID NO: 137672 - DNA, 280 bp, Homo sapiens
  Payload ID: 6959
  Gene Symbol: QARS
  Gene Name: glutaminyl-tRNA synthetase
  ENST ID: ENST00000475599
  CDS Start-End: 1-81
cagggtggtgtgaagtggtgcaatcatagctcactgtggcctcaaactactgggctcaagctattctcctgccttagctgagactacatgtgcacactaccatgcctggctaattttaaaactttttgtagagcttgtctttaaccgaactgtcacactgaaggaagacccaggaaaggtgtgagctggaagcactgaacctacctcatcctcctggagggtgtggctaccctcgccaccccaaattccatgtcaataaagaacagctaaattctcctag

SEQ ID NO: 137673 - DNA, 2362 bp, Homo sapiens
  Payload ID: 6959
  Gene Symbol: QARS
  Gene Name: glutaminyl-tRNA synthetase
  ENST ID: ENST00000464962
  CDS Start-End: 380-2272
tttgtcccgccctttcctctcactgagcgcggggcttctctcttgacccctctgacctcaggctcagcagaccctgggttccaccattgacaaagctaccgggatcctgttatatggcttggcctcccgactcagggatacccggcgtctctccttccttgtaagctacatagccagtaagaagatccacactgagccccagctaagcgctgcccttgagtatgtgcggagtcaccccttggaccccatcgacactgtggacttcgagcgggaatgtggcgtgggtgtcattgtgaccccagagcagattgaggaggctgtggaggctgctattaacaggcaccggccccagctcctggtggaacgttaccatttcaacatggggctgctgatgggagaggctcgggctgtgctgaagtgggcagatggcaaaatgatcaagaatgaagtggacatgcaggtcctccaccttctgggccccaagttggaggctgatctggagaagaagttcaaggtggcaaaagctcggctagaagaaacagaccggaggacggcaaaggatgtggtggagaatggcgagactgctgaccagaccctgtctctgatggagcagctccggggggaggcccttaagttccacaagcctggtgagaactacaagaccccaggctatgtggtcactccacacaccatgaatctactaaagcagcacctggagattactggtgggcaggtacgtacccggttcccgccagaacccaatggaatcctgcatattggacatgccaaagccatcaatttcaactttggctatgccaaggccaacaatggcatctgttttctgcgttttgatgacaccaaccctgagaaggaggaagcaaagttcttcacggccatctgtgacatggtagcctggctaggctacacaccttacaaagtcacatatgcgtctgactattttgaccagctatatgcgtgggctgtggagctcatccgcaggggtctggcttatgtgtgccaccagcgaggagaggagctcaaaggccataatactctgccttcaccctggagagaccgtcccatggaggagtcactgctgctctttgaggcaatgcgcaagggcaagttttcagagggcgaggccacactacggatgaagctggtgatggaggatggcaagatggaccctgtagcctatcgagtcaagtatacaccacaccaccgcacaggggacaaatggtgcatctatcccacctacgactacacacactgcctctgtgactccatcgagcacatcactcactcactctgcaccaaggaattccaggcccgacgctcttcctacttctggctttgcaatgcactggacgtctattgccctgtgcagtgggagtatggccgcctcaacctgcactatgctgttgtctctaagaggaagatcctccagcttgtagcaactggtgctgtgcgggactgggatgacccacggctctttacactcacggccctgcgacggcggggcttcccacctgaggccatcaacaacttctgtgcccgggtgggagtgactgtggcacaaaccacaatggagccacatcttctagaagcctgtgtgcgtgatgtgctgaatgacacagccccacgagccatggctgtgctggagtcactacgggtcatcatcaccaactttcctgctgccaagtccttggacatccaggtgcccaacttcccagctgatgagaccaaaggcttccatcaggttccctttgcacccattgtcttcattgagaggactgacttcaaggaggagccagagccaggatttaagcgcctggcttggggccagcctgtgggcctgaggcatacaggctacgtcattgagctgcagcatgttgtcaagggccccagtggttgtgtagagagtctggaggtgacctgcagacgggcagatgctggagagaagccaaaggcctttattcactgggtgtcacagcctttgatgtgtgaggttcgcctctatgagcgactattccagcacaagaaccctgaagatcctactgaggtgcctggtggatttttaagtgacctgaacctggcatcactacacgtggtggatgcagcattagtggactgctctgtggccctggcaaaacccttcgacaagttccagtttgagcgtcttggatatttctccgtggatccagacagccatcagggaaagcttgtctttaaccgaactgtcacactgaaggaagacccaggaaaggtgtgagctggaagcactgaacctacctcatcctcctggagggtgtggctaccctcgccaccccaaattccatgtcaataaagaacagctaaattc

SEQ ID NO: 137674 - DNA, 732 bp, Homo sapiens
  Payload ID: 6959
  Gene Symbol: QARS
  Gene Name: glutaminyl-tRNA synthetase
  ENST ID: ENST00000634527
  CDS Start-End: 445-732
actcgcatttgcccccgaggacaattactatattgagatggagttaccagggctgaagtagaaaagtcagagcaaaaccacgcctgtgtcttcctcctgcctcagggacgaacaccttccttccaggctcagcagaccctgggttccaccattgacaaagctaccgggatcctgttatatggcttggcctcccgactcagggatacccggcgtctctccttccttgtaagctacatagccagtaagaagatccacactgagccccagctaagcgctgcccttgagtatgtgcggagtcaccccttggaccccatcgacactgtggacttcgagcgggaatgtggcgtgggtgtcattgtgaccccagagcagattgaggaggctgtggaggctgctattaacaggcaccggccccagctcctggtggaacgttaccatttcaacatggggctgctgatgggagaggctcgggctgtgctgaagtgggcagatggcaaaatgatcaagaatgaagtggacatgcaggtcctccaccttctgggccccaagttggaggctgatctggagaagaagttcaaggtggcaaaagctcggctagaagaaacagaccggaggacggcaaaggatgtggtggagaatggcgagactgctgaccagaccctgtctctgatggagcagctccggggggaggcccttaagttccacaagcctggtgagaactacaagacccca

SEQ ID NO: 137675 - DNA, 574 bp, Homo sapiens
  Payload ID: 6959
  Gene Symbol: QARS
  Gene Name: glutaminyl-tRNA synthetase
  ENST ID: ENST00000635292
  CDS Start-End: 1-574
accctgggttccaccattgacaaagctaccgggatcctgttatatggcttggcctcccgactcagggatacccggcgtctctccttccttgtaagctacatagccagtaagaagatccacactgagccccagctaagcgctgcccttgagtatgtgcggagtcaccccttggaccccatcgacactgtggacttcgagcgggaatgtggcgtgggtgtcattgtgaccccagagcagattgaggaggctgtggaggctgctattaacaggcaccggccccagctcctggtggaacgttaccatttcaacatggggctgctgatggaggtggggggagtactcttttttgcctttctgcagctccttgtgcctatgcttctaggagaggctcgggctgtgctgaagtgggcagatggcaaaatgatcaagaatgaagtggacatgcaggtcctccaccttctgggccccaagttggaggctgatctggagaagaagttcaaggtggcaaaagctcggctagaagaaacagaccggaggacggcaaaggatgtggtggagaatggcgagactgctg

SEQ ID NO: 137676 - DNA, 544 bp, Homo sapiens
  Payload ID: 6959
  Gene Symbol: QARS
  Gene Name: glutaminyl-tRNA synthetase
  ENST ID: ENST00000634602
  CDS Start-End: 25-544
cttttagtttccggtgtctctgcaatggcggctctagactccctgtcgctcttcactagcctcggcctgagcgagcagaaggcccgcgagacgctcaagaactcggctctgagcgcgcagctgcgcgaggccgctactcaggctcagcagaccctgggttccaccattgacaaagctaccgggatcctgttatatggcttggcctcccgactcagggatacccggcgtctctccttccttgtaagctacatagccagtaagaagatccacactgagccccagctaagcgctgcccttgagtatgtgcggagtcaccccttggaccccatcgacactgtggacttcgagcgggaatgtggcgtgggtgtcattgtgaccccagagcagattgaggaggctgtggaggctgctattaacaggcaccggccccagctcctggtggaacgttaccatttcaacatggggctgctgatgggagaggctcgggctgtgctgaagtgggcagatggcgagactgctgaccagaccctgtctctgatggagc

SEQ ID NO: 137677 - DNA, 582 bp, Homo sapiens
  Payload ID: 6959
  Gene Symbol: QARS
  Gene Name: glutaminyl-tRNA synthetase
  ENST ID: ENST00000634432
  CDS Start-End: 1-582
ttttgaccagctatatgcgtgggctgtggagctcatccgcaggggtctggcttatgtgtgccaccagcgaggagaggagctcaaaggccataatactctgccttcaccctggagagaccgtcccatggaggagtcactgctgctctttgaggcaatgcgcaagggcaagttttcagagggcgaggccacactacggatgaagctggtgatggaggatggcaagatggaccctgtagcctatcgagtcaagtgcatctatcccacctacgactacacacactgcctctgtgactccatcgagcacatcactcactcactctgcaccaaggaattccaggcccgacgctcttcctacttctggctttgcaatgcactggacgtctattgccctgtgcagtgggagtatggccgcctcaacctgcactatgctgttgtctctaagaggaagatcctccagcttgtagcaactggtgctgtgcgggactgggatgacccacggctctttacactcacggccctgcgacggcggggcttcccacctgaggccatcaacaacttctgtgcccgggtgggagtgactgt

SEQ ID NO: 137678 - DNA, 1053 bp, Homo sapiens
  Payload ID: 6959
  Gene Symbol: QARS
  Gene Name: glutaminyl-tRNA synthetase
  ENST ID: ENST00000635443
  CDS Start-End: 28-1053
tttcttttagtttccggtgtctctgcaatggcggctctagactccctgtcgctcttcactagcctcggcctgagcgagcagaaggcccgcgagacgctcaagaactcggctctgagcgcgcagctgcgcgaggccgctactcaggctcagcagaccctgggttccaccattgacaaagctaccgggatcctgttatatggcttggcctcccgactcagggatacccggcgtctctccttccttgtaagctacatagccagtaagaagatccacactgagccccagctaagcgctgcccttgagtatgtgcggagtcaccccttggaccccatcgacactgtggacttcgagcgggaatgtggcgtgggtgtcattgtgaccccagagcagattgaggaggctgtggaggctgctattaacaggcaccggccccagctcctggtggaacgttaccatttcaacatggggctgctgatgggagaggctcgggctgtgctgaagtgggcagatggcaaaatgatcaagaatgaagtggacatgcaggtcctccaccttctgggccccaagttggaggctgatctggagaagaagttcaaggtggcaaaagctcggctagaagaaacagaccggaggacggcaaaggatgtggtggagaatggcgagactgctgaccagaccctgtctctgatggagcagctccggggggaggcccttaagttccacaagcctggtgagaactacaagaccccaggctatgtggtcactccacacaccatgaatctactaaagcagcacctggagattactggtgggcaggccaacaatggcatctgttttctgcgttttgatgacaccaaccctgagaaggaggaagcaaagttcttcacggccatctgtgacatggtagcctggctaggctacacaccttacaaagtcacatatgcgtctgactattttgaccagctatatgcgtgggctgtggagctcatccgcaggggtctggcttatgtgtgccaccagcgaggagaggagctcaaaggccataatactctg

SEQ ID NO: 137679 - DNA, 1023 bp, Homo sapiens
  Payload ID: 6959
  Gene Symbol: QARS
  Gene Name: glutaminyl-tRNA synthetase
  ENST ID: ENST00000494767
  CDS Start-End: 26-550
tcttttagtttccggtgtctctgcaatggcggctctagactccctgtcgctcttcactagcctcggcctgagcgagcagaaggcccgcgagacgctcaagaactcggctctgagcgcgcagctgcgcgaggccgctactcaggctcagcagaccctgggttccaccattgacaaagctaccgggatcctgttatatggcttggcctcccgactcagggatacccggcgtctctccttccttgtaagctacatagccagtaagaagatccacactgagccccagctaagcgctgcccttgagtatgtgcggagtcaccccttggaccccatcgacactgtggacttcgagcgggaatgtggcgtgggtgtcattgtgaccccagagcagattgaggaggctgtggaggctgctattaacaggcaccggccccagctcctggtggaacgttaccatttcaacatggggctgctgatggctccttgtgcctatgcttctaggagaggctcgggctgtgctgaagtgggcagatggcaaaatgatcaagaatgaagtggacatgcaggtcctccaccttctgggccccaagttggaggctgatctggagaagaagttcaaggtggcaaaagctcggctagaagaaacagaccggaggacggcaaaggatgtggtggagaatggcgagactgctgaccagaccctgtctctgatggagcagctccggggggaggcccttaagttccacaagcctggtgagaactacaagaccccaggctatgtggtcactccacacaccatgaatctactaaagcagcacctggagattactggtgggcaggtacgtacccggttcccgccagaacccaatggaatcctgcatattggacatgccaaagccatcaatttcaactttggctatgccaaggccaacaatggcatctgttttctgcgttttgatgacaccaaccctgagaaggaggaagcaaagttcttcacggccatctgtgacatggtagcctggctag

SEQ ID NO: 137680 - DNA, 643 bp, Homo sapiens
  Payload ID: 6959
  Gene Symbol: QARS
  Gene Name: glutaminyl-tRNA synthetase
  ENST ID: ENST00000634473
  CDS Start-End: 1-405
gccaagtccttggacatccaggtgcccaacttcccagctgatgagaccaaaggcttccatcaggttccctttgcacccattgtcttcattgagaggactgacttcaaggaggagccagagccaggatttaagcgcctggcttggggccagcctgtgggcctgaggcatacaggctacgtcattgagctgcagcatgttgtcaagggccccagtggttgtgtagagagtctggaggtgacctgcagacgggcagatgctggagagaagccaaaggcctttattcactgggtgtcacagcctttgatgtgtgaggttcgcctctatgagcgactattccagcacaagaaccctgaagatcctactgaggtgcctggtggatttttaagtgacctgaacctgcattagtggactgctctgtggccctggcaaaacccttcgacaagttccagtttgagcgtcttggatatttctccgtggatccagacagccatcagggaaagcttgtctttaaccgaactgtcacactgaaggaagacccaggaaaggtgtgagctggaagcactgaacctacctcatcctcctggagggtgtggctaccctcgccaccccaaattccatgtcaataaagaacagctaaattctc

SEQ ID NO: 137681 - DNA, 486 bp, Homo sapiens
  Payload ID: 6959
  Gene Symbol: QARS
  Gene Name: glutaminyl-tRNA synthetase
  ENST ID: ENST00000634336
  CDS Start-End: 1-250
gccagagccaggatttaagcgcctggcttggggccagcctgtgggcctgaggcatacaggctacgtcattgagctgcagcatgttgtcaagggccccagtggttgtgtagagagtctggaggtgacctgcagacgggcagatgctggagagaagccaaaggcctttattcactgggtgtcacagcctttgatgtgtgaggttcgcctctatgagcgactgcatcactacacgtggtggatgcagcattagtggactgctctgtggccctggcaaaacccttcgacaagttccagtttgagcgtcttggatatttctccgtggatccagacagccatcagggaaagcttgtctttaaccgaactgtcacactgaaggaagacccaggaaaggtgtgagctggaagcactgaacctacctcatcctcctggagggtgtggctaccctcgccaccccaaattccatgtcaataaagaacagctaaattc

SEQ ID NO: 137682 - DNA, 568 bp, Homo sapiens
  Payload ID: 6959
  Gene Symbol: QARS
  Gene Name: glutaminyl-tRNA synthetase
  ENST ID: ENST00000635494
  CDS Start-End: 27-329
ttcttttagtttccggtgtctctgcaatggcggctctagactccctgtcgctcttcactagcctcggcctgagcgagcagaaggcccgcgagacgctcaagaactcggctctgagcgcgcagctgcgcgaggccgctactcaggctcagcagaccctgggttccaccattgacaaagctaccgggatcctgttatatggcttggcctcccgactcagggatacccggcgtctctccttccttctgcccttgagtatgtgcggagtcaccccttggaccccatcgacactgtggacttcgagcgggaatgtggcgtgggtgtcattgtgaccccagagcagattgaggaggctgtggaggctgctattaacaggcaccggccccagctcctggtggaacgttaccatttcaacatggggctgctgatgggtgagcagggcctggaacggggctatattgttctctctggtcatgccttttcttctgggcacgagtgagaaggaggagaggctcgggctgtgctgaagtgggcagatggcaaaatgatcaagaatgaagtggacatgcag

SEQ ID NO: 137683 - DNA, 907 bp, Homo sapiens
  Payload ID: 6959
  Gene Symbol: QARS
  Gene Name: glutaminyl-tRNA synthetase
  ENST ID: ENST00000635541
  CDS Start-End: 387-907
actgagcgcggggcttctctcttgacccctctgacctcaggctcagcagaccctgggttccaccattgacaaagctaccgggatcctgttatatggcttggcctcccgactcagggatacccggcgtctctccttccttgtaagctacatagccagtaagaagatccacactgagccccagctaagcgctgcccttgagtatgtgcggagtcaccccttggaccccatcgacactgtggacttcgagcgggaatgtggcgtgggtgtcattgtgaccccagagcagattgaggaggctgtggaggctgctattaacaggcaccggccccagctcctggtggaacgttaccatttcaacatggggctgctgatggctccttgtgcctatgcttctaggagaggctcgggctgtgctgaagtgggcagatggcaaaatgatcaagaatgaagtggacatgcaggtcctccaccttctgggccccaagttggaggctgatctggagaagaagttcaaggtggcaaaagctcggctagaagaaacagaccggaggacggcaaaggatgtggtggagaatggcgagactgctgaccagaccctgtctctgatggagcagctccggggggaggcccttaagttccacaagcctggtgagaactacaagaccccaggctatgtggtcactccacacaccatgaatctactaaagcagcacctggagattactggtgggcaggtacgtacccggttcccgccagaacccaatggaatcctgcatattggacatgccaaagccatcaatttcaactttggctatgccaaggccaacaatggcatctgttttctgcgttttgatgacaccaaccctgagaaggaggaagcaaagttcttcacggccatctgtgacat

SEQ ID NO: 137684 - DNA, 451 bp, Homo sapiens
  Payload ID: 6959
  Gene Symbol: QARS
  Gene Name: glutaminyl-tRNA synthetase
  ENST ID: ENST00000487495
  CDS Start-End: 1-228
gcatcactacacgtggtggatgcagcattagtggactgctctgtggccctggcaaaacccttcgacaagttccagtttgagcgtcttggatatttctccgtggatccagacagccatcagggaaagagacggggtcttactcttgcccagggtggtgtgaagtggtgcaatcatagctcactgtggcctcaaactactgggctcaagctattctcctgccttagctgagactacatgtgcacactaccatgcctggctaattttaaaactttttgtagaggcaagttctcactatgttgcccagcttgtctttaaccgaactgtcacactgaaggaagacccaggaaaggtgtgagctggaagcactgaacctacctcatcctcctggagggtgtggctaccctcgccaccccaaattccatgtcaataaagaacagctaaattctcctag

SEQ ID NO: 137685 - DNA, 570 bp, Homo sapiens
  Payload ID: 6959
  Gene Symbol: QARS
  Gene Name: glutaminyl-tRNA synthetase
  ENST ID: ENST00000635052
  CDS Start-End: 25-327
cttttagtttccggtgtctctgcaatggcggctctagactccctgtcgctcttcactagcctcggcctgagcgagcagaaggcccgcgagacgctcaagaactcggctctgagcgcgcagctgcgcgaggccgctactcaggctcagcagaccctgggttccaccattgacaaagctaccgggatcctgttatatggcttggcctcccgactcagggatacccggcgtctctccttccttctgcccttgagtatgtgcggagtcaccccttggaccccatcgacactgtggacttcgagcgggaatgtggcgtgggtgtcattgtgaccccagagcagattgaggaggctgtggaggctgctattaacaggcaccggccccagctcctggtggaacgttaccatttcaacatggggctgctgatggctccttgtgcctatgcttctaggagaggctcgggctgtgctgaagtgggcagatggcaaaatgatcaagaatgaagtggacatgcaggtcctccaccttctgggccccaagttggaggctgatctggagaagaagttcaaggtg

SEQ ID NO: 137686 - DNA, 334 bp, Homo sapiens
  Payload ID: 6959
  Gene Symbol: QARS
  Gene Name: glutaminyl-tRNA synthetase
  ENST ID: ENST00000466179
  CDS Start-End: 1-276
tccttggacatccaggtgcccaacttcccagctgatgagaccaaaggcttccatcaggttccctttgcacccattgtcttcattgagaggactgacttcaaggaggagccagagccaggatttaagcgcctggcttggggccagcctgtgggcctgaggcatacaggctacgtcattgagctgcagcatgttgtcaaggtgagagccagctgcagccttcctactgcagtgcctgctggggccaagatcttgtctttaaccgaactgtcacactgaaggaagacccaggaaaggtgtgagctggaagcactgaacctacctcatcctcctggag

SEQ ID NO: 137687 - DNA, 578 bp, Homo sapiens
  Payload ID: 6959
  Gene Symbol: QARS
  Gene Name: glutaminyl-tRNA synthetase
  ENST ID: ENST00000635231
  CDS Start-End: 31-578
aagtttcttttagtttccggtgtctctgcaatggcggctctagactccctgtcgctcttcactagcctcggcctgagcgagcagaaggcccgcgagacgctcaagaactcggctcagcagaccctgggttccaccattgacaaagctaccgggatcctgttatatggcttggcctcccgactcagggatacccggcgtctctccttccttgtaagctacatagccagtaagaagatccacactgagccccagctaagcgctgcccttgagtatgtgcggagtcaccccttggaccccatcgacactgtggacttcgagcgggaatgtggcgtgggtgtcattgtgaccccagagcagattgaggaggctgtggaggctgctattaacaggcaccggccccagctcctggtggaacgttaccatttcaacatggggctgctgatgggagaggctcgggctgtgctgaagtgggcagatggcaaaatgatcaagaatgaagtggacatgcaggtcctccaccttctgggccccaagttggaggctgatctggagaagaagttcaaggtggcaaaagctcg

SEQ ID NO: 137688 - DNA, 701 bp, Homo sapiens
  Payload ID: 6959
  Gene Symbol: QARS
  Gene Name: glutaminyl-tRNA synthetase
  ENST ID: ENST00000635622
  CDS Start-End: 496-701
agaaaagtcagagcaaaaccacgcctgtgtcttcctcctgcctcagggacgaacaccttccttccagcctcggcctgagcgagcagaaggcccgcgagacgctcaagaactcggctctgagcgcgcagctgcgcgaggccgctactcaggctcagcagaccctgggttccaccattgacaaagctaccgggatcctgttatatggcttggcctcccgactcagggatacccggcgtctctccttccttgtaagctacatagccagtaagaagatccacactgagccccagctaagcgctgcccttgagtatgtgcggagtcaccccttggaccccatcgacactgtggacttcgagcgggaatgtggcgtgggtgtcattgtgaccccagagcagattgaggaggctgtggaggctgctattaacaggcaccggccccagctcctggtggaacgttaccatttcaacatggggctgctgatggctccttgtgcctatgcttctaggagaggctcgggctgtgctgaagtgggcagatggcaaaatgatcaagaatgaagtggacatgcaggtcctccaccttctgggccccaagttggaggctgatctggagaagaagttcaaggtggcaaaagctcggctagaagaaacagaccggaggacggcaaaggatgtggtggagaatggcgagactgctgacca

SEQ ID NO: 137689 - DNA, 6943 bp, Homo sapiens
  Payload ID: 6960
  Gene Symbol: ENPEP
  Gene Name: glutamyl aminopeptidase (aminopeptidase A)
  Uniprot ID: Q07075
  ENST ID: ENST00000265162
  CDS Start-End: 343-3216
gttttatatttaactcgctgcagtgcaggaggggtaggggtggagatgcgtcgtttataaggggagctgtgacaatcttcttgccagccctcttcctcccactcggctcctcttacggagtcctcattccaccccccttgtttccgcattcatcctgagtggctggtgggaacgtgaaaagggagaggaaaaggcgcaagaagccagagagaggggtgtgggaaaagcgaaaacaggctgccaaatcaggggattccttccaatttaaaaaggaagtctgctgacgttagttagttaaatttaacatctttttatgtgtaacacttgactttggaagcaaaaatgaactttgcggagagagagggctctaagagatactgcattcaaacgaaacatgtggccattctctgtgcggtggtggtgggtgtaggattaatagtgggacttgccgtgggcttgaccagatcgtgtgactccagcggggacggcgggccgggcactgcgccagctccttcccacctgccttcttccacggccagcccctcaggtcctcctgcccaggaccaggacatctgcccggccagtgaggatgagagcggacagtggaaaaactttcgactgccggacttcgtcaacccagtccactacgacctgcacgtgaagcccctgttggaggaggacacctacacgggcaccgtgagcatctccatcaacctgagcgctcccacccggtacctgtggctgcacctccgggagaccaggatcacccggctcccggagctgaagaggccctctggggaccaggtgcaagtccggaggtgtttcgagtacaaaaagcaggagtacgtggtggtcgaggcggaggaagagcttacccccagcagtggagatggcctgtatctcctgaccatggagttcgccggctggctgaacggctccctcgtgggattttatagaaccacctacacggagaacggacaagtcaagagcatagtggccaccgatcatgaaccaacagatgccaggaaatcttttccttgttttgatgagcccaacaaaaaggcaacttatacaatatctatcacccatcccaaagaatacggagcactttcaaatatgccagtggcgaaagaagagtcagtggatgataaatggactcgaacaacttttgagaagtctgtccccatgagcacgtacctggtgtgctttgctgtacatcaatttgactctgtaaagagaatatcaaatagtggaaaacctcttacaatttatgtccagccagagcaaaagcacacagccgaatatgctgcaaacataactaaaagtgtgtttgattattttgaagaatactttgctatgaattattctcttcctaaattagataaaatcgctattccagattttggcactggtgccatggagaactggggactcatcacgtacagagaaacgaacctgctttatgaccctaaggaatcagcctcatcaaaccaacagagggtggccactgtggttgcccatgaacttgtgcatcagtggtttggaaatattgtgaccatggactggtgggaagacttgtggctaaatgaaggatttgcttctttctttgagtttctgggagtaaaccatgcagaaacagactggcaaatgcgtgaccaaatgttacttgaagatgtattacctgttcaagaggatgattctttgatgtcttcgcatccaattattgtgactgtgacaacccctgatgaaataacatctgtttttgatggaatatcctatagcaagggatcttctattttgagaatgcttgaagactggataaaaccagagaattttcaaaaaggatgtcagatgtacttggaaaaataccaattcaagaatgcaaaaacttctgatttttgggcagcactggaagaggcaagtaggctaccagtgaaagaagtaatggacacctggaccagacagatgggttatcctgtgcttaacgtgaacggtgtcaagaacatcacacagaaacgctttttgttggacccaagagctaacccttctcagcccccttcagatcttggttatacatggaatatcccagttaaatggactgaagataatataacaagcagtgtgttatttaataggtcagaaaaagaaggaatcactttgaactcctctaatcctagtggaaatgcttttctcaaaataaacccagatcatattgggttttatcgtgtaaattatgaagtagcaacttgggactcgatagctacagcgctctccttgaaccacaagacattttcttcagcagatcgtgcaagtcttattgatgatgcttttgccttggcaagagctcaacttctagattataaggtggctttgaacttgaccaagtatctcaaaagggaagagaattttttaccatggcagagagtaatttcagctgtaacctacatcattagcatgtttgaagatgataaagagctatatcctatgattgaggaatacttccaaggtcaagtgaagcctattgcagattctctgggatggaatgatgctggagaccatgtcacaaagttactccgttcctccgtgttagggtttgcgtgcaagatgggagacagagaagccttgaacaatgcttcctcgttatttgagcagtggctaaatgggactgtaagccttcccgtaaatctcaggcttctggtgtatcggtatgggatgcagaactctggcaatgagatttcatggaactacactcttgagcaataccagaaaacttcattagctcaagaaaaagaaaaactgctgtatggattagcatcagtgaagaacgttactcttttgtcaaggtatttggatttgctcaaggacacgaaccttattaaaactcaggatgtgtttacagtcattcgatatatctcatataacagctatgggaagaacatggcctggaattggatacaactcaactgggactatctagtcaacagatatacactcaataacagaaaccttggccgaattgtcacaatagcagagccattcaacactgaactgcaactgtggcagatggagagcttttttgcaaaatatccacaagctggagcaggagaaaaacctagggaacaagtgctggaaacagtgaaaaacaatatagagtggctaaaacaacatagaaacaccatcagagaatggttttttaatttacttgagagtggttaatgtattcaaatgttagagtttaattttgtgaatctattgtttctcctctgaagcatttggtggcctaatttacaagcacgatggagagagccttataaacagataatgcttttactaagcactgtgtttatatgtcttgcaaagcctttaaattgttcctctttgtttatgaagaaagatactaatagagtacttaatatactcagggattccttctaagtgtacttcataagatattctttacaaactgaagataatgaaatagttattttaatacctttaaatatcattctttgtatcttaaatctgtgaagtagaacaatttggtcttagctttacattttcagtaccaaagaaacaccacttaatcttctctcttgattgatttttaaagtttaaataccagtacttgagggaccaatattaccatcttaatctttattttattattcagaattatacagacctaatatcattttattcacatatgtcttactactttaaatcctaccaaagtaacctgggcttaagttttacttgaggatcatatgaattagccaaaagaatggctgactgttgcctttgctcttataaaatcaataagagaactctcctctttttttaaaaataaatctaaatgattatcttgaaaaagtattgttttccagtgtcacttgactcttgaataaaaataactgcagtgttccccaaataatttaacacattgcaaatatgattcaagaatctggcctttttcatgcttggtactctcttctcttgctccattccttacaaagctccttcaaatatgctatgaaattagagggaacatagtgcttaactctgctccatggattttagaggaaaaaagctaaataattggaaactgttcaggaaagagagaaggcagattatttcttaaaactaaatggaattagaatttagctttgacctcacctagcaatctaagtgtgaaaatggggagacctgtgggcatccccagcatgactctgcatatctgagcatatatctccttatagatcaattttatgtataaacccttagatcctaatccatacagaatagcactgatcaaatttaaatgcatgacttgattaaagacatcaatttcatagaagctggtggcaagaatatgtttaatatggcacttgatacctcctagatccataatgtaagtccaataggcagaaaagatggtaagttactatgtttcaatctgctatatctagaaaatctaaatttatttggaactttcaaaaatgtaaggtaatttagaatcggcttgatgagaattgaagcatatggaaacaaaaccttagctttaactttatttatacaataatgtgccctaatcatgtactctgaaactttataaactttcctgttgctgtttcttaattatcacttctcaatccgtacagccaaactagtaaattcaaatgtagactgggttgtgggtggcagatatagaagaagaaatttccagaccaaaaaatattaaatattattttaaattatttcagaagcaaaaacatattaacatcataacttaccagaaaaaccccactatcctcataagattaacttaaaattctgaccacaatcagaaccagcacttgaagtctatgtattgtttcaagtaggacatattatgaggtgagatggtttatccttctgttttatgaaattaatacattttaaaagaaaaatgttagtttaagggggtggtaaataaaacagatttcaacttgcctacaagacattctatttcatgccttttccttttgttgttctatttcattctattttaagcattaaaactgagaacaaattgtttacttcttttcactccacacgcgaaagagttgtatgtactttgtcagaataagtcttctagaccatcaggtccttctcaaacaacacctgttttttaaaaggctgatgcctaatagatagatctatgccaagcacagtttattactttgcttgcttggttttgcacagtattcacaggggacaaaaaatttaatatgatgtttccaaaattaagccacagtaaatttaaataattaattttaattgaaaaaaagtaaccatttaatttcaagaattaactggaaaatatgggaagcaaggtcatgtagcaaaaagcaaggccagtattactgcctcccctctaggcagcccactcctgtattccagatcattgctatgtacccacataattataaattaggagtttaaataataaaacatagacgtaaaactgacaggcaagggaggtttgggaaacaggggtgagatgtatacctgggttgaaggtaatgatactcctacagcttaccctccaagttggtgaagtgttagtccaaaagtagaaacaacagagtaggggcaaaaatctagaacaataattctcaaagggaattgggggatgagaaggaagtagaaaagaggggattcaaattaccagtggtgctttctaaaacacggttaggtaatcatcatcatcagactttcctttttttttcaagcatttttataaacactagcactccacataacattaatttttacaaaacccccttaaagtagatactgttattgttcttattttagagtggataaattgagatggagaagttatagaacttgcacaaggctacaaaagttgtatttggcaccagccagtatttgaacccaggcagtttatcactctaatctacattttaatctgtattagagtaaaaatatgcttttgaaatcagagtgacctgggttggaatatcaactacttggtagttgagtgcttttaacctctccattgttgtttcatctataaagtaaggatcaaaatagtagctacctcaatggtagttgtgaggattaaatacaaaaatgcatgtaaaggacatacgtataggaaataacaatcactcaataagtgttagctcttattattgttactattatatctccccatccctacttaagacactagtttgaagaataaaataaactttggttcaggaataaccaaacctaagcaactgaaggcactaagggtaggctatgtgttagcctgtgttattgttcataaatagtaattgccctggtctggaagaggattctatatcctaccccattgtagtctagcatggtatgtgacttgctttggccagtgaaacagagtgaaaatgatgtatgtcaattttaggcagaaacgtccagagccagcacttggtttgccatgttctccgtgtttcttctgctcctagatgcagcagtattccagatagaggccgcactatgagcctgaattccaggataaaaacaacatggaatagaacttagccagcacagagtacacatgtgctgtaaatgagaaatacccctttgttattgtaaatcactgagattttgaggttgtctgttactgcagcataatctagcctaatataaacaccaaactaatatactcctctaccatagtaatttatttcttgttctttctcctcctccttcctctacttcagggtttagcgaccttttgcctgcctgtttttgtaaggcctgaaagctaaacatagttttacatttttagatggttgaaaaaatcaaaaggagaataatagttcatgatgtaaaaattatataaaatttaaataaatgtcggcatccttaaataaagttttattggaacaca

SEQ ID NO: 137690 - DNA, 767 bp, Homo sapiens
  Payload ID: 6960
  Gene Symbol: ENPEP
  Gene Name: glutamyl aminopeptidase (aminopeptidase A)
  ENST ID: ENST00000509344
  CDS Start-End: 1-433
tgtgactgtgacaacccctgatgaaataacatctgtttttgatggaatatcctatagcaagggatcttctattttgagaatgcttgaagactggataaaaccagagaattttcaaaaaggatgtcagatgtacttggaaaaataccaattcaagaatgcaaaaacttctgatttttgggcagcactggaagaggcaagtaggctaccagtgaaagaagtaatggacacctggaccagacagatgggttatcctgtgcttaacgtgaacggtgtcaagaacatcacacagaaacgctttttgttggacccaagagctaacccttctcagcccccttcagatcttggttatacatggaatatcccagttaaatggactgaagataatataacaagcagtgtgttatttaataggtcagaaaaagaagttaattgaggattggaagaatatctcggcagctgtttgatttactgtttacaagtttgaaagcgtgaataattcatctaccctagtacaattcacccagcactttcatggaatgaagtttccatacaagtgaattttccagataactaaagcttactcaagtgctttgtaaaatgcatttcaagagttcacaatagacattgttctaatatgtgttatgtactccttagaatatttggaataataaatttaatccttaattactagattaattctttcaagcacgtattgcttatgtgcaaaacacagagataagaatgggggcagtgctggagcaaaaaaa

SEQ ID NO: 137691 - DNA, 5014 bp, Homo sapiens
  Payload ID: 6961
  Gene Symbol: EPRS
  Gene Name: glutamyl-prolyl-tRNA synthetase
  Uniprot ID: P07814
  ENST ID: ENST00000366923
  CDS Start-End: 271-4809
agcacgaaaggccacgcaggccgttctaaccctggcggccaagaggaggggtagcaggctctggaacctgcgggcggggacgaagacggcgcgcgacgatgtcgcaccgcggcgtgcgcggtgtcggcagtagctgcggcgcaggggcggagcgaaggctgcggcggcgtcgggtacgcgcacacgttgcatcttcttcctttcgcggggtcctccgtagttctggcacgagccaggcgtactgacaggtggaccagcggactggtggagatggcgacgctctctctgaccgtgaattcaggagaccctccgctaggagctttgctggcagtagaacacgtgaaagacgatgtcagcatttccgttgaagaagggaaagagaatattcttcatgtttctgaaaatgtgatattcacagatgtgaattctatacttcgctacttggctagagttgcaactacagctgggttatatggctctaatctgatggaacatactgagattgatcactggttggagttcagtgctacaaaattatcttcatgtgattcctttacttctacaattaatgaactcaatcattgcctgtctctgagaacatacttagttggaaactccttgagtttagcagatttatgtgtttgggccaccctaaaaggaaatgctgcctggcaagaacagttgaaacagaagaaagctccagttcatgtaaaacgttggtttggctttcttgaagcccagcaggccttccagtcagtaggtaccaagtgggatgtttcaacaaccaaagctcgagtggcacctgagaaaaagcaagatgttgggaaatttgttgagcttccaggtgcggagatgggaaaggttaccgtcagatttcctccagaggccagtggttacttacacattgggcatgcaaaagctgctcttctgaaccagcactaccaggttaactttaaagggaaactgatcatgagatttgatgacacaaatcctgaaaaagaaaaggaagattttgagaaggttatcttggaagatgttgcaatgttgcatatcaaaccagatcaatttacttatacttcggatcattttgaaactataatgaagtatgcagagaagctaattcaagaagggaaggcttatgtggatgatactcctgctgaacagatgaaagcagaacgtgagcagaggatagactctaaacatagaaaaaaccctattgagaagaatctacaaatgtgggaagaaatgaaaaaagggagccagtttggtcagtcctgttgtttgcgagcaaaaattgacatgagtagtaacaatggatgcatgagagatccaaccctttatcgctgcaaaattcaaccacatccaagaactggaaataaatacaatgtttatccaacatatgattttgcctgccccatagttgacagcatcgaaggtgttacacatgccctgagaacaacagaataccatgacagagatgagcagttttactggattattgaagctttaggcataagaaaaccatatatttgggaatatagtcggctaaatctcaacaacacagtgctatccaaaagaaaactcacatggtttgtcaatgaaggactagtagatggatgggatgacccaagatttcctacggttcgtggtgtactgagaagagggatgacagttgaaggactgaaacagtttattgctgctcagggctcctcacgttcagtcgtgaacatggagtgggacaaaatctgggcgtttaacaaaaaggttattgacccagtggctccacgatatgttgcattactgaagaaagaagtgatcccagtgaatgtacctgaagctcaggaggagatgaaagaagtagccaaacacccaaagaatcctgaggttggcttgaagcctgtgtggtatagtcccaaagttttcattgaaggtgctgatgcagagactttttcggagggtgagatggttacatttataaattggggcaacctcaacattacaaaaatacacaaaaatgcagatggaaaaatcatatctcttgatgcaaagttgaatttggaaaacaaagactacaagaaaaccactaaggtcacttggcttgcagagactacacatgctcttcctattccagtaatctgtgtcacttatgagcacttgatcacaaagccagtgctaggaaaagacgaggactttaagcagtatgtcaacaagaacagtaagcatgaagagctaatgctaggggatccctgccttaaggatttgaaaaaaggagatattatacaactccagagaagaggattcttcatatgtgatcaaccttatgaacctgttagcccatatagttgcaaggaagccccgtgtgttttgatatacattcctgatgggcacacaaaggaaatgccaacatcagggtcaaaggaaaagaccaaagtagaagccacaaaaaatgagacctctgctccttttaaggaaagaccaacaccttctctgaataataattgtactacatctgaggattccttggtcctttacaatagagtggctgttcaaggagatgtggttcgtgaattaaaagccaagaaagcaccaaaggaagatgtagatgcagctgtaaaacagcttttgtctttgaaagctgaatataaggagaaaactggccaggaatataaacctggaaaccctcctgctgaaataggacagaatatttcttctaattcctcagcaagtattctggaaagtaaatctctgtatgatgaagttgctgcacaaggggaggtggttcgtaagctaaaagctgaaaaatcccctaaggctaaaataaatgaagctgtagaatgcttactgtccctgaaggctcagtataaagaaaaaactgggaaggagtacatacctggtcagcccccattatctcaaagttcggattcaagcccaaccagaaattctgaacctgctggtttagaaacaccagaagcgaaagtactttttgacaaagtagcttctcaaggggaagtagttcggaaacttaaaactgaaaaagcccctaaggatcaagtagatatagctgttcaagaactccttcagctaaaggcacagtacaagtctttgataggagtagagtataagcctgtgtcggccactggagctgaggacaaagataagaagaagaaagaaaaagaaaataaatctgaaaagcagaataagcctcagaaacaaaatgatggccaaaggaaagacccttctaaaaaccaaggaggtgggctctcatcaagtggagcaggagaagggcaggggcctaagaaacagaccaggttgggtcttgaggcaaaaaaagaagaaaatcttgctgattggtattctcaggtcatcacaaagtcagaaatgattgaataccatgacataagtggctgttatattcttcgtccctgggcctatgccatttgggaagccatcaaggacttttttgatgctgagatcaagaaacttggtgttgaaaactgctacttccccatgtttgtgtctcaaagtgcattagagaaagagaagactcatgttgctgactttgccccagaggttgcttgggttacaagatctggcaaaaccgagctggcagaaccaattgccattcgtcctactagtgaaacagtaatgtatcctgcatatgcaaaatgggtacagtcacacagagacctgcccatcaagctcaatcagtggtgcaatgtggtgcgttgggaattcaagcatcctcagcctttcctacgtactcgtgaatttctttggcaggaagggcacagtgcttttgctaccatggaagaggcagcggaagaggtcttgcagatacttgacttatatgctcaggtatatgaagaactcctggcaattcctgttgttaaaggaagaaagacggaaaaggaaaaatttgcaggaggagactatacaactacaatagaagcatttatatctgctagtggaagagctatccagggaggaacatcacatcatttagggcagaatttttccaaaatgtttgaaatcgtttttgaagatccaaagataccaggagagaagcaatttgcctatcaaaactcctggggcctgacaactcgaactattggtgttatgaccatggttcatggggacaacatgggtttagtattaccaccccgtgtagcatgtgttcaggtggtgattattccttgtggcattaccaatgcactttctgaagaagacaaagaagcgctgattgcaaaatgcaatgattatcgaaggcgattactcagtgttaacatccgcgttagagctgatttacgagataattattctccaggttggaaattcaatcactgggagctcaagggagttcccattagacttgaagttgggccacgtgatatgaagagctgtcagtttgtagccgtcagacgagatactggagaaaagctgacagttgctgaaaatgaggcagagactaaacttcaagctattttggaagacatccaggtcacccttttcacaagggcttctgaagaccttaagactcatatggttgtggctaatacaatggaagactttcagaagatactagattctggaaagattgttcagattccattctgtggggaaattgactgtgaggactggatcaaaaagaccactgccagggatcaagatcttgaacctggtgctccatccatgggagctaaaagcctttgcatccccttcaaaccactctgtgaactgcagcctggagccaaatgtgtctgtggcaagaaccctgccaagtactacaccttatttggtcgcagctactgagggatgaacgaaagccccctcttcaactcctctcactttttaaagcattgatattagtatcttctcagatacagaccgttttatgattttttaaaaagtaaaagttctaaaatgaagtcacacaggacaattattcttatgcctaagttaacagtggataaaagacttttctgtaaacaactccagtaataaatatcatgaacta

SEQ ID NO: 137692 - DNA, 2968 bp, Homo sapiens
  Payload ID: 6961
  Gene Symbol: EPRS
  Gene Name: glutamyl-prolyl-tRNA synthetase
  ENST ID: ENST00000609181
  CDS Start-End: 64-2968
gggtcctccgtagttctggcacgagccaggcgtactgacaggtggaccagcggactggtggagatggcgacgctctctctgaccgtgaattcaggagaccctccgctaggagctttgctggcagtagaacacgtgaaagacgatgtcagcatttccgttgaagaagggaaagagaatattcttcatgtttctgaaaatgtgatattcacagatgtgaattctatacttcgctacttggctagagttgcaactacagctgggttatatggctctaatctgatggaacatactgagattgatcactggttggagttcagtgctacaaaattatcttcatgtgattcctttacttctacaattaatgaactcaatcattgcctgtctctgagaacatacttagttggaaactccttgagtttagcagatttatgtgtttgggccaccctaaaaggaaatgctgcctggcaagaacagttgaaacagaagaaagctccagttcatgtaaaacgttggtttggctttcttgaagcccagcaggccttccagtcagtaggtaccaagtgggatgtttcaacaaccaaagctcgagtggcacctgagaaaaagcaagatgttgggaaatttgttgagcttccaggtgcggagatgggaaaggttaccgtcagatttcctccagaggccagtggttacttacacattgggcatgcaaaagctgctcttctgaaccagcactaccaggttaactttaaagggaaactgatcatgagatttgatgacacaaatcctgaaaaagaaaaggaagattttgagaaggttatcttggaagatgttgcaatgttgcatatcaaaccagatcaatttacttatacttcggatcattttgaaactataatgaagtatgcagagaagctaattcaagaagggaaggcttatgtggatgatactcctgctgaacagatgaaagcagaacgtgagcagaggatagactctaaacatagaaaaaaccctattgagaagaatctacaaatgtgggaagaaatgaaaaaagggagccagtttggtcagtcctgttgtttgcgagcaaaaattgacatgagtagtaacaatggatgcatgagagatccaaccctttatcgctgcaaaattcaaccacatccaagaactggaaataaatacaatgtttatccaacatatgattttgcctgccccatagttgacagcatcgaaggtgttacacatgccctgagaacaacagaataccatgacagagatgagcagttttactggattattgaagctttaggcataagaaaaccatatatttgggaatatagtcggctaaatctcaacaacacagtgctatccaaaagaaaactcacatggtttgtcaatgaaggactagtagatggatgggatgacccaagatttcctacggttcgtggtgtactgagaagagggatgacagttgaaggactgaaacagtttattgctgctcagggctcctcacgttcagtcgtgaacatggagtgggacaaaatctgggcgtttaacaaaaagctgcgagctctctgtaagaaggttattgacccagtggctccacgatatgttgcattactgaagaaagaagtgatcccagtgaatgtacctgaagctcaggaggagatgaaagaagtagccaaacacccaaagaatcctgaggttggcttgaagcctgtgtggtatagtcccaaagttttcattgaaggtgctgatgcagagactttttcggagggtgagatggttacatttataaattggggcaacctcaacattacaaaaatacacaaaaatgcagatggaaaaatcatatctcttgatgcaaagttgaatttggaaaacaaagactacaagaaaaccactaaggtcacttggcttgcagagactacacatgctcttcctattccagtaatctgtgtcacttatgagcacttgatcacaaagccagtgctaggaaaagacgaggactttaagcagtatgtcaacaagaacagtaagcatgaagagctaatgctaggggatccctgccttaaggatttgaaaaaaggagatattatacaactccagagaagaggattcttcatatgtgatcaaccttatgaacctgttagcccatatagttgcaaggaagccccgtgtgttttgatatacattcctgatgggcacacaaaggaaatgccaacatcagggtcaaaggaaaagaccaaagtagaagccacaaaaaatgagacctctgctccttttaaggaaagaccaacaccttctctgaataataattgtactacatctgaggattccttggtcctttacaatagagtggctgttcaaggagatgtggttcgtgaattaaaagccaagaaagcaccaaaggaagatgtagatgcagctgtaaaacagcttttgtctttgaaagctgaatataaggagaaaactggccaggaatataaacctggaaaccctcctgctgaaataggacagaatatttcttctaattcctcagcaagtattctggaaagtaaatctctgtatgatgaagttgctgcacaaggggaggtggttcgtaagctaaaagctgaaaaatcccctaaggctaaaataaatgaagctgtagaatgcttactgtccctgaaggctcagtataaagaaaaaactgggaaggagtacatacctggtcagcccccattatctcaaagttcggattcaagcccaaccagaaattctgaacctgctggtttagaaacaccagaagcgaaagtactttttgacaaagtagcttctcaaggggaagtagttcggaaacttaaaactgaaaaagcccctaaggatcaagtagatatagctgttcaagaactccttcagctaaaggcacagtacaagtctttgataggagtagagtataagcctgtgtcggccactggagctgaggacaaag

SEQ ID NO: 137693 - DNA, 1526 bp, Homo sapiens
  Payload ID: 6961
  Gene Symbol: EPRS
  Gene Name: glutamyl-prolyl-tRNA synthetase
  ENST ID: ENST00000477030
  CDS Start-End: 143-727
agtagctgcggcgcaggggcggagcgaaggctgcggcggcgtcgggtacgcgcacacgttgcatcttcttcctttcgcggggtcctccgtagttctggcacgagccaggcgtactgacaggtggaccagcggactggtggagatggcgacgctctctctgaccgtgaattcaggagaccctccgctaggagctttgctggcagtagaacacgtgaaagacgatgtcagcatttccgttgaagaagggaaagagaatattcttcatgtttctgaaaatgtgatattcacagatgtgaattctatacttcgctacttggctagagttgcaactacagctgggttatatggctctaatctgatggaacatactgagattgatcactggttggagttcagtgctacaaaattatcttcatgtgattcctttacttctacaattaatgaactcaatcattgcctgtctctgagaacatacttagttggaaactccttgagtttagcagatttatgtgtttgggccaccctaaaaggaaatgctgcctggcaagaacagttgaaacagaagaaagctccagttcatgtaaaacgttggtttggctttcttgaagcccagcaggccttccagtcagtaggtaccaagtgggatgtttcaacaaccaaagctcgagtgttacttacacattgggcatgcaaaagctgctcttctgaaccagcactaccaggttaactttaaagggaaactgatcatgagatttgatgacacaaatcctgaaaaagaaaaggaagattttgagaaggttatcttggaagatgttgcaatgttgcatatcaaaccagatcaatttacttatacttcggatcattttgaaactataatgaagtatgcagagaagctaattcaagaagggaaggcttatgtggatgatactcctgctgaacagatgaaagcagaacgtgagcagaggatagactctaaacatagaaaaaaccctattgagaagaatctacaaatgtgggaagaaatgaaaaaagggagccagtttggtcagtcctgttgtttgcgagcaaaaattgacatgagtagtaacaatggatgcatgagagatccaaccctttatcgctgcaaaattcaaccacatccaagaactggaaataaatacaaggatgacccaagatttcctacggttcgtggtgtactgagaagagggatgacagttgaaggactgaaacagtttattgctgctcaggttattgacccagtggctccacgatatgttgcattactgaagaaagaagtgatcccagtgaatgtacctgaagctcaggaggagatgaaagaagtagccaaacacccaaagcatgaagagctaatgctaggggatccctgccttaaggatttgaaaaaaggagatattatacaactccagagaagaggattcttcatatgtgatcaaccttatgaacctgttagcccatatagttgcaaggaagccccgtgtgttttgatatacattcctgatgggcac

SEQ ID NO: 137694 - DNA, 3961 bp, Homo sapiens
  Payload ID: 6962
  Gene Symbol: EARS2
  Gene Name: glutamyl-tRNA synthetase 2, mitochondrial
  Uniprot ID: Q5JPH6
  ENST ID: ENST00000449606
  CDS Start-End: 33-1604
gggagaagcccacgtgtgctattccatcccacatggcggcgctcctgaggagactgctgcagcgcgagaggccttcggcggcctctggccgccccgtaggacggcgcgaggccaacctgggcactgatgccggggttgcggtgcgagtgcggttcgctcccagccccacaggcttcttgcacctgggtggcctccgcactgccttgtacaactacatctttgctaagaagtaccaggggagcttcatcctgaggctagaggacacagatcagactcgcgttgtgcctggggcagcggagaatattgaggacatgctggagtgggcaggcatcccgcctgatgagagcccccgccggggcggtcctgctgggccctaccagcaatctcagcggttggagctgtatgcccaggccacagaagcgctgctgaagaccggagctgcttacccctgtttctgctcaccccagcggctggagctcctgaagaaggaggccttgcggaaccaccagacgccccggtatgacaatcggtgcaggaacatgagccaggagcaggtggcccagaagctggccaaggaccccaagcctgcgatccgcttccgcctggagcaggtggtgccagccttccaggacctggtctatggctggaataggcatgaagtggccagcgtggagggagacccagtcatcatgaagagcgacggcttccccacataccacctggcctgcgtggtggacgaccaccacatgggcatcagccacgtgctgcgaggctctgagtggctcgtctccactgccaagcacctgctcctctaccaggccctgggctggcagccaccccacttcgcccacctgcccctgctcctcaacagggatggcagcaagctctccaagaggcaaggggacgttttcctggagcactttgctgctgatggcttcctgcccgattccttgttggacatcatcaccaactgtggctcaggttttgcagagaaccaaatgggcaggaccctgccggagctgatcacacagttcaacctgacacaggtcacctgtcactcagccctgctggacctggagaagctcccagaattcaacagactgcacctccagcggctggtgagcaatgagagccagaggcgccagctggtggggaagctgcaggtccttgtggaggaggcctttggttgccagctgcaaaacagggatgtcctcaacccagtctacgtggagaggatcctcctgctgagacagggtcacatttgccgcctgcaggacttggtgtccccagtatactcttacctgtggactcgccctgcagtaggtcgagcacagctggacgccatctcggagaaggtggatgtgattgccaagcgtgtgctggggcttctagaaagatctagtatgagcttaactcaggatatgctgaatggagaactgaagaagctatcagaaggtctggaaggcaccaagtacagtaatgtgatgaaactccttcggatggccctcagtggacagcagcaaggacctcctgtagctgagatgatgttggccttgggaccaaaggaagtacgggaacggatccagaaggtggtttccagctagggagaggatgtttcgggcagtggagatcgccctaagaacctgtgagcttagaaacagctttcagagaccagaaggaggcctggggcccgtcgggaagtttgctgaaggaactaagagtggaaacaatctctgactgcacacaagtgcatttgtgatccaccacaggcacgtttttgtcaattggctggggaagcccaacccatctaacctcctggactctggaaaggcattctccgggtctggtttctcacacattacacagcagaggtttggagttagttcacagaaaagttaacatcccggaacagtgcagaaggcttgggtttcagtttgctagggcccccataacaaaatgccacagaaccaggtggtttaaacaacagagatttattttctcacatttggaggctagaagttcaagatcaaggtgtcagcaggcctggtttttcctagaggcctcttttgttggcttgcagacagctgtcttctcactgtgtccttgtgcggtcttccctccatgcacacacatctctaagtttcattatgtgcccaacgttcctcttctaagaacaccagttggactggattttaactttaaccagcctcatttaagttaatcacctctttaaatgctcaatctccaagtacagtctcattctgaggttccaggggtttctcaacgtaagaatttagggggacagaattcagcccgtagcagctgggcagcaggactcatgggtcccagttctcaggccccaaggactcagagcagcaaaggatacgtgacacaagcagggctgaactggacaccagactttctttggggttgtaaaaggagaagtgtgactccactgccaagggtaagcactcttgtcttatgctaccctttattcttgaaccttggggcagcctgtgtctcccttccctaaacgtcatctgttccgtttttccagtcttccagacctggtccttggactggagaccttcacccttcctattttgtggctttctcttcaaatccacctcgtccttcctccatgacttataagtcatcatctctgctggtttctgaaatgagatatgcttcttggggtcttcagtgaagaggaatagcaagtgaaaggaggatggtggcagggtacatgaacccctaccaggcttctaggcttcccctgcatggcagccagcctctaagttggcccccaaccatccctgccttcttctattcacacccttgtgtggttccttcccacattgaataggcctgacttgtgtaaccactacactattgaagaaatgagagtttgacttctgagggtaagtcataaaatacatcgtggcttctgtcttgttttctttgatcgcttactttgggggaagccagcttccaggtcatgaaaatactcaagcagccttatggagtgctccacatgacaagggatcgaggcctcccaccaatagccatgggagtgtgcaatcttgaaagctggtccttcaattccagccaagcattcacatgaccgcaatcctagctgatctcgcttgtgacctctatgggagaccctaagccagaaccactcagagaagctgctccggaacgtcagacacacatgaactgtgagatagtaaacgtttattgtttaaagctacttggtttggggataatttgcgtttcagcagtagacaatatatttattttgtccaggggagtggaaaggcgattacagagtttgttgagccccatagagtcctagtctttgcttaaagaaatataccagttctttctaatacagaatccattaagttcgttggttgcaaacaatagaaaccaactctgcctcacttatgtttattggaggccataagagagccacagcatctaccaaaaagccaaaaaaaaaacaggttttggaaaagacaggaactagctacaggagctaatggccaatcttgtctgagttctttgatggcgacacatgaactacagccgttttgttgttgttaatttctccgtgttttcccctcagttttggatgactctgctcaaggttcagattctgaggagcaagtatctgttgggctatctgaggtcctgctaccattccttggccagtaataggtagtttcacagggattatatgcaatggaggaaaagttgttctcaaggaaaactagggagctttctccagaagatgatgtaatggcagaaacaacaggtggttgaccacagaaggggacaataataatacttgtaatttattgtgcgcttatatgagcctcaccctctcccaggtgtcagataatgctcgtaaatgccttagtccatcatctcagtaaattttttttataacactatg

SEQ ID NO: 137695 - DNA, 533 bp, Homo sapiens
  Payload ID: 6962
  Gene Symbol: EARS2
  Gene Name: glutamyl-tRNA synthetase 2, mitochondrial
  ENST ID: ENST00000562581
  CDS Start-End: 11-175
tccatcccacatggcggcgctcctgaggagactgctgcagcgcgagaggccttcggcggcctctggccgccccgtaggacggcgcgaggccaacctgggcactgatgccggggttgcggtgcgagtgcggttcgctcccagccccacaggtgttgtagacgctgggatacagtgatcattgagaaaggcttcttgcacctgggtggcctccgcactgccttgtacaactacatctttgctaagaagtaccaggggagcttcatcctgaggctagaggacacagatcagactcgcgttgtgcctggggcagcggagaatattgaggacatgctggagtgggcaggcatcccgcctgatgagagcccccgccggggcggtcctgctgggccctaccagcaatctcagcggttggagctgtatgcccaggccacagaagcgctgctgaagaccggagctgcttacccctgtttctgctcaccccagcggctggagctcctgaagaaggaggccttgcggaaccaccagacgccccg

SEQ ID NO: 137696 - DNA, 627 bp, Homo sapiens
  Payload ID: 6962
  Gene Symbol: EARS2
  Gene Name: glutamyl-tRNA synthetase 2, mitochondrial
  ENST ID: ENST00000564668
  CDS Start-End: 22-321
acgtgtgctattccatcccacatggcggcgctcctgaggagactgctgcagcgcgagaggccttcggcggcctctggccgccccgtaggacggcgcgaggccaacctgggcactgatgccggggttgcggtgcgagtgcggttcgctcccagccccacagagtctcactctactgctgcccaggctggagtgcagaggcgtgatcatggctcgctgcagcctcagcgtccccaggctcaggcttcttgcacctgggtggcctccgcactgccttgtacaactacatctttgctaagaagtaccaggggagcttcatcctgaggctagaggacacagatcagactcgcgttgtgcctggggcagcggagaatattgaggacatgctggagtgggcaggcatcccgcctgatgagagcccccgccggggcggtcctgctgggccctaccagcaatctcagcggttggagctgtatgcccaggccacagaagcgctgctgaagaccggagctgcttacccctgtttctgctcaccccagcggctggagctcctgaagaaggaggccttgcggaaccaccagacgccccggtatgacaatcggtgcaggaacatgagccaggagcaggtgg

SEQ ID NO: 137697 - DNA, 572 bp, Homo sapiens
  Payload ID: 6962
  Gene Symbol: EARS2
  Gene Name: glutamyl-tRNA synthetase 2, mitochondrial
  ENST ID: ENST00000564997
  CDS Start-End: 22-261
acgtgtgctattccatcccacatggcggcgctcctgaggagactgctgcagcgcgagaggccttcggcggcctctggccgccccgtaggacggcgcgaggccaacctgggcactgatgccggggttgcggtgcgagtgcggttcgctcccagccccacagagtctcactctactgctgcccaggctggagtgcagaggcgtgatcatggctcgctgcagcctcagcgtccccaggctcaggtgatcctcccacctcagtaactgaaaccacaggcatgcttcttgcacctgggtggcctccgcactgccttgtacaactacatctttgctaagaagtaccaggggagcttcatcctgaggctagaggacacagatcagactcgcgttgtgcctggggcagcggagaatattgaggacatgctggagtgggcaggcatcccgcctgatgagagcccccgccggggcggtcctgctgggccctaccagcaatctcagcggttggagctgtatgcccaggccacagaagcgctgctgaagaccggagctgcttacccctgtttctgctcacccca

SEQ ID NO: 137698 - DNA, 1709 bp, Homo sapiens
  Payload ID: 6962
  Gene Symbol: EARS2
  Gene Name: glutamyl-tRNA synthetase 2, mitochondrial
  Uniprot ID: Q5JPH6
  ENST ID: ENST00000563232
  CDS Start-End: 2-1606
catggcggcgctcctgaggagactgctgcagcgcgagaggccttcggcggcctctggccgccccgtaggacggcgcgaggccaacctgggcactgatgccggggttgcggtgcgagtgcggttcgctcccagccccacaggcttcttgcacctgggtggcctccgcactgccttgtacaactacatctttgctaagaagtaccaggggagcttcatcctgaggctagaggacacagatcagactcgcgttgtgcctggggcagcggagaatattgaggacatgctggagtgggcaggcatcccgcctgatgagagcccccgccggggcggtcctgctgggccctaccagcaatctcagcggttggagctgtatgcccaggccacagaagcgctgctgaagaccggagctgcttacccctgtttctgctcaccccagcggctggagctcctgaagaaggaggccttgcggaaccaccagacgccccggtatgacaatcggtgcaggaacatgagccaggagcaggtggcccagaagctggccaaggaccccaagcctgcgatccgcttccgcctggagcaggtggtgccagccttccaggacctggtctatggctggaataggcatgaagtggccagcgtggagggagacccagtcatcatgaagagcgacggcttccccacataccacctggcctgcgtggtggacgaccaccacatgggcatcagccacgtgctgcgaggctctgagtggctcgtctccactgccaagcacctgctcctctaccaggccctgggctggcagccaccccacttcgcccacctgcccctgctcctcaacagggatggcagcaagctctccaagaggcaaggggacgttttcctggagcactttgctgctgatggcttcctgcccgattccttgttggacatcatcaccaactgtggctcaggttttgcagagaaccaaatgggcaggaccctgccggagctgatcacacagttcaacctgacacaggtcacctgtcactcagccctgctggacctggagaagctcccagaattcaacagactgcacctccagcggctggtgagcaatgagagccagaggcgccagctggtggggaagctgcaggtccttgtggaggaggcctttggttgccagctgcaaaacagggatgtcctcaacccagtctacgtggagaggatcctcctgctgagacagggtcacatttgccgcctgcaggacttggtgtccccagtatactcttacctgtggactcgccctgcagtaggtcgagcacagctggacgccatctcggagaaggtggatgtgattgccaagcgtgtgctggggcttctagaaagatctagtatgagcttaactcaggatatgctgaatggagaactgaagaagctatcagaaggtctggaaggcaccaagtacagtaatgtgatgaaactccttcggatggccctcagtggacagcaggtgaggcagggacacgggttggattgttccctggagcccctcattgatcctttgaacttacatttcctggcaggcactgagctcaatattgagtatacaaaggtgaatgaaacatgatcactcccctcatttagtcaatcaacagacactattgagtacctactatgtgcaagcattgtgttaggtacagtgaatacaatatagaattaaacacacatac

SEQ ID NO: 137699 - DNA, 3840 bp, Homo sapiens
  Payload ID: 6962
  Gene Symbol: EARS2
  Gene Name: glutamyl-tRNA synthetase 2, mitochondrial
  Uniprot ID: Q5JPH6
  ENST ID: ENST00000563459
  CDS Start-End: 8-1579
atcccacatggcggcgctcctgaggagactgctgcagcgcgagaggccttcggcggcctctggccgccccgtaggacggcgcgaggccaacctgggcactgatgccggggttgcggtgcgagtgcggttcgctcccagccccacaggcttcttgcacctgggtggcctccgcactgccttgtacaactacatctttgctaagaagtaccaggggagcttcatcctgaggctagaggacacagatcagactcgcgttgtgcctggggcagcggagaatattgaggacatgctggagtgggcaggcatcccgcctgatgagagcccccgccggggcggtcctgctgggccctaccagcaatctcagcggttggagctgtatgcccaggccacagaagcgctgctgaagaccggagctgcttacccctgtttctgctcaccccagcggctggagctcctgaagaaggaggccttgcggaaccaccagacgccccggtatgacaatcggtgcaggaacatgagccaggagcaggtggcccagaagctggccaaggaccccaagcctgcgatccgcttccgcctggagcaggtggtgccagccttccaggacctggtctatggctggaataggcatgaagtggccagcgtggagggagacccagtcatcatgaagagcgacggcttccccacataccacctggcctgcgtggtggacgaccaccacatgggcatcagccacgtgctgcgaggctctgagtggctcgtctccactgccaagcacctgctcctctaccaggccctgggctggcagccaccccacttcgcccacctgcccctgctcctcaacagggatggcagcaagctctccaagaggcaaggggacgttttcctggagcactttgctgctgatggcttcctgcccgattccttgttggacatcatcaccaactgtggctcaggttttgcagagaaccaaatgggcaggaccctgccggagctgatcacacagttcaacctgacacaggtcacctgtcactcagccctgctggacctggagaagctcccagaattcaacagactgcacctccagcggctggtgagcaatgagagccagaggcgccagctggtggggaagctgcaggtccttgtggaggaggcctttggttgccagctgcaaaacagggatgtcctcaacccagtctacgtggagaggatcctcctgctgagacagggtcacatttgccgcctgcaggacttggtgtccccagtatactcttacctgtggactcgccctgcagtaggtcgagcacagctggacgccatctcggagaaggtggatgtgattgccaagcgtgtgctggggcttctagaaagatctagtatgagcttaactcaggatatgctgaatggagaactgaagaagctatcagaaggtctggaaggcaccaagtacagtaatgtgatgaaactccttcggatggccctcagtggacagcagcaaggacctcctgtagctgagatgatgttggccttgggaccaaaggaagtacgggaacggatccagaaggtggtttccagctagggagaggatgtttcgggcagtggagatcgccctaagaacctgtgagcttagaaacagctttcagagaccagaaggaggcctggggcccgtcgggaagtttgctgaaggaactaagagtggaaacaatctctgactgcacacaagtgcatttgtgatccaccacaggcacgtttttgtcaattggctggggaagcccaacccatctaacctcctggactctggaaaggcattctccgggtctggtttctcacacattacacagcagaggtttggagttagttcacagaaaagttaacatcccggaacagtgcagaaggcttgggtttcagtttgctagggcccccataacaaaatgccacagaaccaggtggtttaaacaacagagatttattttctcacatttggaggctagaagttcaagatcaaggtgtcagcaggcctggtttttcctagaggcctcttttgttggcttgcagacagctgtcttctcactgtgtccttgtgcggtcttccctccatgcacacacatctctaagtttcattatgtgcccaacgttcctcttctaagaacaccagttggactggattttaactttaaccagcctcatttaagttaatcacctctttaaatgctcaatctccaagtacagtctcattctgaggttccaggggtttctcaacgtaagaatttagggggacagaattcagcccgtagcagctgggcagcaggactcatgggtcccagttctcaggccccaaggactcagagcagcaaaggatacgtgacacaagcagggctgaactggacaccagactttctttggggttgtaaaaggagaagtgtgactccactgccaaggtcttccagacctggtccttggactggagaccttcacccttcctattttgtggctttctcttcaaatccacctcgtccttcctccatgacttataagtcatcatctctgctggtttctgaaatgagatatgcttcttggggtcttcagtgaagaggaatagcaagtgaaaggaggatggtggcagggtacatgaacccctaccaggcttctaggcttcccctgcatggcagccagcctctaagttggcccccaaccatccctgccttcttctattcacacccttgtgtggttccttcccacattgaataggcctgacttgtgtaaccactacactattgaagaaatgagagtttgacttctgagggtaagtcataaaatacatcgtggcttctgtcttgttttctttgatcgcttactttgggggaagccagcttccaggtcatgaaaatactcaagcagccttatggagtgctccacatgacaagggatcgaggcctcccaccaatagccatgggagtgtgcaatcttgaaagctggtccttcaattccagccaagcattcacatgaccgcaatcctagctgatctcgcttgtgacctctatgggagaccctaagccagaaccactcagagaagctgctccggaacgtcagacacacatgaactgtgagatagtaaacgtttattgtttaaagctacttggtttggggataatttgcgtttcagcagtagacaatatatttattttgtccaggggagtggaaaggcgattacagagtttgttgagccccatagagtcctagtctttgcttaaagaaatataccagttctttctaatacagaatccattaagttcgttggttgcaaacaatagaaaccaactctgcctcacttatgtttattggaggccataagagagccacagcatctaccaaaaagccaaaaaaaaaacaggttttggaaaagacaggaactagctacaggagctaatggccaatcttgtctgagttctttgatggcgacacatgaactacagccgttttgttgttgttaatttctccgtgttttcccctcagttttggatgactctgctcaaggttcagattctgaggagcaagtatctgttgggctatctgaggtcctgctaccattccttggccagtaataggtagtttcacagggattatatgcaatggaggaaaagttgttctcaaggaaaactagggagctttctccagaagatgatgtaatggcagaaacaacaggtggttgaccacagaaggggacaataataatacttgtaatttattgtgcgcttatatgagcctcaccctctcccaggtgtcagataatgctcgtaaatgccttagtccatcatctcagtaaattttttttataacact

SEQ ID NO: 137700 - DNA, 2027 bp, Homo sapiens
  Payload ID: 6962
  Gene Symbol: EARS2
  Gene Name: glutamyl-tRNA synthetase 2, mitochondrial
  ENST ID: ENST00000564501
  CDS Start-End: 389-1909
acaacacccaccgctcccgcagaggccgctgggaagaggcgagctggctgagattggcccccgcagcagcccctaatctctcacagcccggccggaaacaggtggaggtttctatggagacccgcctcctccgctcccaggtccggcccctgccacgctttcgctttcccaagctgaagggggcgggtccgggaaatagccctttctctggcctctgccccctggtggcgagtgcggccgcagccgtccaggggggcgtgggatttcgcgctagggggcctgtgactttaaggggcaaggctgcgctggctgtggcggaggccgattggctggaagcagtccccggaagtgacgcagggagaagcccacgtgtgctattccatcccacatggcggcgctcctgaggagactgctgcagcgcgagaggccttcggcggcctctggccgccccgtaggacggcgcgaggccaacctgggcactgatgccggggttgcggtgcgagtgcggttcgctcccagccccacaggcttcttgcacctgggtggcctccgcactgccttgtacaactacatctttgctaagaagtaccaggggagcttcatcctgaggctagaggacacagatcagactcgcgttgtgcctggggcagcggagaatattgaggacatgctggagtgggcaggcatcccgcctgatgagagcccccgccggggcggtcctgctgggccctaccagcaatctcagcggttggagctgtatgcccaggccacagaagcgctgctgaagaccggagctgcttacccctgtttctgctcaccccagcggctggagctcctgaagaaggaggccttgcggaaccaccagacgccccggtatgacaatcggtgcaggaacatgagccaggagcaggtggcccagaagctggccaaggaccccaagcctgcgatccgcttccgcctggagcaggtggtgccagccttccaggacctggtctatggctggaataggcatgaagtggccagcgtggagggagacccagtcatcatgaagagcgacggcttccccacataccacctggcctgcgtggtggacgaccaccacatgggcatcagccacgtgctgcgaggctctgagtggctcgtctccactgccaagcacctgctcctctaccaggccctgggctggcagccaccccacttcgcccacctgcccctgctcctcaacagggatggcagcaagctctccaagaggcaaggggacgttttcctggagcactttgctgctgatggcttcctgcccgattccttgttggacatcatcaccaactgtggctcaggttttgcagagaaccaaatgggcaggaccctgccggagctgatcacacagttcaacctgacacaggtcacctgtcactcagccctgctggacctggagaagctcccagaattcaacagactgcacctccagcggctggtgagcaatgagagccagaggcgccagctggtggggaagctgcaggtccttgtggaggaggcctttggttgccagctgcaaaacagggatgtcctcaacccagtctacgtggagaggatcctcctgctgagacagggtcacatttgccgcctgcaggacttggtgtccccagtatactcttacctgtggactcgccctgcagtaggtcgagcacagctggacgccatctcggagaaggtggatgtgattgccaagcgtgtgctggggcttctagaaagatctagtatgagcttaactcaggatatgctgaatggagaactgaagaagctatcagaaggtctggaaggcaccaagtacagtaatgtgatgaaactccttcggatggccctcagtggacagcaggcactgagctcaatattgagtatacaaaggtgaatgaaacatgatcactcccctcatttagtcaatcaacagacactattgagtacctactatgtgcaagcattgtgttaggtacagtgaatacaatatagaattaaacacacatacataa

SEQ ID NO: 137701 - DNA, 556 bp, Homo sapiens
  Payload ID: 6962
  Gene Symbol: EARS2
  Gene Name: glutamyl-tRNA synthetase 2, mitochondrial
  ENST ID: ENST00000563499
  CDS Start-End: 13-351
attccatcccacatggcggcgctcctgaggagactgctgcagcgcgagaggccttcggcggcctctggccgccccgccgaggccccctgtcccgtctccgccccacgaatgttcccgaatgaatcctttccggtggtgtcagagtgggcgggcggaggagggttaaggcagcgcgagcccattttacagaggcggaaactgaggtgcaggagcggaaataattcaaattgccaggagtttcttgtgttttttgtgccatcccatctctttcgatctttttttcatgcattccatacatgtgcattgatgacaacctgtgtaacaggtgttgtagacgctgggatacagtgatcattgagaaagagtctcactctactgctgcccaggctggagtgcagaggcgtgatcatggctcgctgcagcctcagcgtccccaggctcaggcttcttgcacctgggtggcctccgcactgccttgtacaactacatctttgctaagaagtaccaggggagcttcatcctgaggctagaggacacagatcagactcgcgttgtg

SEQ ID NO: 137702 - DNA, 2385 bp, Homo sapiens
  Payload ID: 6963
  Gene Symbol: GATB
  Gene Name: glutamyl-tRNA(Gln) amidotransferase, subunit B
  Uniprot ID: O75879
  ENST ID: ENST00000263985
  CDS Start-End: 42-1715
atagtgaggctgagtcacctgaccaagaccctggagttacaatggcggcgcccatgctgcgctggggctgccgtggaagacgttgggctttcgcccgggttgacggtggttcttgccaccgaagaggggctccgactgggtccacatccaaccagattaggggagagagctcagtggctcagcagcccctccacacggcccagaagacgaggaaaggtgaacacaaatgggctgctgtggtaggtttggaaattcatgcccagatttcctccaactctaaactcttctctggatctcaagttcgcttttcagcacctccaaattctttggtttctttttttgatgcatctctacctggaactttgccggttctcaacaggaggtgtgtagaagcggcggtgatgacaggcctggctctgaactgccacataaacaagaagtccttgtttgacaggaagcactacttctatgcagacctccctgcaggctaccaaattacccagcagaggctcccaattgctgtgaatgggagcttgatatatggcgtctgtgcagggaagaagcagagtcaggtgatccccaagacggtgaggatcaagcagatccagttggagcaagacagtggcaaaagcctccacgacaacctgaggtctcagacgctcattgatttgaacagggcaggagtgggccttctggaggtggtcctggagcccgacatgtcctgtggagaagaggcggcaacagctgtcagggagctgcagctgatccttcaagccctggggaccagccaggcgaacatggcagagggccagttgagagtggatgccaatatatccgtgcatcaccctggggagcctttgggcgttcgaacggaagtgaagaatctcaacagcatcaggttcctggccaaagccatagactatgaaattcagaggcaaatcaatgaacttgagaatggaggtgaaattctgaacgaaacacgctcatttcatcacaagctggggtgcaccatgtcaatgagagacaaagaaggaaaacaggactacaggttcatgccagaacccaacctgcctcccctggtgctctacgacgccacatctctgcccgcaggtgcagacccacagcaagtgatcaatattgaccagattcgggagacactcccggagctccccagtgtgacccgagagaagcttgtccaacagtatgggatgctgctggaacacagcttcactttgctgaacgaagtcggcctactggagttcttccaaaatgtgataaaagaaactagggcagagccaaaaaaggtgactagttgggtcctcaacacttttctgggctatttaaagcaacagaacctcgctgtcagtgagagtcctgtcacaccctctgcactcgctgagcttcttgacctgctggacagcagaacaatttcttcatcagcagctaaacaggtgtttgaggaactgtggaagagggaaggcaagactccagggcagattgtttcagaaaagcagcttgaactgatgcaggaccagggggcactggagcagctctgccactctgtgatggaggcccatcctcaagtggtaatggatgtgaagaacagaaaccccagagctataaataaactgattgggttggtccggaaagcgactcaaagccgagcagatccagtcatgataaaggagatcctggagaagaagctgtcattgtgagatgtttgggatccccttgcccaagggacaacaacaaacagtgcagcctgactgggaacaggatcctgtgaaagctgatgcccatgtgccctgagagctgcctctcaatccctgtcccaagccacagctatggcattaatgtcaccagtgttctcaccctctaggccctgtgcctggaggtgcctccacagccgaccagcagccaccccgcctgcttcatccacatcaggagggtccggtgaggctgcagcagtggttaaggagtaacaccttcttgtattaaggaattttaaactaaataaaatgtatgttggagatactgttacccattctaagaaaacttttcattctgcagttccttcaacaaatatttttgagcaactcctaagggccagccattgtaggtgatgggcattagcagtggtcaagagagactgtaatttggatgtattgttttcagacctaaacacaggttaacaaagatgaaaatacaaccaaataaactggcacagtataaacacatttgtttgtttaaggaggtctcaagagggtggggaaggaggatattattagaattaatcaacctatcgactgagtagaagtgatattgcctgttaaactccctccccatcccagaaggcacagtctgagaataaatgaattaaaaaaa

SEQ ID NO: 137703 - DNA, 1519 bp, Homo sapiens
  Payload ID: 6963
  Gene Symbol: GATB
  Gene Name: glutamyl-tRNA(Gln) amidotransferase, subunit B
  ENST ID: ENST00000512306
  CDS Start-End: 4-1077
acaatggcggcgcccatgctgcgctggggctgccgtggaagacgttgggctttcgcccgggttgacggtggttcttgccaccgaagaggggctccgactgggtccacatccaaccagattaggggagagagctcagtggctcagcagcccctccacacggcccagaagacgaggaaaggtgaacacaaatgggctgctgtggtaggtttggaaattcatgcccagatttcctccaactctaaactcttctctggatctcaagttcgcttttcagcacctccaaattctttggtttctttttttgatgcatctctacctggaactttgccggttctcaacaggaggtgtgtagaagcggcggtgatgacaggcctggctctgaactgccacataaacaagaagtccttgtttgacaggaagcactacttctatgcagacctccctgcaggctaccaaattacccagcagaggctcccaattgctgtgaatgggagcttgatatatggcgtctgtgcagggaagaagcagagtcaggtgatccccaagacggtgaggatcaagcagatccagttggagcaagacagtggcaaaagcctccacgacaacctgaggtctcagacgctcattgatttgaacagggcaggagtgggccttctggaggtggtcctggagcccgacatgtcctgtggagaagaggcggcaacagctgtcagggagctgcagctgatccttcaagccctggggaccagccaggcgaacatggcagagggccagttgagagtggatgccaatatatccgtgcatcaccctggggagcctttgggcgttcgaacggaagtgaagaatctcaacagcatcaggttcctggccaaagccatagactatgaaattcagaggcaaatcaatgaacttgagaatggaggtgaaattctgaacgaaacacgctcatttcatcacaagctggggtgcaccatgtcaatgagagacaaagaaggaaaacaggactacaggtggttactccttatggcaaaataccgctatatatcgggggctggggcgtatttcaagttcatttaaagttcaacataatgatcctgaacaatttttagaaaccactttttgtcattgttgtaacatgatgggacatctagacttcctctttgatatgcataccgagagaagtactagtttcttgatttggtagcctcagatctggtgccttgtttgactgattcagcttttggaagaacttgttcatccactgctgtgtcaaagttgtcatagttgagctaggaggatggctgtagaggttggggcctaggctgttcttattctaatgttcagtaactgattcagtaatacgctgaatgaagctccttgagaagaaatgagaaaagagatgttgatagcgtatgttgatggtagttcccttgaacctcatatgatgctatttcatgataaattaagttgaactacttaatatgagacccacaaataaagcaaatgctaagaacaggca

SEQ ID NO: 137704 - DNA, 1860 bp, Homo sapiens
  Payload ID: 6963
  Gene Symbol: GATB
  Gene Name: glutamyl-tRNA(Gln) amidotransferase, subunit B
  ENST ID: ENST00000503160
  CDS Start-End: 1-410
cccgggttgacggtggttcttgccaccgaagaggggctccgactgggtccacatccaaccagattaggggagagagctcagtggctcagcagcccctccacacggcccagaagacgaggaaaggtgaacacaaatgggctgctgtggtaggtttggaaattcatgcccagatttcctccaactctaaactcttctctggatctcaagttcgcttttcagcacctccaaattctttggtttctttttttgatgcatctctacctggaactttgccggttctcaacaggaggtgtgtagaagcggcggtgatgacaggcctggctctgaactgccacataaacaagaagtccttgtttgacaggaagcactacttctatgcagacctccctggaagaagcagagtcaggtgatccccaagacggtgaggatcaagcagatccagttggagcaagacagtggcaaaagcctccacgacaacctgaggtctcagacgctcattgatttgaacagggcaggagtgggccttctggaggtggtcctggagcccgacatgtcctgtggagaagaggcggcaacagctgtcagggagctgcagctgatccttcaagccctggggaccagccaggcgaacatggcagagggccagttgagagtggatgccaatatatccgtgcatcaccctggggagcctttgggcgttcgaacggaagtgaagaatctcaacagcatcaggttcctggccaaagccatagactatgaaattcagaggcaaatcaatgaacttgagaatggaggtgaaattctgaacgaaacacgctcatttcatcacaagctggggtgcaccatgtcaatgagagacaaagaaggaaaacaggactacaggttcatgccagaacccaacctgcctcccctggtgctctacgacgccacatctctgcccgcaggtgcagacccacagcaagtgatcaatattgaccagattcgggagacactcccggagctccccagtgtgacccgagagaagcttgtccaacagtatgggatgctgctggaacacagcttcactttgctgaacgaagtcggcctactggagttcttccaaaatgtgataaaagaaactagggcagagccaaaaaaggtgactagttgggtcctcaacacttttctgggctatttaaagcaacagaacctcgctgtcagtgagagtcctgtcacaccctctgcactcgctgagcttcttgacctgctggacagcagaacaatttcttcatcagcagctaaacaggtgtttgaggaactgtggaagagggaaggcaagactccagggcagattgtttcagaaaagcagcttgaactgatgcaggaccagggggcactggagcagctctgccactctgtgatggaggcccatcctcaagtggtaatggatgtgaagaacagaaaccccagagctataaataaactgattgggttggtccggaaagcgactcaaagccgagcagatccagtcatgataaaggagatcctggagaagaagctgtcattgtgagatgtttgggatccccttgcccaagggacaacaacaaacagtgcagcctgactgggaacaggatcctgtgaaagctgatgcccatgtgccctgagagctgcctctcaatccctgtcccaagccacagctatggcattaatgtcaccagtgttctcaccctctaggccctgtgcctggaggtgcctccacagccgaccagcagccaccccgcctgcttcatccacatcaggagggtccggtgaggctgcagcagtggttaaggagtaacaccttcttgtattaaggaattttaaactaaataaaatgtatgt

SEQ ID NO: 137705 - DNA, 605 bp, Homo sapiens
  Payload ID: 6963
  Gene Symbol: GATB
  Gene Name: glutamyl-tRNA(Gln) amidotransferase, subunit B
  ENST ID: ENST00000508611
  CDS Start-End: 9-356
gagttacaatggcggcgcccatgctgcgctggggctgccgtggaagacgttgggctttcgcccgggttgacggtggttcttgccaccgaagaggggctccgactgggtccacatccaaccagattaggggagagagctcagtggctcagcagcccctccacacggcccagaagacgaggaaaggtgaacacaaatgggctgctgtggtaggtttggaaattcatgcccagatttcctccaactctaaactcttctctggatctcaagttcgcttttcagcacctccaaattctttggtttctttttttgatgcatctctacctggaactttgccgagtgaagacagcccaagttgaattttcccattctgtatcctatcctcagaacatgctgacctggacttccatctgtcacaagcagcttgactaagatcctaggaaattcctttttttcttggcattcttctaactgacactctctgtttactgggccctctgtgcatctgtaacgtgtgatgactgatgcttataattctgaccttgaagtacttcatggcttctaaatcatcaaaaaaagattaaagcatattctcagtatcactgtaa

SEQ ID NO: 137706 - DNA, 1345 bp, Homo sapiens
  Payload ID: 6963
  Gene Symbol: GATB
  Gene Name: glutamyl-tRNA(Gln) amidotransferase, subunit B
  ENST ID: ENST00000511538
  CDS Start-End: 1-441
atgctgcgctggggctgccgtggaagacgttgggctttcgcccgggttgacggtggttcttgccaccgaagaggggctccgactgggtccacatccaaccagattaggggagagagctcagtggctcagcagcccctccacacggcccagaagacgaggaaaggtgaacacaaatgggctgctgtggtaggtttggaaattcatgcccagatttcctccaactctaaactcttctctggatctcaagttcgcttttcagcacctccaaattctttggtttctttttttgatgcatctctacctggaactttgccggttctcaacaggaggtgtgtagaagcggcggtgatgacaggcctggctctgaactgccacataaacaagaagtccttgtttgacaggaagcactacttctatgcagacctccctagggccagttgagagtggatgccaatatatccgtgcatcaccctggggagcctttgggcgttcgaacggaagtgaagaatctcaacagcatcaggttcctggccaaagccatagactatgaaattcagaggcaaatcaatgaacttgagaatggaggtgaaattctgaacgaaacacgctcatttcatcacaagctggggtgcaccatgtcaatgagagacaaagaaggaaaacaggactacaggtggttactccttatggcaaaataccgctatatatcgggggctggggcgtatttcaagttcatttaaagttcaacataatgatcctgaacaatttttagaaaccactttttgtcattgttgtaacatgatgggacatctagacttcctctttgatatgcataccgagagaagtactagtttcttgatttggtagcctcagatctggtgccttgtttgactgattcagcttttggaagaacttgttcatccactgctgtgtcaaagttgtcatagttgagctaggaggatggctgtagaggttggggcctaggctgttcttattctaatgttcagtaactgattcagtaatacgctgaatgaagctccttgagaagaaatgagaaaagagatgttgatagcgtatgttgatggtagttcccttgaacctcatatgatgctatttcatgataaattaagttgaactacttaatatgagacccacaaataaagcaaatgctaagaacaggcataagataattgaaacttttatttttttctcattgagtttagcaggttgaagttttaagcaacaaagttgtgagatcggccacctttcctttgtgaagggcagaaagatgcaaatgtagctattatcaatgaggatcaaaatttgcatgtttatgtgggaaaga

SEQ ID NO: 137707 - DNA, 779 bp, Homo sapiens
  Payload ID: 6963
  Gene Symbol: GATB
  Gene Name: glutamyl-tRNA(Gln) amidotransferase, subunit B
  ENST ID: ENST00000515884
  CDS Start-End: 1-424
ccgtggaagacgttgggctttcgcccgggttgacggtggttcttgccaccgaagaggggctccgactgggtccacatccaaccagattaggggagagagctcagtggctcagcagcccctccacacggcccagaagacgaggaaaggtgaacacaaatgggctgctgtggtaggtttggaaattcatgcccagatttcctccaactctaaactcttctctggatctcaagttcgcttttcagcacctccaaattctttggtttctttttttgatgcatctctacctggaactttgccggttctcaacaggaggtgtgtagaagcggcggtgatgacaggcctggctctgaactgccacataaacaagaagtccttgtttgacaggaagcactacttctatgcagacctccctagggccagttgagagtggatgccaatatatccgtgcatcaccctggggagcctttgggcgttcgaacggaagtgaagaatctcaacagcatcaggttcctggccaaagccatagactatgaaattcagaggcaaatcaatgaacttgagaatggaggtgaaattctgaacgaaacacgctcatttcatcacaagctggggtgcaccatgtcaatgagagacaaagaaggaaaacaggactacaggttcatgccagaacccaacctgcctcccctggtgctctacgacgccacatctctgcccgcaggtgcagacccacagcaagtgatcaatattgaccagattcgggagacactcccggagctccc

SEQ ID NO: 137708 - DNA, 874 bp, Homo sapiens
  Payload ID: 6963
  Gene Symbol: GATB
  Gene Name: glutamyl-tRNA(Gln) amidotransferase, subunit B
  ENST ID: ENST00000510720
  CDS Start-End: 1-397
gttcatgccagaacccaacctgcctcccctggtgctctacgacgccacatctctgcccgcaggtgcagacccacagcaagtgatcaatattgaccagattcgggagacactcccggagctccccagtgtgacccgagagaagcttgtccaacagtatgggatgctgctggaacacagcttcactttgctgaacgaagtcggcctactggagttcttccaaaatgtgataaaagaaactagggcagagccaaaaaaggtgactagttgggtcctcaacacttttctgggctatttaaagcaacagaacctcgctgtcagtgagaggtgtttgaggaactgtggaagagggaaggcaagactccagggcagattgtttcagaaaagcagcttgaactgatgcaggaccagggggcactggagcagctctgccactctgtgatggaggcccatcctcaagtggtaatggatgtgaagaacagaaaccccagagctataaataaactgattgggttggtccggaaagcgactcaaagccgagcagatccagtcatgataaaggagatcctggagaagaagctgtcattgtgagatgtttgggatccccttgcccaagggacaacaacaaacagtgcagcctgactgggaacaggatcctgtgaaagctgatgcccatgtgccctgagagctgcctctcaatccctgtcccaagccacagctatggcattaatgtcaccagtgttctcaccctctaggccctgtgcctggaggtgcctccacagccgaccagcagccaccccgcctgcttcatccacatcaggagggtccggtgaggctgcagcagtggttaaggagtaacaccttcttgtattaagga

SEQ ID NO: 137709 - DNA, 1893 bp, Homo sapiens
  Payload ID: 6963
  Gene Symbol: GATB
  Gene Name: glutamyl-tRNA(Gln) amidotransferase, subunit B
  ENST ID: ENST00000515812
  CDS Start-End: 18-1568
aagaccctggagttacaatggcggcgcccatgctgcgctggggctgccgtggaagacgttgggctttcgcccgggttgacggtggttcttgccaccgaagaggggctccgactgggtccacatccaaccagattaggggagagagctcagtggctcagcagcccctccacacggcccagaagacgaggaaaggtgaacacaaatgggctgctgtggtaggtttggaaattcatgcccagatttcctccaactctaaactcttctctggatctcaagttcgcttttcagcacctccaaattctttggtttctttttttgatgcatctctacctggaactttgccggttctcaacaggaggtgtgtagaagcggcggtgatgacaggcctggctctgaactgccacataaacaagaagtccttgtttgacaggaagcactacttctatgcagacctccctgcaggctaccaaattacccagcagaggctcccaattgctgtgaatgggagcttgatatatggcgtctgtgcagggaagaagcagagtcaggtgatccccaagacggtgaggatcaagcagatccagttggagcaagacagtggcaaaagcctccacgacaacctgaggtctcagacgctcattgatttgaacagggcagagggccagttgagagtggatgccaatatatccgtgcatcaccctggggagcctttgggcgttcgaacggaagtgaagaatctcaacagcatcaggttcctggccaaagccatagactatgaaattcagaggcaaatcaatgaacttgagaatggaggtgaaattctgaacgaaacacgctcatttcatcacaagctggggtgcaccatgtcaatgagagacaaagaaggaaaacaggactacaggttcatgccagaacccaacctgcctcccctggtgctctacgacgccacatctctgcccgcaggtgcagacccacagcaagtgatcaatattgaccagattcgggagacactcccggagctccccagtgtgacccgagagaagcttgtccaacagtatgggatgctgctggaacacagcttcactttgctgaacgaagtcggcctactggagttcttccaaaatgtgataaaagaaactagggcagagccaaaaaaggtgactagttgggtcctcaacacttttctgggctatttaaagcaacagaacctcgctgtcagtgagagtcctgtcacaccctctgcactcgctgagcttcttgacctgctggacagcagaacaatttcttcatcagcagctaaacaggtgtttgaggaactgtggaagagggaaggcaagactccagggcagattgtttcagaaaagcagcttgaactgatgcaggaccagggggcactggagcagctctgccactctgtgatggaggcccatcctcaagtggtaatggatgtgaagaacagaaaccccagagctataaataaactgattgggttggtccggaaagcgactcaaagccgagcagatccagtcatgataaaggagatcctggagaagaagctgtcattgtgagatgtttgggatccccttgcccaagggacaacaacaaacagtgcagcctgactgggaacaggatcctgtgaaagctgatgcccatgtgccctgagagctgcctctcaatccctgtcccaagccacagctatggcattaatgtcaccagtgttctcaccctctaggccctgtgcctggaggtgcctccacagccgaccagcagccaccccgcctgcttcatccacatcaggagggtccggtgaggctgcagcagtggttaaggagtaacaccttcttgtattaaggaattttaaactaaataaaatgtatgttggagatactgtta

SEQ ID NO: 137710 - DNA, 372 bp, Homo sapiens
  Payload ID: 6964
  Gene Symbol: GATC
  Gene Name: glutamyl-tRNA(Gln) amidotransferase, subunit C
  ENST ID: ENST00000229384
  CDS Start-End: 231-372
atctaggcgggtggcggagcaagccgggaggcacttcggagcgccggtgacccacactccccgcctcatccctcctccagggcagtggccggatcacggctgcggtgatcgagcacctggagcgtctagcgcttgtggacttcggcagccgcgaggcagtggcgcgactggagaaagctatcgccttcgccgaccggctacgcgccgtggacacagacggggtggagcccatggaatcggtcctggaggacagatgtctatacctgagatccgacaatgtggtagaaggcaactgtgctgatgaattactacaaaactcccatcgcgtcgtggaggagtactttgtggcccccccaggtaatatctctttgc

SEQ ID NO: 137711 - DNA, 4244 bp, Homo sapiens
  Payload ID: 6964
  Gene Symbol: GATC
  Gene Name: glutamyl-tRNA(Gln) amidotransferase, subunit C
  Uniprot ID: O43716
  ENST ID: ENST00000551765
  CDS Start-End: 44-454
ggcgttacgcgcgggcgcactgcgggggccaaggaaggaagaaatgtggtcgcggttggtgtggctgggccttcgggcccctctgggcgggcgccagggcttcacctccaaggcggatcctcagggcagtggccggatcacggctgcggtgatcgagcacctggagcgtctagcgcttgtggacttcggcagccgcgaggcagtggcgcgactggagaaagctatcgccttcgccgaccggctacgcgccgtggacacagacggggtggagcccatggaatcggtcctggaggacagatgtctatacctgagatccgacaatgtggtagaaggcaactgtgctgatgaattactacaaaactcccatcgcgtcgtggaggagtactttgtggcccccccaggtaatatctctttgccaaagctggatgaacaagagccattcccacacagctgagtagctcattctggaaagggggtactctgtgaacatgtggaagcataatgacagtatttttttactgtgaatactaatgttcctgcttttttcagtcccctgaaaaaatggatgctcaagcatttcttaataacagattcttctgaagacagaattgggaaagatctggccccaacaaggcagtgagttcctgatgctaactgaggtgaaagaaaagcaaaagtcagcttccaaggaattcacttaacaggcctgttcagtatggaagacattatttatctgcctttaactccccccaaaggaccataccaactgcatgaaagtgaacttttctatctacgtaactggtagacggagcatcttgatcactatgtgacaaccttggctgtcatttttagttgccatttgcattgatttgagcagccctatctttaccgaacatacctgaatttgttcctgggctcccactttcttcccagaagagggctaacttcctactaaggtctgaagagtgttgaaagtagactagagcttgggaactcctaacctagaactatctgccatcccacaaagtgattatatgccaaagggatactagtcatacctagtgtttctctttctgaaaagagaacttatcctaaaattagccctgggcctgggacaaaggagccctctccgcccccaaaatgattattaaattgagatgagtccaggataaaactcagataccaaggataaatgaaacttatttagggataaaagtgggctgggcgcagtggctcactcctgtaatcccagcactttgggaggctgagacgggcggatcacaaggtcaggagatcaagaccatcctggctaatgcggtgaaacctcatctctactaaaaatacaaaaaattagctgggtgtgatgacaggtgcctgtagtcccagctactcgggaggctgaggcaggagaatggcgtgaacccgggagacggagcttgcagtaagccgagatcgcaccactgcactccagcctgggcgacagagcaagtctcaaaaaaaaaaaaaaagtgatagaatcagagagtttttcctctaaccaaactgccaaagttggttttggctaagaatttcccaataatatttatgctgctgctcatttttttagttttctgagacaggggtctccctctgtcacccaggctggagtgcagtggtgacagatcactgcagcctccaactcctgggctcaagtgatcctcccacctcagcctcctaagtaactgggactacatatgtgcatcaccacgtccagttaatttttttttaagtagaggtgggggttttgctatgttgcctatctggtcgtgaactcctggcctcaagggatcctctggcatgccttggcctcccaaagggctaggatcacaggcaaaagccaccgtgtgtttatttttcccattcccttcctttatctgcaatgcttttttctttaaggcagcctaatttacaagcttggccttgaattaaaagagaacccagaacccgctcttggagtttacgttctcaaaccaacatcagagcaactgtctatccccatataaataaagttatctacccctgctcctaactgggtacaagttatgactacaactcagtgattttttaaattagtgtgcctatttggtgaaatctgtgaacttaatcaaggacaaccacacatgtcaattactaaacatttaaaatatatttctaaacagaatgggccgactcagtcacagtaactgttgatctccatagtagagcaacccacaaagacagaactgatttttttcccataatcaggggtgaaaaatatacaacttgtttctgaaccaaaaccacaatttctgcagtttaaaatgtttcactgctaatatggccctggtagaaattatgtagttttttttcttctttaaaaaaaaaaaattaaaaaaatttcctaagacactaaatcctcaatctggaatgtagattctgagcacaaagcagctcagttaacctaaaaaataaagaaaaaattcccatcacctgtctcagtagggcctgaaaggagagaagtagtgtggggaacccctgctttggtatggagagtcacggccccttgacccagaccgagaccgtgagtagccatagctggtgcttctctcaggataaactcggatgtaggaagtttcaccctgaaatgcaaacaaaaacaaaaagagtaaaggggaaaaaaatcagagccagaagaataagcaaaccaacatctaacaataatagttaagtattgagcacttactgtgtactctgtgcctggcatgaggctatctcattaaaccttcataacattatgaggtaggtactcttactatcccatttcaagaatgaagaaaattaagacttaagttatatcatttgcccaaggtaacacaataaatgccaatttgacatgttgatactcaattaactatgataaacaatatatctgaattactgccattgacccccctcaaagctaagaactggaaaggatctcaggggtcatatagtttaatcccctgccacctcatgtatgcatctttggatgggcatctatggaaggagctagcctgtatttaataccttccagatgtgaggacctgagctagatgctttagacgttatcctcttgctctagattcctggcaagtcttgtgatggtgctattatgtgaccattttgcccatgaaggaatcgaggtcccaagagtagttcaggtaaggaattaataagcagcagaggagtcatgtccaggctggcttgtccccaggccctctgccttcagccaccattctcagaagatccaaagatgccaaggggaaagaagccggatgctttttcaccttaggtgaaagtcagtaattggagttaccctttctgaggccctgctttgcagtataactgaggatcaggtgctgttctgtttctgcttcaaattcaagtcctagaggacagtctgaacaaaagcatcattaaaccagggaaggaccaacctctaagccaaaaactaggcaattatatgaatcctcagaaaaagaaatgagcccagagacctgtgtccccaaacatccgtaaatctcatagtaaggcaggacaggataaccagaaaaaaacaatgtccaactggtctggtttctggtctcaatggtaccaaagggatagtcaccacctcaatcaaactgagatccaaaacagcagctgctttcctacaaggaaagacatcaagaactactgagtctgaagggtgacataatcaaccacaagaaaatgttacggtttagcctggcacagtggtgcatgcctgcagtcccaactactggagaggctgaggtgggaggactgcttgggcccaggagttcaaggtcagcctcggcaatataatgagactgtctctaaaatcaaaaattagagaaatataaaaattataaaattaaaaaagaaaatgtcatgatagctcaggtttcagagaggatgctgcactactctgggaaaaaagtgaagtgacagctcagccctgacagcaggacctagaagggctgagatgaagaggctgacctgtagagctcagcctggacccacaggaggggtagttgagttcacagagggatactgccatttaagctggttgtgaatggggtggtatgaagaccgactgcactagtattctctccaggttacaaataccatgaccaaactgtgtaatgtgatactaatatgcagaataaagcatattaaaaaacaaa

SEQ ID NO: 137712 - DNA, 931 bp, Homo sapiens
  Payload ID: 6964
  Gene Symbol: GATC
  Gene Name: glutamyl-tRNA(Gln) amidotransferase, subunit C
  ENST ID: ENST00000548171
  CDS Start-End: 38-403
acgcgcgggcgcactgcgggggccaaggaaggaagaaatgtggtcgcggttggtgtggctgggccttcgggcccctctgggcgggcgccagggcttcacctccaaggcggatcctcagggcagtggccggatcacggctgcggtgatcgagcacctggagcgtctagcgcttgtggacttcggcagccgcgaggcagtggcgcgactggagaaagctatcgccttcgccgaccggctacgcgccgtggacacagacggggtggagcccatggaatcggtcctggaggacaggttggagtgcagtggtgtgatctccgctcactacaaactctgcttcctacattcaagtgattcttgtgcctcagcctcccaggtagctgggattacagatgtctatacctgagatccgacaatgtggtagaaggcaactgtgctgatgaattactacaaaactcccatcgcgtcgtggaggagtactttgtggcccccccaggtaatatctctttgccaaagctggatgaacaagagccattcccacacagctgagtagctcattctggaaagggggtactctgtgaacatgtggaagcataatgacagtatttttttactgtgaatactaatgttcctgcttttttcagtcccctgaaaaaatggatgctcaagcatttcttaataacagattcttctgaagacagaattgggaaagatctggccccaacaaggcagtgagttcctgatgctaactgaggtgaaagaaaagcaaaagtcagcttccaaggaattcacttaacaggcctgttcagtatggaagacattatttatctgcctttaactccccccaaaggaccataccaactgcatgaaagtgaacttttctatctacgtaactggtagacggagcatcttgatcactatgtgacaaccttgg

SEQ ID NO: 137713 - DNA, 1211 bp, Homo sapiens
  Payload ID: 6965
  Gene Symbol: GLRX
  Gene Name: glutaredoxin (thioltransferase)
  Uniprot ID: P35754
  ENST ID: ENST00000237858
  CDS Start-End: 344-664
gtaagcactttatgcttccccagaggtgactaaactctgatcattgccaatgggcaggcactccccaaatgtccaaggacaacaaagatacccagagtgtctttcatagctaccaatgattaaatagcaagtattgcattcctgggcattgctaactagtgaagtataccagatggaaatgtcttcgaagctgtccctttaaaactcgagcaagctaccaggcaaactccgcctccagggaggttccttattaaataggagccaactggctgggtcggggctcaataccccaagcaatacctgcaactgaggattcttcccggggagaccgcagcccatcggcatggctcaagagtttgtgaactgcaaaatccagcctgggaaggtggttgtgttcatcaagcccacctgcccgtactgcaggagggcccaagagatcctcagtcaattgcccatcaaacaagggcttctggaatttgtcgatatcacagccaccaaccacactaacgagattcaagattatttgcaacagctcacgggagcaagaacggtgcctcgagtctttattggtaaagattgtataggcggatgcagtgatctagtctctttgcaacagagtggggaactgctgacgcggctaaagcagattggagctctgcagtaaccacagatctcataggaaatgttcaacaattctgtgaaaggtcacaggacccaattggagaaatcatatgaaaagcatagttggtcttggtgtcatatggatcagaggcacaagtgcagaggctgtggtcatgcggaacactctgttatttaagatggctatccagataatcctgaacactgtgtatttattttatttagactaccagcaaagattaaagcatgaaatgtaaaacatctgataaaacttacagccccctacaccaagagtgtatctgtgaaagagctcctacactttgaaaacttaagaatcccttatcatgaagtttgcctgttctagaattgtaagattgttaatttccttcaatctctagtgacaacacttaatttcttttctaataaaaaaaacctatagatgattcagtgatttttgtccaattcatttgcatgttctcaagacattaaggaatgttatgcgaaatacactaacttaaaactgtgtttatatttggccctgccattataaataaagacacgtgctgctgtca

SEQ ID NO: 137714 - DNA, 1366 bp, Homo sapiens
  Payload ID: 6965
  Gene Symbol: GLRX
  Gene Name: glutaredoxin (thioltransferase)
  Uniprot ID: P35754
  ENST ID: ENST00000379979
  CDS Start-End: 53-373
aagcaatacctgcaactgaggattcttcccggggagaccgcagcccatcggcatggctcaagagtttgtgaactgcaaaatccagcctgggaaggtggttgtgttcatcaagcccacctgcccgtactgcaggagggcccaagagatcctcagtcaattgcccatcaaacaagggcttctggaatttgtcgatatcacagccaccaaccacactaacgagattcaagattatttgcaacagctcacgggagcaagaacggtgcctcgagtctttattggtaaagattgtataggcggatgcagtgatctagtctctttgcaacagagtggggaactgctgacgcggctaaagcagattggagctctgcagtaaccacagaacaggccccatgctgacgtccctcctcaagagctggatggcattgcaaatgatgacagcacttctggtggatgaatttgggggcacaaacagcttttttcctcttttggctcagtatttaaaagtggaccaacttgctcttaatcacagggccaagaaggttgacgggccatcttggttttcttctggatgtgctctttggttttcagaagactgtgacaagttctggcccaggattcgctcactgaccctcaattgtcctctttggcatgcgtttcttactgttctccatgtgtcggcatgtctctacctctaagccagtgtttttcaactatgtttatccagactccttctccacaatgatgaatccacagttggttatctgctactgcccattagctaaaatcattttgctgcttgactttatggagtttgtattatgaaatcagtgggtattttgaatgtgttctttctaactacatgcatctctccactcaactccaccccatcccatcccaccttgaaaatcactgctctgaaccagtgttctccaccttgtcctccacagatctcataggaaatgttcaacaattctgtgaaaggtcacaggacccaattggagaaatcatatgaaaagcatagttggtcttggtgtcatatggatcagaggcacaagtgcagaggctgtggtcatgcggaacactctgttatttaagatggctatccagataatcctgaacactgtgtatttattttatttagactaccagcaaagattaaagcatgaaatgtaaaacatctgataaaacttacagccccctacaccaagagtgtatctgtgaaagagctcctacactttgaaaacttaagaatcccttatcatgaagtttgcctgttctagaattgtaagattgttaatttccttcaatctctagtgacaacacttaatttcttttctaataaaaaaaacctatagatgattcagtg

SEQ ID NO: 137715 - DNA, 533 bp, Homo sapiens
  Payload ID: 6965
  Gene Symbol: GLRX
  Gene Name: glutaredoxin (thioltransferase)
  Uniprot ID: P35754
  ENST ID: ENST00000508780
  CDS Start-End: 65-385
gctcaataccccaagcaatacctgcaactgaggattcttcccggggagaccgcagcccatcggcatggctcaagagtttgtgaactgcaaaatccagcctgggaaggtggttgtgttcatcaagcccacctgcccgtactgcaggagggcccaagagatcctcagtcaattgcccatcaaacaagggcttctggaatttgtcgatatcacagccaccaaccacactaacgagattcaagattatttgcaacagctcacgggagcaagaacggtgcctcgagtctttattggtaaagattgtataggcggatgcagtgatctagtctctttgcaacagagtggggaactgctgacgcggctaaagcagattggagctctgcagtaaccacagaaatggagtatcactatgttgctcaagctagactcaaactcctggactcaagggatcctcccgcctcagccttccaagtcactgggattataagtgcatgccatcccacgcagctactctcttgaatactcgagaaagccaa

SEQ ID NO: 137716 - DNA, 473 bp, Homo sapiens
  Payload ID: 6965
  Gene Symbol: GLRX
  Gene Name: glutaredoxin (thioltransferase)
  Uniprot ID: P35754
  ENST ID: ENST00000512469
  CDS Start-End: 50-370
caatacctgcaactgaggattcttcccggggagaccgcagcccatcggcatggctcaagagtttgtgaactgcaaaatccagcctgggaaggtggttgtgttcatcaagcccacctgcccgtactgcaggagggcccaagagatcctcagtcaattgcccatcaaacaagggcttctggaatttgtcgatatcacagccaccaaccacactaacgagattcaagattatttgcaacagctcacgggagcaagaacggtgcctcgagtctttattggtaaagattgtataggcggatgcagtgatctagtctctttgcaacagagtggggaactgctgacgcggctaaagcagattggagctctgcagtaaccacaggtgagtggcaggtgaggtgctgggccaggaacatgggagaccgtggaattcttctgtcgtggtttgttatactgtatgacagcattctggttggggg

SEQ ID NO: 137717 - DNA, 632 bp, Homo sapiens
  Payload ID: 6965
  Gene Symbol: GLRX
  Gene Name: glutaredoxin (thioltransferase)
  Uniprot ID: P35754
  ENST ID: ENST00000505427
  CDS Start-End: 61-381
aataccccaagcaatacctgcaactgaggattcttcccggggagaccgcagcccatcggcatggctcaagagtttgtgaactgcaaaatccagcctgggaaggtggttgtgttcatcaagcccacctgcccgtactgcaggagggcccaagagatcctcagtcaattgcccatcaaacaagggcttctggaatttgtcgatatcacagccaccaaccacactaacgagattcaagattatttgcaacagctcacgggagcaagaacggtgcctcgagtctttattggtaaagattgtataggcggatgcagtgatctagtctctttgcaacagagtggggaactgctgacgcggctaaagcagattggagctctgcagtaaccacagggccaagaaggttgacgggccatcttggttttcttctggatgtgctctttggttttcagaagactgtgacaagttctggcccaggattcgctcactgaccctcaattgtcctctttggcatgcgtttcttactgttctccatgtgtcggcatgtctctacctctaagccagtgtttttcaactatgtttatccagactccttctccacaatgatgaatccacagttggttatctgctactgccca

SEQ ID NO: 137718 - DNA, 701 bp, Homo sapiens
  Payload ID: 6966
  Gene Symbol: GLRX2
  Gene Name: glutaredoxin 2
  Uniprot ID: Q9NS18
  ENST ID: ENST00000367439
  CDS Start-End: 50-544
gatccgcggtgtccggcagtagagctcgctgcagatccgggctctgaccatgatttggcgccgcgcggcgctggcggggacgcggctggtttggagcaggagcggctcggcaggctggcttgacagggcggcgggagctgcgggagctgcggcagctgcggcctctgggatggagagcaatacatcatcatctttggagaatttagcgacggcgcctgtgaaccagatccaagaaacaatttctgataattgtgtggtgattttctcaaaaacatcctgttcttactgtacaatggcaaaaaagcttttccatgacatgaatgttaactataaagtggtggaactggacctgcttgaatatggaaaccagttccaagatgctctttacaaaatgactggtgaaagaactgttccaagaatatttgtcaatggtacttttattggaggtgcaactgacactcataggcttcacaaagaaggaaaattgctcccactagttcatcagtgttatttaaaaaaaagtaagaggaaagaatttcagtgatgtttatactaataagtttgctagtacagtgtcagttatttaaagtggtaatgcccgataatgtcttttaaatgtttgaggatgttttaaatacatgcattgtcttcacgaagaagatgtaaaaataatgaacaataaattgcggtggaaacctctt

SEQ ID NO: 137719 - DNA, 1131 bp, Homo sapiens
  Payload ID: 6966
  Gene Symbol: GLRX2
  Gene Name: glutaredoxin 2
  Uniprot ID: Q9NS18
  ENST ID: ENST00000367440
  CDS Start-End: 477-974
aaggctattattaccaccactgagtggcttaaataatcctgtcaacagcaatcgcccatttccaaagccatggtgaaacatctctgtgctaatttcttttgttttgtttcctaattttttttttttggcaggtggtgggaaataatctttgtcttctttggagtaaaccttcaacaccggattttttcttttaattatggatgtaaaccccaatatccccataatttacattgggtctcgaccaattgcctaattataagaggatatatttaggctcttatttcatccacacaaaaacttgtgtaacaggtagttggaaacatctgaggcaccactttgattctgttttggatggtcatgttttttctcctccgtttccccagcatgtctgccaccatcctcatgcactgcttccaagtgcctgggagcctttatgagcgtccctaaacctaaaagaatccagaggcggggctcggatgaaccctcgagataagcaagtgagccgcttctcccctctaaaggatgtttacacgtgggtggcactcgctggaatccagcgctcgggcagccctgggaggacgcgctcagctgcgaggaggatggagagcaatacatcatcatctttggagaatttagcgacggcgcctgtgaaccagatccaagaaacaatttctgataattgtgtggtgattttctcaaaaacatcctgttcttactgtacaatggcaaaaaagcttttccatgacatgaatgttaactataaagtggtggaactggacctgcttgaatatggaaaccagttccaagatgctctttacaaaatgactggtgaaagaactgttccaagaatatttgtcaatggtacttttattggaggtgcaactgacactcataggcttcacaaagaaggaaaattgctcccactagttcatcagtgttatttaaaaaaaagtaagaggaaagaatttcagtgatgtttatactaataagtttgctagtacagtgtcagttatttaaagtggtaatgcccgataatgtcttttaaatgtttgaggatgttttaaatacatgcattgtcttcacgaagaagatgtaaaaataatgaacaataaattgcggtggaaacctctt

SEQ ID NO: 137720 - DNA, 1302 bp, Homo sapiens
  Payload ID: 6967
  Gene Symbol: GLRX3
  Gene Name: glutaredoxin 3
  Uniprot ID: O76003
  ENST ID: ENST00000331244
  CDS Start-End: 23-1030
gcttctgtctggcggcggcagcatggcggcgggggcggctgaggcagctgtagcggccgtggaggaggtcggctcagccgggcagtttgaggagctgctgcgcctcaaagccaagtccctccttgtggtccatttctgggcaccatgggctccacagtgtgcacagatgaacgaagttatggcagagttagctaaagaactccctcaagtttcatttgtgaagttggaagctgaaggtgttcctgaagtatctgaaaaatatgaaattagctctgttcccacttttctgtttttcaagaattctcagaaaatcgaccgattagatggtgcacatgccccagagttgaccaaaaaagttcagcgacatgcatctagtggctccttcctacccagcgctaatgaacatcttaaagaagatctcaaccttcgcttgaagaaattgactcatgctgccccctgcatgctgtttatgaaaggaactcctcaagaaccacgctgtggtttcagcaagcagatggtggaaattcttcacaaacataatattcagtttagcagttttgatatcttctcagatgaagaggttcgacagggactcaaagcctattccagttggcctacctatcctcagctctatgtttctggagagctcataggaggacttgatataattaaggagctagaagcatctgaagaactagatacaatttgtcccaaagctcccaaattagaggaaaggctcaaagtgctgacaaataaagcttctgtgatgctctttatgaaaggaaacaaacaggaagcaaaatgtggattcagcaaacaaattctggaaatactaaatagtactggtgttgaatatgaaacattcgatatattggaggatgaagaagttcggcaaggattaaaagcttactcaaattggccaacataccctcagctgtatgtgaaaggggagctggtgggaggattggatattgtgaaggaactgaaagaaaatggtgaattgctgcctatactgagaggagaaaattaataaatcttaaacttggtgcccaactattgtaagaaatatttaattacattgggagcagttcatgatttagtcctcagaaatggactaggaatagaaaattcctgctttctcagttacatgttttgtgtatttcacaatgtcgtgctaaataaatgtatgttacatttttttcccaccaaaaatagaatgcaataaacatcttcaaattattaacaataattgtatgaaaaaagtgtatctttacagcagtattaaacatacagctactataa

SEQ ID NO: 137721 - DNA, 3827 bp, Homo sapiens
  Payload ID: 6967
  Gene Symbol: GLRX3
  Gene Name: glutaredoxin 3
  Uniprot ID: O76003
  ENST ID: ENST00000368644
  CDS Start-End: 23-1030
gcttctgtctggcggcggcagcatggcggcgggggcggctgaggcagctgtagcggccgtggaggaggtcggctcagccgggcagtttgaggagctgctgcgcctcaaagccaagtccctccttgtggtccatttctgggcaccatgggctccacagtgtgcacagatgaacgaagttatggcagagttagctaaagaactccctcaagtttcatttgtgaagttggaagctgaaggtgttcctgaagtatctgaaaaatatgaaattagctctgttcccacttttctgtttttcaagaattctcagaaaatcgaccgattagatggtgcacatgccccagagttgaccaaaaaagttcagcgacatgcatctagtggctccttcctacccagcgctaatgaacatcttaaagaagatctcaaccttcgcttgaagaaattgactcatgctgccccctgcatgctgtttatgaaaggaactcctcaagaaccacgctgtggtttcagcaagcagatggtggaaattcttcacaaacataatattcagtttagcagttttgatatcttctcagatgaagaggttcgacagggactcaaagcctattccagttggcctacctatcctcagctctatgtttctggagagctcataggaggacttgatataattaaggagctagaagcatctgaagaactagatacaatttgtcccaaagctcccaaattagaggaaaggctcaaagtgctgacaaataaagcttctgtgatgctctttatgaaaggaaacaaacaggaagcaaaatgtggattcagcaaacaaattctggaaatactaaatagtactggtgttgaatatgaaacattcgatatattggaggatgaagaagttcggcaaggattaaaagcttactcaaattggccaacataccctcagctgtatgtgaaaggggagctggtgggaggattggatattgtgaaggaactgaaagaaaatggtgaattgctgcctatactgagaggagaaaattaataaatcttaaacttggtgcccaactattacggggtctggctctgtcacccaggctggagtgcagtggcacgattatggctcattgcagcctcgacttctcggggccaagcgatcctcctgcctcagccttctgagtagctgggaccacaggcgtgcaccaccatgcccacctaattttttatttcttgtagagatgaggtctcctgcctcagcctcccaaagtgctggaatttacaggtaggaccaccacacttggtccacttacttataataaacattgatttggtcgttcaggttcctttggtcctcctattgagaacagtttgaagtccatgaaaattttaacaatatttttgatcctgaatctaacatatttgaaaaatagttgctccactaggcttccacagtgcaggcttcaaatgggatggctaaattcacctcatggttcttagttttttttgtacttgtggcacattctcttcatatattaccccaccctgtttgtttgggcagttaagatgctggtactgtctggtggcgataaggaaagggaaacagaagtcagtaattcagacaagaataaacaggatgaaatgcatctattcctaggtaagattagcccaccacctccacactgctgctgtctcttcagctcaggctgtttttctctgttttgattgtgtaaagagtagagtgctgatttgtgtgttacagagggtggtctgtacaagtcataaagctcgacatggccttgcttcctgctaggtgttaggacacccatgatggtggagtctcttggcattctgtgtaattagataaggctgtttatagcattggtccatgagaacttccttgtttctatttaaaatgaaaatcattgtataagtaaaacttcttaaatgtagatagaaatagaatttttactgaaattttatgaagccattggccgcagggatgtgtgtcatggaggagggctccatacttttttggtatacttatctcaaacttaattcatttgcatactgctttttctctaagtgccaactgtcctagtatattttctaagtcaacttttactttcactttatcctaagcaagaatatctttggcatcacagactcagtaagcctgtttttttctaatgcacatacaaataaataaaatgcacaacttttaacataaatggctgcctccaatttgggaaatactgttctggccagaggccgttgctctgataatgtcatgtggttagtgcattttaggaagacctcctttccctttggttgactcctgcaggacataagatatcagtgacgttatcctttgttgagccatcctggtttgagtcaggatgagtgttgagagtttttggggagttgcccctgtgtcctatattattttatcctcttaaagtctgatggtctttggctccactgactccaggtaagttggggtgacagtgcagcatatttctattttctagttgtttctggccagacatggggaaggtcaagacatcttgttcatgcaaacggattgatggccattcctaatctgattttattagtgtattttaggaagtaaagtaagattcttgagcccagctgaacttcccctattgaattttctaacaaaaagagagtttgcgtatgggtttataattgagcctgctcttgtagaaatgttttatcagaattgaaatcctctctgatccccaaattctagagacaaagttgttttctgaatttgagaaatctgttcagttcacaaggaaaggtgacaatgtgtcatttggatgttgtcccacacgtgaggcctcgttgggtgcttgtggtgggagggaccctccaggcaggctttgtatggagggttttcatgtctggacacatttctgttccgagaagcactgctgcgtttttgggagcgtggaccctggccagagcctgtggccagctctgcctgccctccctttcttggcctgctcttttgagtatgtagtggggctttgtgtggcatcctgccaggttaaagctgcatggtgcttaggatagagctggtgctgtggggaggctcttgatgatgggggctgccatctatttgcctgttaactcttagaaaccaaacctcaaatgtcagaatttcctttctagaagaggctggttgaataggaaccagaaaggccctcatacaggcagggctgttcactcctcttgacttgcgtgtttgtgccttccttgtaggaaggcttcttagggaattgttatctgtttaggggaaataagcctgcaggaatgaacttttttttaaaataaaaactcttgatcaaaaatggaaagaaaaaaaccagtgaaacaggctaggtagtttgtggaattctcctttgcaggtgaggggagaaagcagctatctcaagggcacagctacagattgggagctggggcttccatccagggtctgggacacccaaaccttaggcttgcccctcccgggaggcctccccctcagagctatgtgggatgcagttgcctttttacctgtgatgagaaactggtgaattgccaggattctggctctggcttcagtctgcccctttccggggattagagggcattaaccctacttcctacagccaagcagctcttcctcatgactctactttctaactccgggggttgactgattgatttgaagaccgccttgttgatgaatgtgttgaaacttgctatcataatgtaaatgctccttaataaaataacaggacctggtgggttcagttgccttgcccacgtgtgactta

SEQ ID NO: 137722 - DNA, 1921 bp, Homo sapiens
  Payload ID: 6967
  Gene Symbol: GLRX3
  Gene Name: glutaredoxin 3
  Uniprot ID: O76003
  ENST ID: ENST00000481034
  CDS Start-End: 23-1030
gcttctgtctggcggcggcagcatggcggcgggggcggctgaggcagctgtagcggccgtggaggaggtcggctcagccgggcagtttgaggagctgctgcgcctcaaagccaagtccctccttgtggtccatttctgggcaccatgggctccacagtgtgcacagatgaacgaagttatggcagagttagctaaagaactccctcaagtttcatttgtgaagttggaagctgaaggtgttcctgaagtatctgaaaaatatgaaattagctctgttcccacttttctgtttttcaagaattctcagaaaatcgaccgattagatggtgcacatgccccagagttgaccaaaaaagttcagcgacatgcatctagtggctccttcctacccagcgctaatgaacatcttaaagaagatctcaaccttcgcttgaagaaattgactcatgctgccccctgcatgctgtttatgaaaggaactcctcaagaaccacgctgtggtttcagcaagcagatggtggaaattcttcacaaacataatattcagtttagcagttttgatatcttctcagatgaagaggttcgacagggactcaaagcctattccagttggcctacctatcctcagctctatgtttctggagagctcataggaggacttgatataattaaggagctagaagcatctgaagaactagatacaatttgtcccaaagctcccaaattagaggaaaggctcaaagtgctgacaaataaagcttctgtgatgctctttatgaaaggaaacaaacaggaagcaaaatgtggattcagcaaacaaattctggaaatactaaatagtactggtgttgaatatgaaacattcgatatattggaggatgaagaagttcggcaaggattaaaagcttactcaaattggccaacataccctcagctgtatgtgaaaggggagctggtgggaggattggatattgtgaaggaactgaaagaaaatggtgaattgctgcctatactgagaggagaaaattaataaatcttaaacttggtgcccaactattacggggtctggctctgtcacccaggctggagtgcagtggcacgattatggctcattgcagcctcgacttctcggggccaagcgatcctcctgcctcagccttctgagtagctgggaccacaggcgtgcaccaccatgcccacctaattttttatttcttgtagagatgaggtctcctgcctcagcctcccaaagtgctggaatttacaggagtgtcggctgtgccccttgtgatgggtgaggaaaggtatccacctttctgaatcagacacaagctgcagtagcttcctgatgcctcattcaccaggatgggtaactttaaagacaagttttataactggcatcccatctggtttcagagtcttgggggcttttttcatacagctttgtctgatatttagagacattcagattcagaagccatgagttcagttagctcatgggccgggcacgtgcactgactcactggctgcagcagaacacgttgagggagtcttggtgcacttaggtcactgtaaggttctagggctgggagctgggatttgaaccaggatctgtcagcgcagccccagtgctgtgcttgaagcctcgtgccacactggctttgaggtagcacgctgcaagttagtgagtggagttgcccaagtctggggcttctgaaatgacctggtatttttatgttcctgttagaaatggtgtggctttcacaaattaagtgccaggctgggcacaatggctcgtgcttgtaatcccagcactttgggaggcggaggcaggcgggttgcttgagctccggagcttgagaccagcctgagcaacatggcgaaacctcatatctacaaaaaataaaaaattaactggtca

SEQ ID NO: 137723 - DNA, 1564 bp, Homo sapiens
  Payload ID: 6968
  Gene Symbol: GLRX5
  Gene Name: glutaredoxin 5
  Uniprot ID: Q86SX6
  ENST ID: ENST00000331334
  CDS Start-End: 498-971
cgcattgccatggcaattcaaccgccgctgacaccggaaccggaaacttcatcaggaggtgaccccttcccggcgttccgcggaacgggcgagtcccgcgcctctcccagttgtctcggcgtagtccagctggcctcattggctcacaggaggaaagtcgtcttccctcttgttttgcctctcgttgccctgcaagcgtgaccctgatggacatccagtctctccaattaactaacaaagcggttgccgacgaccaatagtaaggcagtaggatgaggctccggcataaggcccacctcctacctgccgggcgggacgagcaacatgattggtggaatcgagtaattactgatcagtattgtccaatcacggagggcagtttagagccggcccaatgagggcctccagggggcgggtcggactgccgcgggccggggagcgctctgggtggccagctgtgggcccgggccgtcgtgggctccggcttgcgtgcggagatgagcgggtccctcggccgagctgcggcggctctgctccgctgggggcgcggcgcgggcggcggtggcctttggggtccgggcgtgcgggcggcgggctcgggcgcgggcggcggcggctcggcggagcagttggacgcgctggtgaagaaggacaaggtggtggtcttcctcaaggggacgccggagcagccccagtgcggcttcagcaacgccgtggtgcagatcctgcggctgcacggcgtccgcgattacgcggcctacaacgtgctggacgacccggagctccgacaaggcattaaagactattccaactggcccaccatcccgcaagtgtacctcaatggcgagtttgtagggggctgtgacattcttctgcagatgcaccagaatggggacttggtggaagaactgaaaaagctggggatccactccgcccttttagatgaaaagaaagaccaagactccaagtgagggcggccaagtcctcgctgagcagagagggagccgttcatgtcagagactcactgccagaaaagccttacccattttggttttcactattgagaccgcaactgcttgcactgatcattttggttcgtgagcagttggtgattttagttggtctggtgttcgggctaagaatattttattgtggacttaattacaaccactgcactgtaatgattcaatgctgtattatgatattgctgtaaacaaaattcattcttatattgtcacttattctttgcctgattcagaagttaaataggagctttggaatcattattcatgacccctctgcaaatgtgtcagtctccaaagagagtatctccccccaaattttgtgtagcttcttttgttatggaaaatggtgaacaaaaaaagaaactgtgataactggggcgttgttttttaaaataaactccagcacagggatgctgtgcatgcctgagttgattccgaagtgcatatgtctgtaaggatttggagtgcctgcagtgttttatgtgtgggaagtaagggtgagtctcatattcttctattaaatttgccacaagaattgc

SEQ ID NO: 137724 - DNA, 1863 bp, Homo sapiens
  Payload ID: 6968
  Gene Symbol: GLRX5
  Gene Name: glutaredoxin 5
  ENST ID: ENST00000557731
  CDS Start-End: 1-412
cggagcagccccagtgcggcttcagcaacgccgtggtgcagatcctgcggctgcacggcgtccgcgattacgcggcctacaacgtgctggacgacccggagctccgacaagtcatcatccttgtggctcagaattgaacagagtagttgcacagctgcgctgtcacagagtgtccctcatctcatgtgtgtcctcagagccatttgcacacaggactgatcacatgcatgctggttggtttcttggctgctgtgagcgcttaagagcagagcgggtctcactcccccacccctcagccctggacagggaccttgctgagctctgggccttcattagactcaccagtcacttcgggttctgcacagagcctcatcatccactccacagagagcccatcacagtggctggatagatgggaactgacaacccatagctgtgggacagggatttttccctgggtaaaagtaattgttaaaaattaaaaaaaaaaaaaactcaacaactcatcatctcgaggagaagtgactgacggcctgcaccaacttagacagtcacagtcatgaaaagtgcacaggtgggattgcccgagttggccatgaattaccgtgatggatccatttggaaatgaagttggttgtgacatttcttcaagttttgtttcgcttgaagcttgactggtagatggagaattttggccttatgtatcttatgtgacttgcattacccagtccagtcctctgccattaatctaaggtccgcaatgtatcaggtattttactgagaatcttgcttacctaattctcacaaaaaaaaaaaccttgggagatgagggtggaaacaggatgagaggtcaggtgacttgtctgagggctgacggtttgtaattggaagagtcagggcctaaccactggtctctttgacacaaaaactcatgctcttagtggcaagcacagtgttctcaagattgggggaagccagggagggacagtgggttgtctgctactagtgggtcaaaattacatatttagtcatgaatggttcagcttttaccatttaaataacaaataaatgttctttctccataggcattaaagactattccaactggcccaccatcccgcaagtgtacctcaatggcgagtttgtagggggctgtgacattcttctgcagatgcaccagaatggggacttggtggaagaactgaaaaagctggggatccactccgcccttttagatgaaaagaaagaccaagactccaagtgagggcggccaagtcctcgctgagcagagagggagccgttcatgtcagagactcactgccagaaaagccttacccattttggttttcactattgagaccgcaactgcttgcactgatcattttggttcgtgagcagttggtgattttagttggtctggtgttcgggctaagaatattttattgtggacttaattacaaccactgcactgtaatgattcaatgctgtattatgatattgctgtaaacaaaattcattcttatattgtcacttattctttgcctgattcagaagttaaataggagctttggaatcattattcatgacccctctgcaaatgtgtcagtctccaaagagagtatctccccccaaattttgtgtagcttcttttgttatggaaaatggtgaacaaaaaaagaaactgtgataactggggcgttgttttttaaaataaactccagcacagggatgctgtgcatgcctgagttgattccgaagtgcatatgtctgtaaggatttggagtgcctgcagtgttttatgtgtgggaagtaagggtgagtctcatattcttctattaaatttgccacaagaattgccgtcga

SEQ ID NO: 137725 - DNA, 991 bp, Homo sapiens
  Payload ID: 6969
  Gene Symbol: GRXCR1
  Gene Name: glutaredoxin, cysteine rich 1
  Uniprot ID: A8MXD5
  ENST ID: ENST00000399770
  CDS Start-End: 1-873
atgcttaaaagggagatgaagccagaaagtgacaggccacggaaagtccggtttcggatcgcgtcctctcacagtgggcgagttctgaaggaagtgtatgaagatgggcaaccgtcaggctctctggattctgaatgtgccagtatctgtgggatagatggactaggtgattccgatggacagcagaatggccacatagagtcagaaggtgatgagaatgagaatgaccaggatagcttgctggtgttagcaagggctgccagtgagaagggttttggtacaagaagagtcaacattttaagcaaaaatggcacagtcagaggcgtcaaatacaaagtgagtgctggccaggctctatttaacaatttgaccaaagtattacagcaaccatcaactgatctagaatttgaccgtgtagtgatttataccacctgccttcgtgtggtccggacaacctttgaaagatgtgaactggttagaaagattttccaaaaccatcgcgtaaaatttgaagagaaaaacatagccctgaatggtgaatatggaaaagagttagacgaacgatgccgacgagtttctgaagctccttccctccctgttgtgttcattgatggccattaccttgggggtgctgagaaaattttgtcaatgaatgaatcaggagaactgcaagacatcctaaccaaaattgagagagtacagcatccacatgagtgtccctcttgtggaggctttggctttcttccatgctccgtgtgccatgggagcaagatgtccatgtttcgaaactgcttcacagactctttcaaagccctgaagtgtacggcttgcaatgaaaatggtcttcagcgttgtaagaactgtgctggttaattggagcttctacccaggaaaaacctcattttattaatcaaaggcaatactttggtttatatatatatttttaaatggttatgtttatggattaatcaataaactttgtttattataa

SEQ ID NO: 137726 - DNA, 747 bp, Homo sapiens
  Payload ID: 6970
  Gene Symbol: GRXCR2
  Gene Name: glutaredoxin, cysteine rich 2
  Uniprot ID: A6NFK2
  ENST ID: ENST00000377976
  CDS Start-End: 1-747
atggaggaccctgagaaaaagctgaatcagaagagtgatggcaaaccccggaaagtacgatttaaaatctcctcctcctacagcggtcgagtattgaagcaggtctttgaggatgggcaggaattagagtcaccaaaggaggaataccctcacagttttctgcaagagtctcttgaaacaatggatggtgtttatgggtctggggaagtccccaggccccagatgtgctcccctaagctgactgctcagaggatcagtgtgtttagagagggtaatgcctacaccttggcaggcggccagcctcggttcaacgattacaaggcgaatgaccataagcccctacctattatagattttggaaagataatcatctacactaataacctgaaaatcattcgaaccccaatggacaagagagattttgtgaggaaaattctccagaaggaagaggaggctgaggaagagtctctgatgaacaaagaagaaagctatggaggcagggaccagcacgatagacctttggtggaggcagaaagcacattaccccaaaaccggtatacacaggaaggggatattcccgaggacagctgttttcactgccgagggtcgggcagtgccacctgctctctgtgccacggcagcaagttctcgatgctggccaacagatttaaggagtcctatcgggccctgaggtgccctgcctgcaatgagaatggcctacagccttgccagatttgcaatcaatag

SEQ ID NO: 137727 - DNA, 1956 bp, Homo sapiens
  Payload ID: 6971
  Gene Symbol: GCDH
  Gene Name: glutaryl-CoA dehydrogenase
  Uniprot ID: Q92947
  ENST ID: ENST00000222214
  CDS Start-End: 212-1528
ttccacaggcaaggctaccttagcccttttaaaaggcagagctgcggagggggccggattctaggaggaaccaatgaaaagcctcactcggcctccgctcctcccacttcttgctgaggtcaaaggcctgcgtcagttgcactgtagcctcggcagtgaaccgggaggtactaccaggtcgccgtcgttgctccgctcgctctgagagagcatggccctgagaggcgtctccgtgcggctgctgagccgcggacccggcctgcacgtccttcgcacgtgggtctcgtcggcggcgcagaccgagaaaggcgggagaacacagagccaactggctaagtcctcgcgtcccgagtttgactggcaggacccgctggtgctggaggagcagctgaccacagatgagatcctcatcagggacaccttccgcacctactgccaggagagactcatgcctcgcatcctgttggccaatcgcaacgaagtttttcatcgggagatcatttcggagatgggggagttgggtgtgctgggccccaccatcaaaggatatggctgtgctggggtttcgtctgtggcctatgggctcctggcccgagagctggagcgggtggacagtggctacaggtcggcgatgagtgtccagtcctccctcgtcatgcaccctatctatgcctatggcagcgaggaacagcggcagaagtacctgccccagctggccaagggggagctcctgggctgcttcgggctcacagagcccaacagcggaagtgaccccagcagcatggagaccagagcccactacaactcatccaacaagagctacaccctcaatgggaccaagacctggatcacgaactcgcctatggccgatctgtttgtagtgtgggctcggtgtgaagatggctgcattcggggcttcctgctggagaaggggatgcggggtctctcggcccccaggatccagggcaagttctcgctgcgggcctcagccacaggcatgatcatcatggacggtgtggaggtgccagaggagaatgtgctccctggtgcatccagcctggggggtcccttcggctgcctgaacaacgcccggtacggcatcgcgtggggcgtgcttggagcttcggagttctgcttgcacacagcccggcagtacgccctcgacaggatgcagtttggtgtcccactggccaggaaccagctgattcagaagaagctggcagacatgctcactgagattaccctgggccttcacgcctgcctgcagctcggccgcttgaaggaccaggacaaggctgcccccgagatggtttctctgctgaagaggaataactgtgggaaagccctggacatcgcccgccaggcccgagacatgctgggggggaatgggatttctgacgagtatcacgtgatccggcacgccatgaacctggaggccgtgaacacctacgaaggtacacatgacattcacgccctgatccttgggagagctatcacgggaatccaggcgttcacggccagcaagtgagccgctccatcaggggcccgaaactctcaagcccctttctggagagatgcctggctggaccgtaggagcgctgtgctctgagcttagaaagggaggtggcggatggagtgggaagtgagagacactgatttttaaatatcaaaatttcccttctgaagtcgttcagatgtgttccttaaaaagaagatggaattctctgtagagcgtctcaatccacttttaaccatggatgagagcagactccatttaccctgaaatagcagcttctcttgagaggagagtgacatggaagcaactccgtctgctgcagctgaccccctcacactgagttcacagtgcgccctccctccctcccatctgggggtagtgccttatgctgggtgttggagcagagtgagggagaggaaaataaagacctgcacatctga

SEQ ID NO: 137728 - DNA, 523 bp, Homo sapiens
  Payload ID: 6971
  Gene Symbol: GCDH
  Gene Name: glutaryl-CoA dehydrogenase
  ENST ID: ENST00000589039
  CDS Start-End: 78-523
agttgcactgtagcctcggcagtgaaccgggaggtactaccaggtcgccgtcgttgctccgctcgctctgagagagcatggccctgagaggcgtctccgtgcggctgctgagccgcggacccggcctgcacgtccttcgcacgtgggtctcgtcggcggcgcagaccgagaaaggcgggagaacacagagccaactggctaagtcctcgcgtcccgagtttgactggcaggacccgctggtgctggaggagcagctgaccacagatgagatcctcatcagggacaccttccgcacctactgccaggagagactcatgcctcgcatcctgttggccaatcgcaacgaaggatatggctgtgctggggtttcgtctgtggcctatgggctcctggcccgagagctggagcgggtggacagtggctacaggtcggcgatgagtgtccagtcctccctcgtcatgcaccctatctatgcctatggcagcgaggaacagcggcagaagtacctgccccagctggccaa

SEQ ID NO: 137729 - DNA, 562 bp, Homo sapiens
  Payload ID: 6971
  Gene Symbol: GCDH
  Gene Name: glutaryl-CoA dehydrogenase
  ENST ID: ENST00000588905
  CDS Start-End: 70-562
tgtagcctcggcagtgaaccgggaggtactaccaggtcgccgtcgttgctccgctcgctctgagagagcatggccctgagaggcgtctccgtgcggctgctgagccgcggacccggcctgcacgtccttcgcacgtgggtctcgtcggcggcgcagaccgcctcgcgtcccgagtttgactggcaggacccgctggtgctggaggagcagctgaccacagatgagatcctcatcagggacaccttccgcacctactgccaggagagactcatgcctcgcatcctgttggccaatcgcaacgaagtttttcatcgggagatcatttcggagatgggggagttgggtgtgctgggccccaccatcaaaggatatggctgtgctggggtttcgtctgtggcctatgggctcctggcccgagagctggagcgggtggacagtggctacaggtcggcgatgagtgtccagtcctccctcgtcatgcaccctatctatgcctatggcagcgaggaacagcggcagaagtacctgccccagctggccaagggggagctcctgggctgct

SEQ ID NO: 137730 - DNA, 1867 bp, Homo sapiens
  Payload ID: 6971
  Gene Symbol: GCDH
  Gene Name: glutaryl-CoA dehydrogenase
  Uniprot ID: Q92947
  ENST ID: ENST00000591470
  CDS Start-End: 146-1462
agttgcactgtagcctcggcagtgaaccgggaggtactaccaggtaaggaaggtgcggtagccccagccgtgggtgagaggagctccgctctgacacccccgctcctgtaggtcgccgtcgttgctccgctcgctctgagagagcatggccctgagaggcgtctccgtgcggctgctgagccgcggacccggcctgcacgtccttcgcacgtgggtctcgtcggcggcgcagaccgagaaaggcgggagaacacagagccaactggctaagtcctcgcgtcccgagtttgactggcaggacccgctggtgctggaggagcagctgaccacagatgagatcctcatcagggacaccttccgcacctactgccaggagagactcatgcctcgcatcctgttggccaatcgcaacgaagtttttcatcgggagatcatttcggagatgggggagttgggtgtgctgggccccaccatcaaaggatatggctgtgctggggtttcgtctgtggcctatgggctcctggcccgagagctggagcgggtggacagtggctacaggtcggcgatgagtgtccagtcctccctcgtcatgcaccctatctatgcctatggcagcgaggaacagcggcagaagtacctgccccagctggccaagggggagctcctgggctgcttcgggctcacagagcccaacagcggaagtgaccccagcagcatggagaccagagcccactacaactcatccaacaagagctacaccctcaatgggaccaagacctggatcacgaactcgcctatggccgatctgtttgtagtgtgggctcggtgtgaagatggctgcattcggggcttcctgctggagaaggggatgcggggtctctcggcccccaggatccagggcaagttctcgctgcgggcctcagccacaggcatgatcatcatggacggtgtggaggtgccagaggagaatgtgctccctggtgcatccagcctggggggtcccttcggctgcctgaacaacgcccggtacggcatcgcgtggggcgtgcttggagcttcggagttctgcttgcacacagcccggcagtacgccctcgacaggatgcagtttggtgtcccactggccaggaaccagctgattcagaagaagctggcagacatgctcactgagattaccctgggccttcacgcctgcctgcagctcggccgcttgaaggaccaggacaaggctgcccccgagatggtttctctgctgaagaggaataactgtgggaaagccctggacatcgcccgccaggcccgagacatgctgggggggaatgggatttctgacgagtatcacgtgatccggcacgccatgaacctggaggccgtgaacacctacgaaggtacacatgacattcacgccctgatccttgggagagctatcacgggaatccaggcgttcacggccagcaagtgagccgctccatcaggggcccgaaactctcaagcccctttctggagagatgcctggctggaccgtaggagcgctgtgctctgagcttagaaagggaggtggcggatggagtgggaagtgagagacactgatttttaaatatcaaaatttcccttctgaagtcgttcagatgtgttccttaaaaagaagatggaattctctgtagagcgtctcaatccacttttaaccatggatgagagcagactccatttaccctgaaatagcagcttctcttgagaggagagtgacatggaagcaactccgtctgctgcagctgaccccctcacactgagttcacagtgcgccctccctccctcccatctgggggtagtgccttatgctgggtgttggagcagagtgagggagagg

SEQ ID NO: 137731 - DNA, 423 bp, Homo sapiens
  Payload ID: 6971
  Gene Symbol: GCDH
  Gene Name: glutaryl-CoA dehydrogenase
  ENST ID: ENST00000591050
  CDS Start-End: 1-308
tgggccttcacgcctgcctgcagctcggccgcttgaaggaccaggacaaggctgcccccgagatggtttctctgctgaagaggaataactgtgggaaagccctggacatcgcccgccaggcccgagacatgctgggggggaatgggatttctgacgagtatcacgtgatccggcacgccatgaacctggaggccgtgaacacctacgaaggtgagctcattcattccacagctgctgctgaaacaatgactcccacagaaccatctccagaccctcaccccaccccgagttccgggtcagaaagttgaactgtatcctggacatgtggatgtccctggccaccgaaagtggctcagataaacaaggacaacacagaactcatgttcttgtctctgccagagaagccaccacctaccggaaacc

SEQ ID NO: 137732 - DNA, 496 bp, Homo sapiens
  Payload ID: 6971
  Gene Symbol: GCDH
  Gene Name: glutaryl-CoA dehydrogenase
  ENST ID: ENST00000590445
  CDS Start-End: 74-334
gcactgtagcctcggcagtgaaccgggaggtactaccaggtcgccgtcgttgctccgctcgctctgagagagcatggccctgagaggcgtctccgtgcggctgctgagccgcggacccggcctgcacgtccttcgcacgtgggtctcgtcggcggcgcagaccgagaaaggcgggagaacacagagccaactggctaagtgtaaggacctctggtcgcaccgtgtgtctgctgcccctgttcagctgtctgtctgccgcaggtggactctgtcccagaatccgagagctgcccgagcggggtggcagggtcgtggccagggtcagaggcactaaggcacctcgcgtcccgagtttgactggcaggacccgctggtgctggaggagcagctgaccacagatgagatcctcatcagggacaccttccgcacctactgccaggagagactcatgcctcgcatcctgttggccaatcgcaacgaagtttttcatcgggag

SEQ ID NO: 137733 - DNA, 1871 bp, Homo sapiens
  Payload ID: 6971
  Gene Symbol: GCDH
  Gene Name: glutaryl-CoA dehydrogenase
  ENST ID: ENST00000590530
  CDS Start-End: 72-686
actgtagcctcggcagtgaaccgggaggtactaccaggtcgccgtcgttgctccgctcgctctgagagagcatggccctgagaggcgtctccgtgcggctgctgagccgcggacccggcctgcacgtccttcgcacgtgggtctcgtcggcggcgcagaccgagaaaggcgggagaacacagagccaactggctaagtcctcgcgtcccgagtttgactggcaggacccgctggtgctggaggagcagctgaccacagatgagatcctcatcagggacaccttccgcacctactgccaggagagactcatgcctcgcatcctgttggccaatcgcaacgaagagtctggctctgttgcccaggctggagtgcagtggcacgatcttggctcactgcaaattctgcctcccaggctcaagcgattctcctgcctccacccctctagtagctgggattacaggatatggctgtgctggggtttcgtctgtggcctatgggctcctggcccgagagctggagcgggtggacagtggctacaggtcggcgatgagtgtccagtcctccctcgtcatgcaccctatctatgcctatggcagcgaggaacagcggcagaagtacctgccccagctggccaagggggagctcctgggctgcttcgggctcacagagcccaacagcggaagtgaccccagcagcatggagaccagagcccactacaactcatccaacaagagctacaccctcaatgggaccaagacctggatcacgaactcgcctatggccgatctgtttgtagtgtgggctcggtgtgaagatggctgcattcggggcttcctgctggagaaggggatgcggggtctctcggcccccaggatccagggcaagttctcgctgcgggcctcagccacaggcatgatcatcatggacggtgtggaggtgccagaggagaatgtgctccctggtgcatccagcctggggggtcccttcggctgcctgaacaacgcccggtacggcatcgcgtggggcgtgcttggagcttcggagttctgcttgcacacagcccggcagtacgccctcgacaggatgcagtttggtgtcccactggccaggaaccagctgattcagaagaagctggcagacatgctcactgagattaccctgggccttcacgcctgcctgcagctcggccgcttgaaggaccaggacaaggctgcccccgagatggtttctctgctgaagaggaataactgtgggaaagccctggacatcgcccgccaggcccgagacatgctgggggggaatgggatttctgacgagtatcacgtgatccggcacgccatgaacctggaggccgtgaacacctacgaaggtacacatgacattcacgccctgatccttgggagagctatcacgggaatccaggcgttcacggccagcaagtgagccgctccatcaggggcccgaaactctcaagcccctttctggagagatgcctggctggaccgtaggagcgctgtgctctgagcttagaaagggaggtggcggatggagtgggaagtgagagacactgatttttaaatatcaaaatttcccttctgaagtcgttcagatgtgttccttaaaaagaagatggaattctctgtagagcgtctcaatccacttttaaccatggatgagagcagactccatttaccctgaaatagcagcttctcttgagaggagagtgacatggaagcaactccgtctgctgcagctgaccccctcacactgagttcacagtgcgccctccctccctcccatctgggggtagtgccttatgctgggtgttggagcagagtgagggagaggaaaataaagacctgcacatctga

SEQ ID NO: 137734 - DNA, 453 bp, Homo sapiens
  Payload ID: 6971
  Gene Symbol: GCDH
  Gene Name: glutaryl-CoA dehydrogenase
  ENST ID: ENST00000587072
  CDS Start-End: 61-453
ggcagtgaaccgggaggtactaccaggtcgccgtcgttgctccgctcgctctgagagagcatggccctgagaggcgtctccgtgcggctgctgagccgcggacccggcctgcacgtccttcgcacgtgggtctcgtcggcggcgcagaccgagaaaggcgggagaacacagagccaactggctaagtcctcgcgtcccgagtttgactggcaggacccgctggtgctggaggagcagctgaccacagatgagatcctcatcagggacaccttccgcacctactgccaggagagactcatgcctcgcatcctgttggccaatcgcaacgaagtttttcatcgggagatcatttcggagatgggggagttgggtgtgctgggccccaccatcaaaggctcaagcgattctcctgcctccacccctctagtagctgggattacaggatatggctgt

SEQ ID NO: 137735 - DNA, 545 bp, Homo sapiens
  Payload ID: 6971
  Gene Symbol: GCDH
  Gene Name: glutaryl-CoA dehydrogenase
  ENST ID: ENST00000590472
  CDS Start-End: 1-346
gatgcagtttggtgtcccactggccaggaaccagctgattcagaagaagctggcagacatgctcactgagattaccctgggccttcacgcctgcctgcagctcggccgcttgaaggaccaggacaaggctgcccccgagatggtttctctgctgaagaggaataactgtgggaaagccctggacatcgcccgccaggcccgagacatgctgggggggaatgggatttctgacgagtatcacgtgatccggcacgccatgaacctggaggccgtgaacacctacgaagggatgttcctgagacaggtaagctccgaaggcagcccaggggtgaggcccgactcctagcaggctggtggacgcaagggagtgagcgaagctacacgcaggaatcaacgctccattttgttaagagacaaaagtcatcttcagatgacggtgtttgcaccctgtaactgatggtgatttacatgggggtccagaaccccttgcttggtgggaagacagatgtggaaaaagatacttaaaaaaaaaaaaaaagtgcaaa

SEQ ID NO: 137736 - DNA, 1106 bp, Homo sapiens
  Payload ID: 6972
  Gene Symbol: GPX1
  Gene Name: glutathione peroxidase 1
  Uniprot ID: P07203
  ENST ID: ENST00000419349
  CDS Start-End: 6-302
gcgccatgtgtgctgctcggctagcggcggcggcggcggcggcccagtcggtgtatgccttctcggcgcgcccgctggccggcggggagcctgtgagcctgggctccctgcggggcaaggtactacttatcgagaatgtggcgtccctctgaggcaccacggtccgggactacacccagatgaacgagctgcagcggcgcctcggaccccggggcctggtggtgctcggcttcccgtgcaaccagtttgggcatcaggtgcgccgggcggagcggggcggggcgggggcggacgtgcagtagtggctgggggcgccggcggtgtgctggtgggtgccgtcggctccatgcgcggagagtctggctactctctcgtttcctttctgttgctcgtagctgctgaaattcctctccgcccttgggattgcgcatggagggcaaaatcccggtgactcatagaaaatctcccttgtttgtggttagaacgtttctctcctcctcttgaccccgggttctagctgcccttctctcctgtaggagaacgccaagaacgaagagattctgaattccctcaagtacgtccggcctggtggtgggttcgagcccaacttcatgctcttcgagaagtgcgaggtgaacggtgcgggggcgcaccctctcttcgccttcctgcgggaggccctgccagctcccagcgacgacgccaccgcgcttatgaccgaccccaagctcatcacctggtctccggtgtgtcgcaacgatgttgcctggaactttgagaagttcctggtgggccctgacggtgtgcccctacgcaggtacagccgccgcttccagaccattgacatcgagcctgacatcgaagccctgctgtctcaagggcccagctgtgcctagggcgcccctcctaccccggctgcttggcagttgcagtgctgctgtctcgggggggttttcatctatgagggtgtttcctctaaacctacgagggaggaacacctgatcttacagaaaataccacctcgagatgggtgctggtcctgttgatcccagtctctgccagaccaaggcgagtttccccactaataaagtgccgggtgtcagcag

SEQ ID NO: 137737 - DNA, 1146 bp, Homo sapiens
  Payload ID: 6972
  Gene Symbol: GPX1
  Gene Name: glutathione peroxidase 1
  Uniprot ID: P07203
  ENST ID: ENST00000419783
  CDS Start-End: 323-934
gagccctcgagggccccagcccttggaagggtaacctggaccgctgccgcctggttgcctgggccagaccagacatgcctgctgctccttccggcttaggaggagcacgcgtcccgctcgggcgcactctccagccttttcctggctgaggaggggccgagccctccgggtagggcgggggccggatgaggcgggaccctcaggcccggaaaactgcctgtgccacgtgacccgccgccggccagttaaaaggaggcgcctgctggcctccccttacagtgcttgttcggggcgctccgctggcttcttggacaattgcgccatgtgtgctgctcggctagcggcggcggcggcggcggcccagtcggtgtatgccttctcggcgcgcccgctggccggcggggagcctgtgagcctgggctccctgcggggcaaggtactacttatcgagaatgtggcgtccctctgaggcaccacggtccgggactacacccagatgaacgagctgcagcggcgcctcggaccccggggcctggtggtgctcggcttcccgtgcaaccagtttgggcatcaggagaacgccaagaacgaagagattctgaattccctcaagtacgtccggcctggtggtgggttcgagcccaacttcatgctcttcgagaagtgcgaggtgaacggtgcgggggcgcaccctctcttcgccttcctgcgggaggccctgccagctcccagcgacgacgccaccgcgcttatgaccgaccccaagctcatcacctggtctccggtgtgtcgcaacgatgttgcctggaactttgagaagttcctggtgggccctgacggtgtgcccctacgcaggtacagccgccgcttccagaccattgacatcgagcctgacatcgaagccctgctgtctcaagggcccagctgtgcctagggcgcccctcctaccccggctgcttggcagttgcagtgctgctgtctcgggggggttttcatctatgagggtgtttcctctaaacctacgagggaggaacacctgatcttacagaaaataccacctcgagatgggtgctggtcctgttgatcccagtctctgccagaccaaggcgagtttccccactaataaagtgccgggtgtcagcagaa

SEQ ID NO: 137738 - DNA, 897 bp, Homo sapiens
  Payload ID: 6972
  Gene Symbol: GPX1
  Gene Name: glutathione peroxidase 1
  ENST ID: ENST00000620890
  CDS Start-End: 81-689
cagttaaaaggaggcgcctgctggcctccccttacagtgcttgttcggggcgctccgctggcttcttggacaattgcgccatgtgtgctgctcggctagcggcggcggcggcggcggcccagtcggtgtatgccttctcggcgcgcccgctggccggcggggagcctgtgagcctgggctccctgcggggcaaggtactacttatcgagaatgtggcgtccctcggcaccacggtccgggactacacccagatgaacgagctgcagcggcgcctcggaccccggggcctggtggtgctcggcttcccgtgcaaccagtttgggcatcaggagaacgccaagaacgaagagattctgaattccctcaagtacgtccggcctggtggtgggttcgagcccaacttcatgctcttcgagaagtgcgaggtgaacggtgcgggggcgcaccctctcttcgccttcctgcgggaggccctgccagctcccagcgacgacgccaccgcgcttatgaccgaccccaagctcatcacctggtctccggtgtgtcgcaacgatgttgcctggaactttgagaagttcctggtgggccctgacggtgtgcccctacgcaggtacagccgccgcttccagaccattgacatcgagcctgacatcgaagccctgctgtctcaagggcccagctgtgcctagggcgcccctcctaccccggctgcttggcagttgcagtgctgctgtctcgggggggttttcatctatgagggtgtttcctctaaacctacgagggaggaacacctgatcttacagaaaataccacctcgagatgggtgctggtcctgttgatcccagtctctgccagaccaaggcgagtttccccactaataaagtgccgggtgtcagc

SEQ ID NO: 137739 - DNA, 990 bp, Homo sapiens
  Payload ID: 6973
  Gene Symbol: GPX2
  Gene Name: glutathione peroxidase 2
  Uniprot ID: P18283
  ENST ID: ENST00000389614
  CDS Start-End: 88-660
cttcctggctcctccttcctccccacccctctaataggctcataagtgggctcaggcctctctgcggggctcactctgcgcttcaccatggctttcattgccaagtccttctatgacctcagtgccatcagcctggatggggagaaggtagatttcaatacgttccggggcagggccgtgctgattgagaatgtggcttcgctctgaggcacaaccacccgggacttcacccagctcaacgagctgcaatgccgctttcccaggcgcctggtggtccttggcttcccttgcaaccaatttggacatcaggagaactgtcagaatgaggagatcctgaacagtctcaagtatgtccgtcctgggggtggataccagcccaccttcacccttgtccaaaaatgtgaggtgaatgggcagaacgagcatcctgtcttcgcctacctgaaggacaagctcccctacccttatgatgacccattttccctcatgaccgatcccaagctcatcatttggagccctgtgcgccgctcagatgtggcctggaactttgagaagttcctcatagggccggagggagagcccttccgacgctacagccgcaccttcccaaccatcaacattgagcctgacatcaagcgcctccttaaagttgccatatagatgtgaactgctcaacacacagatctcctactccatccagtcctgaggagccttaggatgcagcatgccttcaggagacactgctggacctcagcattcccttgatatcagtccccttcactgcagagccttgcctttcccctctgcctgtttccttttcctctcccaaccctctggttggtgattcaacttgggctccaagacttgggtaagctctgggccttcacagaatgatggcaccttcctaaaccctcatgggtggtgtctgagaggcgtgaagggcctggagccactctgctagaagagaccaataaagggcaggtgtggaaa

SEQ ID NO: 137740 - DNA, 1134 bp, Homo sapiens
  Payload ID: 6973
  Gene Symbol: GPX2
  Gene Name: glutathione peroxidase 2
  ENST ID: ENST00000553522
  CDS Start-End: 20-256
gctcactctgcgcttcaccatggctttcattgccaagtccttctatgacctcagtgccatcagcctggatggggagaaggtagatttcaatacgttccggggcagggccgtgctgattgagaatgtggcttcgctctgaggcacaaccacccgggacttcacccagctcaacgagctgcaatgccgctttcccaggcgcctggtggtccttggcttcccttgcaaccaatttggacatcagaactgctcagggtagactggagacaaaagcaacagctcagaagtgctaaatcttgaagagcagccaaagcatgggcaacaaagtgagaccccatctctacaaaaaaaaaaaaaaattagccgggcatggtggcctgtgtctgtagtctcagctactaaagaggctgaagcaggaggaatgcttgagcccagaagttcaaggctgcagagaactgtcagaatgaggagatcctgaacagtctcaagtatgtccgtcctgggggtggataccagcccaccttcacccttgtccaaaaatgtgaggtgaatgggcagaacgagcatcctgtcttcgcctacctgaaggacaagctcccctacccttatgatgacccattttccctcatgaccgatcccaagctcatcatttggagccctgtgcgccgctcagatgtggcctggaactttgagaagttcctcatagggccggagggagagcccttccgacgctacagccgcaccttcccaaccatcaacattgagcctgacatcaagcgcctccttaaagttgccatatagatgtgaactgctcaacacacagatctcctactccatccagtcctgaggagccttaggatgcagcatgccttcaggagacactgctggacctcagcattcccttgatatcagtccccttcactgcagagccttgcctttcccctctgcctgtttccttttcctctcccaaccctctggttggtgattcaacttgggctccaagacttgggtaagctctgggccttcacagaatgatggcaccttcctaaaccctcatgggtggtgtctgagaggcgtgaagggcctggagccactctgctagaagagaccaataaagggcaggtgtggaaacggcca

SEQ ID NO: 137741 - DNA, 476 bp, Homo sapiens
  Payload ID: 6973
  Gene Symbol: GPX2
  Gene Name: glutathione peroxidase 2
  ENST ID: ENST00000557049
  CDS Start-End: 1-405
ttcattgccaagtccttctatgacctcagtgccatcagcctggatggggagaaggagaactgtcagaatgaggagatcctgaacagtctcaagtatgtccgtcctgggggtggataccagcccaccttcacccttgtccaaaaatgtgaggtgaatgggcagaacgagcatcctgtcttcgcctacctgaaggacaagctcccctacccttatgatgacccattttccctcatgaccgatcccaagctcatcatttggagccctgtgcgccgctcagatgtggcctggaactttgagaagttcctcatagggccggagggagagcccttccgacgctacagccgcaccttcccaaccatcaacattgagcctgacatcaagcgcctccttaaagttgccatatagatgtgaactgctcaacacacagatctcctactccatccagtcctgaggagccttaggatgcagcatgcctt

SEQ ID NO: 137742 - DNA, 778 bp, Homo sapiens
  Payload ID: 6973
  Gene Symbol: GPX2
  Gene Name: glutathione peroxidase 2
  ENST ID: ENST00000557323
  CDS Start-End: 21-257
ggctcactctgcgcttcaccatggctttcattgccaagtccttctatgacctcagtgccatcagcctggatggggagaaggtagatttcaatacgttccggggcagggccgtgctgattgagaatgtggcttcgctctgaggcacaaccacccgggacttcacccagctcaacgagctgcaatgccgctttcccaggcgcctggtggtccttggcttcccttgcaaccaatttggacatcaggagagacagaagtagcaaaccctctttcgagatgtccctccagccccagaagtacctccagcctcacaccatctcttcagcctagcaagttgctggagggagtctataacctaccaggagccagccagccatttgtatcaagaaatagaaatctgccagggtacagtggctcacacctataatcccagcgctttgggaggctaaggagaactgtcagaatgaggagatcctgaacagtctcaagtatgtccgtcctgggggtggataccagcccaccttcacccttgtccaaaaatgtgaggtgaatgggcagaacgagcatcctgtcttcgcctacctgaaggacaagctcccctacccttatgatgacccattttccctcatgaccgatcccaagctcatcatttggagccctgtgcgccgctcagatgtggcctggaactttgagaagttcctcatagggccggagggagagcccttccgacgctacagccgcaccttcccaaccatcaacattgagcctgacatcaagcgcc

SEQ ID NO: 137743 - DNA, 1084 bp, Homo sapiens
  Payload ID: 6973
  Gene Symbol: GPX2
  Gene Name: glutathione peroxidase 2
  ENST ID: ENST00000612794
  CDS Start-End: 180-749
cttgttcaaacagcacttacaggtggggacctgtttttgctaagtcatcctggggatgctcaaagctccattgttagatcctttctgtcctccttcctggctcctccttcctccccacccctctaataggctcataagtgggctcaggcctctctgcggggctcactctgcgcttcaccatggctttcattgccaagtccttctatgacctcagtgccatcagcctggatggggagaaggtagatttcaatacgttccggggcagggccgtgctgattgagaatgtggcttcgctcggcacaaccacccgggacttcacccagctcaacgagctgcaatgccgctttcccaggcgcctggtggtccttggcttcccttgcaaccaatttggacatcaggagaactgtcagaatgaggagatcctgaacagtctcaagtatgtccgtcctgggggtggataccagcccaccttcacccttgtccaaaaatgtgaggtgaatgggcagaacgagcatcctgtcttcgcctacctgaaggacaagctcccctacccttatgatgacccattttccctcatgaccgatcccaagctcatcatttggagccctgtgcgccgctcagatgtggcctggaactttgagaagttcctcatagggccggagggagagcccttccgacgctacagccgcaccttcccaaccatcaacattgagcctgacatcaagcgcctccttaaagttgccatatagatgtgaactgctcaacacacagatctcctactccatccagtcctgaggagccttaggatgcagcatgccttcaggagacactgctggacctcagcattcccttgatatcagtccccttcactgcagagccttgcctttcccctctgcctgtttccttttcctctcccaaccctctggttggtgattcaacttgggctccaagacttgggtaagctctgggccttcacagaatgatggcaccttcctaaaccctcatgggtggtgtctgagaggcgtgaagggcctggagccactctgctagaagagaccaataaagggcaggtgtggaaacggcc

SEQ ID NO: 137744 - DNA, 1636 bp, Homo sapiens
  Payload ID: 6974
  Gene Symbol: GPX3
  Gene Name: glutathione peroxidase 3
  Uniprot ID: P22352
  ENST ID: ENST00000388825
  CDS Start-End: 93-773
aaaggtggctgggagcgccggacacctcagacggacggtggccagggatcaggcagcggctcaggcgaccctgagtgtgcccccaccccgccatggcccggctgctgcaggcgtcctgcctgctttccctgctcctggccggcttcgtctcgcagagccggggacaagagaagtcgaagatggactgccatggtggcataagtggcaccatttacgagtacggagccctcaccattgatggggaggagtacatccccttcaagcagtatgctggcaaatacgtcctctttgtcaacgtggccagctactgaggcctgacgggccagtacattgaactgaatgcactacaggaagagcttgcaccattcggtctggtcattctgggctttccctgcaaccaatttggaaaacaggaaccaggagagaactcagagatccttcctaccctcaagtatgtccgaccaggtggaggctttgtccctaatttccagctctttgagaaaggggatgtcaatggagagaaagagcagaaattctacactttcctaaagaactcctgtcctcccacctcggagctcctgggtacatctgaccgcctcttctgggaacccatgaaggttcacgacatccgctggaactttgagaagttcctggtggggccagatggtatacccatcatgcgctggcaccaccggaccacggtcagcaacgtcaagatggacatcctgtcctacatgaggcggcaggcagccctgggggtcaagaggaagtaactgaaggccgtctcatcccatgtccaccatgtaggggagggactttgttcaggaagaaatccgtgtctccaaccacactatctacccatcacagacccctttcctatcactcaaggccccagcctggcacaaatggatgcatacagttctgtgtactgccaggcatgtgggtgtgggtgcatgtgggtgtttacacacatgcctacaggtatgcgtgattgtgtgtgtgtgcatgggtgtacagccacgtgtctacctatgtgtctttctgggaatgtgtaccatctgtgtgcctgcagctgtgtagtgctggacagtgacaaccctttctctccagttctccactccaatgataatagttcacttacacctaaacccaaaggaaaaaccagctctaggtccaattgttctgctctaactgatacctcaaccttggggccagcatctcccactgcctccaaatattagtaactatgactgacgtccccagaagtttctgggtctaccacactccccaaccccccactcctacttcctgaagggccctcccaaggctacatccccaccccacagttctccctgagagagatcaacctccctgagatcaaccaaggcagatgtgacagcaagggccacggaccccatggcaggggtggcgtcttcatgagggaggggcccaaagcccttgtgggcggacctcccctgagcctgtctgaggggccagcccttagtgcattcaggctaaggcccctgggcagggatgccacccctgctccttcggaggacgtgccctcacccctcactggtccactggcttgagactcaccccgtctgcccagtaaaagcctttctgcagcagctga

SEQ ID NO: 137745 - DNA, 467 bp, Homo sapiens
  Payload ID: 6974
  Gene Symbol: GPX3
  Gene Name: glutathione peroxidase 3
  ENST ID: ENST00000521650
  CDS Start-End: 52-467
ccagggatcaggcagcggctcaggcgaccctgagtgtgcccccaccccgccatggcccggctgctgcaggcgtcctgcctgctttccctgctcctggccggcttcgtctcgcagagccggggacaagagaagtcgaaggctccccgccagatgggcaatccccagatggactgccatggtggcataagtggcaccatttacgagtacggagccctcaccattgatggggaggagtacatccccttcaagcagtatgctggcaaatacgtcctctttgtcaacgtggccagctactgaggcctgacgggccagtacattgaactgaatgcactacaggaagagcttgcaccattcggtctggtcattctgggctttccctgcaaccaatttggaaaacaggaaccaggagagaactcagagatccttcctaccctcaagtatgtccgaccaggtggaggctttgtccc

SEQ ID NO: 137746 - DNA, 316 bp, Homo sapiens
  Payload ID: 6974
  Gene Symbol: GPX3
  Gene Name: glutathione peroxidase 3
  ENST ID: ENST00000520059
  CDS Start-End: 1-239
aatttggaaaacaggaaccaggagagaactcagagatccttcctaccctcaagtatgtccgaccaggtggaggctttgtccctaatttccagctctttgagaaaggggatgtcaatggagagaaagagcagaaattctacactttcctaaagggccaggctattccccaggaaggcctgggaaggaagagggtcagggggcctcaagcaaggttgacactcctcttatccctgctctagaactcctgtcctcccacctcggagctcctgggtacatctgaccgcctcttctgggaacccatgaaggttcacgacat

SEQ ID NO: 137747 - DNA, 612 bp, Homo sapiens
  Payload ID: 6974
  Gene Symbol: GPX3
  Gene Name: glutathione peroxidase 3
  ENST ID: ENST00000517973
  CDS Start-End: 50-352
agggatcaggcagcggctcaggcgaccctgagtgtgcccccaccccgccatggcccggctgctgcaggcgtcctgcctgctttccctgctcctggccggcttcgtctcgcagagccggggacaagagaagtcgaagaactgaatgcactacaggaagagcttgcaccattcggtctggtcattctgggctttccctgcaaccaatttggaaaacaggaaccaggagagaactcagagatccttcctaccctcaagtatgtccgaccaggtggaggctttgtccctaatttccagctctttgagaaaggggatgtcaatggagagaaagagcagaaattctacactttcctaaagaactcctgtcctcccacctcggagctcctgggtacatctgaccgcctcttctgggaacccatgaaggttcacgacatccgctggaactttgagaagttcctggtggggccagatggtatacccatcatgcgctggcaccaccggaccacggtcagcaacgtcaagatggacatcctgtcctacatgaggcggcaggcagccctgggggtcaagaggaagtaactgaaggccgtctcatcccatgtccaccatgtaggg

SEQ ID NO: 137748 - DNA, 834 bp, Homo sapiens
  Payload ID: 6974
  Gene Symbol: GPX3
  Gene Name: glutathione peroxidase 3
  ENST ID: ENST00000519214
  CDS Start-End: 50-241
agggatcaggcagcggctcaggcgaccctgagtgtgcccccaccccgccatggcccggctgctgcaggcgtcctgcctgctttccctgctcctggccggcttcgtctcgcagagccggggacaagagaagtcgaaggctccccgccagatgggcaatccccaggtgcgagagacctcctgaaccccttttgccgccccctccgccgccgggaccccgcccccgaccgtcgtcgtctcgtagttccatctgttggagagccgagacctggtgcttcaggcgggcagaatgactaagggaggaaggtctctctccccgagctcgcactttctccccactgccacctcgagggtcgccttgctacatctatgtcacctccgtgcctgagctgctccccttcagtagggcctaagagggagggcgtcacagaaaaaaatgcccagcgtctgggtgggctgtgcaagttcccagggagagagacaaggagaaaggagagaggcagctgggtggtcctggtcctgaagaactgctgtggggggctcttctaccccaagaatgatacagatggactgccatggtggcataagtggcaccatttacgagtacggagccctcaccattgatggggaggagtacatccccttcaagcagtatgctggcaaatacgtcctctttgtcaacgtggccagctactgaggcctgacgggccagtacattgaactgaatgcactacaggaagagcttgcaccattcggtctggtcattctgggctttccctgcaaccaatttggaaaacaggaaccaggagagaactcagagatccttcctaccctcaa

SEQ ID NO: 137749 - DNA, 1314 bp, Homo sapiens
  Payload ID: 6974
  Gene Symbol: GPX3
  Gene Name: glutathione peroxidase 3
  ENST ID: ENST00000521632
  CDS Start-End: 1-524
actgccatggtggcataagtggcaccatttacgagtacggagccctcaccattgatggggaggagtacatccccttcaagcagtatgctggcaaatacgtcctctttgtcaacgtggccagctactgaggcctgacgggccagtacattgaactgaatgcactacaggaagagcttgcaccattcggtctggtcattctgggctttccctgcaaccaatttggaaaacaggaaccaggagagaactcagagatccttcctaccctcaaaactcctgtcctcccacctcggagctcctgggtacatctgaccgcctcttctgggaacccatgaaggttcacgacatccgctggaactttgagaagttcctggtggggccagatggtatacccatcatgcgctggcaccaccggaccacggtcagcaacgtcaagatggacatcctgtcctacatgaggcggcaggcagccctgggggtcaagaggaagtaactgaaggccgtctcatcccatgtccaccatgtaggggagggactttgttcaggaagaaatccgtgtctccaaccacactatctacccatcacagacccctttcctatcactcaaggccccagcctggcacaaatggatgcatacagttctgtgtactgccaggcatgtgggtgtgggtgcatgtgggtgtttacacacatgcctacaggtatgcgtgattgtgtgtgtgtgcatgggtgtacagccacgtgtctacctatgtgtctttctgggaatgtgtaccatctgtgtgcctgcagctgtgtagtgctggacagtgacaaccctttctctccagttctccactccaatgataatagttcacttacacctaaacccaaaggaaaaaccagctctaggtccaattgttctgctctaactgatacctcaaccttggggccagcatctcccactgcctccaaatattagtaactatgactgacgtccccagaagtttctgggtctaccacactccccaaccccccactcctacttcctgaagggccctcccaaggctacatccccaccccacagttctccctgagagagatcaacctccctgagatcaaccaaggcagatgtgacagcaagggccacggaccccatggcaggggtggcgtcttcatgagggaggggcccaaagcccttgtgggcggacctcccctgagcctgtctgaggggccagcccttagtgcattcaggctaaggcccctgggcagggatgccacccctgctccttcggaggacgtgccctcacccctcactggtccactggcttgagactc

SEQ ID NO: 137750 - DNA, 1478 bp, Homo sapiens
  Payload ID: 6974
  Gene Symbol: GPX3
  Gene Name: glutathione peroxidase 3
  ENST ID: ENST00000614343
  CDS Start-End: 67-285
tcagacggacggtggccagggatcaggcagcggctcaggcgaccctgagtgtgcccccaccccgccatggcccggctgctgcaggcgtcctgcctgctttccctgctcctggccggcttcgtctcgcagagccggggacaagagaagtcgaagatggactgccatggtggcataagtggcaccatttacgagtacggagccctcaccattgatggggaggagtacatccccttcaagcagtatgctggcaaatacgtcctctttgtcaacgtggccagctactgaggcctgacgggccagtacattgaactgaatgcactacaggaagagcttgcaccattcggtctggtcattctgggctttccctgcaaccaatttggaaaacaggaaccaggagagaactcagagatccttcctaccctcaagtatgtccgaccaggtggaggctttgtccctaatttccagctctttgagaaaggggatgtcaatggagagaaagagcagaaattctacactttcctaaagaactcctgtcctcccacctcggagctcctgggtacatctgaccgcctcttctgggaacccatgaaggttcacgacatccgctggaactttgagaagttcctggtggggccagatggtatacccatcatgcgctggcaccaccggaccacggtcagcaacgtcaagatggacatcctgtcctacatgaggcggcaggcagccctgggggtcaagaggaagtaactgaaggccgtctcatcccatgtccaccatgtaggggagggactttgttcaggaagaaatccgtgtctccaaccacactatctacccatcacagacccctttcctatcactcaaggccccagcctggcacaaatggatgcatacagttctgtgtactgccaggcatgtgggtgtgggtgcatgtgggtgtttacacacatgcctacaggtatgcgtgattgtgtgtgtgtgcatgggtgtacagccacgtgtctacctatgtgtctttctgggaatgtgtaccatctgtgtgcctgcagctgtgtagtgctggacagtgacaaccctttctctccagttctccactccaatgataatagttcacttacacctaaacccaaaggaaaaaccagctctaggtccaattgttctgctctaactgatacctcaaccttggggccagcatctcccactgcctccaaatattagtaactatgactgacgtccccagaagtttctgggtctaccacactccccaaccccccactcctacttcctgaagggccctcccaaggctacatccccaccccacagttctccctgagagagatcaacctccctgagatcaaccaaggcagatgtgacagcaagggccacggaccccatgctccttcggaggacgtgccctcacccctcactggtccactggcttgagactcaccccgtctgcccagtaaaagcctttctgcagc

SEQ ID NO: 137751 - DNA, 1757 bp, Homo sapiens
  Payload ID: 6974
  Gene Symbol: GPX3
  Gene Name: glutathione peroxidase 3
  ENST ID: ENST00000622181
  CDS Start-End: 218-895
gtcgccccgggacggggaggtggggagctgagggcaagtcgcgcccgcccctgaaatcccagccgcctagcgattggctgcaagggtctcggcttggccgcggattggtcacacccgagggcttgaaaggtggctgggagcgccggacacctcagacggacggtggccagggatcaggcagcggctcaggcgaccctgagtgtgcccccaccccgccatggcccggctgctgcaggcgtcctgcctgctttccctgctcctggccggcttcgtctcgcagagccggggacaagagaagtcgaagatggactgccatggtggcataagtggcaccatttacgagtacggagccctcaccattgatggggaggagtacatccccttcaagcagtatgctggcaaatacgtcctctttgtcaacgtggccagctacggcctgacgggccagtacattgaactgaatgcactacaggaagagcttgcaccattcggtctggtcattctgggctttccctgcaaccaatttggaaaacaggaaccaggagagaactcagagatccttcctaccctcaagtatgtccgaccaggtggaggctttgtccctaatttccagctctttgagaaaggggatgtcaatggagagaaagagcagaaattctacactttcctaaagaactcctgtcctcccacctcggagctcctgggtacatctgaccgcctcttctgggaacccatgaaggttcacgacatccgctggaactttgagaagttcctggtggggccagatggtatacccatcatgcgctggcaccaccggaccacggtcagcaacgtcaagatggacatcctgtcctacatgaggcggcaggcagccctgggggtcaagaggaagtaactgaaggccgtctcatcccatgtccaccatgtaggggagggactttgttcaggaagaaatccgtgtctccaaccacactatctacccatcacagacccctttcctatcactcaaggccccagcctggcacaaatggatgcatacagttctgtgtactgccaggcatgtgggtgtgggtgcatgtgggtgtttacacacatgcctacaggtatgcgtgattgtgtgtgtgtgcatgggtgtacagccacgtgtctacctatgtgtctttctgggaatgtgtaccatctgtgtgcctgcagctgtgtagtgctggacagtgacaaccctttctctccagttctccactccaatgataatagttcacttacacctaaacccaaaggaaaaaccagctctaggtccaattgttctgctctaactgatacctcaaccttggggccagcatctcccactgcctccaaatattagtaactatgactgacgtccccagaagtttctgggtctaccacactccccaaccccccactcctacttcctgaagggccctcccaaggctacatccccaccccacagttctccctgagagagatcaacctccctgagatcaaccaaggcagatgtgacagcaagggccacggaccccatggcaggggtggcgtcttcatgagggaggggcccaaagcccttgtgggcggacctcccctgagcctgtctgaggggccagcccttagtgcattcaggctaaggcccctgggcagggatgccacccctgctccttcggaggacgtgccctcacccctcactggtccactggcttgagactcaccccgtctgcccagtaaaagcctttctgcagcagctg

SEQ ID NO: 137752 - DNA, 919 bp, Homo sapiens
  Payload ID: 6975
  Gene Symbol: GPX4
  Gene Name: glutathione peroxidase 4
  Uniprot ID: P36969
  ENST ID: ENST00000354171
  CDS Start-End: 108-701
gagcgctctggagggcgtggccgtgggaaaggaggcgcggaaagccgacgcgcgtccattggtcggctggacgaggggaggagccgctggctcccagccccgccgcgatgagcctcggccgcctttgccgcctactgaagccggcgctgctctgtggggctctggccgcgcctggcctggccgggaccatgtgcgcgtcccgggacgactggcgctgtgcgcgctccatgcacgagttttccgccaaggacatcgacgggcacatggttaacctggacaagtaccggggcttcgtgtgcatcgtcaccaacgtggcctcccagtgaggcaagaccgaagtaaactacactcagctcgtcgacctgcacgcccgatacgctgagtgtggtttgcggatcctggccttcccgtgtaaccagttcgggaagcaggagccagggagtaacgaagagatcaaagagttcgccgcgggctacaacgtcaaattcgatatgttcagcaagatctgcgtgaacggggacgacgcccacccgctgtggaagtggatgaagatccaacccaagggcaagggcatcctgggaaatgccatcaagtggaacttcaccaagttcctcatcgacaagaacggctgcgtggtgaagcgctacggacccatggaggagcccctggtgatagagaaggacctgccccactatttctagctccacaagtgtgtggccccgcccgagcccctgcccacgcccttggagccttccaccggcactcatgacggcctgcctgcaaacctgctggtggggcagacccgaaaatccagcgtgcaccccgccggaggaaggtcccatggcctgctgggcttggctcggcgcccccacccctggctaccttgtgggaataaacagacaaattagcctgctggatc

SEQ ID NO: 137753 - DNA, 803 bp, Homo sapiens
  Payload ID: 6975
  Gene Symbol: GPX4
  Gene Name: glutathione peroxidase 4
  ENST ID: ENST00000588919
  CDS Start-End: 53-781
gaagccggcgctgctctgtggggctctggccgcgcctggcctggccgggaccatgtgcgcgtcccgggacgactggcgctgtgcgcgctccatgcacgagttttccgccaaggacatcgacgggcacatggttaacctggacaagtaccggggcttcgtgtgcatcgtcaccaacgtggcctcccagtgaggcaagaccgaagtaaactacactcagctcgtcgacctgcacgcccgatacgctgagtgtggtttgcggatcctggccttcccgtgtaaccagttcgggaagcaggagccagggagtaacgaagagatcaaagagttcgccgcgggctacaacgtcaaattcgatatgttcagcaagatctgcgtgaacggggacgacgcccacccgctgtggaagtggatgaagatccaacccaagggcaagggcatcctgggaaatgccatcaagtggaacttcaccaagtttggacaccgtctctccacagttcctcatcgacaagaacggctgcgtggtgaagcgctacggacccatggaggagcccctggtgatagagaaggacctgccccactatttctagctccacaagtgtgtggccccgcccgagcccctgcccacgcccttggagccttccaccggcactcatgacggcctgcctgcaaacctgctggtggggcagacccgaaaatccagcgtgcaccccgccggaggaaggtcccatggcctgctgggcttggctcggcgcccccacccctggctaccttgtgggaataaacagacaaattagcctgctgga

SEQ ID NO: 137754 - DNA, 583 bp, Homo sapiens
  Payload ID: 6975
  Gene Symbol: GPX4
  Gene Name: glutathione peroxidase 4
  ENST ID: ENST00000593032
  CDS Start-End: 59-583
cctactgaagccggcgctgctctgtggggctctggccgcgcctggcctggccgggaccatgtgcgcgtcccgggacgactggcgctgtgcgcgctccatgcacgagttttccgccaaggacatcgacgggcacatggttaacctggacaagtaccggggcttcgtgtgcatcgtcaccaacgtggcctcccagtgaggcaagaccgaagtaaactacactcagctcgtcgacctgcacgcccgatacgctgagtgtggtttgcggatcctggccttcccgtgtaaccagttcgggaagcaggagccagggagtaacgaagagatcaaagagttcgccgcgggctacaacgtcaaattcgatatgttcagcaagatctgcgtgaacggggacgacgcccacccgctgtggaagtggatgaagatccaacccaagggcaagggcatcctgggaaagacagcttggggactgtggggggctgctggggacgctcacgtccatgtgcttcttttccagtgccatcaagtggaacttcaccaagttcctcatcgacaagaacggctgcgtggtgaagcgctacggacc

SEQ ID NO: 137755 - DNA, 812 bp, Homo sapiens
  Payload ID: 6975
  Gene Symbol: GPX4
  Gene Name: glutathione peroxidase 4
  ENST ID: ENST00000589115
  CDS Start-End: 37-579
cgaggggaggagccgctggctcccagccccgccgcgatgagcctcggccgcctttgccgcctactgaagccggcgctgctctgtggggctctggccgcgcctggcctggccgggaccatgtgcgcgtcccgggacgactggcgctgtgcgcgctccatgcacgagttttccgccaaggacatcgacgggcacatggttaacctggacaagtaccggggcttcgtgtgcatcgtcaccaacgtggcctcccagtgaggcaagaccgaagtaaactacactcagctcgtcgacctgcacgcccgatacgctgagtgtggtttgcggatcctggccttcccgtgtaaccagttcgggaagcaggagccagggagtaacgaagagatcaaagagttcgccgcgggctacaacgtcaaattcgatatgttcagcaagatctgcgtgaacggggacgacgcccacccgctgtggaagtggatgaagatccaacccaagggcaagggcatcctgggaaattcctcatcgacaagaacggctgcgtggtgaagcgctacggacccatggaggagcccctggtgatagagaaggacctgccccactatttctagctccacaagtgtgtggccccgcccgagcccctgcccacgcccttggagccttccaccggcactcatgacggcctgcctgcaaacctgctggtggggcagacccgaaaatccagcgtgcaccccgccggaggaaggtcccatggcctgctgggcttggctcggcgcccccacccctggctaccttgtgggaataaacagacaaattag

SEQ ID NO: 137756 - DNA, 501 bp, Homo sapiens
  Payload ID: 6975
  Gene Symbol: GPX4
  Gene Name: glutathione peroxidase 4
  ENST ID: ENST00000585480
  CDS Start-End: 1-501
tacgctgagtgtggtttgcggatcctggccttcccgtgtaaccagttcgggaagcaggagccagggagtaacgaagagatcaaagagttcgccgcgggctacaacgtcaaattcgatatgttcagcaagatctgcgtgaacggggacgacgcccacccgctgtggaagtggatgaagatccaacccaagggcaagggcatcctgggaaatgccatcaagtggaacttcaccaagttcctcatcgacaagaacggctgcgtggtgaagcgctacggacccatggaggagcccctgctccacaagtgtgtggccccgcccgagcccctgcccacgcccttggagccttccaccggcactcatgacggcctgcctgcaaacctgctggtggggcagacccgaaaatccagcgtgcaccccgccggaggaaggtcccatggcctgctgggcttggctcggcgcccccacccctggctaccttgtgggaataaacagacaaattag

SEQ ID NO: 137757 - DNA, 536 bp, Homo sapiens
  Payload ID: 6975
  Gene Symbol: GPX4
  Gene Name: glutathione peroxidase 4
  ENST ID: ENST00000587648
  CDS Start-End: 71-536
ccacgctccctgctcagcttcctttgccttgcagtgcgcgtcccgggacgactggcgctgtgcgcgctccatgcacgagttttccgccaaggacatcgacgggcacatggttaacctggacaagtaccggggcttcgtgtgcatcgtcaccaacgtggcctcccagtgaggcaagaccgaagtaaactacactcagctcgtcgacctgcacgcccgatacgctgagtgtggtttgcggatcctggccttcccgtgtaaccagttcgggaagcaggagccagggagtaacgaagagatcaaagagttcgccgcgggctacaacgtcaaattcgatatgttcagcaagatctgcgtgaacggggacgacgcccacccgctgtggaagtggatgaagatccaacccaagggcaagggcatcctgggaaatgccatcaagtggaacttcaccaagttcctcatcgacaagaacggctgcgtggtgaagcgctacggacccatggaggagcccctggtgatagagaaggacctgccccact

SEQ ID NO: 137758 - DNA, 859 bp, Homo sapiens
  Payload ID: 6975
  Gene Symbol: GPX4
  Gene Name: glutathione peroxidase 4
  ENST ID: ENST00000585362
  CDS Start-End: 321-859
tgcaggcgcgcgtgccggggccggggtcgggggtccaggcttgcagggggcggggtccgggacggctggggcggagctggaccgttgagggccacggcggggcgtctccgggccgagcggggctgctgcgcccgagcggttgggggcgcggagggctggaaatcccggatcacgcgcccccgggcgccgccccgcccccgcaccttggcctagcgcggtggcgtcacagtcgcgcagtcctgactacggcctccgggccctttgtccccgctagcggcgctcggggtgggggagccaggaggggcgggagacgggcgggtatgggccgcgcgggcgcaggctcccccgggcgccgcaggcagcggtgccagagccggggcaggcggcggccgcgagcccctcggcggcggaaggccccagcgtgcaggcgcaggagggcgcggcgccggcggaagaagccctgtccccgcagcttgcgaccggagatccacgaatgtcccaagtcccaggacccgtgcgcgtcccgggacgactggcgctgtgcgcgctccatgcacgagttttccgccaaggacatcgacgggcacatggttaacctggacaagtaccggggcttcgtgtgcatcgtcaccaacgtggcctcccagtgaggcaagaccgaagtaaactacactcagctcgtcgacctgcacgcccgatacgctgagtgtggtttgcggatcctggccttcccgtgtaaccagttcgggaagcaggagccagggagtaacgaagagatcaaagagttcgccgcgggctacaacgtcaaattcgatatgttcagcaagatctgcgtgaacggggacgacgcccacccgct

SEQ ID NO: 137759 - DNA, 1002 bp, Homo sapiens
  Payload ID: 6975
  Gene Symbol: GPX4
  Gene Name: glutathione peroxidase 4
  ENST ID: ENST00000622390
  CDS Start-End: 86-787
agtcctgactacggcctccgggccctttgtccccgctagcggcgctcggggtgggggagccaggaggggcgggagacgggcgggtatgggccgcgcgggcgcaggctcccccgggcgccgcaggcagcggtgccagagccggggcaggcggcggccgcgagcccctcggcggcggaaggccccagcgtgcaggcgcaggagggcgcggcgccggcggaagaagccctgtccccgcagcttgcgaccggagatccacgaatgtcccaagtcccaggacccgtgcgcgtcccgggacgactggcgctgtgcgcgctccatgcacgagttttccgccaaggacatcgacgggcacatggttaacctggacaagtaccggggcttcgtgtgcatcgtcaccaacgtggcctcccagggcaagaccgaagtaaactacactcagctcgtcgacctgcacgcccgatacgctgagtgtggtttgcggatcctggccttcccgtgtaaccagttcgggaagcaggagccagggagtaacgaagagatcaaagagttcgccgcgggctacaacgtcaaattcgatatgttcagcaagatctgcgtgaacggggacgacgcccacccgctgtggaagtggatgaagatccaacccaagggcaagggcatcctgggaaatgccatcaagtggaacttcaccaagttcctcatcgacaagaacggctgcgtggtgaagcgctacggacccatggaggagcccctggtgatagagaaggacctgccccactatttctagctccacaagtgtgtggccccgcccgagcccctgcccacgcccttggagccttccaccggcactcatgacggcctgcctgcaaacctgctggtggggcagacccgaaaatccagcgtgcaccccgccggaggaaggtcccatggcctgctgggcttggctcggcgcccccacccctggctaccttgtgggaataaacagacaaattagcctgctgg

SEQ ID NO: 137760 - DNA, 793 bp, Homo sapiens
  Payload ID: 6975
  Gene Symbol: GPX4
  Gene Name: glutathione peroxidase 4
  Uniprot ID: P36969
  ENST ID: ENST00000611653
  CDS Start-End: 74-586
cggccgcctttgccgcctactgaagccggcgctgctctgtggggctctggccgcgcctggcctggccgggaccatgtgcgcgtcccgggacgactggcgctgtgcgcgctccatgcacgagttttccgccaaggacatcgacgggcacatggttaacctggacaagtaccggggcttcgtgtgcatcgtcaccaacgtggcctcccagtgaggcaagaccgaagtaaactacactcagctcgtcgacctgcacgcccgatacgctgagtgtggtttgcggatcctggccttcccgtgtaaccagttcgggaagcaggagccagggagtaacgaagagatcaaagagttcgccgcgggctacaacgtcaaattcgatatgttcagcaagatctgcgtgaacggggacgacgcccacccgctgtggaagtggatgaagatccaacccaagggcaagggcatcctgggaaatgccatcaagtggaacttcaccaagttcctcatcgacaagaacggctgcgtggtgaagcgctacggacccatggaggagcccctggtgatagagaaggacctgccccactatttctagctccacaagtgtgtggccccgcccgagcccctgcccacgcccttggagccttccaccggcactcatgacggcctgcctgcaaacctgctggtggggcagacccgaaaatccagcgtgcaccccgccggaggaaggtcccatggcctgctgggcttggctcggcgcccccacccctggctaccttgtgggaataaacagacaaattag

SEQ ID NO: 137761 - DNA, 431 bp, Homo sapiens
  Payload ID: 6975
  Gene Symbol: GPX4
  Gene Name: glutathione peroxidase 4
  ENST ID: ENST00000614791
  CDS Start-End: 30-431
gagccaggaggggcgggagacgggcgggtatgggccgcgcgggcgcaggctcccccgggcgccgcaggcagcggtgccagagccggggcaggcggcggccgcgagcccctcggcggcggaaggccccagcgtgcaggcgcaggagggcgcggcgccggcggaagaagccctgtccccgcagcttgcgaccggagatccacgaatgtcccaagtcccaggacccgtgcgcgtcccgggacgactggcgctgtgcgcgctccatgcacgagttttccgccaaggacatcgacgggcacatggttaacctggacaagggcttcgtgtgcatcgtcaccaacgtggcctcccagtgaggcaagaccgaagtaaactacactcagctcgtcgacctgcacgcccgatacgctgagtgtggtttgcggatcctggcc

SEQ ID NO: 137762 - DNA, 924 bp, Homo sapiens
  Payload ID: 6975
  Gene Symbol: GPX4
  Gene Name: glutathione peroxidase 4
  ENST ID: ENST00000616066
  CDS Start-End: 119-709
gtctgaccaatgagcgctctggagggcgtggccgtgggaaaggaggcgcggaaagccgacgcgcgtccattggtcggctggacgaggggaggagccgctggctcccagccccgccgcgatgagcctcggccgcctttgccgcctactgaagccggcgctgctctgtggggctctggccgcgcctggcctggccgggaccatgtgcgcgtcccgggacgactggcgctgtgcgcgctccatgcacgagttttccgccaaggacatcgacgggcacatggttaacctggacaagtaccggggcttcgtgtgcatcgtcaccaacgtggcctcccagggcaagaccgaagtaaactacactcagctcgtcgacctgcacgcccgatacgctgagtgtggtttgcggatcctggccttcccgtgtaaccagttcgggaagcaggagccagggagtaacgaagagatcaaagagttcgccgcgggctacaacgtcaaattcgatatgttcagcaagatctgcgtgaacggggacgacgcccacccgctgtggaagtggatgaagatccaacccaagggcaagggcatcctgggaaatgccatcaagtggaacttcaccaagttcctcatcgacaagaacggctgcgtggtgaagcgctacggacccatggaggagcccctggtgatagagaaggacctgccccactatttctagctccacaagtgtgtggccccgcccgagcccctgcccacgcccttggagccttccaccggcactcatgacggcctgcctgcaaacctgctggtggggcagacccgaaaatccagcgtgcaccccgccggaggaaggtcccatggcctgctgggcttggctcggcgcccccacccctggctaccttgtgggaataaacagacaaattagcctgctgg

SEQ ID NO: 137763 - DNA, 1540 bp, Homo sapiens
  Payload ID: 6976
  Gene Symbol: GPX5
  Gene Name: glutathione peroxidase 5
  Uniprot ID: O75715
  ENST ID: ENST00000412168
  CDS Start-End: 90-755
ttgggctaagtccctgccaagataccaaaagactgcagaggtgggcaaagacctcaggcccccagactagcaatctacaaacactagtcatgactacacagttaagggtcgtccatctgcttccccttctcctagcctgctttgtgcaaacaagtcccaagcaggagaagatgaagatggattgccacaaagacgagaaaggcaccatctatgactatgaggccatcgcacttaataagaatgaatatgtttccttcaagcagtatgtgggcaagcacatcctcttcgtcaacgtggccacctactgtggtctgacagcgcaatatcctgaactaaatgcactccaggaggagctgaagccctatggtctagttgtgttgggctttccctgcaaccaatttggaaagcaagaaccaggagataacaaagagattcttcctgggctcaagtatgtccgtccagggggaggatttgtacctagtttccagctttttgagaaaggggatgtgaatggtgaaaaagaacagaaagtcttcagtttcttgaagcactcctgtcctcatccctctgagattttgggcacattcaaatctatatcctgggaccctgtaaaggtccatgacatccgttggaactttgaaaagttcctggtggggcctgatggaatccctgtcatgcgctggtcccaccgggctacggtcagctcagtcaagacagacatcctggcgtacttgaagcaattcaaaaccaaataggaaggtggagttaagggcaggagcaaccctacttctcacctaatgacttgctctccccacccctccaaaaaaaaggaatacccatcttctcaccacactctcttcctgcatgggctccacctgagtaaatcaccgccacatactgccagaattcccactctccacaaactagatttatatttggaaggctactgctcttttgcctctcaagagtatgtgggtgaagactgaaacaaatggaaacctaaaatccccagacctctgttacaggttgaatcattcatatccaccagagggaaatcatccttccacgacaatggttcagtcggccatcacatcctgaagaacattcctagacattctgactcttccatctctctctaccctggaggtgtagaaatagcaatggggtcacagtcacacaatttaggttccacttcataacattttttgtctcctaggacaaacgtgtatcatcagtttccaactgttttggctcagttttcatccatgacacctccccctaccagccattctcctgtgggagcaagaacattgcttcaaaagaagagagggcatctccatgcttgtgggacccaaaacctatctctggccctacaaaagttttcctaattgtctgatctttagtgcattcaggttatggcacctggagaggaatgccctttatcttttgaaggatgggatttcccatctcaaccctggattcctcaccttcagaacgagccctgccactgtctccaataaaatgttttctgcagcatcga

SEQ ID NO: 137764 - DNA, 428 bp, Homo sapiens
  Payload ID: 6976
  Gene Symbol: GPX5
  Gene Name: glutathione peroxidase 5
  Uniprot ID: O75715
  ENST ID: ENST00000469384
  CDS Start-End: 3-305
tcatgactacacagttaagggtcgtccatctgcttccccttctcctagcctgctttgtgcaaacaagtcccaagcaggagaagatgaagatggattgccacaaagacgagaaaggcaccatctatgactatgaggccatcgcacttaataagaatgaatatgtttccttcaagcagtatgtgggcaagcacatcctcttcgtcaacgtggccacctactgtggtctgacagcgcaatatcctggtatgtccgtccagggggaggatttgtacctagtttccagctttttgagaaaggggatgtgaatggtgaaaaagaacagaaagtcttcagtttcttgaagcactcctgtcctcatccctctgagattttgggcacattcaaatctatatcctgggaccctgtaaaggtccatgacatccgttgga

SEQ ID NO: 137765 - DNA, 1334 bp, Homo sapiens
  Payload ID: 6976
  Gene Symbol: GPX5
  Gene Name: glutathione peroxidase 5
  ENST ID: ENST00000551639
  CDS Start-End: 3-305
tcatgactacacagttaagggtcgtccatctgcttccccttctcctagcctgctttgtgcaaacaagtcccaagcaggagaagatgaagatggattgccacaaagacgagaaaggcaccatctatgactatgaggccatcgcacttaataagaatgaatatgtttccttcaagcagtatgtgggcaagcacatcctcttcgtcaacgtggccacctactgtggtctgacagcgcaatatcctggtatgtccgtccagggggaggatttgtacctagtttccagctttttgagaaaggggatgtgaatggtgaaaaagaacagaaagtcttcagtttcttgaagcactcctgtcctcatccctctgagattttgggcacattcaaatctatatcctgggaccctgtaaaggtccatgacatccgttggaactttgaaaagttcctggtggggcctgatggaatccctgtcatgcgctggtcccaccgggctacggtcagctcagtcaagacagacatcctggcgtacttgaagcaattcaaaaccaaataggaaggtggagttaagggcaggagcaaccctacttctcacctaatgacttgctctccccacccctccaaaaaaaaggaatacccatcttctcaccacactctcttcctgcatgggctccacctgagtaaatcaccgccacatactgccagaattcccactctccacaaactagatttatatttggaaggctactgctcttttgcctctcaagagtatgtgggtgaagactgaaacaaatggaaacctaaaatccccagacctctgttacaggttgaatcattcatatccaccagagggaaatcatccttccacgacaatggttcagtcggccatcacatcctgaagaacattcctagacattctgactcttccatctctctctaccctggaggtgtagaaatagcaatggggtcacagtcacacaatttaggttccacttcataacattttttgtctcctaggacaaacgtgtatcatcagtttccaactgttttggctcagttttcatccatgacacctccccctaccagccattctcctgtgggagcaagaacattgcttcaaaagaagagagggcatctccatgcttgtgggacccaaaacctatctctggccctacaaaagttttcctaattgtctgatctttagtgcattcaggttatggcacctggagaggaatgccctttatcttttgaaggatgggatttcccatctcaaccctggattcctcaccttcagaacgagccctgccactgtctccaataaaatgttttctgcagcatcg

SEQ ID NO: 137766 - DNA, 1452 bp, Homo sapiens
  Payload ID: 6976
  Gene Symbol: GPX5
  Gene Name: glutathione peroxidase 5
  ENST ID: ENST00000550775
  CDS Start-End: 3-668
tcatgactacacagttaagggtcgtccatctgcttccccttctcctagcctgctttgtgcaaacaagtcccaagcaggagaagatgaagatggattgccacaaagacgagaaaggcaccatctatgactatgaggccatcgcacttaataagaatgaatatgtttccttcaagcagtatgtgggcaagcacatcctcttcgtcaacgtggccacctactgtggtctgacagcgcaatatcctgaactaaatgcactccaggaggagctgaagccctatggtctagttgtgttgggctttccctgcaaccaatttggaaagcaagaaccaggagataacaaagagattcttcctgggctcaagtatgtccgtccagggggaggatttgtacctagtttccagctttttgagaaaggggatgtgaatggtgaaaaagaacagaaagtcttcagtttcttgaagcactcctgtcctcatccctctgagattttgggcacattcaaatctatatcctgggaccctgtaaaggtccatgacatccgttggaactttgaaaagttcctggtggggcctgatggaatccctgtcatgcgctggtcccaccgggctacggtcagctcagtcaagacagacatcctggcgtacttgaagcaattcaaaaccaaataggaaggtggagttaagggcaggagcaaccctacttctcacctaatgacttgctctccccacccctccaaaaaaaaggaatacccatcttctcaccacactctcttcctgcatgggctccacctgagtaaatcaccgccacatactgccagaattcccactctccacaaactagatttatatttggaaggctactgctcttttgcctctcaagagtatgtgggtgaagactgaaacaaatggaaacctaaaatccccagacctctgttacaggttgaatcattcatatccaccagagggaaatcatccttccacgacaatggttcagtcggccatcacatcctgaagaacattcctagacattctgactcttccatctctctctaccctggaggtgtagaaatagcaatggggtcacagtcacacaatttaggttccacttcataacattttttgtctcctaggacaaacgtgtatcatcagtttccaactgttttggctcagttttcatccatgacacctccccctaccagccattctcctgtgggagcaagaacattgcttcaaaagaagagagggcatctccatgcttgtgggacccaaaacctatctctggccctacaaaagttttcctaattgtctgatctttagtgcattcaggttatggcacctggagaggaatgccctttatcttttgaaggatgggatttcccatctcaaccctggattcctcaccttcagaacgagccctgccactgtctccaataaaatgttttctgcagcatcg

SEQ ID NO: 137767 - DNA, 1712 bp, Homo sapiens
  Payload ID: 6977
  Gene Symbol: GPX6
  Gene Name: glutathione peroxidase 6
  Uniprot ID: P59796
  ENST ID: ENST00000361902
  CDS Start-End: 51-716
aaaaggggctgaaatcctggggacctcagagtcgtctaaaactcctagccatgttccagcagttccaggcctcctgtcttgtcctgtttttcctggttggctttgctcagcagaccctaaagcctcaaaataggaaggtggattgcaacaaaggggtaacaggcaccatctatgagtatggagccctcaccctcaacggcgaggagtacatccaattcaagcagtttgcaggcaagcacgtcctgtttgtcaatgtggccgcctattgaggcttggcagctcagtatcctgaactgaatgcactacaggaggagctgaagaattttggtgtcattgtgttggcctttccctgcaaccagtttggaaaacaagaaccaggaacaaactcagaaatacttcttggtctcaagtatgtgtgtccaggtagtggctttgtccccagtttccagctctttgagaaaggggatgtgaatggagaaaaagaacagaaggtctttactttcctgaagaactcctgccctccgacctctgatcttttgggctcatcaagccaactcttctgggagcccatgaaggtccatgatatccgctggaactttgagaaatttctggtggggcccgatggagtccctgtcatgcattggttccaccaggctccagtcagcacagtcaagtcagacatcctggagtacctaaagcagttcaatacccactaggaagggctagcgactgacagaaataactaccctgtctcccacctgcaggaatgtctaacaaagcatccatcttcctccttctttgctccacactcgtgcctacccagcctcctgatgaccaaaccatcctgtactacccaagcacctgcttagcatgtgtgtgtagctgtgtgtgtgtgtgtgtgtgtgtgtatggatatgtagaattgtatttgttggtatatgcataggtgtatgtatggtgtgtgtgtgtgtgtgtgtgtgtgtgtttgaagattaaggaaaagaacacctatctctccaactctctgatcctgaaatatctattccaaaggaaaatcatattttagggtagatgaatcagactatcctgtgtccctaaaaaagcaatcccgagaagttgtgacatctatcccttccccttcctgaaagttttaaagaaagcaggagctggccgcaagactctaggcctccttcatagcctctctcctctaagataggcatgcattgttaaactcttttctccttaattctcctttattcccctgccacccagtagttctcatgtaggacctctgaaggcagagtgagagcagaaaccccacctcacatgaagggaagggcatctccatgatggtggatcccaaaacccctctgggtcgcaccctgccagagccttccttggtgcctgtcccttagtgcattcaggtcatggcacctgggcaggggtgtccctgtattctgaatgatgggctttctcctcaccctgagcctcctcaactttaagcttattttgatcactgtctcaaatttaaaaattctgcagcaacctggctctgtgtggtgttttcccagtcccatattatgtccagtcatacttcttctttctctgtcactttgtccctgctttcttgattcccttgtcttgttcttcagtattttgtttttctcaaaaatgctctagaactttccttggcacatataaaagcacggctg

SEQ ID NO: 137768 - DNA, 716 bp, Homo sapiens
  Payload ID: 6977
  Gene Symbol: GPX6
  Gene Name: glutathione peroxidase 6
  ENST ID: ENST00000474923
  CDS Start-End: 45-590
ggctgaaatcctggggacctcagagtcgtctaaaactcctagccatgttccagcagttccaggcctcctgtcttgtcctgtttttcctggttggctttgctcagcagaccctaaagcctcaaaataggaaggtggattgcaacaaaggggtaacaggcaccatctatgagtatggagccctcaccctcaacggcgaggagtacatccaattcaagcagtttgcaggcaagcacgtcctgtttgtcaatgtggccgcctattgaggcttggcagctcagtatcctgaactgaatgcactacaggaggagctgaagaattttggtgtcattgtgttggcctttccctgcaaccagtttggaaaacaagaaccaggaacaaactcagaaatacttcttggtctcaaaactcctgccctccgacctctgatcttttgggctcatcaagccaactcttctgggagcccatgaaggtccatgatatccgctggaactttgagaaatttctggtggggcccgatggagtccctgtcatgcattggttccaccaggctccagtcagcacagtcaagtcagacatcctggagtacctaaagcagttcaatacccactaggaagggctagcgactgacagaaataactaccctgtctcccacctgcaggaatgtctaacaaagcatccatcttcctccttctttgctccacactcgtgcctaccca

SEQ ID NO: 137769 - DNA, 1709 bp, Homo sapiens
  Payload ID: 6977
  Gene Symbol: GPX6
  Gene Name: glutathione peroxidase 6
  ENST ID: ENST00000612264
  CDS Start-End: 51-713
aaaaggggctgaaatcctggggacctcagagtcgtctaaaactcctagccatgttccagcagttccaggcctcctgtcttgtcctgtttttcctggttggctttgctcagcagaccctaaagcctcaaaataggaaggtggattgcaacaaaggggtaacaggcaccatctatgagtatggagccctcaccctcaacggcgaggagtacatccaattcaagcagtttgcaggcaagcacgtcctgtttgtcaatgtggccgcctatggcttggcagctcagtatcctgaactgaatgcactacaggaggagctgaagaattttggtgtcattgtgttggcctttccctgcaaccagtttggaaaacaagaaccaggaacaaactcagaaatacttcttggtctcaagtatgtgtgtccaggtagtggctttgtccccagtttccagctctttgagaaaggggatgtgaatggagaaaaagaacagaaggtctttactttcctgaagaactcctgccctccgacctctgatcttttgggctcatcaagccaactcttctgggagcccatgaaggtccatgatatccgctggaactttgagaaatttctggtggggcccgatggagtccctgtcatgcattggttccaccaggctccagtcagcacagtcaagtcagacatcctggagtacctaaagcagttcaatacccactaggaagggctagcgactgacagaaataactaccctgtctcccacctgcaggaatgtctaacaaagcatccatcttcctccttctttgctccacactcgtgcctacccagcctcctgatgaccaaaccatcctgtactacccaagcacctgcttagcatgtgtgtgtagctgtgtgtgtgtgtgtgtgtgtgtgtatggatatgtagaattgtatttgttggtatatgcataggtgtatgtatggtgtgtgtgtgtgtgtgtgtgtgtgtgtttgaagattaaggaaaagaacacctatctctccaactctctgatcctgaaatatctattccaaaggaaaatcatattttagggtagatgaatcagactatcctgtgtccctaaaaaagcaatcccgagaagttgtgacatctatcccttccccttcctgaaagttttaaagaaagcaggagctggccgcaagactctaggcctccttcatagcctctctcctctaagataggcatgcattgttaaactcttttctccttaattctcctttattcccctgccacccagtagttctcatgtaggacctctgaaggcagagtgagagcagaaaccccacctcacatgaagggaagggcatctccatgatggtggatcccaaaacccctctgggtcgcaccctgccagagccttccttggtgcctgtcccttagtgcattcaggtcatggcacctgggcaggggtgtccctgtattctgaatgatgggctttctcctcaccctgagcctcctcaactttaagcttattttgatcactgtctcaaatttaaaaattctgcagcaacctggctctgtgtggtgttttcccagtcccatattatgtccagtcatacttcttctttctctgtcactttgtccctgctttcttgattcccttgtcttgttcttcagtattttgtttttctcaaaaatgctctagaactttccttggcacatataaaagcacggctg

SEQ ID NO: 137770 - DNA, 219 bp, Homo sapiens
  Payload ID: 6977
  Gene Symbol: GPX6
  Gene Name: glutathione peroxidase 6
  ENST ID: ENST00000627846
  CDS Start-End: 1-219
atgttccagcagttccaggcctcctgtcttgtcctgtttttcctggttggctttgctcagcagaccctaaagcctcaaaataggaaggtggattgcaacaaaggggtaacaggcaccatctatgagtatggagccctcaccctcaacggcgaggagtacatccaattcaagcagtttgcaggcaagcacgtcctgtttgtcaatgtggccgcctattga

SEQ ID NO: 137771 - DNA, 1228 bp, Homo sapiens
  Payload ID: 6978
  Gene Symbol: GPX7
  Gene Name: glutathione peroxidase 7
  Uniprot ID: Q96SL4
  ENST ID: ENST00000361314
  CDS Start-End: 39-602
tctttgccctcgcgacgccgccacctccggaacaagccatggtggcggcgacggtggcagcggcgtggctgctcctgtgggctgcggcctgcgcgcagcaggagcaggacttctacgacttcaaggcggtcaacatccggggcaaactggtgtcgctggagaagtaccgcggatcggtgtccctggtggtgaatgtggccagcgagtgcggcttcacagaccagcactaccgagccctgcagcagctgcagcgagacctgggcccccaccactttaacgtgctcgccttcccctgcaaccagtttggccaacaggagcctgacagcaacaaggagattgagagctttgcccgccgcacctacagtgtctcattccccatgtttagcaagattgcagtcaccggtactggtgcccatcctgccttcaagtacctggcccagacttctgggaaggagcccacctggaacttctggaagtacctagtagccccagatggaaaggtggtaggggcttgggacccaactgtgtcagtggaggaggtcagaccccagatcacagcgctcgtgaggaagctcatcctactgaagcgagaagacttataaccaccgcgtctcctcctccaccacctcatcccgcccacctgtgtggggctgaccaatgcaaactcaaatggtgcttcaaagggagagacccactgactctccttcctttactcttatgccattggtcccatcattcttgtgggggaaaaattctagtattttgattatttgaatcttacagcaacaaataggaactcctggccaatgagagctcttgaccagtgaatcaccagccgatacgaacgtcttgccaacaaaaatgtgtggcaaatagaagtatatcaagcaataatctcccacccaaggcttctgtaaactgggaccaatgattacctcatagggctgttgtgaggattaggatgaaatacctgtgaaagtgcctaggcagtgccagccaaataggaggcattcaatgaacattttttgcatataaaccaaaaaataacttgttatcaataaaaacttgcatccaacatgaatttccagccgatgataatccaggccaaaggtttagttgttgttatttcctctgtattattttcttcattacaaaagaaatgcaagttcattgtaacaatccaaacaatacctcacgatataaaataaaaatgaaagtatcctcctca

SEQ ID NO: 137772 - DNA, 3245 bp, Homo sapiens
  Payload ID: 6979
  Gene Symbol: GPX8
  Gene Name: glutathione peroxidase 8 (putative)
  ENST ID: ENST00000296734
  CDS Start-End: 25-297
gacttccctctagaatcctccaacatggagcctcttgcagcttacccgctaaaatgttccgggcccagagcaaaggtatttgcagttttgctgtctatagttctatgcacagtaacgctatttcttctacaactaaaattcctcaaacctaaaatcaacagcttttatgcctttgaagtgaaggatgcaaaaggaagaactgtttctctggaaaagtataaaggcaaaattcttcaaagaaggaaccaaggtggaatttttggaagtatcttgtcaaccctgagggtcaagttgtgaagttctggaagccagaggagcccattgaagtcatcaggcctgacatagcagctctggttagacaagtgatcataaaaaagaaagaggatctatgagaatgccattgcgtttctaatagaacagagaaatgtctccatgagggtttggtctcattttaaacattttttttttggagacagtgtctcactctgtcacccaggctggagtgcagtagtgcgttctcagctcattgcaacctctgcctttttaaacatgctattaaatgtggcaatgaaggatttttttttaatgttatcttgctattaagtggtaatgaatgttcccaggatgaggatgttacccaaagcaaaaatcaagagtagccaaagaatcaacatgaaatatattaactacttcctctgaccatactaaagaattcagaatacacagtgaccaatgtgcctcaatatcttattgttcaacttgacattttctaggactgtacttgatgaaaatgccaacacactagaccactctttggattcaagagcactgtgtatgactgaaatttctggaataactgtaaatggttatgttaatggaataaaacacaaatgttgaaaaatgtaaaatatatatacatagattcaaatccttatatatgtatgcttgttttgtgtacaggattttgttttttctttttaagtacaggttcctagtgttttactataactgtcactatgtatgtaactgacatatataaatagtcatttataaatgaccgtattataacatttgaaaaagtcttcatcattttcagtatttctctctgcattattttttagaagcaactcaaattctgtaatcataatattaccaagtaagtcagtctttatttttgcgtgaaaatcccaagtgtagaaaaaaggacatgagtataagatcatttaacttgattccttataggctgatttgggttgctaatgtattcgtactagattagccacttgggaggaattcaatgctgcatcattctgatagctgaaatagtaaaagtcaactccaaacagcctaaattctagtataaaaagggggtgatcatacaagtcctaaagtgtagatcagcagtcactgaacctcttagagtcacaaggcatttcttctcccaaagtcatgacctttatattttgttagccttataattgactaacaaagcaacctgccaagttggtgaaggttaattattgcctcatgaaatatacattcatcgcataaaagaattaaataggaagatggccaaaaatgtaaaaaagtcgtataaatttgtctaagaagaaaaagacccaatttaagtagtctgtgacttgactcccaaattctgacctgatggatgaaagtgaagatgtttcgtatggcaaattcagtaatgctacctcagtatatagttctgtatacgtatttggaccaaagttattagataaaccaaaaatatttcatgaagcatcttctgcttcagagtccatatccagccacccagctatgaatgtatttagaaagatatttggtggaggtggaatttctaccagaggtcaagaggatttgtagggatagcctcaagaatgccagatgagtgtgtcagaaagcctgctcctacctctcgccagctgcgtgactttaggcaagtcacttaagtaccttatttcagtttcctcacctgtaaattgaacaggggttgaatggaataaaaagccctttgcaactctaaaagtcaattaacacacttactaaggtgttttaagtgaccaggaaggaaatcagaactaacctggattgttagcgaagaaaacagaagccaccaacaagcctatctgtcctttgcaattttgctccaagagcctattagcaatttgaattctgagcctctaagaaaacttatgctcaggtggcccctccaagtgttggtgccagagcactcttgccttgtatcctcacctacgccttccatgaactcatagcagtgctgtggcactgcaggggtgttttatgcattcacgttaggagcatgagcagaactgcatatgccagcaccacatgggcagcagagactccccactgccagatggatgataatggagctgcactgggaacaaccaggactgtcccagtcaacatgatacagatgaacatcctgccttaagtcactagctctctccaaagccagataaagtgggtttcttcacttacatctctctaatcttggctgccttattcaacctacagactctatgtcagtgctggattttctccccttgccctttaggtaagcagagtaggcaggaggagatttgaaagcgtgtcatacatattgccttgaaagaaaggacattcaggtgtcccttcggggttctgtaacaattaggctatgtgtgctgagagagggagcggagtcatttgctgatgtgctgctacctgtaactcaaatgcctcataggaataccagcggacaaacacatagaggaaaagttgaatctttcctatattggacaatcttccttcagtcttgtttctgcatcaaaaagtctgggacacagagtgctacaggatgcctgggctaaggactgtaacagaaaaatatcaacatcagagcctggcacagtggctcacaccggtaatcccagcactttgggaggccgaggcgggtggatcacttcaggtcaggagttcgagaccatcctggccaacatggtgaaacccccatctctactaaaaatacaaaaattagccgggcacggtggcacatgcctgtaatcccagctacctgggaggctgagtcagaagaatcacttgaaaacaggaggctgaggttgcaatgagccaagattgcaccactgcactccaacctgggcaacagagcgagaccccatcttaaagaccctgtctcaaaaaagagagaaaaagaaaaagaaaaa

SEQ ID NO: 137773 - DNA, 1411 bp, Homo sapiens
  Payload ID: 6979
  Gene Symbol: GPX8
  Gene Name: glutathione peroxidase 8 (putative)
  Uniprot ID: Q8TED1
  ENST ID: ENST00000503787
  CDS Start-End: 76-705
aaactaagccggtttcaagtttcagctcctccttgaattccaggctgctgagacttccctctagaatcctccaacatggagcctcttgcagcttacccgctaaaatgttccgggcccagagcaaaggtatttgcagttttgctgtctatagttctatgcacagtaacgctatttcttctacaactaaaattcctcaaacctaaaatcaacagcttttatgcctttgaagtgaaggatgcaaaaggaagaactgtttctctggaaaagtataaaggcaaagtttcactagttgtaaacgtggccagtgactgccaactcacagacagaaattacttagggctgaaggaactgcacaaagagtttggaccatcccacttcagcgtgttggcttttccctgcaatcagtttggagaatcggagccccgcccaagcaaggaagtagaatcttttgcaagaaaaaactacggagtaactttccccatcttccacaagattaagattctaggatctgaaggagaacctgcatttagatttcttgttgattcttcaaagaaggaaccaaggtggaatttttggaagtatcttgtcaaccctgagggtcaagttgtgaagttctggaagccagaggagcccattgaagtcatcaggcctgacatagcagctctggttagacaagtgatcataaaaaagaaagaggatctatgagaatgccattgcgtttctaatagaacagagaaatgtctccatgagggtttggtctcattttaaacattttttttttggagacagtgtctcactctgtcacccaggctggagtgcagtagtgcgttctcagctcattgcaacctctgcctttttaaacatgctattaaatgtggcaatgaaggatttttttttaatgttatcttgctattaagtggtaatgaatgttcccaggatgaggatgttacccaaagcaaaaatcaagagtagccaaagaatcaacatgaaatatattaactacttcctctgaccatactaaagaattcagaatacacagtgaccaatgtgcctcaatatcttattgttcaacttgacattttctaggactgtacttgatgaaaatgccaacacactagaccactctttggattcaagagcactgtgtatgactgaaatttctggaataactgtaaatggttatgttaatggaataaaacacaaatgttgaaaaatgtaaaatatatatacatagattcaaatccttatatatgtatgcttgttttgtgtacaggattttgttttttctttttaagtacaggttcctagtgttttactataactgtcactatgtatgtaactgacatatataaatagtcatttataaatgaccgtattataacatttgaaaaagtcttcatcattttcagta

SEQ ID NO: 137774 - DNA, 1036 bp, Homo sapiens
  Payload ID: 6979
  Gene Symbol: GPX8
  Gene Name: glutathione peroxidase 8 (putative)
  ENST ID: ENST00000515370
  CDS Start-End: 24-500
acttccctctagaatcctccaacatggagcctcttgcagcttacccgctaaaatgttccgggcccagagcaaaggtttcactagttgtaaacgtggccagtgactgccaactcacagacagaaattacttagggctgaaggaactgcacaaagagtttggaccatcccacttcagcgtgttggcttttccctgcaatcagtttggagaatcggagccccgcccaagcaaggaagtagaatcttttgcaagaaaaaactacggagtaactttccccatcttccacaagattaagattctaggatctgaaggagaacctgcatttagatttcttgttgattcttcaaagaaggaaccaaggtggaatttttggaagtatcttgtcaaccctgagggtcaagttgtgaagttctggaagccagaggagcccattgaagtcatcaggcctgacatagcagctctggttagacaagtgatcataaaaaagaaagaggatctatgagaatgccattgcgtttctaatagaacagagaaatgtctccatgagggtttggtctcattttaaacattttttttttggagacagtgtctcactctgtcacccaggctggagtgcagtagtgcgttctcagctcattgcaacctctgcctttttaaacatgctattaaatgtggcaatgaaggatttttttttaatgttatcttgctattaagtggtaatgaatgttcccaggatgaggatgttacccaaagcaaaaatcaagagtagccaaagaatcaacatgaaatatattaactacttcctctgaccatactaaagaattcagaatacacagtgaccaatgtgcctcaatatcttattgttcaacttgacattttctaggactgtacttgatgaaaatgccaacacactagaccactctttggattcaagagcactgtgtatgactgaaatttctggaataactgtaaatggttatgttaatggaataaaacacaaatgttgaaaaatgtaaaatatatatacatagattcaaa

SEQ ID NO: 137775 - DNA, 3119 bp, Homo sapiens
  Payload ID: 6980
  Gene Symbol: GSR
  Gene Name: glutathione reductase
  Uniprot ID: P00390
  ENST ID: ENST00000221130
  CDS Start-End: 92-1660
gtgaggctgcgcttgcccggggcccgcgcccccctaccccggggaccgcccccgggccgcccgccccacttggcgcgccacttccgcgtgcatggccctgctgccccgagccctgagcgccggcgcgggaccgagctggcggcgggcggcgcgcgccttccgaggcttcctgctgcttctgcccgagcccgcggccctcacgcgcgccctctcccgtgccatggcctgcaggcaggagccgcagccgcagggcccgccgcccgctgctggcgccgtggcctcctatgactacctggtgatcgggggcggctcgggcgggctggccagcgcgcgcagggcggccgagctgggtgccagggccgccgtggtggagagccacaagctgggtggcacttgcgtgaatgttggatgtgtacccaaaaaggtaatgtggaacacagctgtccactctgaattcatgcatgatcatgctgattatggctttccaagttgtgagggtaaattcaattggcgtgttattaaggaaaagcgggatgcctatgtgagccgcctgaatgccatctatcaaaacaatctcaccaagtcccatatagaaatcatccgtggccatgcagccttcacgagtgatcccaagcccacaatagaggtcagtgggaaaaagtacaccgccccacacatcctgatcgccacaggtggtatgccctccacccctcatgagagccagatccccggtgccagcttaggaataaccagcgatggattttttcagctggaagaattgcccggccgcagcgtcattgttggtgcaggttacattgctgtggagatggcagggatcctgtcagccctgggttctaagacatcactgatgatacggcatgataaggtacttagaagttttgattcaatgatcagcaccaactgcacggaggagctggagaacgctggcgtggaggtgctgaagttctcccaggtcaaggaggttaaaaagactttgtcgggcttggaagtcagcatggttactgcagttcccggtaggctaccagtcatgaccatgattccagatgttgactgcctgctctgggccattgggcgggtcccgaataccaaggacctgagtttaaacaaactggggattcaaaccgatgacaagggtcatatcatcgtagacgaattccagaataccaacgtcaaaggcatctatgcagttggggatgtatgtggaaaagctcttcttactccagttgcaatagctgctggccgaaaacttgcccatcgactttttgaatataaggaagattccaaattagattataacaacatcccaactgtggtcttcagccacccccctattgggacagtgggactcacggaagatgaagccattcataaatatggaatagaaaatgtgaagacctattcaacgagctttaccccgatgtatcacgcagttaccaaaaggaaaacaaaatgtgtgatgaaaatggtctgtgctaacaaggaagaaaaggtggttgggatccatatgcagggacttgggtgtgatgaaatgctgcagggttttgctgttgcagtgaagatgggagcaacgaaggcagactttgacaacacagtcgccattcaccctacctcttcagaagagctggtcacacttcgttgagaaccaggagacacgtgtggcgggcagtgggacccatagatcttctgaaatgaaacaaataatcacattgacttactgtttgagttttatgtatttctttattttaatcaggatcttctgatagtggaaatttttagtacataatagaacttatttatggagttagaaatttgtagtgttatccaggattgattttcatttgatcacatctcacagtaattaatattttcaagttttttttttattaacagctctgtgctagttttttttttctgttttagcctcatcccaaatataaagctttgtgaagtacaattaacttaatgtacttgaatgaatagaacttgctactttttttttttttttttttgagacagagttttgctctcattgcccaggctggagtgcggtggtgctatttcagctcaccacaacctctgcctcctgggttcaagtgattctcctgccttagcctcccgaatagctggaattacaggcacgcaccaccatgcctgactaattttgtatttttagtagacatggggtttctccatgttggtcaggctggtctcaaactcccaccttcaggtgatccgcccacctcggcctcctgaggtgctgagattacaggcgtgagccactgtgccagcttgctaattttcacagaagttgatggcaattcttcacatgtaaacagtgccagtgcacagaacctttatatattttttgaagccagtactgtgctctgcatataacaaagctgcttcaaggatgagacctttttctaaaagcatgtaatgtgagaagccggcctgccttattttcttttttcttttttaatgattaaaaatagtttgtggcaaggcacggtggctcaggcctgtaattctagcactttgggaggccgaggcaggaggattacttgagcctacaagtttgaggccagcatgcacagcatagcaagactgcatctctacagagagtaaaaaaaattacccgagtgtggtgatgtgcatctgtaatctcagctacttgggaggctgaggtgagaggatcacttgagcttgggtgaggtgaggctgcagtgagtcctgatcatgctgctgcactcaatcttggacaacagagcaagaccctgtctcaaaaaaaaaaaaaaaaaatatatatatatatatatattatttttatgaggtgaagtgcatcaaacttgggaaagatttgaggaggctgggaacctcctggaaaaccactccttgaagaaagatatgagagacatttagaagtgattcctgctttcagaaggaggtggattcaaatacatcaaaagtcccttcctctgctaagtgtttatagttcaatgaataatttcaatatttgtatgtgttcttgtcattttatttttttctgaaaaacttccaaaaatttgaaaataaaattacagccttttcttcttataaaa

SEQ ID NO: 137776 - DNA, 582 bp, Homo sapiens
  Payload ID: 6980
  Gene Symbol: GSR
  Gene Name: glutathione reductase
  ENST ID: ENST00000521479
  CDS Start-End: 149-582
aattggtctgaggtgcacttgggctttgggatgtttcccgacttaattggtctgaagtgcagcctgggctttgggattttcgggtgatctgaattgcagccaaggcgaccttgagtaggtgaatgttggatgtgtacccaaaaaggtaatgtggaacacagctgtccactctgaattcatgcatgatcatgctgattatggctttccaagttgtgagggtaaattcaattggcgtgttattaaggaaaagcgggatgcctatgtgagccgcctgaatgccatctatcaaaacaatctcaccaagtcccatatagaaatcatccgtggccatgcagccttcacgagtgatcccaagcccacaatagaggtcagtgggaaaaagtacaccgccccacacatcctgatcgccacaggtggtatgccctccacccctcatgagagccagatccccggtgccagcttaggaataaccagcgatggattttttcagctggaagaattgcccggccgcagcgtcattgttggtgcaggttacattgctgtggagatggcagggatcctgtcagccctgggttctaagac

SEQ ID NO: 137777 - DNA, 913 bp, Homo sapiens
  Payload ID: 6980
  Gene Symbol: GSR
  Gene Name: glutathione reductase
  ENST ID: ENST00000523295
  CDS Start-End: 1-396
cccgctgctggcgccgtggcctcctatgactacctggtgatcgggggcggctcgggcgggctggccagcgcgcgcagggcggccgagctgggtgccagggccgccgtggtggagagccacaagctgggtggcacttgcgtgaatgttggatgtgtacccaaaaaggtaatgtggaacacagctgtccactctgaattcatgcatgatcatgctgattatggctttccaagttgtgagggtaaattcaattggcgtgttattaaggaaaagcgggatgcctatgtgagccgcctgaatgccatctatcaaaacaatctcaccaagccgcagcgtcattgttggtgcaggttacattgctgtggagatggcagggatcctgtcagccctgggttctaagacatcactgatgatacggcatgataaggtacttagaagttttgattcaatgatcagcaccaactgcacggaggagctggagaacgctggcgtggaggtgctgaagttctcccaggtcaaggaggttaaaaagactttgtcgggcttggaagtcagcatggttactgcagttcccggtaggctaccagtcatgaccatgattccagatgttgactgcctgctctgggccattgggcgggtcccgaataccaaggacctgagtttaaacaaactggggattcaaaccgatgacaagggtcatatcatcgtagacgaattccagaataccaacgtcaaaggcatctatgcagttggggatgtatgtggaaaagctcttcttactccagttgcaatagctgctggccgaaaacttgcccatcgactttttgaatataaggaagattccaaattagattataacaacatcccaactgtggtcttcagccacccccctattgggacagtgggactcacggaa

SEQ ID NO: 137778 - DNA, 1323 bp, Homo sapiens
  Payload ID: 6980
  Gene Symbol: GSR
  Gene Name: glutathione reductase
  Uniprot ID: P00390
  ENST ID: ENST00000537535
  CDS Start-End: 1-1323
atggccctgctgccccgagccctgagcgccggcgcgggaccgagctggcggcgggcggcgcgcgccttccgaggcttcctgctgcttctgcccgagcccgcggccctcacgcgcgccctctcccgtgccatggcctgcaggcaggagccgcagccgcagggcccgccgcccgctgctggcgccgtggcctcctatgactacctggtgatcgggggcggctcgggcgggctggccagcgcgcgcagggcggccgagctgggtgccagggccgccgtggtggagagccacaagctgggtggcacttgcgtgaatgttggatgtgtacccaaaaaggtaatgtggaacacagctgtccactctgaattcatgcatgatcatgctgattatggctttccaagttgtgagggtaaattcaattggcgtgttattaaggaaaagcgggatgcctatgtgagccgcctgaatgccatctatcaaaacaatctcaccaagtcccatatagaaatcatccgtggccatgcagccttcacgagtgatcccaagcccacaatagaggtcagtgggaaaaagtacaccgccccacacatcctgatcgccacaggtggtatgccctccacccctcatgagagccagatccccggtgccagcttaggaataaccagcgatggattttttcagctggaagaattgcccggccgcagcgtcattgttggtgcaggttacattgctgtggagatggcagggatcctgtcagccctgggttctaagacatcactgatgatacggcatgataaggggattcaaaccgatgacaagggtcatatcatcgtagacgaattccagaataccaacgtcaaaggcatctatgcagttggggatgtatgtggaaaagctcttcttactccagttgcaatagctgctggccgaaaacttgcccatcgactttttgaatataaggaagattccaaattagattataacaacatcccaactgtggtcttcagccacccccctattgggacagtgggactcacggaagatgaagccattcataaatatggaatagaaaatgtgaagacctattcaacgagctttaccccgatgtatcacgcagttaccaaaaggaaaacaaaatgtgtgatgaaaatggtctgtgctaacaaggaagaaaaggtggttgggatccatatgcagggacttgggtgtgatgaaatgctgcagggttttgctgttgcagtgaagatgggagcaacgaaggcagactttgacaacacagtcgccattcaccctacctcttcagaagagctggtcacacttcgttga

SEQ ID NO: 137779 - DNA, 1410 bp, Homo sapiens
  Payload ID: 6980
  Gene Symbol: GSR
  Gene Name: glutathione reductase
  Uniprot ID: P00390
  ENST ID: ENST00000541648
  CDS Start-End: 1-1410
atggccctgctgccccgagccctgagcgccggcgcgggaccgagctggcggcgggcggcgcgcgccttccgaggcttcctgctgcttctgcccgagcccgcggccctcacgcgcgccctctcccgtgccatggcctgcaggcaggagccgcagccgcagggcccgccgcccgctgctggcgccgtggcctcctatgactacctggtgatcgggggcggctcgggcgggctggccagcgcgcgcagggcggccgagctgggtgccagggccgccgtggtggagagccacaagctgggtggcacttgcgtgaatgttggatgtgtacccaaaaaggtaatgtggaacacagctgtccactctgaattcatgcatgatcatgctgattatggctttccaagttgtgagggtaaattcaattggcgtgttattaaggaaaagcgggatgcctatgtgagccgcctgaatgccatctatcaaaacaatctcaccaagtcccatatagaaatcatccgtggccatgcagccttcacgagtgatcccaagcccacaatagaggtcagtgggaaaaagtacaccgccccacacatcctgatcgccacaggtggtatgccctccacccctcatgagagccagatccccggtgccagcttaggaataaccagcgatggattttttcagctggaagaattgcccggccgcagcgtcattgttggtgcaggttacattgctgtggagatggcagggatcctgtcagccctgggttctaagacatcactgatgatacggcatgataaggtacttagaagttttgattcaatgatcagcaccaactgcacggaggagctggagaacgctggcgtggaggtgctgaagttctcccaggggattcaaaccgatgacaagggtcatatcatcgtagacgaattccagaataccaacgtcaaaggcatctatgcagttggggatgtatgtggaaaagctcttcttactccagttgcaatagctgctggccgaaaacttgcccatcgactttttgaatataaggaagattccaaattagattataacaacatcccaactgtggtcttcagccacccccctattgggacagtgggactcacggaagatgaagccattcataaatatggaatagaaaatgtgaagacctattcaacgagctttaccccgatgtatcacgcagttaccaaaaggaaaacaaaatgtgtgatgaaaatggtctgtgctaacaaggaagaaaaggtggttgggatccatatgcagggacttgggtgtgatgaaatgctgcagggttttgctgttgcagtgaagatgggagcaacgaaggcagactttgacaacacagtcgccattcaccctacctcttcagaagagctggtcacacttcgttga

SEQ ID NO: 137780 - DNA, 1482 bp, Homo sapiens
  Payload ID: 6980
  Gene Symbol: GSR
  Gene Name: glutathione reductase
  Uniprot ID: P00390
  ENST ID: ENST00000546342
  CDS Start-End: 1-1482
atggccctgctgccccgagccctgagcgccggcgcgggaccgagctggcggcgggcggcgcgcgccttccgaggcttcctgctgcttctgcccgagcccgcggccctcacgcgcgccctctcccgtgccatggcctgcaggcaggagccgcagccgcagggcccgccgcccgctgctggcgccgtggcctcctatgactacctggtgatcgggggcggctcgggcgggctggccagcgcgcgcagggcggccgagctgggtgccagggccgccgtggtggagagccacaagctgggtggcacttgcgtgaatgttggatgtgtacccaaaaaggtaatgtggaacacagctgtccactctgaattcatgcatgatcatgctgattatggctttccaagttgtgagggtaaattcaattggcgtgttattaaggaaaagcgggatgcctatgtgagccgcctgaatgccatctatcaaaacaatctcaccaagtcccatatagaaatcatccgtggccatgcagccttcacgagtgatcccaagcccacaatagaggtcagtgggaaaaagtacaccgccccacacatcctgatcgccacaggtggtatgccctccacccctcatgagagccagatccccggtgccagcttaggaataaccagcgatggattttttcagctggaagaattgcccggccgcagcgtcattgttggtgcaggttacattgctgtggagatggcagggatcctgtcagccctgggttctaagacatcactgatgatacggcatgataaggtcaaggaggttaaaaagactttgtcgggcttggaagtcagcatggttactgcagttcccggtaggctaccagtcatgaccatgattccagatgttgactgcctgctctgggccattgggcgggtcccgaataccaaggacctgagtttaaacaaactggggattcaaaccgatgacaagggtcatatcatcgtagacgaattccagaataccaacgtcaaaggcatctatgcagttggggatgtatgtggaaaagctcttcttactccagttgcaatagctgctggccgaaaacttgcccatcgactttttgaatataaggaagattccaaattagattataacaacatcccaactgtggtcttcagccacccccctattgggacagtgggactcacggaagatgaagccattcataaatatggaatagaaaatgtgaagacctattcaacgagctttaccccgatgtatcacgcagttaccaaaaggaaaacaaaatgtgtgatgaaaatggtctgtgctaacaaggaagaaaaggtggttgggatccatatgcagggacttgggtgtgatgaaatgctgcagggttttgctgttgcagtgaagatgggagcaacgaaggcagactttgacaacacagtcgccattcaccctacctcttcagaagagctggtcacacttcgttga

SEQ ID NO: 137781 - DNA, 1019 bp, Homo sapiens
  Payload ID: 6981
  Gene Symbol: GSTA1
  Gene Name: glutathione S-transferase alpha 1
  Uniprot ID: P08263
  ENST ID: ENST00000334575
  CDS Start-End: 157-825
gtggcttttccctaacttgactcttctttcagtgggagagaactattgagaggaacaaagagcttataaatacattaggacctggaattcagttgtcgagccaggacggtgacagcgtttaacaaagcttagagaaacctccaggagactgctatcatggcagagaagcccaagctccactacttcaatgcacggggcagaatggagtccacccggtggctcctggctgcagctggagtagagtttgaagagaaatttataaaatctgcagaagatttggacaagttaagaaatgatggatatttgatgttccagcaagtgccaatggttgagattgatgggatgaagctggtgcagaccagagccattctcaactacattgccagcaaatacaacctctatgggaaagacataaaggagagagccctgattgatatgtatatagaaggtatagcagatttgggtgaaatgatcctccttctgcccgtatgtccacctgaggaaaaagatgccaagcttgccttgatcaaagagaaaataaaaaatcgctacttccctgcctttgaaaaagtcttaaagagccatggacaagactaccttgttggcaacaagctgagccgggctgacattcatctggtggaacttctctactacgtcgaggagcttgactccagtcttatctccagcttccctctgctgaaggccctgaaaaccagaatcagcaacctgcccacagtgaagaagtttctacagcctggcagcccaaggaagcctcccatggatgagaaatctttagaagaagcaaggaagattttcaggttttaataacgcagtcatggaggccaagaacttgcaataccaatgttctaaagttttgcaacaataaagtactttacctaagtgttgattgtgcctgttgtgaagctaatgaactctttcaaattatatgctaattaaataatacaactcctattcgctgacttagttaaaattgatttgttttcattaggatctgatgt

SEQ ID NO: 137782 - DNA, 1313 bp, Homo sapiens
  Payload ID: 6982
  Gene Symbol: GSTA2
  Gene Name: glutathione S-transferase alpha 2
  Uniprot ID: P09210
  ENST ID: ENST00000493422
  CDS Start-End: 157-825
gtggcttttccctaacttgacccttctttcagtgggagggaactattgagaggaacaaagagcttataaatacattaggacctggaattcggttgtccagccacaaaggtgacagcatttaacaaagcttagagaaacctccaggagactgctaccatggcagagaagcccaagctccactactccaatatacggggcagaatggagtccatccggtggctcctggctgcagctggagtagagtttgaagagaaatttataaaatctgcagaagatttggacaagttaagaaatgatggatatttgatgttccagcaagtgccaatggttgagattgatgggatgaagctggtgcagaccagagccattctcaactacattgccagcaaatacaacctctatgggaaagacataaaggagaaagccctgattgatatgtatatagaaggtatagcagatttgggtgaaatgatccttcttctgccctttagtcaacctgaggaacaagatgccaagcttgccttgatccaagagaaaacaaaaaatcgctacttccctgcctttgaaaaagtcttaaagagccacggacaagactaccttgttggcaacaagctgagccgggctgacattcacctggtggaacttctctactacgtggaagagcttgactctagccttatttccagcttccctctgctgaaggccctgaaaaccagaatcagtaacctgcccacagtgaagaagtttctacagcctggcagcccaaggaagcctcccatggatgagaaatctttagaagaatcaaggaagattttcaggttttaataaaccagccatagaggtcaagaacatgcaagaccagtattctaaagttttgcaacaattaagtgctttacctaagtgttgattgtgcctgttgtgaagctaatgaactctttcaaattatatgctaattaaataatacaactcctattcacccacttagttaaaattgatttcttctcattaggatctgatgtgaattcagttttccaatctcctcctagccaacaattttcttggaattacaaattcagtaaaaatggaaactataaattatgtggtttgtttgacttttccaagaattgccctgtaacatacaatttgtcatacaatctattaaaatgccaatgtaaaaatgcacctctgacattttcaggtatgcacaggagaagagttaccatcctggataatggcataaagacattttcttcttttcctgaacagtcattttatttctgataaaagcattctttctaatgcatttgcaaaac

SEQ ID NO: 137783 - DNA, 902 bp, Homo sapiens
  Payload ID: 6983
  Gene Symbol: GSTA3
  Gene Name: glutathione S-transferase alpha 3
  Uniprot ID: Q16772
  ENST ID: ENST00000211122
  CDS Start-End: 67-735
ggtggccttgagaagctgagcggagaccggctagactttactcaaagaaaccaagagactgttaccatggcagggaagcccaagcttcactacttcaatggacggggcagaatggagcccatccggtggctcttggctgcagctggagtggagtttgaagagaaatttataggatctgcagaagatttgggaaagttaagaaatgatgggagtttgatgttccagcaagtaccaatggttgagattgatgggatgaagttggtacagaccagagccattctcaactacattgccagcaaatacaacctctacgggaaagacataaaggagagagccctaattgatatgtatacagaaggtatggcagatttgaatgaaatgatccttcttctgcccttatgtcgacctgaggaaaaagatgccaagattgccttgatcaaagagaaaacaaaaagtcgctatttccctgccttcgaaaaagtgttacagagccatggacaagactaccttgttggcaacaagctgagccgggctgacattagcctggtggaacttctctactatgtggaagagcttgactccagccttatctccaacttccctctgctgaaggccctgaaaaccagaatcagcaacctgcccacggtgaagaagtttctacagcctggcagcccaaggaagcctcccgcagatgcaaaagctttagaagaagccagaaagattttcaggttttaataaagcagccatggaggctaagaacatgcaagaccaatattctaaagttttgcaacaatgaagtgctttacttaagtgttgattgtgcctgttgtaaagctaatgaaccctttccaattatatgctaattaaataataaaaactcctatttgctaacttagttaaaa

SEQ ID NO: 137784 - DNA, 775 bp, Homo sapiens
  Payload ID: 6983
  Gene Symbol: GSTA3
  Gene Name: glutathione S-transferase alpha 3
  ENST ID: ENST00000370968
  CDS Start-End: 90-608
gcggagaccggctagactttactcaatttgaagagaaatttataggatctgcagaagatttgggaaagttaagaaatgatgggagtttgatgttccagcaagtaccaatggttgagattgatgggatgaagttggtacagaccagagccattctcaactacattgccagcaaatacaacctctacgggaaagacataaaggagagagccctaattgatatgtatacagaaggtatggcagatttgaatgaaatgatccttcttctgcccttatgtcgacctgaggaaaaagatgccaagattgccttgatcaaagagaaaacaaaaagtcgctatttccctgccttcgaaaaagtgttacagagccatggacaagactaccttgttggcaacaagctgagccgggctgacattagcctggtggaacttctctactatgtggaagagcttgactccagccttatctccaacttccctctgctgaaggccctgaaaaccagaatcagcaacctgcccacggtgaagaagtttctacagcctggcagcccaaggaagcctcccgcagatgcaaaagctttagaagaagccagaaagattttcaggttttaataaagcagccatggaggctaagaacatgcaagaccaatattctaaagttttgcaacaatgaagtgctttacttaagtgttgattgtgcctgttgtaaagctaatgaaccctttccaattatatgctaattaaataataaaaactcctatttgctaacttagttaaaa

SEQ ID NO: 137785 - DNA, 411 bp, Homo sapiens
  Payload ID: 6983
  Gene Symbol: GSTA3
  Gene Name: glutathione S-transferase alpha 3
  ENST ID: ENST00000431899
  CDS Start-End: 87-411
cccaagcttcactacttcaatggacggggcagaatggagcccatccggtggctcttggctgcagctggagtggagatgggagtttgatgttccagcaagtaccaatggttgagattgatgggatgaagttggtacagaccagagccattctcaactacattgccagcaaatacaacctctacgggaaagacataaaggagagagccctaattgatatgtatacagaaggtatggcagatttgaatgaaatgatccttcttctgcccttatgtcgacctgaggaaaaagatgccaagattgccttgatcaaagagaaaacaaaaagtcgctatttccctgccttccgggctgacattagcctggtggaacttctctactatgtggaagagcttgactccagccttatctcca

SEQ ID NO: 137786 - DNA, 669 bp, Homo sapiens
  Payload ID: 6983
  Gene Symbol: GSTA3
  Gene Name: glutathione S-transferase alpha 3
  ENST ID: ENST00000616666
  CDS Start-End: 1-669
atggcagggaagcccaagcttcactacttcaatggacggggcagaatggagcccatccggtggctcttggctgcagctggagtggagtttgaagagaaatttataggatctgcagaagatttgggaaagttaagaaatgatgggagtttgatgttccagcaagtaccaatggttgagattgatgggatgaagttggtacagaccagagccattctcaactacattgccagcaaatacaacctctacgggaaagacataaaggagagagccctaattgatatgtatacagaaggtatggcagatttgaatgaaatgatccttcttctgcccttatgtcgacctgaggaaaaagatgccaagattgccttgatcaaagagaaaacaaaaagtcgctatttccctgccttcgaaaaagtgttacagagccatggacaagactaccttgttggcaacaagctgagccgggctgacattagcctggtggaacttctctactatgtggaagagcttgactccagccttatctccaacttccctctgctgaaggccctgaaaaccagaatcagcaacctgcccatggtgaagaaatttctacagcctggcagcccaaggaagtctctcatggatgagaaatctttagaagaagcaaggaagattttcagattttaa

SEQ ID NO: 137787 - DNA, 793 bp, Homo sapiens
  Payload ID: 6984
  Gene Symbol: GSTA4
  Gene Name: glutathione S-transferase alpha 4
  Uniprot ID: O15217
  ENST ID: ENST00000370959
  CDS Start-End: 119-787
ctcactctcgcattcttccctcactcccccagttcagtccttctcttgtcttttcttcctcttgtcctttgtcctcctgctccatccagtctgggcagagaaagcctgaaaagctatcatggcagcaaggcccaagctccactatcccaacggaagaggccggatggagtccgtgagatgggttttagctgccgccggagtcgagtttgatgaagaatttctggaaacaaaagaacagttgtacaagttgcaggatggtaaccacctgctgttccaacaagtgcccatggttgaaattgacgggatgaagttggtacagacccgaagcattctccactacatagcagacaagcacaatctctttggcaagaacctcaaggagagaaccctgattgacatgtacgtggaggggacactggatctgctggaactgcttatcatgcatcctttcttaaaaccagatgatcagcaaaaggaagtggttaacatggcccagaaggctataattagatactttcctgtgtttgaaaagattttaaggggtcacggacaaagctttcttgttggtaatcagctgagccttgcagatgtgattttactccaaaccattttagctctagaagagaaaattcctaatatcctgtctgcatttcctttcctccaggaatacacagtgaaactaagtaatatccctacaattaagagattccttgaacctggcagcaagaagaagcctccccctgatgaaatttatgtgagaaccgtctacaacatctttaggccataaaacaac

SEQ ID NO: 137788 - DNA, 859 bp, Homo sapiens
  Payload ID: 6984
  Gene Symbol: GSTA4
  Gene Name: glutathione S-transferase alpha 4
  Uniprot ID: O15217
  ENST ID: ENST00000370960
  CDS Start-End: 255-644
agtgagggaaaatgcagcaacaaaaataaagaacagtttcccgtgccaaaatcctgaatattcatttcgcccctgagcactgggttgaagacgcgaaattgggactgttggtctgcgacgagctgctgcatttgtatttcagaaagcctgaaaagctatcatggcagcaaggcccaagctccactatcccaacggaagaggccggatggagtccgtgagatgggttttagctgccgccggagtcgaggattgacatgtacgtggaggggacactggatctgctggaactgcttatcatgcatcctttcttaaaaccagatgatcagcaaaaggaagtggttaacatggcccagaaggctataattagatactttcctgtgtttgaaaagattttaaggggtcacggacaaagctttcttgttggtaatcagctgagccttgcagatgtgattttactccaaaccattttagctctagaagagaaaattcctaatatcctgtctgcatttcctttcctccaggaatacacagtgaaactaagtaatatccctacaattaagagattccttgaacctggcagcaagaagaagcctccccctgatgaaatttatgtgagaaccgtctacaacatctttaggccataaaacaacacatccatgtgtgagtgacagtgtgttcctagagatggtattgtctacagtcatgtcttaatggatcccagctctgtcatggtgctatctatgtattaagttgggtcctaagttgggtcttttgtgtcaacgagatcatctcttctagaaatatcaaccttttttgtccagtaaataattgttaggggatctttattggaaaacttttt

SEQ ID NO: 137789 - DNA, 1334 bp, Homo sapiens
  Payload ID: 6984
  Gene Symbol: GSTA4
  Gene Name: glutathione S-transferase alpha 4
  Uniprot ID: O15217
  ENST ID: ENST00000370963
  CDS Start-End: 149-817
agtctccattggtgaggtcgtcccggagcctcgcccagctcccgcgcgctagagccgcctgctggtctcacccagccgggaccgctgacctggcgctttgtgcggctccaggcctccgagtggactccagaaagcctgaaaagctatcatggcagcaaggcccaagctccactatcccaacggaagaggccggatggagtccgtgagatgggttttagctgccgccggagtcgagtttgatgaagaatttctggaaacaaaagaacagttgtacaagttgcaggatggtaaccacctgctgttccaacaagtgcccatggttgaaattgacgggatgaagttggtacagacccgaagcattctccactacatagcagacaagcacaatctctttggcaagaacctcaaggagagaaccctgattgacatgtacgtggaggggacactggatctgctggaactgcttatcatgcatcctttcttaaaaccagatgatcagcaaaaggaagtggttaacatggcccagaaggctataattagatactttcctgtgtttgaaaagattttaaggggtcacggacaaagctttcttgttggtaatcagctgagccttgcagatgtgattttactccaaaccattttagctctagaagagaaaattcctaatatcctgtctgcatttcctttcctccaggaatacacagtgaaactaagtaatatccctacaattaagagattccttgaacctggcagcaagaagaagcctccccctgatgaaatttatgtgagaaccgtctacaacatctttaggccataaaacaacacatccatgtgtgagtgacagtgtgttcctagagatggtattgtctacagtcatgtcttaatggatcccagctctgtcatggtgctatctatgtattaagttgggtcctaagttgggtcttttgtgtcaacgagatcatctcttctagaaatatcaaccttttttgtccagtaaataattgttaggggatctttattggaaaacttttttggagaggctggtatttaagttagatctgattgggctactcatgtcctgtagccagttcatcctcataataagaatgggcaggatctcttgttctctcctgagtgtctttctactctcctgagcgtctttctgctctccttatcctgttctcttatccttatcccctccagtctctgcctaatttttagtgtttaataacaaccgaatgtctagtaaatgactctcctctgagctgtaataaataaaatggtagtaatgaatgcaatcagtattagccaaaataaagaatttatgagtcatt

SEQ ID NO: 137790 - DNA, 379 bp, Homo sapiens
  Payload ID: 6984
  Gene Symbol: GSTA4
  Gene Name: glutathione S-transferase alpha 4
  ENST ID: ENST00000457564
  CDS Start-End: 113-379
aaagcctgaaaagctatcatggcagcaaggcccaagctccactatcccaacggaagaggccggatggagtccgtgagatgggttttagctgccgccggagtcgaggattgacatgtacgtggaggggacactggatctgctggaactgcttatcatgcatcctttcttaaaaccagatgatcagcaaaaggaagtggttaacatggcccagaaggctataattagatactttcctgtgtttgaaaagattttaaggggtcacggacaaagctttcttgttggtaatcagctgagccttgcagatgtgattttactccaaaccattttagctctagaagagaaaattcctaatatcctgtctgcatttcctttcctccag

SEQ ID NO: 137791 - DNA, 845 bp, Homo sapiens
  Payload ID: 6985
  Gene Symbol: GSTA5
  Gene Name: glutathione S-transferase alpha 5
  Uniprot ID: Q7RTV2
  ENST ID: ENST00000284562
  CDS Start-End: 71-739
agttgcccagccacgacagtgacagagtttaacaaactaagcttagagaaacctccaggagactgctatcatggcagagaagcccaagctccactactccaatgcacggggcagtatggagtccattcggtggctcctggctgcagctggagtagagttggaagagaaatttctagaatctgcagaagatttggacaagttaagaaatgatgggagtttgctgttccagcaagtaccaatggttgagattgacgggatgaagctggtgcagaccagagccattcttaactacattgccagcaaatacaacctttatgggaaagacatgaaggagagagccctgattgatatgtacacagaaggtatagtagatttgactgaaatgatccttcttctgctcatatgtcaaccagaggaaagagatgccaagactgccttggtcaaagagaaaataaaaaatcgctacttccctgcctttgaaaaagtcttaaagagccacagacaagactaccttgttggcaacaagctgagctgggctgacattcacctggtggaacttttctactacgtggaagagcttgactcgagtcttatctccagcttccctctgctgaaggccctgaaaaccagaatcagcaacctgcccacggtgaagaagtttctgcagcctggcagccagagaaagcctcccatggatgagaaatctttagaagaagcaaggaagattttcaggttttaataaagcagctatggaggccaagaacatgccagaccaatattctacagtttgcaacaatgaagtgctttacctaagtgtggattgtgcctcttgtaaagctaataaa

SEQ ID NO: 137792 - DNA, 892 bp, Homo sapiens
  Payload ID: 6985
  Gene Symbol: GSTA5
  Gene Name: glutathione S-transferase alpha 5
  Uniprot ID: Q7RTV2
  ENST ID: ENST00000370989
  CDS Start-End: 31-699
gcttagagaaacctccaggagactgctatcatggcagagaagcccaagctccactactccaatgcacggggcagtatggagtccattcggtggctcctggctgcagctggagtagagttggaagagaaatttctagaatctgcagaagatttggacaagttaagaaatgatgggagtttgctgttccagcaagtaccaatggttgagattgacgggatgaagctggtgcagaccagagccattcttaactacattgccagcaaatacaacctttatgggaaagacatgaaggagagagccctgattgatatgtacacagaaggtatagtagatttgactgaaatgatccttcttctgctcatatgtcaaccagaggaaagagatgccaagactgccttggtcaaagagaaaataaaaaatcgctacttccctgcctttgaaaaagtcttaaagagccacagacaagactaccttgttggcaacaagctgagctgggctgacattcacctggtggaacttttctactacgtggaagagcttgactcgagtcttatctccagcttccctctgctgaaggccctgaaaaccagaatcagcaacctgcccacggtgaagaagtttctgcagcctggcagccagagaaagcctcccatggatgagaaatctttagaagaagcaaggaagattttcaggttttaataaagcagctatggaggccaagaacatgccagaccaatattctacagtttgcaacaatgaagtgctttacctaagtgtggattgtgcctcttgtaaagctaataaactctttccaattacatgctaattaaataataaataactcttatctgtcaacttagctaaaattgatttgttttcattagtatctgat

SEQ ID NO: 137793 - DNA, 669 bp, Homo sapiens
  Payload ID: 6985
  Gene Symbol: GSTA5
  Gene Name: glutathione S-transferase alpha 5
  ENST ID: ENST00000619736
  CDS Start-End: 1-669
atggcagagaagcccaagctccactactccaatgcacagggcagaatggagtccacctggtggctcctggctgcagccggagtagagttggaagagaaatttctagaatctgcagaagatttggacaagttaagaaatgatgggagtttgctgttccagcaagtaccaatggttgagattgacgggatgaagctggtgcagaccagagccattcttaactacattgccagcaaatacaacctttatgggaaagacatgaaggagagagccctgattgatatgtacacagaaggtatagtagatttgactgaaatgatccttcttctgctcatatgtcaaccagaggaaagagatgccaagactgccttggtcaaagagaaaataaaaaatcgctacttccctgcctttgaaaaagtcttaaagagccacagacaagactaccttgttggcaacaagctgagctgggctgacattcacctggtggaacttttctactacgtggaagagcttgactcgagtcttatctccagcttccctctgctgaaggccctgaaaaccagaatcagcaacctgcccacggtgaagaagtttctgcagcctggcagccagagaaagcctcccatggatgagaaatctttagaagaagcaaggaagattttcaggttttaa

SEQ ID NO: 137794 - DNA, 1044 bp, Homo sapiens
  Payload ID: 6986
  Gene Symbol: GSTK1
  Gene Name: glutathione S-transferase kappa 1
  Uniprot ID: Q9Y2Q3
  ENST ID: ENST00000358406
  CDS Start-End: 72-752
aagctgggcagcctctgccgggttccgggaaaaggagctcctgctgccactgctcttccggagcctgcagcatggggcccctgccgcgcaccgtggagctcttctatgacgtgctgtccccctactcctggctgggcttcgagatcctgtgccggtatcagaatatctggaacatcaacctgcagttgcggcccagcctcataacagggatcatgaaagacagtggaaacaagcctccaggtctgcttccccgcaaaggactatacatggcaaatgacttaaagctcctgagacaccatctccagattcccatccacttccccaaggatttcttgtctgtgatgcttgaaaaaggaagtttgtctgccatgcgtttcctcaccgccgtgaacttggagcatccagagatgctggagaaagcgtcccgggagctgtggatgcgcgtctggtcaaggaatgaagacatcaccgagccgcagagcatcctggcggctgcagagaaggctggtatgtctgcagaacaagcccagggacttctggaaaagatcgcaacgccaaaggtgaagaaccagctcaaggagaccactgaggcagcctgcagatacggagcctttgggctgcccatcaccgtggcccatgtggatggccaaacccacatgttatttggctctgaccggatggagctgctggcgcacctgctgggagagaagtggatgggccctatacctccagccgtgaatgccagactttaagattgcccggaggaagcaaactcttcgtataaaaaaagcaggccatctgcttaacccttggctccaccataaggcactgggactcggatttctctatctgatagaggtattttctgtggccctgggagctgtctgtctttcccctacccccaaggatgccaggaagacgtccaccattagccatgtggcaacctttacttctatgcctcacaagtgcctttcagagagccccaattctgctttcccacaaaataaacctaatgccatcaggcaaaacatttctgtgtctgta

SEQ ID NO: 137795 - DNA, 888 bp, Homo sapiens
  Payload ID: 6986
  Gene Symbol: GSTK1
  Gene Name: glutathione S-transferase kappa 1
  Uniprot ID: Q9Y2Q3
  ENST ID: ENST00000409500
  CDS Start-End: 86-730
ccaggcaggcccagaagctgggcagcctctgccgggttccgggaaaaggagctcctgctgccactgctcttccggagcctgcagcatggggcccctgccgcgcaccgtggagctcttctatgacgtgctgtccccctactcctggctgggcttcgagatcctgtgccggtatcagaatatctggaacatcaacctgcagttgcggcccagcctcataacagggatcatgaaagacagtggaaacaagcctccaggtctgcttccccgcaaaggactatacatggcaaatgacttaaagctcctgagacaccatctccagattcccatccacttccccaaggatttcttgtctgtgatgcttgaaaaaggaagtttgtctgccatgcgtttcctcaccgccgtgaacttggagcatccagagatgctggagaaagcgtcccgggagctgtggatgcgcgtctggtcaagggctgcagagaaggctggtatgtctgcagaacaagcccagggacttctggaaaagatcgcaacgccaaaggtgaagaaccagctcaaggagaccactgaggcagcctgcagatacggagcctttgggctgcccatcaccgtggcccatgtggatggccaaacccacatgttatttggctctgaccggatggagctgctggcgcacctgctgggagagaagtggatgggccctatacctccagccgtgaatgccagactttaagattgcccggaggaagcaaactcttcgtataaaaaaagcaggccatctgcttaacccttggctccaccataaggcactgggactcggatttctctatctgatagaggtattttctgtggccctgggagctgtctgtctttcccctacccccaaggatg

SEQ ID NO: 137796 - DNA, 2219 bp, Homo sapiens
  Payload ID: 6986
  Gene Symbol: GSTK1
  Gene Name: glutathione S-transferase kappa 1
  ENST ID: ENST00000442394
  CDS Start-End: 64-636
cagcctctgccgggttccgggaaaaggagctcctgctgccactgctcttccggagcctgcagcatggggcccctgccgcgcaccgtggagctcttctatgacgtgctgtccccctactcctggctgggcttcgagatcctgtgccggtatcagaatatctggaacatcaacctgcagttgcggcccagcctcataacagggatcatgaaagacagtggaaacaagcctccaggtctgcttccccgcaaaggactatacatggcaaatgacttaaagctcctgagacaccatctccagattcccatccacttccccaaggatttcttgtctgtgatgcttgaaaaaggaagtttgtctgccatgcgtttcctcaccgccgtgaacttggagcatccagagatgctggagaaagcgtcccgggagctgtggatgcgcgtctggtcaaggaatgaagacatcaccgagccgcagagcatcctggcggctgcagagaaggctggtatgtctgcagaacaagcccagggacttctggaaaagatcgcaacgccaaaggtgaagaaccagctcaaggagaccactgaggcagcctgcagatacggagagagaagtggatgggccctatacctccagccgtgaatgccagactttaagattgcccggaggaagcaaactcttcgtataaaaaaagcaggccatctgcttaacccttggctccaccataaggcactgggactcggatttctctatctgatagagaaactcccctggtctctctatcagcaacagaaaaccaagccagatggactttgcaactaatcaagtttgggatttactgtcttctgaccaaccacagtgactgagatggggctgggaccagaagcccagtgggagtgaacagccgagggaaccagagtctggctgagcttgtggccagatatttaaactgggtccagccacacctgcaaaaccagggcaaggcagtaccgggaaactggctggagttgctgcggtttggggaagttgcacaccctttcatagatacctcccttaaccctcagtgcagattctgagaaaactccaaggcttctctgcctaacctagtataacccctgttccctactacatacatataacttttccattcccccagtaattgacccaaagtccctgcctctagctgtgcccattgtgcaatgatcagaatcccttgtttcaatagtattttgacttctttaagaatactctgtatttggaagctgaaacctcacttggatccattgttgggaaccaagtacggagccttacatagcccggaggagtttcaggagcaatgccactttcccttccatccctccctctgggtctggctcttcccatagtccattttccccttttatctcccattaatttctgtcttcctctctcaccttttccatgtctctagcatcctccaggatttaaaatcatctttacccaacttatctgtgaagtaatggcaaaagaacatctccaaattaagtactccttttcttcaaaggagtttcatgggatgtacagctagtataaaataaaaatatgggaagatgtccaatcttaaaaaccataagggcaaattaagacaaaactaagctgcccagagcagggtgagtggaaccagttttatgaataaagatgcttgtctcagcactatatgtggatatcaaaaattgtgaacaacttgaacacctatcaggaggagaatactttaatcaattatggcacattcaggagataatgttttacagtcatcaaaaattgtatatgagggccagcacggtggctcacacctgtaatcccagcactttgggaggccaaggcaggcggatcacctgaggtcaggagttcgagaccagactggctaacatggtaaaaccctgtttctactaaaaatacaaaaaagtaaccgggtgtggtggcacgtgcctgtaatcccagctactcgggaggctgaggcaggagaatcgcttgaacccgggaggcagaggttgtggtgagctgagattgcactattgcactccagcttgggcaacaagagcgaaactctgtctcaaaaaaaaattgtatttctgaagaattgttaagaacattggaaattcttgagatataatattgattggaaaaagatgaaactatatggtatgatctcaatatgtcctgatgaataaaaacataatacagag

SEQ ID NO: 137797 - DNA, 556 bp, Homo sapiens
  Payload ID: 6986
  Gene Symbol: GSTK1
  Gene Name: glutathione S-transferase kappa 1
  ENST ID: ENST00000436038
  CDS Start-End: 203-556
taggtttgttcatgtttctcacagaaaggacgtgaaaatgaaaatacttgagtggcctgagatttgcctagggaatcatcttagaagcaaagaaggaaaagaacatcacggaaattcccgcaggcataattccatggacagaactagacaacgtattctctagcagttttgaaaccaagatcagctcgtcccatgctcaggaatgaccaagggcagtttggaggttaaaggcacgatggagttgatcctgtgccggtatcagaatatctggaacatcaacctgcagttgcggcccagcctcataacagggatcatgaaagacagtggaaacaagcctccaggtctgcttccccgcaaaggactatacatggcaaatgacttaaagctcctgagacaccatctccagattcccatccacttccccaaggatttcttgtctgtgatgcttgaaaaaggaagtttgtctgccatgcgtttcctcaccgccgtgaacttggagcatccagagatgctggagaaagcgtcccgggagctgtggatgcgcgtctggtcaagg

SEQ ID NO: 137798 - DNA, 850 bp, Homo sapiens
  Payload ID: 6986
  Gene Symbol: GSTK1
  Gene Name: glutathione S-transferase kappa 1
  Uniprot ID: Q9Y2Q3
  ENST ID: ENST00000443571
  CDS Start-End: 74-625
agaagctgggcagcctctgccgggttccgggaaaaggagctcctgctgccactgctcttccggagcctgcagcatggggcccctgccgcgcaccgtggagctcttctatgacgtgctgtccccctactcctggctgggcttcgagatcctgtgccggtatcagaatatctggaacatcaacctgcagttgcggcccagcctcataacagggatcatgaaagacagtggaagtttgtctgccatgcgtttcctcaccgccgtgaacttggagcatccagagatgctggagaaagcgtcccgggagctgtggatgcgcgtctggtcaaggaatgaagacatcaccgagccgcagagcatcctggcggctgcagagaaggctggtatgtctgcagaacaagcccagggacttctggaaaagatcgcaacgccaaaggtgaagaaccagctcaaggagaccactgaggcagcctgcagatacggagcctttgggctgcccatcaccgtggcccatgtggatggccaaacccacatgttatttggctctgaccggatggagctgctggcgcacctgctgggagagaagtggatgggccctatacctccagccgtgaatgccagactttaagattgcccggaggaagcaaactcttcgtataaaaaaagcaggccatctgcttaacccttggctccaccataaggcactgggactcggatttctctatctgatagaggtattttctgtggccctgggagctgtctgtctttcccctacccccaaggatgccaggaagacgtccaccattagccatgtggcaacctttacttctatgcctcacaagtgcctttcaga

SEQ ID NO: 137799 - DNA, 1185 bp, Homo sapiens
  Payload ID: 6986
  Gene Symbol: GSTK1
  Gene Name: glutathione S-transferase kappa 1
  Uniprot ID: Q9Y2Q3
  ENST ID: ENST00000479303
  CDS Start-End: 59-907
tctgccgggttccgggaaaaggagctcctgctgccactgctcttccggagcctgcagcatggggcccctgccgcgcaccgtggagctcttctatgacgtgctgtccccctactcctggctgggcttcgagatcctgtgccggtatcagaatatctggaacatcaacctgcagttgcggcccagcctcataacagggatcatgaaagacagtggaaacaagcctccaggtctgcttccccgcaaaggactatacatggcaaatgacttaaagctcctgagacaccatctccagattcccatccacttccccaaggatttcttgtctgtgatgcttgaaaaaggaagtttgtctgccatgcgtttcctcaccgccgtgaacttggagcatccagagatgctggagaaagcgtcccgggagctgtggatgcgcgtctggtcaagggtgagtgtggggctctgggaatcctctgggaggaccttggatgactttctgaccttccccaggcacgttttcagggtcatgatcctgcccccgcccgggggatctactgtcctcccagtcacacccctctccccgcaccgccttcctgctgtcttctcttcttcccagaatgaagacatcaccgagccgcagagcatcctggcggctgcagagaaggctggtatgtctgcagaacaagcccagggacttctggaaaagatcgcaacgccaaaggtgaagaaccagctcaaggagaccactgaggcagcctgcagatacggagcctttgggctgcccatcaccgtggcccatgtggatggccaaacccacatgttatttggctctgaccggatggagctgctggcgcacctgctgggagagaagtggatgggccctatacctccagccgtgaatgccagactttaagattgcccggaggaagcaaactcttcgtataaaaaaagcaggccatctgcttaacccttggctccaccataaggcactgggactcggatttctctatctgatagaggtattttctgtggccctgggagctgtctgtctttcccctacccccaaggatgccaggaagacgtccaccattagccatgtggcaacctttacttctatgcctcacaagtgcctttcagagagccccaattctgctttcccacaaaataaacctaatgccatcaggcaaaaca

SEQ ID NO: 137800 - DNA, 1028 bp, Homo sapiens
  Payload ID: 6987
  Gene Symbol: GSTM1
  Gene Name: glutathione S-transferase mu 1
  Uniprot ID: P09488
  ENST ID: ENST00000349334
  CDS Start-End: 35-580
aggcctgtctgcggaatccgcaccaaccagcaccatgcccatgatactggggtactgggacatccgcgggctggcccacgccatccgcctgctcctggaatacacagactcaagctatgaggaaaagaagtacacgatgggggacgctcctgattatgacagaagccagtggctgaatgaaaaattcaagctgggcctggactttcccaatctgccctacttgattgatggggctcacaagatcacccagagcaacgccatcttgtgctacattgcccgcaagcacaacctgtgtggggagacagaagaggagaagattcgtgtggacattttggagaaccagaccatggacaaccatatgcagctgggcatgatctgctacaatccagaatttgagaaactgaagccaaagtacttggaggaactccctgaaaagctaaagctctactcagagtttctggggaagcggccatggtttgcaggaaacaagggcttggagaagatctctgcctacatgaagtccagccgcttcctcccaagacctgtgttctcaaagatggctgtctggggcaacaagtagggccttgaaggccaggaggtgggagtgaggagcccatactcagcctgctgcccaggctgtgcagcgcagctggactctgcatcccagcacctgcctcctcgttcctttctcctgtttattcccatctttactcccaagacttcattgtccctcttcactccccctaaacccctgtcccatgcaggccctttgaagcctcagctacccactatccttcgtgaacatcccctcccatcattacccttccctgcactaaagccagcctgaccttccttcctgttagtggttgtgtctgctttaaagggcctgcctggcccctcgcctgtggagctcagccccgagctgtccccgtgttgcatgaaggagcagcattgactggtttacaggccctgctcctgcagcatggtccctgccttaggcctacctgatggaagtaaagcctcaacca

SEQ ID NO: 137801 - DNA, 1161 bp, Homo sapiens
  Payload ID: 6987
  Gene Symbol: GSTM1
  Gene Name: glutathione S-transferase mu 1
  Uniprot ID: P09488
  ENST ID: ENST00000309851
  CDS Start-End: 55-711
ctctgagccctgctcggtttaggcctgtctgcggaatccgcaccaaccagcaccatgcccatgatactggggtactgggacatccgcgggctggcccacgccatccgcctgctcctggaatacacagactcaagctatgaggaaaagaagtacacgatgggggacgctcctgattatgacagaagccagtggctgaatgaaaaattcaagctgggcctggactttcccaatctgccctacttgattgatggggctcacaagatcacccagagcaacgccatcttgtgctacattgcccgcaagcacaacctgtgtggggagacagaagaggagaagattcgtgtggacattttggagaaccagaccatggacaaccatatgcagctgggcatgatctgctacaatccagaatttgagaaactgaagccaaagtacttggaggaactccctgaaaagctaaagctctactcagagtttctggggaagcggccatggtttgcaggaaacaagatcacttttgtagattttctcgtctatgatgtccttgacctccaccgtatatttgagcccaagtgcttggacgccttcccaaatctgaaggacttcatctcccgctttgagggcttggagaagatctctgcctacatgaagtccagccgcttcctcccaagacctgtgttctcaaagatggctgtctggggcaacaagtagggccttgaaggccaggaggtgggagtgaggagcccatactcagcctgctgcccaggctgtgcagcgcagctggactctgcatcccagcacctgcctcctcgttcctttctcctgtttattcccatctttactcccaagacttcattgtccctcttcactccccctaaacccctgtcccatgcaggccctttgaagcctcagctacccactatccttcgtgaacatcccctcccatcattacccttccctgcactaaagccagcctgaccttccttcctgttagtggttgtgtctgctttaaagggcctgcctggcccctcgcctgtggagctcagccccgagctgtccccgtgttgcatgaaggagcagcattgactggtttacaggccctgctcctgcagcatggtccctgccttaggcctacctgatggaagtaaagcctcaaccaca

SEQ ID NO: 137802 - DNA, 790 bp, Homo sapiens
  Payload ID: 6987
  Gene Symbol: GSTM1
  Gene Name: glutathione S-transferase mu 1
  ENST ID: ENST00000369819
  CDS Start-End: 17-466
cgcaccaaccagcaccatgcccatgatactggggtactgggacatccgcgggctggcccacgccatccgcctgctcctggaatacacagactcaagctatgaggaaaagaagtacacgatgggggacgctcctgattatgacagaagccagtggctgaatgaaaaattcaagctgggcctggactttcccaatctgccctacttgattgatggggctcacaagatcacccagagcaacgccatcttgtgctacattgcccgcaagcacaacctgtgtggggagacagaagaggagaagattcgtgtggacattttggagaaccagaccatggacaaccatatgcagctgggcatgatctgctacaatccagaatttggcttggagaagatctctgcctacatgaagtccagccgcttcctcccaagacctgtgttctcaaagatggctgtctggggcaacaagtagggccttgaaggccaggaggtgggagtgaggagcccatactcagcctgctgcccaggctgtgcagcgcagctggactctgcatcccagcacctgcctcctcgttcctttctcctgtttattcccatctttactcccaagacttcattgtccctcttcactccccctaaacccctgtcccatgcaggccctttgaagcctcagctacccactatccttcgtgaacatcccctcccatcattacccttccctgcactaaagccagcctgaccttccttcctgttagtggttgtgtctgctttaaagggcctgcctggcccctcgcct

SEQ ID NO: 137803 - DNA, 852 bp, Homo sapiens
  Payload ID: 6987
  Gene Symbol: GSTM1
  Gene Name: glutathione S-transferase mu 1
  ENST ID: ENST00000369823
  CDS Start-End: 46-759
ctgctcggtttaggcctgtctgcggaatccgcaccaaccagcaccatgcccatgatactggggtactgggacatccgcgggctggcccacgccatccgcctgctcctggaatacacagactcaagctatgaggaaaagaagtacacgatgggggacgctcctgattatgacagaagccagtggctgaatgaaaaattcaagctgggcctggactttcccaatgggatgctggggagcctggtggcccaactgagcttcgccggtttcccatccatccagctgccctacttgattgatggggctcacaagatcacccagagcaacgccatcttgtgctacattgcccgcaagcacaacctgtgtggggagacagaagaggagaagattcgtgtggacattttggagaaccagaccatggacaaccatatgcagctgggcatgatctgctacaatccagaatttgagaaactgaagccaaagtacttggaggaactccctgaaaagctaaagctctactcagagtttctggggaagcggccatggtttgcaggaaacaagatcacttttgtagattttctcgtctatgatgtccttgacctccaccgtatatttgagcccaagtgcttggacgccttcccaaatctgaaggacttcatctcccgctttgagggcttggagaagatctctgcctacatgaagtccagccgcttcctcccaagacctgtgttctcaaagatggctgtctggggcaacaagtagggccttgaaggccaggaggtgggagtgaggagcccatactcagcctgctgcccaggctgtgcagcgcagctggactctgcatcccagcacctg

SEQ ID NO: 137804 - DNA, 512 bp, Homo sapiens
  Payload ID: 6987
  Gene Symbol: GSTM1
  Gene Name: glutathione S-transferase mu 1
  ENST ID: ENST00000483399
  CDS Start-End: 30-287
tgtctgcggaatccgcaccaaccagcaccatgcccatgatactggggtactgggacatccgcgggctggcccacgccatccgcctgctcctggaatacacagactcaagctatgaggaaaagaagtacacgatgggggacgctcctgattatgacagaagccagtggctgaatgaaaaattcaagctgggcctggactttcccaatgtggggagacagaagaggagaagattcgtgtggacattttggagaaccagaccatggacaaccatatgcagctgggcatgatctgctacaatccagaatttgaaaagtgtaatgttggttggagctcgagaaggaatctggatactgtgtgccggaccagccaaagaatcctgtgtcaaaaccgagagaacgaataagccttcatcaccatggcacatttatataaaaagaaagggagagatgttgcgggaagtcagggaccccgaatggagggactgactggagccgcggcagaggaacataaat

SEQ ID NO: 137805 - DNA, 491 bp, Homo sapiens
  Payload ID: 6987
  Gene Symbol: GSTM1
  Gene Name: glutathione S-transferase mu 1
  ENST ID: ENST00000476065
  CDS Start-End: 185-491
tgtctgcggaatccgcaccaaccagcaccatgcccatgatactggggtactgggacatccgcgggacaaagtcagggaccctccatctctgacgcgacctgcgggccatctctcccagctggcccacgccatccgcctgctcctggaatacacagactcaagctatgaggaaaagaagtacacgatgggggacgctcctgattatgacagaagccagtggctgaatgaaaaattcaagctgggcctggactttcccaatctgccctacttgattgatggggctcacaagatcacccagagcaacgccatcttgtgctacattgcccgcaagcacaacctgtgtggggagacagaagaggagaagattcgtgtggacattttggagaaccagaccatggacaaccatatgcagctgggcatgatctgctacaatccagaatttgagaaactgaagccaaagtacttggaggaactccctgaaaagctaaagc

SEQ ID NO: 137806 - DNA, 1157 bp, Homo sapiens
  Payload ID: 6988
  Gene Symbol: GSTM2
  Gene Name:: glutathione S-transferase mu 2 (muscle)
  Uniprot ID: P28161
  ENST ID: ENST00000241337
  CDS Start-End: 51-707
gagccccgccccgctgaggcctgtctgcagaatccacagcaaccagcaccatgcccatgacactggggtactggaacatccgcgggctggcccattccatccgcctgctcctggaatacacagactcaagctacgaggaaaagaagtacacgatgggggacgctcctgattatgacagaagccagtggctgaatgaaaaattcaagctgggcctggactttcccaatctgccctacttgattgatgggactcacaagatcacccagagcaacgccatcctgcggtacattgcccgcaagcacaacctgtgcggggaatcagaaaaggagcagattcgcgaagacattttggagaaccagtttatggacagccgtatgcagctggccaaactctgctatgacccagattttgagaaactgaaaccagaatacctgcaggcactccctgaaatgctgaagctctactcacagtttctggggaagcagccatggtttcttggggacaagatcacctttgtggatttcatcgcttatgatgtccttgagagaaaccaagtatttgagcccagctgcctggatgccttcccaaacctgaaggacttcatctcccgatttgagggcttggagaagatctctgcctacatgaagtccagccgcttcctcccaagacctgtgttcacaaagatggctgtctggggcaacaagtagggccttgaaggccaggaggtgggagtgaggagcccatactcagcctgctgcccaggctgtgcagcgcagctggactctgcatcccagcacctgcctcctcgttcctttctcctgtttattcccatctttactcccaagacttcattgtccctcttcactccccctaaacccctgtcccatgcaggccctttgaagcctcagctacccactatccttcgtgaacatcccctcccatcattacccttccctgcactaaagccagcctgaccttccttcctgttagtggttgtgtctgctttaaagggcctgcctggcccctcgcctgtggagctcagccccgagctgtccccgtgttgcatgaaggagcagcattgactggtttacaggccctgctcctgcagcatggtccctgccttaggcctacctgatggaagtaaagcctcaaccaca

SEQ ID NO: 137807 - DNA, 1073 bp, Homo sapiens
  Payload ID: 6988
  Gene Symbol: GSTM2
  Gene Name: glutathione S-transferase mu 2 (muscle)
  ENST ID: ENST00000369827
  CDS Start-End: 81-626
tctaccctctctgggcctctcacaaacgctgagccccgccccgctgaggcctgtctgcagaatccacagcaaccagcaccatgcccatgacactggggtactggaacatccgcgggctggcccattccatccgcctgctcctggaatacacagactcaagctacgaggaaaagaagtacacgatgggggacgctcctgattatgacagaagccagtggctgaatgaaaaattcaagctgggcctggactttcccaatctgccctacttgattgatgggactcacaagatcacccagagcaacgccatcctgcggtacattgcccgcaagcacaacctgtgcggggaatcagaaaaggagcagattcgcgaagacattttggagaaccagtttatggacagccgtatgcagctggccaaactctgctatgacccagattttgagaaactgaaaccagaatacctgcaggcactccctgaaatgctgaagctctactcacagtttctggggaagcagccatggtttcttggggacaagggcttggagaagatctctgcctacatgaagtccagccgcttcctcccaagacctgtgttcacaaagatggctgtctggggcaacaagtagggccttgaaggccaggaggtgggagtgaggagcccatactcagcctgctgcccaggctgtgcagcgcagctggactctgcatcccagcacctgcctcctcgttcctttctcctgtttattcccatctttactcccaagacttcattgtccctcttcactccccctaaacccctgtcccatgcaggccctttgaagcctcagctacccactatccttcgtgaacatcccctcccatcattacccttccctgcactaaagccagcctgaccttccttcctgttagtggttgtgtctgctttaaagggcctgcctggcccctcgcctgtggagctcagccccgagctgtccccgtgttgcatgaaggagcagcattgactggtttacaggccctgctcctgcagcatggtccctgccttaggcctacctgatggaagtaaagcctcaacc

SEQ ID NO: 137808 - DNA, 914 bp, Homo sapiens
  Payload ID: 6988
  Gene Symbol: GSTM2
  Gene Name: glutathione S-transferase mu 2 (muscle)
  ENST ID: ENST00000369829
  CDS Start-End: 25-606
gcagaatccacagcaaccagcaccatgcccatgacactggggtactggaacatccgcgggctggcccattccatccgcctgctcctggaatacacagactcaagctacgaggaaaagaagtacacgatgggggacgctcctgattatgacagaagccagtggctgaatgaaaaattcaagctgggcctggactttcccaatctgccctacttgattgatgggactcacaagatcacccagagcaacgccatcctgcggtacattgcccgcaagcacaacctgtgcggggaatcagaaaaggagcagattcgcgaagacattttggagaaccagtttatggacagccgtatgcagctggccaaactctgctatgacccagattttgagaaactgaaaccagaatacctgcaggcactccctgaaatgctgaagctctactcacagtttctggggaagcagccatggtttcttggggacaagatcacctttgtggatttcatcgcttatgatgtccttgagagaaaccaagtatttgagcccagctgcctggatgccttcccaaacctgaaggacttcatctcccgatttgaggtgttccccctgtgagatgagtagcacgctgattttactcctgttcactgaccttctcctctgcatgaggcagggtgtgaggcacagtgggagatgcatagatgacagccccatcctggaaatgagtgcagtgagaggcctgcaggcagagcagcctgtgaagtgtgtgctgaacttgtttgagagcagcaaatcctacattactacagatttggggatttgaggcatttgtccaacaggcttctgagccttgaatctgtttcccttttccactccccatcaagagatctgcttgctcagctagttcccatcagctctggttc

SEQ ID NO: 137809 - DNA, 1730 bp, Homo sapiens
  Payload ID: 6988
  Gene Symbol: GSTM2
  Gene Name: glutathione S-transferase mu 2 (muscle)
  ENST ID: ENST00000369831
  CDS Start-End: 95-757
agcaaggcttcccctctaccctctctgggcctctcacaaacgctgagccccgccccgctgaggcctgtctgcagaatccacagcaaccagcaccatgcccatgacactggggtactggaacatccgcgggctggcccattccatccgcctgctcctggaatacacagactcaagctacgaggaaaagaagtacacgatgggggacgctcctgattatgacagaagccagtggctgaatgaaaaattcaagctgggcctggactttcccaatctgccctacttgattgatgggactcacaagatcacccagagcaacgccatcctgcggtacattgcccgcaagcacaacctgtgcggggaatcagaaaaggagcagattcgcgaagacattttggagaaccagtttatggacagccgtatgcagctggccaaactctgctatgacccagattttgagaaactgaaaccagaatacctgcaggcactccctgaaatgctgaagctctactcacagtttctggggaagcagccatggtttcttggggacaagatcacctttgtggatttcatcgcttatgatgtccttgagagaaaccaagtatttgagcccagctgcctggatgccttcccaaacctgaaggacttcatctcccgatttgaggaaaagtgtaatgttggttggagctcgagaaggaatctggatactgtgtgccggaccagccaaagaatcctgtgtcaaaaccgagagaacgaataagccttcatcaccatggcacatttatataaaaagaaagggagagatgttgcgggaagtcagggaccccgaatggagggactgactggagccgcggcagaggaacataaattgcaaatatttcattttaatatggacatttatcagttcccaaattattactttttacatttcttacgcctgtcttactttaatctcttaatcctgttatcttcataagctgaggatatatgtcacctcaggaccactgtgataattgtgttaactgtacaaattgattgtaaaacatgtgtgtttgcacaatatgaaatcagtgcaccttgaagaagaacagaataacagtgatttttaggcaacaagagaagacaaccataaggtctgactgcgtgcagggtcaggcaaaatagagccatatttttcttcttgcagggagcctataaatggacatggaagtagggaagatattgctaaattcttttcctagcaaggaatattactattaatactctgggaaaggaatgcattcctggggggaggtctataaacggccgctctgggaatgtctgtcctatgcagttgagacaaggactgaagtacaccctggtctcctgcagtaccctcaggcttactagggtggggaaaaacctggccctggcaaatctgtggtcagactggttctctgctcttgaaccctgtgttctgttgtttaagatgtttatcaagacaatacgtgcactgctgaacatagacccttatcaggagttctacttttgcccttgtcctgtttcctcagaagcatgtgatctctgttctgttttttgccccttaaagcatgtgatctttgtacctaccccccgttcgtacaccccctccccttttgcaatccttaataaaagcttgctggttttgaggctcgggccggcatcacggtcctactgatatgtgatgtcacccctggcggcccagctgtaaaatt

SEQ ID NO: 137810 - DNA, 982 bp, Homo sapiens
  Payload ID: 6988
  Gene Symbol: GSTM2
  Gene Name: glutathione S-transferase mu 2 (muscle)
  ENST ID: ENST00000414179
  CDS Start-End: 324-587
gtctgcagaatccacagcaaccagcaccatgcccatgacactggggtactggaacatccgcgggctggcccattccatccgcctgctcctggaatacacagactcaagctacgaggaaaagaactcctgattatgacagaagccagtggctgaatgaaaaattcaagctgggcctggactttcccaatctgccctacttgattgatgggactcacaagatcacccagagcaacgccatcctgcggtacattgcccgcaagcacaacctgtgcggggaatcagaaaaggagcagattcgcgaagacattttggagaaccagtttatggacagccgtatgcagctggccaaactctgctatgacccagattttgagaaactgaaaccagaatacctgcaggcactccctgaaatgctgaagctctactcacagtttctggggaagcagccatggtttcttggggacaagatcacctttgtggatttcatcgcttatgatgtccttgagagaaaccaagtatttgagcccagctgcctggatgccttcccaaacctgaaggacttcatctcccgatttgagcattcctgatgtttggattcaggctgcttccctcatccctgctgctcctgatccccgtccacagacccactttccccgctggtgtgatccttgtggccactatggcagctactttggagagccgctagtccagtccttcccgccttccgcagagctctactcctgcttctgaagaagccacctggggcctggccttcttcctggctcctcagagtccttgcaacagcaggcactacttctctctcctgcactcaacccctctcccactccactgcctctcagtgtgccaaaacacgaagatgtgtcctgattttcaaaatctctcccctgaagttcccacctgatatgtagttggagatgggcaaatacagcgtccttgaagcatcattttattcatagtgcct

SEQ ID NO: 137811 - DNA, 1478 bp, Homo sapiens
  Payload ID: 6988
  Gene Symbol: GSTM2
  Gene Name: glutathione S-transferase mu 2 (muscle)
  Uniprot ID: P28161
  ENST ID: ENST00000442650
  CDS Start-End: 95-670
agcaaggcttcccctctaccctctctgggcctctcacaaacgctgagccccgccccgctgaggcctgtctgcagaatccacagcaaccagcaccatgcccatgacactggggtactggaacatccgcgggctggcccattccatccgcctgctcctggaatacacagactcaagctacgaggaaaagaagtacacgatgggggacgctcctgattatgacagaagccagtggctgaatgaaaaattcaagctgggcctggactttcccaatctgccctacttgattgatgggactcacaagatcacccagagcaacgccatcctgcggtacattgcccgcaagcacaacctgtgcggggaatcagaaaaggagcagattcgcgaagacattttggagaaccagtttatggacagccgtatgcagctggccaaactctgctatgacccagattttgagaaactgaaaccagaatacctgcaggcactccctgaaatgctgaagctctactcacagtttctggggaagcagccatggtttcttggggacaagatcacctttgtggatttcatcgcttatgatgtccttgagagaaaccaagtatttgagcccagctgcctggatgccttcccaaacctgaaggacttcatctcccgatttgagcattcctgatgtttggattcaggctgcttccctcatccctgctgctcctgatccccgtccacagacccactttccccgctggtgtgatccttgtggccactatggcagctactttggagagccgctagtccagtccttcccgccttccgcagagctctactcctgcttctgaagaagccacctggggcctggccttcttcctggctcctcagagtccttgcaacagcaggcactacttctctctcctgcactcaacccctctcccactccactgcctctcagtgtgccaaaacacgaagatgtgtcctgattttcaaaatctctcccctgaagttcccacctgatatgtagttggagatgggcaaatacagcgtccttgaagcatcattttattcatagtgcctggaatgtagtaggatctcgacaattgttgtttcaataaaggaatgaccaaatatattaatactgtaaaaagtaaagtagaggttcctcttcaaagagacttttctccccatctaattaagaataagtcgtaacttctcttagaagcaaaatttattcaaagaccggtgctgatattctgaaatatctgctagctgtaataaagaaattaatgtactttatgttcttaactcccacaatttagcctaaatacttgccctggcatgcttatactgatccaaacaagcatgaggtcatagcctgttcctcttccttatttgaaggtgtttttaccttactcagcattccacaagtgagttcccccttcctttgttctcctctgcctctgcctcttttaaaaagttctaagttgcta

SEQ ID NO: 137812 - DNA, 476 bp, Homo sapiens
  Payload ID: 6988
  Gene Symbol: GSTM2
  Gene Name: glutathione S-transferase mu 2 (muscle)
  ENST ID: ENST00000467579
  CDS Start-End: 34-476
ggcctgtctgcagaatccacagcaaccagcaccatgcccatgacactggggtactggaacatccgcgggctggcccattccatccgcctgctcctggaatacacagactcaagctacgaggaaaagaagtacacgatgggggacgctcctgattatgacagaagccagtggctgaatgaaaaattcaagctgggcctggactttcccaatctgccctacttgattgatgggactcacaagatcacccagagcaacgccatcctgcggtacattgcccgcaagcacaacctgtgcggggaatcagaaaaggagcagattcgcgaagacattttggagaaccagtttatggacagccgtatgcagctggccaaactctgctatgacccagattttgcactccctgaaatgctgaagctctactcacagtttctggggaagcagccatggtttcttggggacaagatcacctttgtgga

SEQ ID NO: 137813 - DNA, 1449 bp, Homo sapiens
  Payload ID: 6988
  Gene Symbol: GSTM2
  Gene Name: glutathione S-transferase mu 2 (muscle)
  Uniprot ID: P28161
  ENST ID: ENST00000460717
  CDS Start-End: 66-641
cctctcacaaacgctgagccccgccccgctgaggcctgtctgcagaatccacagcaaccagcaccatgcccatgacactggggtactggaacatccgcgggctggcccattccatccgcctgctcctggaatacacagactcaagctacgaggaaaagaagtacacgatgggggacgctcctgattatgacagaagccagtggctgaatgaaaaattcaagctgggcctggactttcccaatctgccctacttgattgatgggactcacaagatcacccagagcaacgccatcctgcggtacattgcccgcaagcacaacctgtgcggggaatcagaaaaggagcagattcgcgaagacattttggagaaccagtttatggacagccgtatgcagctggccaaactctgctatgacccagattttgagaaactgaaaccagaatacctgcaggcactccctgaaatgctgaagctctactcacagtttctggggaagcagccatggtttcttggggacaagatcacctttgtggatttcatcgcttatgatgtccttgagagaaaccaagtatttgagcccagctgcctggatgccttcccaaacctgaaggacttcatctcccgatttgagcattcctgatgtttggattcaggctgcttccctcatccctgctgctcctgatccccgtccacagacccactttccccgctggtgtgatccttgtggccactatggcagctactttggagagccgctagtccagtccttcccgccttccgcagagctctactcctgcttctgaagaagccacctggggcctggccttcttcctggctcctcagagtccttgcaacagcaggcactacttctctctcctgcactcaacccctctcccactccactgcctctcagtgtgccaaaacacgaagatgtgtcctgattttcaaaatctctcccctgaagttcccacctgatatgtagttggagatgggcaaatacagcgtccttgaagcatcattttattcatagtgcctggaatgtagtaggatctcgacaattgttgtttcaataaaggaatgaccaaatatattaatactgtaaaaagtaaagtagaggttcctcttcaaagagacttttctccccatctaattaagaataagtcgtaacttctcttagaagcaaaatttattcaaagaccggtgctgatattctgaaatatctgctagctgtaataaagaaattaatgtactttatgttcttaactcccacaatttagcctaaatacttgccctggcatgcttatactgatccaaacaagcatgaggtcatagcctgttcctcttccttatttgaaggtgtttttacctttctcagcgttccacaagtgagttcccccttcctttgttctcctctgcctctgcctcttttaaaaagttctaagttgcta

SEQ ID NO: 137814 - DNA, 4046 bp, Homo sapiens
  Payload ID: 6989
  Gene Symbol: GSTM3
  Gene Name: glutathione S-transferase mu 3 (brain)
  Uniprot ID: P21266
  ENST ID: ENST00000256594
  CDS Start-End: 230-907
tgcagcactcctgcccgggtcccgcctcggggtcgccaggccctgaaccccaacgccggcattagtcgcgcctgcgcacggccctgtggagccgcggaggcaagggacggagaacggggcggaggcggagtcagggcgcccgcgcgtgggccccgcccccttatgtcgggtataaagcccctcccgctcacagtttccctagtcctcgaaggctcggaagcccgtcaccatgtcgtgcgagtcgtctatggttctcgggtactgggatattcgtgggctggcgcacgccatccgcctgctcctggagttcacggatacctcttatgaggagaaacggtacacgtgcggggaagctcctgactatgatcgaagccaatggctggatgtgaaattcaagctagacctggactttcctaatctgccctacctcctggatgggaagaacaagatcacccagagcaatgccatcttgcgctacatcgctcgcaagcacaacatgtgtggtgagactgaagaagaaaagattcgagtggacatcatagagaaccaagtaatggatttccgcacacaactgataaggctctgttacagctctgaccacgaaaaactgaagcctcagtacttggaagagctacctggacaactgaaacaattctccatgtttctggggaaattctcatggtttgccggggaaaagctcacctttgtggattttctcacctatgatatcttggatcagaaccgtatatttgaccccaagtgcctggatgagttcccaaacctgaaggctttcatgtgccgttttgaggctttggagaaaatcgctgcctacttacagtctgatcagttctgcaagatgcccatcaacaacaagatggcccagtggggcaacaagcctgtatgctgagcaggaggcagacttgcagagcttgttttgtttcatcctgtccgtaaggggtcagcgctcttgctttgctcttttcaatgaatagcacttatgttactggtgtccagctgagtttctcttgggtataaaggctaaaagggaaaaaggatatgtggagaatcatcaagatatgaattgaatcgctgcgatactggcatttccctactccccaactgagttcaagggctgtaggttcatgcccaagccctgagagtgggtactagaaaaaacgagattgcacagttggagagagcaggtgtgttaaatgggactggagtccctgtgaagactgggtgaggataacacaagtaaaactgtggtactgatggacttaaccggagttcggaaaccgtcctgtgtacacatgggagtttagtgtgataaaggcagtatttcagactggtgggctagccaatagagttgggacaattgcttactcattaaaaataatagagccccacttgacactattcactaaaattaatctggaatttaaggcccaacattaaacacaaagctgttgaaatattgatgaaaatgtaagaatttttgtgaccacggggtaggagaagtttctttaaagacgtaaaaagaaaaaaaccataggctgctctgcctgtggagtagccattctttattcttttactttttaaaataataacaatcacaaaggaaagatttgccaattgaataggatcaaattctacaacttttcctaaggcacccacaaataaatgacaagtgagacaaaaagcactagtataaagattatataaagacctataaatcattaagacaactgagtttttaaaaatggacaaaatccatgaacaatttataaaatagaaatatagccaaaaatgtctaaaagatgtttatgatgtaaggaattatcaattacaacagtgagaaaccatatttccttctatccgatgagtaaaaagtttctaaagtgttggcaaggcttaggaaagtgatatgcatttcctgctggtcaagttgtaaattagtatagctactttggaggacaattgtaaaatttaaatcatatcctatgacccagcaattccatgctataaaaactcatccatggccgggcttggtggctcacgcctgtaatcccagcactttgggaggctgaggtgggcagatcacgaggtcaagagatcgagaccatcctggccaacatgatgaaaccccgtttctactaaaaatacaaaaattagctgggcatggtggcatgtgcctatagtcccagctactcaggaggctgaggcaggagaattgcttgaacctgggaggcagaggttgcagtgagccgagatcacgccactgcactccagcctggctacagggcgagactctgtctcaaaaaaaaaaaaaaaaaaaaaaaaaaaacattcaaagagacatatactaagatgttcactgtggcattgtctgtaatgacaaataagtggaaaccgtgtaaatacctgtcaatactatggagtaccatgtggcaacggaagaatgagactgaactgtgtgaactaacatgcaaagatccccaaaacaggccaggtgtggttgctcacagctgtaataacaacaccttcagaggctgaggtgagaggatcagttgaggccaggagtttaagaccagcctgggcaacatagtgagacccctgtctcccaaaaattttttttaattagctgtgcgcaattgctcatgcatagtcccagctacccaggaggctgaggtgggaggatcacttgagcccaggaatttgaagctgcagtgagctgtgttcttgccactgcactccaatctgggtgactgagcaagaccctgtctcttaaaaaaataaaaaagatctccaagcatagagaagagtctggagggaaacaccaaactcataacagtcttactgcaggcaagtgggataaaggcccagactccatggtggaagttaaagggcatttccaagttaaggctaagacttgcttttctaactaagagaatgtgctcatgcattgcttgtgtagtagaaactagtttttagaaaagaaagcaaacttaagaaacactgactcctgtggagatgacttggcaccactctcctttcacagagcagagtctgaatagtcttcagagataggcctgtgggccagattgccatcccctatggaccagaagccaaggatctctctagtgatggtcagagggcccaaatggcagggatacccagtgatgtcaggaggaatagtacagacagaaggtgctaagcagacaattcaactgccatgttttgccaccccctgtgagcagggattaggtgttcaggccagtatcttgggcatgggggagcctttggccagaagaggtataaagctcagaagtttttcagtctgataactattgatataatttccatagtgtgagggagcggtatgctctacccttgtgtatttaaggcaggacagagaaattgaggatgcccctggggctagatcgatgatatgaccagaaatcaaaaagggaatgcattatttattgctgtgtaacactgttaagagaggaggtagttaagggatggataggcacatagagagggaaggtctcaggagaagggatagaaaggaactatgttcacaagaacaacggcaagacagtgcctatactgcctctacagttaataggaaaaacggaagaagttacccttaagctaggatgttgctcagaagtgaccatcccaactttggtgcgggcacaataaatcagcctaaatgtccctaatttaacccagctcattataatgtcattaaacatgacattagcattgtggttttagcacccccatgggttttgcttaggcactcatgggtaataaccaagatggagtccctttggcaaaacttaggcatgcacagctgtagtaccccaagaagaaaatgttacttctctcatctgggcaaaacccacagaagacttcccagcttctgccacataaaagacacagaacacagacgccttactggcaacctgctttcaagacccctgtctttgctgagagctttcctttttcccaataaattctactctgccctactcactctc

SEQ ID NO: 137815 - DNA, 1565 bp, Homo sapiens
  Payload ID: 6989
  Gene Symbol: GSTM3
  Gene Name: glutathione S-transferase mu 3 (brain)
  Uniprot ID: P21266
  ENST ID: ENST00000361066
  CDS Start-End: 311-988
ggttggttctgagaaggcttcaaggaataggcagacatttcagcaaggctgctgaggaaggataggctgtggaaattaggatgcagcactcctgcccgggtcccgcctcggggtcgccaggccctgaaccccaacgccggcattagtcgcgcctgcgcacggccctgtggagccgcggaggcaagggacggagaacggggcggaggcggagtcagggcgcccgcgcgtgggccccgcccccttatgtcgggtataaagcccctcccgctcacagtttccctagtcctcgaaggctcggaagcccgtcaccatgtcgtgcgagtcgtctatggttctcgggtactgggatattcgtgggctggcgcacgccatccgcctgctcctggagttcacggatacctcttatgaggagaaacggtacacgtgcggggaagctcctgactatgatcgaagccaatggctggatgtgaaattcaagctagacctggactttcctaatctgccctacctcctggatgggaagaacaagatcacccagagcaatgccatcttgcgctacatcgctcgcaagcacaacatgtgtggtgagactgaagaagaaaagattcgagtggacatcatagagaaccaagtaatggatttccgcacacaactgataaggctctgttacagctctgaccacgaaaaactgaagcctcagtacttggaagagctacctggacaactgaaacaattctccatgtttctggggaaattctcatggtttgccggggaaaagctcacctttgtggattttctcacctatgatatcttggatcagaaccgtatatttgaccccaagtgcctggatgagttcccaaacctgaaggctttcatgtgccgttttgaggctttggagaaaatcgctgcctacttacagtctgatcagttctgcaagatgcccatcaacaacaagatggcccagtggggcaacaagcctgtatgctgagcaggaggcagacttgcagagcttgttttgtttcatcctgtccgtaaggggtcagcgctcttgctttgctcttttcaatgaatagcacttatgttactggtgtccagctgagtttctcttgggtataaaggctaaaagggaaaaaggatatgtggagaatcatcaagatatgaattgaatcgctgcgatactggcatttccctactccccaactgagttcaagggctgtaggttcatgcccaagccctgagagtgggtactagaaaaaacgagattgcacagttggagagagcaggtgtgttaaatgggactggagtccctgtgaagactgggtgaggataacacaagtaaaactgtggtactgatggacttaaccggagttcggaaaccgtcctgtgtacacatgggagtttagtgtgataaaggcagtatttcagactggtgggctagccaatagagttgggacaattgcttactcattaaaaataatagagccccacttgacactattcactaaaattaatctggaatttaaggcccaacattaaacacaaagctgttgaaatattgatgaaaa

SEQ ID NO: 137816 - DNA, 678 bp, Homo sapiens
  Payload ID: 6989
  Gene Symbol: GSTM3
  Gene Name: glutathione S-transferase mu 3 (brain)
  ENST ID: ENST00000540225
  CDS Start-End: 18-656
ctcggaagcccgtcaccatgtcgtgcgagtcgtctatggttctcgggtactgggatattcgtgggctggcgcacgccatccgcctgctcctggagttcacggatacctcttatgaggagaaacggtacacgtgcggggaagctcctgactatgatcgaagccaatggctggatgtgaaattcaagctagacctggactttcctaatctgccctacctcctggatgggaagaacaagatcacccagagcaatgccatcttgcgctacatcgctcgcaagcacaacatgtgtggtgagactgaagaagaaaagattcgagtggacatcatagagaaccaagtaatggatttccgcacacaactgataaggctctgttacagctctgaccacgaaaaactgaagcctcagtacttggaagagctacctggacaactgaaacaattctccatgtttctggggaaattctcatggtttgccggggaaaagctcacctttgtggattttctcacctatgatatcttggatcagaaccgtatatttgaccccaagtgcctggatgagttcccaaacctgaaggctttcatgtgccgttttggtgacgttctgcactttctctataaaacactcacagctcccctgggacctgcagatccatagtggaggattcttccccggcttt

SEQ ID NO: 137817 - DNA, 1321 bp, Homo sapiens
  Payload ID: 6990
  Gene Symbol: GSTM4
  Gene Name: glutathione S-transferase mu 4
  Uniprot ID: Q03013
  ENST ID: ENST00000326729
  CDS Start-End: 269-856
ctgaacactcggaggtggcggtggatcttactccttccagccagtgaggatccagcaacctgctccgtgcctcccgcgcctgttggttggaagtgacgaccttgaagatcggccggttggaagtgacgaccttgaagatcggcgggcgcagcggggccgagggggcgggtctggcgctaggtccagcccctgcgtgccgggaaccccagaggaggtcgcagttcagcccagctgaggcctgtctgcagaatcgacaccaaccagcatcatgtccatgacactggggtactgggacatccgcgggctggcccacgccatccgcctgctcctggaatacacagactcaagctacgaggaaaagaagtatacgatgggggacgctcctgactatgacagaagccagtggctgaatgaaaaattcaagctgggcctggactttcccaatctgccctacttgattgatggggctcacaagatcacccagagcaacgccatcctgtgctacattgcccgcaagcacaacctgtgtggggagacagaagaggagaagattcgtgtggacattttggagaaccaggctatggacgtctccaatcagctggccagagtctgctacagccctgactttgagaaactgaagccagaatacttggaggaacttcctacaatgatgcagcacttctcacagttcctggggaagaggccatggtttgttggagacaagatcacctttgtagatttcctcgcctatgatgtccttgacctccaccgtatatttgagcccaactgcttggacgcctttccaaatctgaaggacttcatctcccgctttgaggtttcctgtggcataatgtgatggtcaattttctgcatcaacttgactgggctaagggatgctcagatggcaggtaaaatcattgtgcttgtgagggtgtttccagaagagatttgcctttgaatcagaagacagcaaagatttccttcagcaatgaaggaggcatccaccaaactgtcagggcccagagagaagaaaaagacaggaagggtgaatttgacctctctgactgggacatccatctctgcctatcctgggacctccacactcctggttctctggccttcagacttgatcagggactaacaccatcgcctcccacccccacctttgttctgaggcctttagcctctgaatgataccactggctttcctgcttctctatcctgcagtcggcagatcatgggacttcttcactccaaaattgtgtgagccaattcccataacagatagataaatttataaataaacacacaaatttcctac

SEQ ID NO: 137818 - DNA, 657 bp, Homo sapiens
  Payload ID: 6990
  Gene Symbol: GSTM4
  Gene Name: glutathione S-transferase mu 4
  ENST ID: ENST00000336075
  CDS Start-End: 1-657
atgtccatgacactggggtactgggacatccgcgggctggcccacgccatccgcctgctcctggaatacacagactcaagctacgaggaaaagaagtatacgatgggggacgctcctgactatgacagaagccagtggctgaatgaaaaattcaagctgggcctggactttcccaatctgccctacttgattgatggggctcacaagatcacccagagcaacgccatcctgtgctacattgcccgcaagcacaacctgtgtggggagacagaagaggagaagattcgtgtggacattttggagaaccaggctatggacgtctccaatcagctggccagagtctgctacagccctgactttgagaaactgaagccagaatacttggaggaacttcctacaatgatgcagcacttctcacagttcctggggaagaggccatggtttgttggagacaagatcacctttgtagatttcctcgcctatgatgtccttgacctccaccgtatatttgagcccaactgcttggacgcctttccaaatctgaaggacttcatctcccgctttgagggcttggagaagatctctgcctacatgaagtccagccgcttcctcccaagacctgtgttcacaaagatggctgtctggggcaacaagtag

SEQ ID NO: 137819 - DNA, 3990 bp, Homo sapiens
  Payload ID: 6990
  Gene Symbol: GSTM4
  Gene Name: glutathione S-transferase mu 4
  ENST ID: ENST00000369833
  CDS Start-End: 915-1523
gtcgcagttcagcccagctgaggcctgtctgcagaatcgacaccaaccagcatcatgtccatgacactggggtactgggacatccgcgggctggcccacgccatccgcctgctcctggaatacacagactcaagctacgaggaaaagaagtatacgatgggggacggtaatgacacccttgtgtccgggctctgcccactcacgctgagttggcaccaagcaacccatggtggccacctgtggctacctctgcaggcctcccctgctggagctgcaggctgtcccttccctgagccccggtgagggagtcctgtggccttgcaaggcagaatgctggggcgggatgctgggccccctgtttaattgggttgggtgtccctcagagcttccctaaaccctggaagccttagccgtgtggggtccagagccctcagcgggattctttgtccctgaaccctgggatgtgggactgagtggtcagattctagatccacctgtctcagggatcttgccactggttccttgggagggtccccgggaaggagggctgggctctggggaggtttgttttcacttcttcttccccacggcagctcctgactatgacagaagccagtggctgaatgaaaaattcaagctgggcctggactttcccaatgtaggtgcaggggaaggggcggttttgggggaaagtgcgacgtgtctctgactgcatctcctctccccagattagaggtgttcggatcaggagtcttctgcccaattcctctcactcctggttgtctacacagcccctgcatgatgttctgtgtcccagctcatttgttcatgtgacagtatttctatgtcaggcctgccatgagcgggcacagtgagtgcctggtctcccctctgcccttgcatatgggaaggggatgctggggagcctgctggcccaactgagcttccccggtttcccatctatccagctgccctacttgattgatggggctcacaagatcacccagagcaacgccatcctgtgctacattgcccgcaagcacaacctgtgtggggagacagaagaggagaagattcgtgtggacattttggagaaccaggctatggacgtctccaatcagctggccagagtctgctacagccctgactttgagaaactgaagccagaatacttggaggaacttcctacaatgatgcagcacttctcacagttcctggggaagaggccatggtttgttggagacaagatcacctttgtagatttcctcgcctatgatgtccttgacctccaccgtatatttgagcccaactgcttggacgcctttccaaatctgaaggacttcatctcccgctttgaggtgatgcccccatcctcctttctctttgatgccccttgttccgttacctcctttcagatgctttcccagtcctggagctacataaagaataacttgcatttattgagtgctggcttcatgccaggaaccttgcccagcacattatacctatcgtgtggaatttgaaatttccaacattcctacagggtgacagaattatcttgcccatttagagataagaaaactttgaatgagagggtcagtcctttgttctgggtcccagagccagtggaggctgtgctgggctccctgtgagcatctggatctatgggtggcagtcagggctctcccttttgtgacaaaagaaagaagcctcaggcctcatccagcctggatttcacagcccagggcactttggaagaggcagagaactttaggagcatggatgcagctggcaatagtaggactgacacacggtggcattgacgtcgagtacgaaacccacaggcagtattcatagctactcccagaagctttgcacgatcagacccccacgtggggaatcctgagagccagagctgtggccagagctggattagggtacatatgtgggtgcccctgttgaaggagtgtatgttgaagtgctctgtgctggggcactctccttctttatcttttttcctctcttttttccctccagtgttccaagtgttccccctgtgagatgagtagcacactgattttactgctattcaccgaccttctcctctgcatgaggcagggtgtgaggcacagtgggagttgcatagatgactgccccatcctggaaatgagtgcagtgagaggcctgcaggcagagcagcctgtgaggtgtgtggcaccacctgggtaccaggcctggggcctgcccctcactcatggggaaccatccctcacccgtgctgaatttgtttgagagcagcaaatcctacttttagtacagatgtgagaatttgaggcattagtccaacaagtttttcagcctagaatttgttttcctttcccactacccatcaagggatctggttactcagctagttcccatcagctctggctgtggtctcggctgagtggccttggggttatgtaagaggtagtgggaggggaagagagctgagggctgcagcatatggtccacctgggcttggccctttgggaataggcagccctggctctctctgaatccttagaaattacacggctatttgatcctggaaagatcgtgcagagcacacctgagtgtcatacagcctggtctgaggtagtggggttggagatgaggtgggttggggcacagtggtgtttagctcaggtaccaggtggggaggtttagactttctgctttaaaaggaatgattagagcctggtctggcgtttcttttgctggtccaacacaccttgaccactttcatccaggttttgccaggtccttgggtgagatctgggctctcttccaggctgcacagacattttcagaggtcccctctgtgtgtgcaaacctaggcaagccaggtgcctccctgtgaaacaggagaatgttgtgtagtcagagagtgacaggacctcctgagggatttgggggaggatggggatttgacagaaagaggccagaactggagagagacagaaccagtctacgttgcagctctgtcccccttagtagctatttgagtgtgaggaagttactgaacttctgtttcccacatgagaaatggtgataatagattcagccttgcagagtagtcgagtgggttttctaagcttatgttgtaatttctcttgggtacagagcacccagcaccgggtagaatcttcataagtgttagctgttactgtggtacaacattacttaaaggaagttggaagagttaactccgcaaatctggggaccctaagaggctgtgtgatgcctcagcacttgagcccacgtggaaaggctgtggccagggccctgacctgctgtgtctgcagtggggttgtcccagccctcatgggcagctgaccttgagttctggccttattttcccccctctcagggcttggagaagatctctgcctacatgaagtccagccgcttcctcccaaaacctctgtacacaagggtggctgtctggggcaacaagtaatgccttgaaggccaggaggtgggagtgaggagcccatactcagcctgctgcccaggctgtgcagcgcagctggactctgcatcccagcacctgcctcctcgttcctttctcctgtttattcccatctttacccccaagactttattgggcctcttcacttcccctaaacccctgtcccatgcaggccctttgaagcctcagctacccactttccttcatgaacatccccctcccaacactacccttccctgcactaaagccagcctgaccttccttcctgttagtggttgtatctgctttgaagggcctacctggcccctcgcctgtggagctcagccctgagctgtccccgtgttgcatgacagcattgactggtttacaggccctgctcctgcagcatggcccctgccttaggcctacctgatcaaaataaagcctcagccacatttgctatagtcttgtcttatttgctcctggctgcccagact

SEQ ID NO: 137820 - DNA, 1412 bp, Homo sapiens
  Payload ID: 6990
  Gene Symbol: GSTM4
  Gene Name: glutathione S-transferase mu 4
  Uniprot ID: Q03013
  ENST ID: ENST00000369836
  CDS Start-End: 310-966
ggcgaggccgagcccctcctagtgcttccggaccttgctccctgaacactcggaggtggcggtggatcttactccttccagccagtgaggatccagcaacctgctccgtgcctcccgcgcctgttggttggaagtgacgaccttgaagatcggccggttggaagtgacgaccttgaagatcggcgggcgcagcggggccgagggggcgggtctggcgctaggtccagcccctgcgtgccgggaaccccagaggaggtcgcagttcagcccagctgaggcctgtctgcagaatcgacaccaaccagcatcatgtccatgacactggggtactgggacatccgcgggctggcccacgccatccgcctgctcctggaatacacagactcaagctacgaggaaaagaagtatacgatgggggacgctcctgactatgacagaagccagtggctgaatgaaaaattcaagctgggcctggactttcccaatctgccctacttgattgatggggctcacaagatcacccagagcaacgccatcctgtgctacattgcccgcaagcacaacctgtgtggggagacagaagaggagaagattcgtgtggacattttggagaaccaggctatggacgtctccaatcagctggccagagtctgctacagccctgactttgagaaactgaagccagaatacttggaggaacttcctacaatgatgcagcacttctcacagttcctggggaagaggccatggtttgttggagacaagatcacctttgtagatttcctcgcctatgatgtccttgacctccaccgtatatttgagcccaactgcttggacgcctttccaaatctgaaggacttcatctcccgctttgagggcttggagaagatctctgcctacatgaagtccagccgcttcctcccaaaacctctgtacacaagggtggctgtctggggcaacaagtaatgccttgaaggccaggaggtgggagtgaggagcccatactcagcctgctgcccaggctgtgcagcgcagctggactctgcatcccagcacctgcctcctcgttcctttctcctgtttattcccatctttacccccaagactttattgggcctcttcacttcccctaaacccctgtcccatgcaggccctttgaagcctcagctacccactttccttcatgaacatccccctcccaacactacccttccctgcactaaagccagcctgaccttccttcctgttagtggttgtatctgctttgaagggcctacctggcccctcgcctgtggagctcagccctgagctgtccccgtgttgcatgacagcattgactggtttacaggccctgctcctgcagcatggcccctgccttaggcctacctgatcaaaataaagcctcagccaca

SEQ ID NO: 137821 - DNA, 1555 bp, Homo sapiens
  Payload ID: 6991
  Gene Symbol: GSTM5
  Gene Name: glutathione S-transferase mu 5
  Uniprot ID: P46439
  ENST ID: ENST00000256593
  CDS Start-End: 59-715
caaagtctgagccccgctccgctgatgcctgtctgcagaatccgcaccaaccagcaccatgcccatgactctggggtactgggacatccgtgggctggcccacgccatccgcttgctcctggaatacacagactcaagctatgtggaaaagaagtacacgctgggggacgctcctgactatgacagaagccagtggctgaatgaaaaattcaagctgggcctggactttcccaatctgccctacttgattgatggggctcacaagatcacccagagcaatgccatcctgcgctacattgcccgcaagcacaacctgtgtggggagacagaagaggagaagattcgtgtggacattttggagaaccaggttatggataaccacatggagctggtcagactgtgctatgacccagattttgagaaactgaagccaaaatacttggaggaactccctgaaaagctaaagctctactcagagtttctggggaagcggccatggtttgcaggagacaagatcacctttgtggatttccttgcctatgatgtccttgacatgaagcgtatatttgagcccaagtgcttggacgccttcctaaacttgaaggacttcatctcccgctttgagggtttgaagaagatctctgcctacatgaagtccagccaattcctccgaggtcttttgtttggaaagtcagctacatggaacagcaaatagggcccagtgatgccagaagatgggagggaggagccaaccttgctgcctgcgaccctggaggacagcctgactccctggacctgccttcttcctttttccttctttctactctcttctcttccccaaggcctcattggcttcctttcttctaacatcatccctccccgcatcgaggctctttaaagcttcagctccccactgtcctccatcaaagtccccctcctaacgtcttcctttccctgcactaacgccaacctgactgcttttcctgtcagtgcttttctcttctttgagaagccagactgatctctgagctccctagcactgtcctcaaagaccatctgtatgccctgctccctttgctgggtccctaccccagctccgtgtgatgcccagtaaagcctgaaccatgcctgccatgtcttgtcttattccctgaggctcccttgactcaggactgtgctcgaattgtgggtggttttttgtcttctgttgtccacagccagagcttagtggatgggtgtgtgtgtgtgtgtgttgggggtggtgatcaggcaggttcataaatttccttggtcatttctgccctctagccacatccctctgttcctcactgtggggattactacagaaaggtgctctgtgccaagttcctcactcattcgcgctcctgtaggccgtctagaactggcatggttcaaagaggggctaggctgatggggaagggggctgagcagctcccaggcagactgccttctttcaccctgtcctgatagacttccctgatctagatatccttcgtcatgacacttctcaataaaacgtatcccaccgtattgt

SEQ ID NO: 137822 - DNA, 657 bp, Homo sapiens
  Payload ID: 6991
  Gene Symbol: GSTM5
  Gene Name: glutathione S-transferase mu 5
  ENST ID: ENST00000369812
  CDS Start-End: 1-657
atgcccatgactctggggtactgggacatccgtgggctggcccacgccatccgcttgctcctggaatacacagactcaagctatgtggaaaagaagtacacgctgggggacgctcctgactatgacagaagccagtggctgaatgaaaaattcaagctgggcctggactttcccaatctgccctacttgattgatggggctcacaagatcacccagagcaatgccatcctgcgctacattgcccgcaagcacaacctgtgtggggagacagaagaggagaagattcgtgtggacattttggagaaccagaccacggacaactggatgcaactggtcatgatctgctaccacccagagtttgagaaactgaagccaaaatacttggaggaactccctgaaaagctaaagctctactcagagtttctggggaagcggccatggtttgcaggagacaagatcacctttgtggatttccttgcctatgatgtccttgacatgaagcgtatatttgagcccaagtgcttggacgccttcctaaacttgaaggacttcatctcccgctttgagggtttgaagaagatctctgcctacatgaagtccagccaattcctccgaggtcttttgtttggaaagtcagctacatggaacagcaaatag

SEQ ID NO: 137823 - DNA, 4370 bp, Homo sapiens
  Payload ID: 6991
  Gene Symbol: GSTM5
  Gene Name: glutathione S-transferase mu 5
  ENST ID: ENST00000369813
  CDS Start-End: 906-1514
aaagtctgagccccgctccgctgatgcctgtctgcagaatccgcaccaaccagcaccatgcccatgactctggggtactgggacatccgtgggctggcccacgccatccgcttgctcctggaatacacagactcaagctatgtggaaaagaagtacacgctgggggacggtaatggcaccctcgtgtccgggccctgcccactcacgctgagttggcaccaagcaacccatggtggccacctgtggctgcctctgcaggcctcccctgctggagctgcaggctgtcccttccctgagctcccgtgagtgagccctctggccttgcaaggcagaatgctggggcgggatgctggacaccctgtctaattgggttgggtgtccctcagagcttccctaaaccctggaagccttagccgttgtggggtccagagccctcagtgggattctttctccctgaaccctgggatgtgggactgagtggtcagattctagatccacctgtctcagggatcttgccactggctccttgggagggtccccgggaaggagggctgggctctggggaggtttgttttcacttcttccccaccacagctcctgactatgacagaagccagtggctgaatgaaaaattcaagctgggcctggactttcccaatgtaggtgcaggggaaggggcggttttgggggaaagtgcgacgtgtctctgactgcatctcctctccccaccttagaggtgttaagatcaggagtcttctgcccaattcctctcactcttggctgtctacacagcccttgcatgatgttctgtgtcccagctcatttattagtgtgacagtatttctatctcaggcctgccatgagcaggccctggtctcctctctgcccttgcatatgggaaggggatgctggggagcctggtggcccaactgagcttccccggtttcccatctatccagctgccctacttgattgatggggctcacaagatcacccagagcaatgccatcctgcgctacattgcccgcaagcacaacctgtgtggggagacagaagaggagaagattcgtgtggacattttggagaaccaggttatggataaccacatggagctggtcagactgtgctatgacccagattttgagaaactgaagccaaaatacttggaggaactccctgaaaagctaaagctctactcagagtttctggggaagcggccatggtttgcaggagacaagatcacctttgtggatttccttgcctatgatgtccttgacatgaagcgtatatttgagcccaagtgcttggacgccttcctaaacttgaaggacttcatctcccgctttgaggtgatgcccccatcctcctttctctttgatgccccttgttcctttctctcctttcagatgctttcccagtcctggagctacacaaagaataactcgtatgtattgagtacgggcttcatgccaggaatcatgcccagcacattatacctatcgtgtagaatttgaaatttccaacattcctacagggtgacagaattatcttgcccattttagagataagaaaactgagaatgagagggtcagtcctttgctcagggtcccagagccagtggaggctgtgctgggctccctgtgagcctctggatctatgggtggcagtcagggctctcccatttgtgacaaaaggagaagcctcaggcctcatccagcctgggtttcacagcccagaacactttgaaagaggcagagcacttcaggaccacggatgcagctggcaatagtaggactgacacacagtggcattgatgttgagtactaaacctgcaggcagtattcatagccacccccagaagctttgcatgatcggacccccatgtggaaaatcctgagatccggagctgtggctggagctggattagggtacatatgtgggtgcccctgttgaagcagtgtgtgttgaagtgctctgtgctggggcactctccttctttatctttcttcctctctttttttccctccaatgttccacgtcttccccctgtgagatgagtagcacactgattttactcctattcaccgaccttctcctctgcatgaggcagggtgtgaggcacagtgggagttgcatagatgactgccccatcctggaaatgagtgcagtgagaggcctgcaggcagagcagcctgtgaggtgtgtgtggcaccacctgggtaccgggcctggggcctgcccctcactcacggggaaccatccctcacctgtgttgaagttgtttgagagcagcaaatcctactttagtacagatttggggatttgaggcattagtccaacaggcttctgagcctagaatctgtttccctttcccactccccatcaagaaatctgcttgctcagctagttcccatcagctctggttctggtccagcctgagcagccttggggttatgtaagaggtggtgggaggggagcggtggggaacagccgagggctggggcatggagcctgcctgggcctggccctggccctttggggagagggagccctggatctctttgaattctttagaagttacatggtcattgaatcctggtaagattgtgtgcagcacacctgagtgtcatgtggcctggctagcagtagtagggctggagatgtgatgggggcacagggacatagggagatttagctcaggtaccaggtggagaagtttggactttatgctttaatgggaatgattagagcctggtctggccttcctttggtggttcacccttaccctattcagtttcatccaggttttgctaagtcattgggtgagatctgtgctctcttcttggctgcacaggtgtgttctgagcccctttgttctgctggaggtcctttctgtgtgtgcaatcctaggcaagccaagaacctccctgtgaaaaaggagaatgtttgtgccgacaaggagtgacaggatctggcatggggtgtggctgggtggaagaggaggagaatttggcaaaaacatgctagaactgaagacagaaccaggctatattccagccctgtcccacttactagctatttgagtgtgaggaagttgctgaacttctgttcttctatatgagaaacggtgataatagaactgaccatggagggtagtcgagtggattttctaagcctgtgttgtaatttctgttggatataaagcacccagcacagtgtagatctttcgtaaatggtagctgttattatggtataacattacttaaaggaagttggaagagttaacttagaagagctggggacctaagagaccgtgtgatgctccagcacttgagcccacatggaaaggctgtggccagggccctgacctgctgtgcctgcagcaaagctacttgagcccttctagacagcagacctggctctggccccttcttcccgccctcagggtttgaagaagatctctgcctacatgaagtccagccaattcctccgaggtcttttgtttggaaagtcagctacatggaacagcaaatagggcccagtgatgccagaagatgggagggaggagccaaccttgctgcctgcgaccctggaggacagcctgactccctggacctgccttcttcctttttccttctttctactctcttctcttccccaaggcctcattggcttcctttcttctaacatcatccctccccgcatcgaggctctttaaagcttcagctccccactgtcctccatcaaagtccccctcctaacgtcttcctttccctgcactaacgccaacctgactgcttttcctgtcagtgcttttctcttctttgagaagccagactgatctctgagctccctagcactgtcctcaaagaccatctgtatgccctgctccctttgctgggtccctaccccagctccgtgtgatgcccagtaaagcctgaaccatgcctgccatgtcttgtcttattccctgaggctcccttgactcaggactgtgctcgaattgtgggtggttttttgtcttctgttgtccacagccagagcttagtggatgggtgtgtgtgtgtgtgtgttgggggtggtgatcaggcaggttcataaatttccttggtcatttctgccctctagccacatccctctgttcctcactgtggggattactacagaaaggtgctctgtgccaagttcctcactcattcgcgctcctgtaggccgtctagaactggcatggttcaaagaggggctaggctgatggggaagggggctgagcagctcccaggcagactgccttctttcaccctgtcctgatagacttccctgatctagatatccttcgtcatgacacttctcaataaaacgtatcccaccgt

SEQ ID NO: 137824 - DNA, 900 bp, Homo sapiens
  Payload ID: 6992
  Gene Symbol: GSTO1
  Gene Name: glutathione S-transferase omega 1
  Uniprot ID: P78417
  ENST ID: ENST00000369710
  CDS Start-End: 220-846
cccttggccagcgagatgctttgacacagccccttaagatgttttaagggctatcccataaagccgggaaggcacaacgggtggagctggcggccgccgggggcaggcacttttgagctaaggaggaagcgggggagggaaggagggcgggaaggacgcgccacctacttcctgaatcccctgcaaaccccagaggagctcggcctgcgctgcgccacgatgtccggggagtcagccaggagcttggggaagggaagcgcgcccccggggccggtcccggagggctcgatccgcatctacagcatgaggttctgcccgtttgctgagaggacgcgtctagtcctgaaggccaagggaatcaggcatgaagtcatcaatatcaacctgaaaaataagcctgagtggttctttaagaaaaatccctttggtctggtgccagttctggaaaacagtcagggtcagctgatctacgagtctgccatcacctgtgagtacctggatgaagcatacccagggaagaagctgttgccggatgacccctatgagaaagcttgccagaagatgatcttagagttgttttctaaggttctgactaataagaagacgaccttctttggtggcaattctatctctatgattgattacctcatctggccctggtttgaacggctggaagcaatgaagttaaatgagtgtgtagaccacactccaaaactgaaactgtggatggcagccatgaaggaagatcccacagtctcagccctgcttactagtgagaaagactggcaaggtttcctagagctctacttacagaacagccctgaggcctgtgactatgggctctgaagggggcaggagtcagcaataaagctatgtctgatattttccttcactaatatg

SEQ ID NO: 137825 - DNA, 972 bp, Homo sapiens
  Payload ID: 6992
  Gene Symbol: GSTO1
  Gene Name: glutathione S-transferase omega 1
  Uniprot ID: P78417
  ENST ID: ENST00000369713
  CDS Start-End: 195-920
acagccccttaagatgttttaagggctatcccataaagccgggaaggcacaacgggtggagctggcggccgccgggggcaggcacttttgagctaaggaggaagcgggggagggaaggagggcgggaaggacgcgccacctacttcctgaatcccctgcaaaccccagaggagctcggcctgcgctgcgccacgatgtccggggagtcagccaggagcttggggaagggaagcgcgcccccggggccggtcccggagggctcgatccgcatctacagcatgaggttctgcccgtttgctgagaggacgcgtctagtcctgaaggccaagggaatcaggcatgaagtcatcaatatcaacctgaaaaataagcctgagtggttctttaagaaaaatccctttggtctggtgccagttctggaaaacagtcagggtcagctgatctacgagtctgccatcacctgtgagtacctggatgaagcatacccagggaagaagctgttgccggatgacccctatgagaaagcttgccagaagatgatcttagagttgttttctaaggtgccatccttggtaggaagctttattagaagccaaaataaagaagactatgctggcctaaaagaagaatttcgtaaagaatttaccaagctagaggaggttctgactaataagaagacgaccttctttggtggcaattctatctctatgattgattacctcatctggccctggtttgaacggctggaagcaatgaagttaaatgagtgtgtagaccacactccaaaactgaaactgtggatggcagccatgaaggaagatcccacagtctcagccctgcttactagtgagaaagactggcaaggtttcctagagctctacttacagaacagccctgaggcctgtgactatgggctctgaagggggcaggagtcagcaataaagctatgtctgatattttccttcactaata

SEQ ID NO: 137826 - DNA, 592 bp, Homo sapiens
  Payload ID: 6992
  Gene Symbol: GSTO1
  Gene Name: glutathione S-transferase omega 1
  ENST ID: ENST00000432659
  CDS Start-End: 51-592
gaagcgcgcccccggggccggtcccggagggctcgatccgcatctacagcatgaggttctgcccgtttgctgagaggacgcgtctagtcctgaaggccaagggaatcaggcatgaagtcatcaatatcaacctgaaaaataagcctgagtggttctttaagaaaaatccctttggtctggtgccagttctggaaaacagtcagggtcagctgatctacgagtctgccatcacctgtgagtacctggatgaagcatacccagggaagaagctgttgccggatgacccctatgagaaagcttgccagaagatgatcttagagttgttttctaaggttctgactaataagaagacgaccttctttggtggcaattctatctctatgattgattacctcatctggccctggtttgaacggctggaagcaatgaagttaaatgagtgtgtagaccacactccaaaactgaaactgtggatggcagccatgaaggaagatcccacagtctcagccctgcttactagtgagaaagactggcaaggtttcctagagctctacttacagaacagccctgaggcctgtgactatgggctctg

SEQ ID NO: 137827 - DNA, 829 bp, Homo sapiens
  Payload ID: 6992
  Gene Symbol: GSTO1
  Gene Name: glutathione S-transferase omega 1
  ENST ID: ENST00000445155
  CDS Start-End: 228-829
gggggtgatctcggcgacccccggcggcatgttcgaggctgctccgggagcccagccgcccgggagcgccccaccggcggggaacgggtcggagctgcagtgggacgcgggggcggtgggatacggggggtctcgacacctctctgggccgtaatcgccttcgcttctccccggcaggaagcgcgcccccggggccggtcccggagggctcgatccgcatctacagcatgaggttctgcccgtttgctgagaggacgcgtctagtcctgaaggccaagggaatcaggcatgaagtcatcaatatcaacctgaaaaataagcctgagtggttctttaagaaaaatccctttggtctggtgccagttctggaaaacagtcagggtcagctgatctacgagtctgccatcacctgtgagtacctggatgaagcatacccagggaagaagctgttgccggatgacccctatgagaaagcttgccagaagatgatcttagagttgttttctaaggtgccatccttggtaggaagctttattagaagccaaaataaagaagactatgctggcctaaaagaagaatttcgtaaagaatttaccaagctagaggaggttctgactaataagaagacgaccttctttggtggcaattctatctctatgattgattacctcatctggccctggtttgaacggctggaagcaatgaagttaaatgagtgtgtagaccacactccaaaactgaaactgtggatggcagccatgaaggaagatcccacagtctcagccctgcttactagtgagaaagactggcaaggtttcctagagctcta

SEQ ID NO: 137828 - DNA, 1052 bp, Homo sapiens
  Payload ID: 6992
  Gene Symbol: GSTO1
  Gene Name: glutathione S-transferase omega 1
  Uniprot ID: P78417
  ENST ID: ENST00000539281
  CDS Start-End: 357-998
aaggatgactcctagacctgtctttgtcccatacttgggaagataagctgttagtttacattgccaagatgaaattcaactgatctgttttagagtaaagatcttgcgggccaacaaggaatttccttggggaggtgtgtggcctttgatctttgtagctatttagcaacaaaatgggaggcagtgttgcctgactcagtttccaagcttgactcttccctttggcatagtgagtttggagtcaagagatttttattttcccttcacaagctgaacaggagcctttggagagaacgctctggaccggaagcgcgcccccggggccggtcccggagggctcgatccgcatctacagcatgaggttctgcccgtttgctgagaggacgcgtctagtcctgaaggccaagggaatcaggcatgaagtcatcaatatcaacctgaaaaataagcctgagtggttctttaagaaaaatccctttggtctggtgccagttctggaaaacagtcagggtcagctgatctacgagtctgccatcacctgtgagtacctggatgaagcatacccagggaagaagctgttgccggatgacccctatgagaaagcttgccagaagatgatcttagagttgttttctaaggtgccatccttggtaggaagctttattagaagccaaaataaagaagactatgctggcctaaaagaagaatttcgtaaagaatttaccaagctagaggaggttctgactaataagaagacgaccttctttggtggcaattctatctctatgattgattacctcatctggccctggtttgaacggctggaagcaatgaagttaaatgagtgtgtagaccacactccaaaactgaaactgtggatggcagccatgaaggaagatcccacagtctcagccctgcttactagtgagaaagactggcaaggtttcctagagctctacttacagaacagccctgaggcctgtgactatgggctctgaagggggcaggagtcagcaataaagctatgtctgatattttccttcactaatatg

SEQ ID NO: 137829 - DNA, 1179 bp, Homo sapiens
  Payload ID: 6993
  Gene Symbol: GSTO2
  Gene Name: glutathione S-transferase omega 2
  Uniprot ID: Q9H4Y5
  ENST ID: ENST00000338595
  CDS Start-End: 321-1052
cgcctccttgctgctgctgccgccgccaatcctggtccggttgcccgagttcccggaggtctctcgcgggacctctctcaccgccaccgctcctactctcgggcttccaaatctggggcgatgtctccccaggttaaattaccctagctcctgctccagatcgcttccccgtgccccgccagagcccagtagttcaaaaattaaatttggggcaaggggtgcgcgccagagcgcagctgtttctggagcctgcggcagcggtggcgagccacagggcggcgaccgtgagctccgggagctgcgcaaaccacctggagaccatgtctggggatgcgaccaggaccctggggaaaggaagccagcccccagggccagtcccggaggggctgatccgcatctacagcatgaggttctgcccctattctcacaggacccgcctcgtcctcaaggccaaagacatcagacatgaagtggtcaacattaacctgagaaacaagcctgaatggtactatacaaagcacccttttggccacattcctgtcctggagaccagccaatgtcaactgatctatgaatctgttattgcttgtgagtacctggatgatgcttatccaggaaggaagctgtttccatatgacccttatgaacgagctcgccaaaagatgttattggagctattttgtaaggtcccacatttgaccaaggagtgcctggtagcgttgagatgtgggagagaatgcactaatctgaaggcagccctgcgtcaggaattcagcaacctggaagagattcttgagtatcagaacaccaccttctttggtggaacctgtatatccatgattgattacctcctctggccctggtttgagcggctggatgtgtatgggatactggactgtgtgagccacacgccagccctgcggctctggatatcagccatgaagtgggaccccacagtctgtgctcttctcatggataagagcattttccagggcttcttgaatctctattttcagaacaaccctaatgcctttgactttgggctgtgctgagtctcactgtccaccccttcgctgtccagaattccccagcttgttgggagtctacgtcacggcttgtcttgggaaccaatccgtctctctttcttttctttgaagttcccaataaaatgaaaacagg

SEQ ID NO: 137830 - DNA, 6423 bp, Homo sapiens
  Payload ID: 6993
  Gene Symbol: GSTO2
  Gene Name: glutathione S-transferase omega 2
  Uniprot ID: Q9H4Y5
  ENST ID: ENST00000369707
  CDS Start-End: 115-762
gctccttcctcaccgggctgactagcctctcctttccctgtccccctccatcgctgctctgcaggaagccagcccccagggccagtcccggaggggctgatccgcatctacagcatgaggttctgcccctattctcacaggacccgcctcgtcctcaaggccaaagacatcagacatgaagtggtcaacattaacctgagaaacaagcctgaatggtactatacaaagcacccttttggccacattcctgtcctggagaccagccaatgtcaactgatctatgaatctgttattgcttgtgagtacctggatgatgcttatccaggaaggaagctgtttccatatgacccttatgaacgagctcgccaaaagatgttattggagctattttgtaaggtcccacatttgaccaaggagtgcctggtagcgttgagatgtgggagagaatgcactaatctgaaggcagccctgcgtcaggaattcagcaacctggaagagattcttgagtatcagaacaccaccttctttggtggaacctgtatatccatgattgattacctcctctggccctggtttgagcggctggatgtgtatgggatactggactgtgtgagccacacgccagccctgcggctctggatatcagccatgaagtgggaccccacagtctgtgctcttctcatggataagagcattttccagggcttcttgaatctctattttcagaacaaccctaatgcctttgactttgggctgtgctgagtctcactgtccaccccttcgctgtccagaattccccagcttgttgggagtctacgtcacggcttgtcttgggaaccaatccgtctctctttcttttctttgaagttcccaataaaatgaaaacaggaaatgtattcttctgataatcatttgtctgactcctctagcctgtagctgctgctactgctgcttttttttcctttttttttttgaggcaagatcttgcttcgttactcaggctggagtgcagtgggacagtcggctcactgcagccttgaactcctgggctcagttgattctcccgcctcagcctcctgagaagctaggactacaggtatgtgtcaccacgcccagctaatttttaaaaaaatgttgttgagacagggtctcactatgttgctcaggctggtctccatctcctggccgcaagccatccacccaacttggtctccaaagtgttgagattacaggcatgagccacctggcctgcctagcctgtagcttctaactattttctagaaagtgcctggtgctaatgtcagagcacattttgggagcctgtgtgcctcctaactccttggccttcagcctagtttgatctccagattattggtgcagatgctgatgctgaggttcagggtcaacctatgactgatgcttgtcactacagaatggcaccctccaaagacctccctggtgaaagcttaagaagagggagaaggaagaagaaaacactccaaacctaaataccttccatttggcaaatgaatgtcgctgtccacgtgggcgagtatgagtgtaattctccaaactttggccatgggcctggagacaccgagggtcttgtgactggaaagaattccaaagcaggaaatgaaacaccggtttatcacccaggactaactacgtcagaatttcactggtgctgtcagggctcaggatgtctcacaaaatgttctatagccggcatcctgccttaaaaaaatacacacgccccaaacccagccacaagcaaaggtcattccgttggatttgcgtcacactctcttccaattcatctcaacaaatgcctctggttgcctgttgtgtaccaagcccaggggcacactggggataaagttgaaaaagacattggctctgtccctgggagcccccatctctccacttatcttggttgaggttttaaacctagcgctttggagctgcttgtctgttgtagggatgcttgtctctgatgtggcccctctgccagcttcgccaggcagtaccaccccactgaagacagcaaagagctgaggatggctggtgccaacaggtcccttgggctgggagcatctactgcctgcactatgggagggggaccaagtttgtccaatgctgtttcatctcagtgtctgaggatcagcctgtgatcatttcagctttgctcatgctggatcctttcccatcctcctagctgtgctgagacaccaggcagcaacaggagcgatgttttgccttgtctgtgctccctaaggagctgtctgccacctctgcctctgagacagcccaaatcagccctcctctctccccacgtctcagtctggccctgccatctgctggctctgggtatattttgacccatgtaaatagttaccaggtgttactctgtgccagctggacagaaacaagcctgcttggtgaggtggccagaacttccagaagaggcagcgcatgacaggggcagtctgccgcaccatctgctccggatgtggagccctgttgccatggcaccctagttaatgctgagtgaggtctgtgaatcaccgttttcctgggatctttgctccaagaagaggggaatcttctcctgtggcctctcataggacttaggagattgatcagccttttgccggtacaaatcctgcatgctagtgagtgcttgtcataagaccaaagttaccactgatgcaacaggaaatggcatgcctctggctcaccaaaatgaaggtgttctcttttggggctccgcacactaatttagaaagcttgaagaaccaggaattatagaatggagaaaagcactcatgggggaggtttgcagcctggtggcctatagcccagtttgggatttgagtgcctcttggccaggcatgctccctgctgtttaccagggtcctggtcacctgcacatccttacacttcctccatctcgcttctttgtcacttgtctgacccacagagaaaactgagttatcaatctttgaataaaactagaaggatgtggcctggagaaaagagggaaggaggtaattaaataatgctccatgaagaactttaaaaatatgcttcttaattaatacatgtggaaagaatacatatgggttaaaaatacaataatgtaaaagaatagaaaatcttccattatcttgtgtcctagagataaccacttttagtaattggtgtctacctttttttccccttttcttttaaataatagagatggggtttcgctatgttgaccaggctggtcttgaactcctggcttcaagtgatcctcccatctcggcatcccaaagtgctgggattataggtctgagtcatcatgcctggtgggtgtctatcttataaaaagcactaaacttaaagatttaaaggtgagagcctgtattaggccattctcatggtgctataaagaactgcccaagactgagtaatttataaaggaaagaggtttaattgactcacaattccacatggctggggaagcctcaggaaactttcaatcatggtggaaggggaagcaaacatgtccttctgcacaaggtggcagaagagagaagtacagagccaaagagggaaaaactccttataaaaccattagatctcatgagaactcactcactgtcatgagaaaagcatagggaaaacactcccacaatcgaatcacctcccttgaggtccctcccccaacatgtggggattataattcagattaaaattgaagatgagattttaggtggagcacagccaaaccatatcagagccattctctatcttttgcagattggaaaaataaaaaaattagtttaaaccacagcatttaaaagaaatggtcatagatgatgttaacatcagaatggaggttgtgtggagttcccctccttggaggttctgagctacagcctagcctggactcagtccagttacaatctaacatggctagggggaggagggagcatgatggggcagggcttgtgtggctgggacagctggctatggtcgtggtgctggtgactaaatggtacttgaaatttcttttagatctaaaattctgtgatatggtttggatctgagaccccaccaaatttcgtgttgaaatgtaatccccaatgctggtgggaggtgattggatcatgggggtagatttctcatgaatggtttagcaccattctcttggtgctgttctcatgatagtgagtgagttctcatgagttctggttgtttaaaagtgtgcagcatctccctgacccctcttgcgccagctcccaccatgggagatgcctcgctccccctttgctttttgccatgagaggaagcttcctgagggctctccagaagcagaatctactacacttctcatacagcctgcagaaccatgagccaattaaacctctttttaaaaacacttttattttaagttcaggggtacatgtgcaggatgtgcaggttcgttccataggtaaacatgcgtcatggggtttgttatgcagattatttcatcacctagatattaagtctagtatccattagttatttttcctgatcctctccctcctcccaccctgcaccctctgataggcctcagtgtgtattgttaccctccacatgtccatgtgttctcatgatttagctcccacttataagtgagaacatgcagtttttgtaaacctgttttctttagggaaagtttagaattttctagagactggttgtatggttgtgaccaaaatgccagtagtgatatggacagtgaaggccaggctgaggaggtgatggaaatgaggaacttactgggaactggagcaaaggtcacttttgttatgctttagcaaagaacttggctgcattgtgctcctggcctagggacctgtggaagtttgaacttgagagtgatgattttagggtatctggcagaaaaaatttctaagcagcaaagcattcaagatgcgccctggctgctttcaacaacctatgctcatatttgtgagcaaagaaattatgttaagttggaacttatatttacaggggaagcagagcgtaaaagtttggagaatttgcagccagctatgtggtagaaaagaagagcccgttttcagggaaggaattcaagcaggctgcagaaatttgcataagtaaaaaggagccaagtgctaatggccaagaaaatggggaaaaggccttgaaggcatttcagagacctttgtggcagcccctcccatcacagactcagaggcctaggaggacagaatgactctgagtattaaagtagatttaatctaaatcataaagtacaagctagagcaatccctccagtgctgcagaaactgcctgcatgtggctcccacattgtttcttggagctttggtggtggtaggggtggcaggggcaggtgttatgtttcttggtttctcaccttcaggtctccttacccatgtttcctttgtcagagtcattggccttgatggaggggagactgggttactctgagttgagaagcaagcttgactgccctgtggtttatatcagcctagcttagtttgttttctgaagtcttcacaaataaccaaatatccagcccagtgcagttctcaatgagtagtctccagttcccatcccccaccacacacacacaccaaacactgtgcccacctgggagacccattttcatttatcttcttctttgagtgcctggaaggctgaacatttgatcttttcaaacatttttctctcatctggcctgttagcgctcttgagcctttgaaaatgccatttcctctacatactattcttcctcagagcagccctctgtttttttttccaaccagtcttttctcttgcaaagttcagatcaaaattcttctttatgtaaagagaagtggcgtgccataggggttacaaacagggcttcaaggttagcactgggatcaaattccgactttgcaacttaactttcttgagtaagttgctacacctctattagcctcagtttcttatctgtaaaatgggacggctaagtacctatttcattgggctgttgaataatgatggtctcatctatgcaagggcttagtaccagctgggtgaaactcagtgaatggcaggcaaccctattatgactaggcttctgccaatgatcagacttgaaccctgtgctcatccccccatcactttgtggaactagatgtcctacgttgcacatggcttgattcatggtttggagttgttttctggttgtttcctgtgtgcaggtttaatctcaacctgtgatcccttgaaagctgcaattttatccctccccgtcctcctccctctcaccccaaggccaagtttaatactgtgcattctgaaatcttgcaatgttgatgatgtaaaataaatcttctctcctgtgtttctgaa

SEQ ID NO: 137831 - DNA, 1391 bp, Homo sapiens
  Payload ID: 6993
  Gene Symbol: GSTO2
  Gene Name: glutathione S-transferase omega 2
  Uniprot ID: Q9H4Y5
  ENST ID: ENST00000450629
  CDS Start-End: 629-1258
accacctctgctgccgcgcgcctaccggagccgcttggccctagtgctttccagcggatttcccctcaggtgcggagccgggtgccggggtcccacagccaaccactaccggttcctctttcgtcagccaccggcgccggcaggacccgcgaatcccgatctccaggagcctgtaaggaggccgcccattggctcagccgcactgctgggcaggtacttccaaagctttgaggattggctgatgctctgggcgccggggctagttggcgggtaggatcacgtgcgaggggcaggccccgtctaggccccgcctccttgctgctgctgccgccgccaatcctggtccggttgcccgagttcccggaggtctctcgcgggacctctctcaccgccaccgctcctactctcgggcttccaaatctggggcgatgtctccccaggttaaattaccctagctcctgctccagatcgcttccccgtgccccgccagagcccagtagttcaaaaattaaatttggggcaaggggtgcgcgccagagcgcagctgtttctggagcctgcggcagcggtggcgagccacagggcggcgaccgtgagctccgggagctgcgcaaaccacctggagaccatgtctggggatgcgaccaggaccctggggaaaggaagccagcccccagggccagtcccggaggggctgatccgcatctacagcatgaggttctgcccctattctcacaggacccgcctcgtcctcaaggccaaagacatcagacatgaagtggtcaacattaacctgagaaacaagcctgaatggtactatacaaagcacccttttggccacattcctgtcctggagaccagccaatgtcaactgatctatgaatctgttattgcttgtgagtacctggatgatgcttatccaggaaggaagctgtttccatatgacccttatgaacgagctcgccaaaagatgttattggagctattttgtaagattcttgagtatcagaacaccaccttctttggtggaacctgtatatccatgattgattacctcctctggccctggtttgagcggctggatgtgtatgggatactggactgtgtgagccacacgccagccctgcggctctggatatcagccatgaagtgggaccccacagtctgtgctcttctcatggataagagcattttccagggcttcttgaatctctattttcagaacaaccctaatgcctttgactttgggctgtgctgagtctcactgtccaccccttcgctgtccagaattccccagcttgttgggagtctacgtcacggcttgtcttgggaaccaatccgtctctctttcttttctttgaagttcccaataaaatgaaaacaggaaatgt

SEQ ID NO: 137832 - DNA, 700 bp, Homo sapiens
  Payload ID: 6994
  Gene Symbol: GSTP1
  Gene Name: glutathione S-transferase pi 1
  ENST ID: ENST00000398603
  CDS Start-End: 103-627
gccgtgactcagcactggggcggagcggggcgggaccacccttataaggctcggaggccgcgaggccttcgctggagtttcgccgccgcagtcttcgccaccatgccgccctacaccgtggtctatttcccagttcgaggccgctgcgcggccctgcgcatgctgctggcagatcagggccagagctggaaggaggaggtggtgaccgtggagacgtggcaggagggctcactcaaagcctcctgcctatacgggcagctccccaagttccaggacggagacctcaccctgtaccagtccaataccatcctgcgtcacctgggccgcacccttgggctctatgggaaggaccagcaggaggcagccctggtggacatggtgaatgacggcgtggaggacctccgctgcaaatacatctccctcatctacaccaactatatctccttcgctgactacaacctgctggacttgctgctgatccatgaggtcctagcccctggctgcctggatgcgttccccctgctctcagcatatgtggggcgcctcagtgcccggcccaagctcaaggccttcctggcctcccctgagtacgtgaacctccccatcaatggcaacgggaaacagtgagggttggggggactctgagcgggaggcagagtttgccttcctttctccaggaccaataaaatttctaagagag

SEQ ID NO: 137833 - DNA, 965 bp, Homo sapiens
  Payload ID: 6994
  Gene Symbol: GSTP1
  Gene Name: glutathione S-transferase pi 1
  Uniprot ID: P09211
  ENST ID: ENST00000398606
  CDS Start-End: 250-882
tgggaaagagggaaaggcttccccggccagctgcgcggcgactccggggactccagggcgcccctctgcggccgacgcccggggtgcagcggccgccggggctggggccggcgggagtccgcgggaccctccagaagagcggccggcgccgtgactcagcactggggcggagcggggcgggaccacccttataaggctcggaggccgcgaggccttcgctggagtttcgccgccgcagtcttcgccaccatgccgccctacaccgtggtctatttcccagttcgaggccgctgcgcggccctgcgcatgctgctggcagatcagggccagagctggaaggaggaggtggtgaccgtggagacgtggcaggagggctcactcaaagcctcctgcctatacgggcagctccccaagttccaggacggagacctcaccctgtaccagtccaataccatcctgcgtcacctgggccgcacccttgggctctatgggaaggaccagcaggaggcagccctggtggacatggtgaatgacggcgtggaggacctccgctgcaaatacatctccctcatctacaccaactatgaggcgggcaaggatgactatgtgaaggcactgcccgggcaactgaagccttttgagaccctgctgtcccagaaccagggaggcaagaccttcattgtgggagaccagatctccttcgctgactacaacctgctggacttgctgctgatccatgaggtcctagcccctggctgcctggatgcgttccccctgctctcagcatatgtggggcgcctcagtgcccggcccaagctcaaggccttcctggcctcccctgagtacgtgaacctccccatcaatggcaacgggaaacagtgagggttggggggactctgagcgggaggcagagtttgccttcctttctccaggaccaataaaatttctaagagagctactatgag

SEQ ID NO: 137834 - DNA, 221 bp, Homo sapiens
  Payload ID: 6994
  Gene Symbol: GSTP1
  Gene Name: glutathione S-transferase pi 1
  ENST ID: ENST00000495996
  CDS Start-End: 1-210
gaggcgggcaaggatgactatgtgaaggcactgcccgggcaactgaagccttttgagaccctgctgtcccagaaccagggaggcaagaccttcattgtgggagaccaggtgagcatctggccccatgctgttccttcctcgccaccctctgcttccagatggacacaggtatctccttcgctgactacaacctgctggacttgctgctgatccatgaggtc

SEQ ID NO: 137835 - DNA, 723 bp, Homo sapiens
  Payload ID: 6994
  Gene Symbol: GSTP1
  Gene Name: glutathione S-transferase pi 1
  ENST ID: ENST00000498765
  CDS Start-End: 1-239
gccgctgcgcggccctgcgcatgctgctggcagatcagggccagagctggaaggaggaggtggtgaccgtggagacgtggcaggagggctcactcaaagcctcctgcctatacgggcagctccccaagttccaggacggagacctcaccctgtaccagtccaataccatcctgcgtcacctgggccgcacccttggctggggctcacagacagccccctggttggcccatccccagtgactgtgtgttgatcaggcgcccagtcacgcggcctgctcccctccacccaaccccagggctctatgggaaggaccagcaggaggcagccctggtggacatggtgaatgacggcgtggaggacctccgctgcaaatacatctccctcatctacaccaactatgaggcgggcaaggatgactatgtgaaggcactgcccgggcaactgaagccttttgagaccctgctgtcccagaaccagggaggcaagaccttcattgtgggagaccagatctccttcgctgactacaacctgctggacttgctgctgatccatgaggtcctagcccctggctgcctggatgcgttccccctgctctcagcatatgtggggcgcctcagtgcccggcccaagctcaaggccttcctggcctcccctgagtacgtgaacctccccatcaatggcaacgggaaacagtgagggttggggggactctgagcgggaggc

SEQ ID NO: 137836 - DNA, 955 bp, Homo sapiens
  Payload ID: 6995
  Gene Symbol: GSTT1
  Gene Name: glutathione S-transferase theta 1
  ENST ID: ENST00000621513
  CDS Start-End: 37-171
ccctctggtttccggtcaggtcggtcggtccccactatgggcctggagctgtacctggacctgctgtcccagccctgccgcgctgtttacatctttgccaagaagaacgacattcccttcgagctgcgcatcgtggatctgattaaagtgtggccatcctgctctacctgacgcgcaaatataaggtccctgactactggtaccctcaggacctgcaggcccgtgcccgtgtggatgagtacctggcatggcagcacacgactctgcggagaagctgcctccgggccttgtggcataaggtgatgttccctgttttcctgggtgagccagtatctccccagacactggcagccaccctggcagagttggatgtgaccctgcagttgctcgaggacaagttcctccagaacaaggccttccttactggtcctcacatctccttagctgacctcgtagccatcacggagctgatgcatcccgtgggtgctggctgccaagtcttcgaaggccgacccaagctggccacatggcggcagcgcgtggaggcagcagtgggggaggacctcttccaggaggcccatgaggtcattctgaaggccaaggacttcccacctgcagaccccaccataaagcagaagctgatgccctgggtgctggccatgatccggtgagctgggaaacctcacccttgcaccgtcctcagcagtccacaaagcattttcatttctaatggcccatgggagccaggcccagaaagcaggaatggcttgcctaagacttgcccaagtcccagagcacctcacctcccgaagccaccatccccaccctgtcttccacagccgcctgaaagccacaatgagaatgatgcacactgaggccttgtgtcctttaatcactgcatttcattttgattttggataataaacctgggctcagcctgagcctctgcttctaa

SEQ ID NO: 137837 - DNA, 1060 bp, Homo sapiens
  Payload ID: 6995
  Gene Symbol: GSTT1
  Gene Name: glutathione S-transferase theta 1
  Uniprot ID: P30711
  ENST ID: ENST00000612885
  CDS Start-End: 54-776
actggagtttgctgactccctctggtttccggtcaggtcggtcggtccccactatgggcctggagctgtacctggacctgctgtcccagccctgccgcgctgtttacatctttgccaagaagaacgacattcccttcgagctgcgcatcgtggatctgattaaaggtcagcacttaagcgatgcctttgcccaggtgaaccccctcaagaaggtgccagccttgaaggacggggacttcaccttgacggagagtgtggccatcctgctctacctgacgcgcaaatataaggtccctgactactggtaccctcaggacctgcaggcccgtgcccgtgtggatgagtacctggcatggcagcacacgactctgcggagaagctgcctccgggccttgtggcataaggtgatgttccctgttttcctgggtgagccagtatctccccagacactggcagccaccctggcagagttggatgtgaccctgcagttgctcgaggacaagttcctccagaacaaggccttccttactggtcctcacatctccttagctgacctcgtagccatcacggagctgatgcatcccgtgggtgctggctgccaagtcttcgaaggccgacccaagctggccacatggcggcagcgcgtggaggcagcagtgggggaggacctcttccaggaggcccatgaggtcattctgaaggccaaggacttcccacctgcagaccccaccataaagcagaagctgatgccctgggtgctggccatgatccggtgagctgggaaacctcacccttgcaccgtcctcagcagtccacaaagcattttcatttctaatggcccatgggagccaggcccagaaagcaggaatggcttgcctaagacttgcccaagtcccagagcacctcacctcccgaagccaccatccccaccctgtcttccacagccgcctgaaagccacaatgagaatgatgcacactgaggccttgtgtcctttaatcactgcatttcattttgattttggataataaacctgggctcagcctgagcctctgcttctaa

SEQ ID NO: 137838 - DNA, 559 bp, Homo sapiens
  Payload ID: 6995
  Gene Symbol: GSTT1
  Gene Name: glutathione S-transferase theta 1
  ENST ID: ENST00000628417
  CDS Start-End: 365-559
agtgttgagccaagaggatggactttggagccagactttctgggtctataatcattcagtgtctgtctcctcctctaaaatgcggacggtgggaaattctgacacacgcttcaacacagatgcaccttgaagacattatgctaagtgaaatgagcgagccaggcacgaaagggatgggactggggcctctctgtgcgtccccctgagagacaacggtctcttggccacccaccctgatcccacaggagccaggcgggcccagccctgagacaggccgcccgccgcccgcaattggactaaagagtgtcccaggcgtccgtgccgcccaatggggcacagcggtcggggtcggtcggtccccactatgggcctggagctgtacctggacctgctgtcccagccctgccgcgctgtttacatctttgccaagaagaacgacattcccttcgagctgcgcatcgtggatctgattaaaggtcagcacttaagcgatgcctttgcccaggtgaaccccctcaagaaggtgccagccttgaaggacggggacttcaccttgacg

SEQ ID NO: 137839 - DNA, 617 bp, Homo sapiens
  Payload ID: 6995
  Gene Symbol: GSTT1
  Gene Name: glutathione S-transferase theta 1
  ENST ID: ENST00000629554
  CDS Start-End: 35-172
ctctggtttccggtcaggtcggtcggtccccactatgggcctggagctgtacctggacctgctgtcccagccctgccgcgctgtttacatctttgccaagaagaacgacattcccttcgagctgcgcatcgtggatctgattaaaggtgatgttccctgttttcctgggtgagccagtatctccccagacactggcagccaccctggcagagttggatgtgaccctgcagttgctcgaggacaagttcctccagaacaaggccttccttactggtcctcacatctccttagctgacctcgtagccatcacggagctgatgcatcccgtgggtgctggctgccaagtcttcgaaggccgacccaagctggccacatggcggcagcgcgtggaggcagcagtgggggaggacctcttccaggaggcccatgaggtcattctgaaggccaaggacttcccacctgcagaccccaccataaagcagaagctgatgccctgggtgctggccatgatccggtgagctgggaaacctcacccttgcaccgtcctcagcagtccacaaagcattttcatttctaatggcccatgggagccaggcccagaaagcaggaatggcttg

SEQ ID NO: 137840 - DNA, 974 bp, Homo sapiens
  Payload ID: 6995
  Gene Symbol: GSTT1
  Gene Name: glutathione S-transferase theta 1
  ENST ID: ENST00000628171
  CDS Start-End: 29-322
tttccggtcaggtcggtcggtccccactatgggcctggagctgtacctggacctgctgtcccagccctgccgcgctgtttacatctttgccaagaagaacgacattcccttcgagctgcgcatcgtggatctgattaaaggtcagcacttaagcgatgcctttgcccaggtgaaccccctcaagaaggtgccagccttgaaggacggggacttcaccttgacggagaggacctgcaggcccgtgcccgtgtggatgagtacctggcatggcagcacacgactctgcggagaagctgcctccgggccttgtggcataaggtgatgttccctgttttcctgggtgagccagtatctccccagacactggcagccaccctggcagagttggatgtgaccctgcagttgctcgaggacaagttcctccagaacaaggccttccttactggtcctcacatctccttagctgacctcgtagccatcacggagctgatgcatcccgtgggtgctggctgccaagtcttcgaaggccgacccaagctggccacatggcggcagcgcgtggaggcagcagtgggggaggacctcttccaggaggcccatgaggtcattctgaaggccaaggacttcccacctgcagaccccaccataaagcagaagctgatgccctgggtgctggccatgatccggtgagctgggaaacctcacccttgcaccgtcctcagcagtccacaaagcattttcatttctaatggcccatgggagccaggcccagaaagcaggaatggcttgcctaagacttgcccaagtcccagagcacctcacctcccgaagccaccatccccaccctgtcttccacagccgcctgaaagccacaatgagaatgatgcacactgaggccttgtgtcctttaatcactgcatttcattttgattttggataataaacctgggctcagcctgagcctctgcttctaa

SEQ ID NO: 137841 - DNA, 218 bp, Homo sapiens
  Payload ID: 6995
  Gene Symbol: GSTT1
  Gene Name: glutathione S-transferase theta 1
  ENST ID: ENST00000627958
  CDS Start-End: 22-218
tcaggtcggtcggtccccactatgggcctggagctgtacctggacctgctgtcccagccctgccgcgctgtttacatctttgccaagaagaacgacattcccttcgagctgcgcatcgtggatctgattaaagcccgtgggtgctggctgccaagtcttcgaaggccgacccaagctggccacatggcggcagcgcgtggaggcagcagtgggggagg

SEQ ID NO: 137842 - DNA, 485 bp, Homo sapiens
  Payload ID: 6995
  Gene Symbol: GSTT1
  Gene Name: glutathione S-transferase theta 1
  ENST ID: ENST00000630428
  CDS Start-End: 22-162
tcaggtcggtcggtccccactatgggcctggagctgtacctggacctgctgtcccagccctgccgcgctgtttacatctttgccaagaagaacgacattcccttcgagctgcgcatcgtggatctgattaaaggacctgcaggcccgtgcccgtgtggatgagtacctggcatggcagcacacgactctgcggagaagctgcctccgggccttgtggcataaggtgatgttccctgttttcctgggtgagccagtatctccccagacactggcagccaccctggcagagttggatgtgaccctgcagttgctcgaggacaagttcctccagaacaaggccttccttactggtcctcacatctccttagctgacctcgtagccatcacggagctgatgcatcccgtgggtgctggctgccaagtcttcgaaggccgacccaagctggccacatggcggcagcgcgtggaggcagcagtgggggagg

SEQ ID NO: 137843 - DNA, 584 bp, Homo sapiens
  Payload ID: 6995
  Gene Symbol: GSTT1
  Gene Name: glutathione S-transferase theta 1
  ENST ID: ENST00000628465
  CDS Start-End: 41-385
gactccctctggtttccggtcaggtcggtcggtccccactatgggcctggagctgtacctggacctgctgtcccagccctgccgcgctgtttacatctttgccaagaagaacgacattcccttcgagctgcgcatcgtggatctgattaaagacggagtctcgctctgtcgcccaggctggagtgcagtggcaggatcacagctcactgcaacctctgccgcccgaaaccttgtcctctgcctcttgttcctgctggggaggtcagcacttaagcgatgcctttgcccaggtgaaccccctcaagaaggtgccagccttgaaggacggggacttcaccttgacggagagtgtggccatcctgctctacctgacgcgcaaatataaggtccctgactactggtaccctcaggacctgcaggcccgtgcccgtgtggatgagtacctggcatggcagcacacgactctgcggagaagctgcctccgggccttgtggcataaggtgatgttccctgttttcctgggtgagccagtatctccccagacactggcagccaccctggcagagttggatgtgaccctgcag

SEQ ID NO: 137844 - DNA, 348 bp, Homo sapiens
  Payload ID: 6995
  Gene Symbol: GSTT1
  Gene Name: glutathione S-transferase theta 1
  ENST ID: ENST00000628470
  CDS Start-End: 18-335
gtcggtcggtccccactatgggcctggagctgtacctggacctgctgtcccagccctgccgcgctgtttacatctttgccaagaagaacgacattcccttcgagctgcgcatcgtggatctgattaaaggtcagcacttaagcgatgcctttgcccaggtgaaccccctcaagaaggtgccagccttgaaggacggggacttcaccttgacggagagcccgtgggtgctggctgccaagtcttcgaaggccgacccaagctggccacatggcggcagcgcgtggaggcagcagtgggggaggacctcttccaggaggcccatgaggtcattctgaaggccaaggactt

SEQ ID NO: 137845 - DNA, 726 bp, Homo sapiens
  Payload ID: 6995
  Gene Symbol: GSTT1
  Gene Name: glutathione S-transferase theta 1
  ENST ID: ENST00000628969
  CDS Start-End: 16-696
cggtcggtccccactatgggcctggagctgtacctggacctgctgtcccagccctgccgcgctgtttacatctttgccaagaagaacgacattcccttcgagctgcgcatcgtggatctgattaaagacggagtctcgctctgtcgcccaggctggagtgcagtggcaggatcacagctcactgcaacctctgccgcccgaaaccttgtcctctgcctcttgttcctgctggggaggtcagcacttaagcgatgcctttgcccaggtgaaccccctcaagaaggtgccagccttgaaggacggggacttcaccttgacggagaggtgatgttccctgttttcctgggtgagccagtatctccccagacactggcagccaccctggcagagttggatgtgaccctgcagttgctcgaggacaagttcctccagaacaaggccttccttactggtcctcacatctccttagctgacctcgtagccatcacggagctgatgcatcccgtgggtgctggctgccaagtcttcgaaggccgacccaagctggccacatggcggcagcgcgtggaggcagcagtgggggaggacctcttccaggaggcccatgaggtcattctgaaggccaaggacttcccacctgcagaccccaccataaagcagaagctgatgccctgggtgctggccatgatccggtgagctgggaaacctcacccttgcaccgtcctc

SEQ ID NO: 137846 - DNA, 937 bp, Homo sapiens
  Payload ID: 6996
  Gene Symbol: GSTT2
  Gene Name: glutathione S-transferase theta 2 (gene/pseudogene)
  ENST ID: ENST00000402588
  CDS Start-End: 141-833
gtgcgctccaattgggtgctgtccccagggggtggggcctgatcccctatttcccggcgcgccgggatcctgccacagctgctgcccacaccgcgctcagcgccttcactgccatccccgctgtccttgccgcccccgccatgggcctagagctgtttcttgacctggtgtcccagcccagccgcgccgtctacatcttcgccaagaagaatggcatccccttagagctgcgcaccgtggatttggtcaaagggcagcacaagagcaaggagttcttgcagatcaacagcctggggaaactgccgacgctcaaggatggtgatttcatcttgaccgaaagctcggccatcctgatttacctgagctgtaagtaccagacgccggaccactggtatccatctgacctgcaggctcgtgcccgtgttcatgagtacctgggctggcatgccgactgcatccgtggcacctttggtatacccctgtgggtccagatgttggggccactcattggggtccaggtgcccgaggagaaggtggaacgcaacaggactgccatggaccaggccctgcaatggctggaggacaagttcctgggggacaggcccttcctcgctggccagcagccggtggctctcggctatgaactgtttgagggacggccacgactggcagcatggcgtggatgagtggaggctttcctgggtgctgagctatgccaggaggcccacagcatcatcttgagcatcctggaacaggcggccaagaaaaccctcccaacaccctcaccagaggcctatcaggctatgctgcttcgaatcgccaggatcccctgaagggtctgggatgggggccaggagattagcaacaaggattcattctgttacttacttgcccctttttatctttccctcttgccccagtcccttctctccagctt

SEQ ID NO: 137847 - DNA, 1094 bp, Homo sapiens
  Payload ID: 6996
  Gene Symbol: GSTT2
  Gene Name: glutathione S-transferase theta 2 (gene/pseudogene)
  Uniprot ID: P0CG29
  ENST ID: ENST00000618279
  CDS Start-End: 51-785
ccgcgctcagcgccttcactgccatccccgctgtccttgccgcccccgccatgggcctagagctgtttcttgacctggtgtcccagcccagccgcgccgtctacatcttcgccaagaagaatggcatccccttagagctgcgcaccgtggatttggtcaaagggcagcacaagagcaaggagttcttgcagatcaacagcctggggaaactgccgacgctcaaggatggtgatttcatcttgaccgaaagctcggccatcctgatttacctgagctgtaagtaccagacgccggaccactggtatccatctgacctgcaggctcgtgcccgtgttcatgagtacctgggctggcatgccgactgcatccgtggcacctttggtatacccctgtgggtccaggtgttggggccactcattggggtccaggtgcccaaggagaaggtggaacgcaacaggactgccatggaccaggccctgcaatggctggaggacaagttcctgggggacaggcccttcctcgctggccagcaggtgacactggctgatctcatggccctggaggagctgatgcagccggtggctctcggctatgaactgtttgagggacggccacgactggcagcatggcgtggacgagtggaggctttcctgggtgctgagctatgccaggaggcccacagcatcatcttgagcatcctggaacaggcggccaagaaaaccctcccaacaccctcaccagaggcctatcaggctatgctgcttcgaatcgccaggatcccctgaagggtctgggatgggggccaggagattagcaacaaggattcattctgttacttacttgcccctttttatctttccctcttgccccagtcccttctctccagcttcatgtgaagctctgcacagacaagacactcagtgtccttggcagtgctgctactcctcaggtgcagcatacataaccagtaagagactaaatctgcaatatataaagagctcctacaaatcagtaacatgaagaacactcaaaaattggcaaatgtcatcagtgttttaaacagaataaagattccaaacactttgaatagagaa

SEQ ID NO: 137848 - DNA, 1112 bp, Homo sapiens
  Payload ID: 6996
  Gene Symbol: GSTT2
  Gene Name: glutathione S-transferase theta 2 (gene/pseudogene)
  ENST ID: ENST00000621118
  CDS Start-End: 76-807
gatcctgccacagctgctgcccacaccgcgctcagcgccttcactgccatccccgctgtccttgccgcccccgccatgggcctagagctgtttcttgacctggtgtcccagcccagccgcgccgtctacatcttcgccaagaagaatggcatccccttagagctgcgcaccgtggatttggtcaaagggcagcacaagagcaaggagttcttgcagatcaacagcctggggaaactgccgacgctcaaggatggtgatttcatcttgaccgaaagctcggccatcctgatttacctgagctgtaagtaccagacgccggaccactggtatccatctgacctgcaggctcgtgcccgtgttcatgagtacctgggctggcatgccgactgcatccgtggcacctttggtatacccctgtgggtccagatgttggggccactcattggggtccaggtgcccgaggagaaggtggaacgcaacaggactgccatggaccaggccctgcaatggctggaggacaagttcctgggggacaggcccttcctcgctggccagcaggtgacactggctgatctcatggccctggaggagctgatgcagccggtggctctcggctatgaactgtttgagggacggccacgactggcagcatggcgtggagtggaggctttcctgggtgctgagctatgccaggaggcccacagcatcatcttgagcatcctggaacaggcggccaagaaaaccctcccaacaccctcaccagaggcctatcaggctatgctgcttcgaatcgccaggatcccctgaagggtctgggatgggggccaggagattagcaacaaggattcattctgttacttacttgcccctttttatctttccctcttgccccagtcccttctctccagcttcatgtgaagctctgcacagacaagacactcagtgtccttggcagtgctgctactcctcaggtgcagcatacataaccagtaagagactaaatctgcaatatataaagagctcctacaaatcagtaacatgaagaacactcaaaaattggcaaatgtcatcagtgttttaaacagaataaagattccaaacactttgaatag

SEQ ID NO: 137849 - DNA, 1184 bp, Homo sapiens
  Payload ID: 6996
  Gene Symbol: GSTT2
  Gene Name: glutathione S-transferase theta 2 (gene/pseudogene)
  ENST ID: ENST00000634759
  CDS Start-End: 141-875
gtgcgctccaattgggtgctgtccccagggggtggggcctgatcccctatttcccggcgcgccgggatcctgccacagctgctgcccacaccgcgctcagcgccttcactgccatccccgctgtccttgccgcccccgccatgggcctagagctgtttcttgacctggtgtcccagcccagccgcgccgtctacatcttcgccaagaagaatggcatccccttagagctgcgcaccgtggatttggtcaaagggcagcacaagagcaaggagttcttgcagatcaacagcctggggaaactgccgacgctcaaggatggtgatttcatcttgaccgaaagctcggccatcctgatttacctgagctgtaagtaccagacgccggaccactggtatccatctgacctgcaggctcgtgcccgtgttcatgagtacctgggctggcatgccgactgcatccgtggcacctttggtatacccctgtgggtccagatgttggggccactcattggggtccaggtgcccgaggagaaggtggaacgcaacaggactgccatggaccaggccctgcaatggctggaggacaagttcctgggggacaggcccttcctcgctggccagcaggtgacactggctgatctcatggccctggaggagctgatgcagccggtggctctcggctatgaactgtttgagggacggccacgactggcagcatggcgtggatgagtggaggctttcctgggtgctgagctatgccaggaggcccacagcatcatcttgagcatcctggaacaggcggccaagaaaaccctcccaacaccctcaccagaggcctatcaggctatgctgcttcgaatcgccaggatcccctgaagggtctgggatgggggccaggagattagcaacaaggattcattctgttacttacttgcccctttttatctttccctcttgccccagtcccttctctccagcttcatgtgaagctctgcacagacaagacactcagtgtccttggcagtgctgctactcctcaggtgcagcatacataaccagtaagagactaaatctgcaatatataaagagctcctacaaatcagtaacatgaagaacactcaaaaattggcaaatgtcatcagtgttttaaacagaataaagattccaaacactttgaatagagaa

SEQ ID NO: 137850 - DNA, 1099 bp, Homo sapiens
  Payload ID: 6997
  Gene Symbol: GSTT2B
  Gene Name: glutathione S-transferase theta 2B (gene/pseudogene)
  Uniprot ID: P0CG30
  ENST ID: ENST00000290765
  CDS Start-End: 56-790
ccacaccgcgctcagcgccttcactgccatccccgctgtccttgccgcccccgccatgggcctagagctgtttcttgacctggtgtcccagcccagccgcgccgtctacatcttcgccaagaagaatggcatccccttagagctgcgcaccgtggatttggtcaaagggcagcacaagagcaaggagttcttgcagatcaacagcctggggaaactgccgacgctcaaggatggtgatttcatcttgaccgaaagctcggccatcctgatttacctgagctgtaagtaccagacgccggaccactggtatccatctgacctgcaggctcgtgcccgtgttcatgagtacctgggctggcatgccgactgcatccgtggcacctttggtatacccctgtgggtccaggtgttggggccactcattggggtccaggtgcccgaggagaaggtggaacgcaacaggactgccatggaccaggccctgcaatggctggaggacaagttcctgggggacaggcccttcctcgctggccagcaggtgacactggctgatctcatggccctggaggagctgatgcagccggtggctctcggctatgaactgtttgagggacggccacgactggcagcatggcgtggacgagtggaggctttcctgggtgctgagctatgccaggaggcccacagcatcatcttgagcatcctggaacaggcggccaagaaaaccctcccaacaccctcaccagaggcctatcaggctatgctgcttcgaatcgccaggatcccctgaagggtctgggatgggggccaggagattagcaacaaggattcattctgttacttacttgcccctttttatctttccctcttgccccagtcccttctctccagcttcatgtgaagctctgcacagacaagacactcagtgtccttggcagtgctgctactcctcaggtgcagcatacataaccagtaagagactaaatctgcaatatataaagagctcctacaaatcagtaacatgaagaacactcaaaaattggcaaatgtcatcagtgttttaaacagaataaagattccaaacactttgaatagagaa

SEQ ID NO: 137851 - DNA, 819 bp, Homo sapiens
  Payload ID: 6997
  Gene Symbol: GSTT2B
  Gene Name: glutathione S-transferase theta 2B (gene/pseudogene)
  ENST ID: ENST00000404172
  CDS Start-End: 23-715
cgctgtccttgccgcccccgccatgggcctagagctgtttcttgacctggtgtcccagcccagccgcgccgtctacatcttcgccaagaagaatggcatccccttagagctgcgcaccgtggatttggtcaaagggcagcacaagagcaaggagttcttgcagatcaacagcctggggaaactgccgacgctcaaggatggtgatttcatcttgaccgaaagctcggccatcctgatttacctgagctgtaagtaccagacgccggaccactggtatccatctgacctgcaggctcgtgcccgtgttcatgagtacctgggctggcatgccgactgcatccgtggcacctttggtatacccctgtgggtccaggtgttggggccactcattggggtccaggtgcccgaggagaaggtggaacgcaacaggactgccatggaccaggccctgcaatggctggaggacaagttcctgggggacaggcccttcctcgctggccagcagccggtggctctcggctatgaactgtttgagggacggccacgactggcagcatggcgtggacgagtggaggctttcctgggtgctgagctatgccaggaggcccacagcatcatcttgagcatcctggaacaggcggccaagaaaaccctcccaacaccctcaccagaggcctatcaggctatgctgcttcgaatcgccaggatcccctgaagggtctgggatgggggccaggagattagcaacaaggattcattctgttacttacttgcccctttttatctttccctcttgccccagtcccttctctccagctt

SEQ ID NO: 137852 - DNA, 1115 bp, Homo sapiens
  Payload ID: 6997
  Gene Symbol: GSTT2B
  Gene Name: glutathione S-transferase theta 2B (gene/pseudogene)
  ENST ID: ENST00000616938
  CDS Start-End: 76-810
gatcctgccacagctgctgcccacaccgcgctcagcgccttcactgccatccccgctgtccttgccgcccccgccatgggcctagagctgtttcttgacctggtgtcccagcccagccgcgccgtctacatcttcgccaagaagaatggcatccccttagagctgcgcaccgtggatttggtcaaagggcagcacaagagcaaggagttcttgcagatcaacagcctggggaaactgccgacgctcaaggatggtgatttcatcttgactgaaagctcggccatcctgatttacctgagctgtaagtaccagacgccggaccactggtatccatctgacctgcaggctcgtgcccgtgttcatgagtacctgggctggcatgccgactgcatccgtggcacctttggtatacccctgtgggtccaggtgttggggcccctcattggggtccaggtgcccgaggagaaggtggaacgcaacaggactgccatggaccaggccctgcaatggctggaggacaagttcctgggggacaggcccttcctcgctggccagcaggtgacactggctgatctcatggccctggaggagctgatgcagccggtggctctcggctatgaactgtttgagggacggccacgactggcagcatggcgtggacgagtggaggctttcctgggtgctgagctatgccaggaggcccacagcatcatcttgagcatcctggaacaggcggccaagaaaaccctcccaacaccctcaccagaggcctatcaggctatgctgcttcgaatcgccaggatcccctgaagggtctgggatgggggccaggagattagcaacaaggattcattctgttacttacttgcccctttttatctttccctcttgccccagtcccttctctccagcttcatgtgaagctctgcacagacaagacactcagtgtccttggcagtgctgctactcctcaggtgcagcatacataaccagtaagagactaaatctgcaatatataaagagctcctacaaatcagtaacatgaagaacactcaaaaattggcaaatgtcatcagtgttttaaacagaataaagattccaaacactttgaatag

SEQ ID NO: 137853 - DNA, 1338 bp, Homo sapiens
  Payload ID: 6998
  Gene Symbol: GSTZ1
  Gene Name: glutathione S-transferase zeta 1
  ENST ID: ENST00000216465
  CDS Start-End: 286-936
agagcatgtcgggaccgggagggccggccggcccggggcgggggggactgggcaggaggggtcgggctcagggaactgcaactcccagcagcccccaggtacggggcgtggcgggagagctgggcgagccagaggcgaccggaaggatctttctagtccagcccctcgctttacccggacgaaagacacgggcctgattcgtcgagtctcactgagccttagtcgtcggcaggtcccaggcgcgaagtttctcggcctggaggagggggtcgcgcgaagtgccagatgcaggcggggaagcccatcctctattcctatttccgaagctcctgctcatggagagttcgaattgctctggccttgaaaggcatcgactacgagacggtgcccatcaatctcataaaggatgggggccaacagttttctaaggacttccaggcactgaatcctatgaagcaggtgccaaccctgaagattgatggaatcaccattcaccagtcactggccatcattgagtatctagaggagatgcgtcccactccgcgacttctgcctcaggacccaaagaagagggccagcgtgcgtatgatttctgacctcatcgctggtggcatccagcccctgcagaacctgtctgtcctgaagcaagtgggagaggagatgcagctgacctgggcccagaacgccatcacttgtggctttaacgccctggagcagatcctacagagcacagcgggcatatactgtgtaggagacgaggtgaccatggctgatctgtgcttggtgcctcaggtggcaaatgctgaaagattcaaggtggatctcaccccctaccctaccatcagctccatcaacaagaggctgctggtcttggaggccttccaggtgtctcacccctgccggcagccagatacacccactgagctgagggcctagctcccaaatcctgccccgttggcacagggccacaggagcagaagctgggtgggctgaagaggcctggaaacgagagtcttaattgaggagatgggagactcgaactctagccctggatctgccttcctgctgaaacttgttccacctcagtcccctcatctgtcacacgcatgtggggtggagtagggagatgcggggagcagggtgggcaggaatactgttatctatgtgacggggcagtcgtgaggctgagatgagaatgcggattaaaatgcctggcgtgctcaccgtaacaccacggggaaggctgtgtgccttttctcatccgcttttgttgtgtgtgactccaaagaatgcccgcgctgaaatttggcgtgaattaaactgaagcccaggcctcta

SEQ ID NO: 137854 - DNA, 867 bp, Homo sapiens
  Payload ID: 6998
  Gene Symbol: GSTZ1
  Gene Name: glutathione S-transferase zeta 1
  ENST ID: ENST00000349555
  CDS Start-End: 145-669
gaaggatctttctagtccagcccctcgctttacccggacgaaagacacgggcctgattcgtcgagtctcactgagccttagtcgtcggcaggtcccaggcgcgaagtttctcggcctggaggagggggtcgcgcgaagtgccagatgcaggcggggaagcccatcctctattcctatttccgaagctcctgctcatggagagttcgaattgctctggccttgaaaggcatcgactacgagacggtgcccatcaatctcataaaggatgggggccaacagttttctaaggacttccaggcactgaatcctatgaagcaggtgccaaccctgaagattgatggaatcaccattcaccagtcaaacctgtctgtcctgaagcaagtgggagaggagatgcagctgacctgggcccagaacgccatcacttgtggctttaacgccctggagcagatcctacagagcacagcgggcatatactgtgtaggagacgaggtgaccatggctgatctgtgcttggtgcctcaggtggcaaatgctgaaagattcaaggtggatctcaccccctaccctaccatcagctccatcaacaagaggctgctggtcttggaggccttccaggtgtctcacccctgccggcagccagatacacccactgagctgagggcctagctcccaaatcctgccccgttggcacagggccacaggagcagaagctgggtgggctgaagaggcctggaaacgagagtcttaattgaggagatgggagactcgaactctagccctggatctgccttcctgctgaaacttgttccacctcagtcccctcatctgtcacacgcatgtggggtggagtagggagatgcgggg

SEQ ID NO: 137855 - DNA, 1010 bp, Homo sapiens
  Payload ID: 6998
  Gene Symbol: GSTZ1
  Gene Name: glutathione S-transferase zeta 1
  Uniprot ID: O43708
  ENST ID: ENST00000361389
  CDS Start-End: 525-1010
gggagagctgggcgagccagaggcgaccggaaggatctttctagtccagcccctcgctttacccggacgaaagacacgggcctgattcgtcgagtctcactgagccttagtcgtcggcaggtcccaggcgcgaagtttctcggcctggaggagggggtcgcgcgaagtgccagatgcaggcggggaagtggtcaccagcagtccctgtcccttggcaccaggagtccctgtagcctggctaggtaaggaaagggagttgcatctccaaataaggaagatccagttgtggccacccaattcctcctcttcgaaagacactttctgcccatcacctgctttctgtgccaggaccatctttactttctccacaaaagcccatcctctattcctatttccgaagctcctgctcatggagagttcgaattgctctggccttgaaaggcatcgactacgagacggtgcccatcaatctcataaaggatgggggccaacagttttctaaggacttccaggcactgaatcctatgaagcaggtgccaaccctgaagattgatggaatcaccattcaccagtcactggccatcattgagtatctagaggagatgcgtcccactccgcgacttctgcctcaggacccaaagaagagggccagcgtgcgtatgatttctgacctcatcgctggtggcatccagcccctgcagaacctgtctgtcctgaagcaagtgggagaggagatgcagctgacctgggcccagaacgccatcacttgtggctttaacgccctggagcagatcctacagagcacagcgggcatatactgtgtaggagacgaggtgaccatggctgatctgtgcttggtgcctcaggtggcaaatgctgaaagattcaaggtggatctcaccccctaccctaccatcagctccatcaacaagaggctgctggtcttggaggccttccaggtgtctcacccctgccggcagccagatacacccactgagctgagggcctag

SEQ ID NO: 137856 - DNA, 1424 bp, Homo sapiens
  Payload ID: 6998
  Gene Symbol: GSTZ1
  Gene Name: glutathione S-transferase zeta 1
  Uniprot ID: O43708
  ENST ID: ENST00000393734
  CDS Start-End: 538-1023
ccgggagggttgggccagaggaggcggtcctggtagggagtgcgtagcagggtggagtcgctgtccggtcgcgcttcacttctgctccgccctccctgctccccataacagacccctccctccactaaggcttccaaacgtcgccccaagcctcccaatttctcgcagcccttcatgctcttctcttggccctagcaggagtggtcaccagcagtccctgtcccttggcaccaggagtccctgtagcctggctaggtaaggaaagggagttgcatctccaaataaggaagatccagttgtggccacccaattcctcctcttcgaaagacactttctgcccatcacctgctttctgtgccaggaccatctttactttctccacaaaagcccatcctctattcctatttccgaagctcctgctcatggagagttcgaattgctctggccttgaaaggcatcgactacgagacggtgcccatcaatctcataaaggatgggggccaacagttttctaaggacttccaggcactgaatcctatgaagcaggtgccaaccctgaagattgatggaatcaccattcaccagtcactggccatcattgagtatctagaggagatgcgtcccactccgcgacttctgcctcaggacccaaagaagagggccagcgtgcgtatgatttctgacctcatcgctggtggcatccagcccctgcagaacctgtctgtcctgaagcaagtgggagaggagatgcagctgacctgggcccagaacgccatcacttgtggctttaacgccctggagcagatcctacagagcacagcgggcatatactgtgtaggagacgaggtgaccatggctgatctgtgcttggtgcctcaggtggcaaatgctgaaagattcaaggtggatctcaccccctaccctaccatcagctccatcaacaagaggctgctggtcttggaggccttccaggtgtctcacccctgccggcagccagatacacccactgagctgagggcctagctcccaaatcctgccccgttggcacagggccacaggagcagaagctgggtgggctgaagaggcctggaaacgagagtcttaattgaggagatgggagactcgaactctagccctggatctgccttcctgctgaaacttgttccacctcagtcccctcatctgtcacacgcatgtggggtggagtagggagatgcggggagcagggtgggcaggaatactgttatctatgtgacggggcagtcgtgaggctgagatgagaatgcggattaaaatgcctggcgtgctcaccgtaacaccacggggaaggctgtgtgccttttctcatccgcttttgttgtgtgtgactccaaagaatgcccgcgctgaaatttggcgtgaattaaactgaagcccaggcctct

SEQ ID NO: 137857 - DNA, 919 bp, Homo sapiens
  Payload ID: 6998
  Gene Symbol: GSTZ1
  Gene Name: glutathione S-transferase zeta 1
  ENST ID: ENST00000556627
  CDS Start-End: 132-701
agtccagcccctcgctttacccggacgaaagacacgggcctgattcgtcgagtctcactgagccttagtcgtcggcaggtcccaggcgcgaagtttctcggcctggaggagggggtcgcgcgaagtgccagatgcaggcggggaagcccatcctctattcctatttccgaagctcctgctcatggagagttcgaattgctctggccttgaaaggcatcgactacgagacggtgcccatcaatctcataaaggatgggggccaacagctggccatcattgagtatctagaggagatgcgtcccactccgcgacttctgcctcaggacccaaagaagagggccagcgtgcgtatgatttctgacctcatcgctggtggcatccagcccctgcagaacctgtctgtcctgaagcaagtgggagaggagatgcagctgacctgggcccagaacgccatcacttgtggctttaacgccctggagcagatcctacagagcacagcgggcatatactgtgtaggagacgaggtgaccatggctgatctgtgcttggtgcctcaggtggcaaatgctgaaagattcaaggtggatctcaccccctaccctaccatcagctccatcaacaagaggctgctggtcttggaggccttccaggtgtctcacccctgccggcagccagatacacccactgagctgagggcctagctcccaaatcctgccccgttggcacagggccacaggagcagaagctgggtgggctgaagaggcctggaaacgagagtcttaattgaggagatgggagactcgaactctagccctggatctgccttcctgctgaaacttgttccacctcagtcccctcatctgtcacacgcatgtggggtggagtagggagatgcggggagcagggtgggcaggaatac

SEQ ID NO: 137858 - DNA, 580 bp, Homo sapiens
  Payload ID: 6998
  Gene Symbol: GSTZ1
  Gene Name: glutathione S-transferase zeta 1
  ENST ID: ENST00000557053
  CDS Start-End: 205-564
tgattcgtcgagtctcactgagccttagtcgtcggcaggtcccaggcgcgaagtttctcggcctggaggagggggtcgcgcgaagtgccagatgcaggcggggaagctctggccttgaaaggcatcgactacgagacggtgcccatcaatctcataaaggatgggggccaacagttttctaaggacttccaggcactgaatcctatgaagcaggtgccaaccctgaagattgatggaatcaccattcaccagtcaaacctgtctgtcctgaagcaagtgggagaggagatgcagctgacctgggcccagaacgccatcacttgtggctttaacgccctggagcagatcctacagagcacagcgggcatatactgtgtaggagacgaggtgaccatggctgatctgtgcttggtgcctcaggtggcaaatgctgaaagattcaaggtggatctcaccccctaccctaccatcagctccatcaacaagaggctgctggtcttggaggccttccaggtgtctcacccctgccggcagccagatacacccactgagctgagggcctagctcccaaatcctgccc

SEQ ID NO: 137859 - DNA, 729 bp, Homo sapiens
  Payload ID: 6998
  Gene Symbol: GSTZ1
  Gene Name: glutathione S-transferase zeta 1
  ENST ID: ENST00000554381
  CDS Start-End: 1-213
gtgcgtatgatttctgacctcatcgctggtggcatccagcccctgcagaacctgtctgtcctgaagcaagtgggagaggagatgcagctgacctgggcccagaacgccatcacttgtggctttaacgccctggagcagatcctacagagcacagcgggcatatactgtgtaggagacgagagtcgcagtggacacacccagtccagccactgactctggggtatgcaccctgatgggaacccaccgggacctctttcaggtgaccatggctgatctgtgcttggtgcctcaggtggcaaatgctgaaagattcaaggtggatctcaccccctaccctaccatcagctccatcaacaagaggctgctggtcttggaggccttccaggtgtctcacccctgccggcagccagatacacccactgagctgagggcctagctcccaaatcctgccccgttggcacagggccacaggagcagaagctgggtgggctgaagaggcctggaaacgagagtcttaattgaggagatgggagactcgaactctagccctggatctgccttcctgctgaaacttgttccacctcagtcccctcatctgtcacacgcatgtggggtggagtagggagatgcggggagcagggtgggcaggaatactgttatctatgtgacggggcagtcgtgaggctgagatgagaatgcggattaaaatgcctggcgtgctcaccgtaa

SEQ ID NO: 137860 - DNA, 873 bp, Homo sapiens
  Payload ID: 6998
  Gene Symbol: GSTZ1
  Gene Name: glutathione S-transferase zeta 1
  Uniprot ID: O43708
  ENST ID: ENST00000557639
  CDS Start-End: 263-748
gaccggaaggatctttctagtccagcccctcgctttacccggacgaaagacacgggcctgattcgtcgagtctcactgagccttagtcgtcggcaggtcccaggcgcgaagtttctcggcctggaggagggggtcgcgcgaagtgccagatgcaggcggggaagctctggccttgaaaggcatcgactacgagacggtgcccatcaatctcataaaggatgggggccaacagttttctaaggacttccaggcactgaatcctatgaagcaggtgccaaccctgaagattgatggaatcaccattcaccagtcactggccatcattgagtatctagaggagatgcgtcccactccgcgacttctgcctcaggacccaaagaagagggccagcgtgcgtatgatttctgacctcatcgctggtggcatccagcccctgcagaacctgtctgtcctgaagcaagtgggagaggagatgcagctgacctgggcccagaacgccatcacttgtggctttaacgccctggagcagatcctacagagcacagcgggcatatactgtgtaggagacgaggtgaccatggctgatctgtgcttggtgcctcaggtggcaaatgctgaaagattcaaggtggatctcaccccctaccctaccatcagctccatcaacaagaggctgctggtcttggaggccttccaggtgtctcacccctgccggcagccagatacacccactgagctgagggcctagctcccaaatcctgccccgttggcacagggccacaggagcagaagctgggtgggctgaagaggcctggaaacgagagtcttaattgaggagatgggagactcgaactctagccctggatctgcctt

SEQ ID NO: 137861 - DNA, 979 bp, Homo sapiens
  Payload ID: 6998
  Gene Symbol: GSTZ1
  Gene Name: glutathione S-transferase zeta 1
  ENST ID: ENST00000553586
  CDS Start-End: 37-690
gacatttcctgggaggctgagggtcaccacgataccatgacagagtctggcaagcccatcctctattcctatttccgaagctcctgctcatggagagttcgaattgctctggccttgaaaggcatcgactacgagacggtgcccatcaatctcataaaggatgggggccaacagttttctaaggacttccaggcactgaatcctatgaagcaggtgccaaccctgaagattgatggaatcaccattcaccagtcactggccatcattgagtatctagaggagatgcgtcccactccgcgacttctgcctcaggacccaaagaagagggccagcgtgcgtatgatttctgacctcatcgctggtggcatccagcccctgcagaacctgtctgtcctgaagcaagtgggagaggagatgcagctgacctgggcccagaacgccatcacttgtggctttaacgccctggagcagatcctacagagcacagcgggcatatactgtgtaggagacgaggtgaccatggctgatctgtgcttggtgcctcaggtggcaaatgctgaaagattcaaggtggatctcaccccctaccctaccatcagctccatcaacaagaggctgctggtcttggaggccttccaggtgtctcacccctgccggcagccagatacacccactgagctgagggcctagctcccaaatcctgccccgttggcacagggccacaggagcagaagctgggtgggctgaagaggcctggaaacgagagtcttaattgaggagatgggagactcgaactctagccctggatctgccttcctgctgaaacttgttccacctcagtcccctcatctgtcacacgcatgtggggtggagtagggagatgcggggagcagggtgggcaggaatactgttatctatgtgacggggcagtcgtgaggctgagatgagaatgcggattaaaatgcctggcgtgctcacc

SEQ ID NO: 137862 - DNA, 564 bp, Homo sapiens
  Payload ID: 6998
  Gene Symbol: GSTZ1
  Gene Name: glutathione S-transferase zeta 1
  ENST ID: ENST00000555583
  CDS Start-End: 451-564
acatttcctgggaggctgagggtcaccacgataccatgacagagtctggcaaggtatggaaggcactctcaggctagctgcccctttgggggcctcttggacctcaggagctcaaaccagcataattttggagccaagggacctcatgagcctctcagagagcttggagtctgccctgatttgcacagatgcaggcctgagagaggaggcctggcaggacaggaagaaatggttgactcctcccaagctggagcccacccagcatgggttaacacgcgccttcatcctctctctcctcagcccatcctctattcctatttccgaagctcctgctcatggagagttcgaattgctctggccttgaaaggcatcgactacgagacggtgcccatcaatctcataaaggatgggggccaacagttttctaaggacttccaggcactgaatcctatgaagcaggtgccaaccctgaagattgatggaatcaccattcaccagtcactggccatcattgagtatctagaggagatgcgtcccactccgcgacttctgcctcaggaccca

SEQ ID NO: 137863 - DNA, 795 bp, Homo sapiens
  Payload ID: 6998
  Gene Symbol: GSTZ1
  Gene Name: glutathione S-transferase zeta 1
  ENST ID: ENST00000554279
  CDS Start-End: 155-763
gaggcgaccggaaggatctttctagtccagcccctcgctttacccggacgaaagacacgggcctgattcgtcgagtctcactgagccttagtcgtcggcaggtcccaggcgcgaagtttctcggcctggaggagggggtcgcgcgaagtgccagatgcaggcggggaagcccatcctctattcctatttccgaagctcctgctcatggagagttcgaattgctctggccttgaaaggcatcgactacgagacggtgcccatcaatctcataaaggatgggggccaacagttttctaaggacttccaggcactgaatcctatgaagcagctggccatcattgagtatctagaggagatgcgtcccactccgcgacttctgcctcaggacccaaagaagagggccagcgtgcgtatgatttctgacctcatcgctggtggcatccagcccctgcagaacctgtctgtcctgaagcaagtgggagaggagatgcagctgacctgggcccagaacgccatcacttgtggctttaacgccctggagcagatcctacagagcacagcgggcatatactgtgtaggagacgaggtgaccatggctgatctgtgcttggtgcctcaggtggcaaatgctgaaagattcaaggtggatctcaccccctaccctaccatcagctccatcaacaagaggctgctggtcttggaggccttccaggtgtctcacccctgccggcagccagatacacccactgagctgagggcctagctcccaaatcctgccccgttggcacagggcca

SEQ ID NO: 137864 - DNA, 714 bp, Homo sapiens
  Payload ID: 6998
  Gene Symbol: GSTZ1
  Gene Name: glutathione S-transferase zeta 1
  ENST ID: ENST00000554846
  CDS Start-End: 538-714
ccgggagggttgggccagaggaggcggtcctggtagggagtgcgtagcagggtggagtcgctgtccggtcgcgcttcacttctgctccgccctccctgctccccataacagacccctccctccactaaggcttccaaacgtcgccccaagcctcccaatttctcgcagcccttcatgctcttctcttggccctagcaggagtggtcaccagcagtccctgtcccttggcaccaggagtccctgtagcctggctaggtaaggaaagggagttgcatctccaaataaggaagatccagttgtggccacccaattcctcctcttcgaaagacactttctgcccatcacctgctttctgtgccaggaccatctttactttctccacaaaagcccatcctctattcctatttccgaagctcctgctcatggagagttcgaattgctctggccttgaaaggcatcgactacgagacggtgcccatcaatctcataaaggatgggggccaacagttttctaaggacttccaggcactgaatcctatgaagcaggtgccaaccctgaagattgatggaatcaccattcaccagtcactggccatcattgagtatctagaggagatgcgtcccactccgcgacttctgcctcaggacccaaagaagagggccagcgtgcgtatgatttctgacctcatcgctggtggcatccagcccctgcag

SEQ ID NO: 137865 - DNA, 2154 bp, Homo sapiens
  Payload ID: 6999
  Gene Symbol: GSTCD
  Gene Name: glutathione S-transferase, C-terminal domain containing
  Uniprot ID: Q8NEC7
  ENST ID: ENST00000360505
  CDS Start-End: 76-1977
aacagatgattccctgattctccagagagattacacacttcgtttgtggctaaggtgacccaatgaaagaagaaaatgaaagccataaagaaaagtcttacagaagaagaatacctgtacctggacttttctcaccaaacagaaggatgcatctttcctcttcatacatctgtaactttatttctgttatcttactgtgactgtaaaatctttaaaatttgcttagttgtcaccaaagaggtgagtagagatagttcactactaagagatgacctgatccaggatgttgaaatacagattatttcaaggcaggagctcccaccaatagtccaaaattgctgtttgcctgcagtagtagaacgatcagacaatttttgtagagcaggacttgctgttgtattgagacacataatccagaaatcctatgaagcagaccccttaaagaaggaacttttggaacttctgggctttaaaaagacttgcttgaaagcctgtgctgaagttagtcagtggaccaggctatgtgaactcaccatccctttggctattgagaattttctcagagaatcttctgaccagcccccaactatacctgtagaaatactacagctagagaaaaagcttagtgagcctgttagagtgcataatgatgataaactccgcaggcagaagctcaagcaacagaaggctgatggagttgggcctccccttactaagggaaaggcaaagagcaaggtccacacacaggaaacatctgaagggttggattcttcatccaagagtctggaactgaaagtggcattctcaaagctcacagtacaggaagaaccagctactaccaacagagagccttctcacatcagaaaagcaaaagcctccgaccttccacctctggagcatgtgtttgcagaagggctttacttcactctggcagatattgtgctcttgccctgtatccatcatttcttggtaattatcagcaggaaattttctgagaagctggtagaatttccattgctagcctcttggtaccagaggattcaggaagtgccaggagtaaaaacagcagcttctaagtgtgggatccaatttctccatttaccaaagttgttgacaacctcaactgaacagcatccaaacttatgtgaagtcccaggtgtagaagagcaaagcgatcctttatttataggaggaccaagaccaaccatggccaagttaatggaaaagggcattgaagtgatgttttctccccacccttgccctacttggactcttgattggaatgttctccctgcagcagtcagcccaaaggaaggtaaaatgtccagtgatcgagctttgaggaagcagcaacagttgaacaaccttgtctatgtggtaacaaatcaggccaaacctggtgacagaattgtggatttctgcagcggtgggggccatgttggaattgtccttgctcacatgctgccatcatgtcaggttacattaatagaaaacaaggaattatcattaattcgtgctaagaagagaagtgatgaactgggtttaagcaacatttggttcattcaagcaaatatggaatattttactgggatgtttaatattggagtagcattgcatgcttgtggagtggcaacagacatggtgattgagcactgtatcaaaacacgggcttccttcgtcacatgcccttgctgttatggtttcattcagaacacctcaaagttcaattttccaaaaagtgaacaattcaagaaaactttatcatacaaggaacacatgattctgtgcagatttgcagaccagacagctgtccagctcccaccccaacgaaggctcataggaaaacagtgcatgtgcttggtggatctggatcgagcaagagctgcagaagaatgtggatactccgttcaagtgatatccatggagccagagagctgctctcccaaaaataacatgattgtgggagtccccatttaaaatgagatattcacatttgatattttgccatccgtcttcacgttggatgcccagtggcattcaggaggttcttggcataactaggaaacagcattagccatcttgaacctattgtgctcaggaaggaaagcaacagggaaatcttggaagtaaaggctccctgcaaagcatcacaaa

SEQ ID NO: 137866 - DNA, 2416 bp, Homo sapiens
  Payload ID: 6999
  Gene Symbol: GSTCD
  Gene Name: glutathione S-transferase, C-terminal domain containing
  Uniprot ID: Q8NEC7
  ENST ID: ENST00000394728
  CDS Start-End: 114-2015
gtgctgaagagccattggatggttttgagcacgagacatctgatttatgtttttaaggatcaccctgttgttggagaatggactgttttatggtgacccaatgaaagaagaaaatgaaagccataaagaaaagtcttacagaagaagaatacctgtacctggacttttctcaccaaacagaaggatgcatctttcctcttcatacatctgtaactttatttctgttatcttactgtgactgtaaaatctttaaaatttgcttagttgtcaccaaagaggtgagtagagatagttcactactaagagatgacctgatccaggatgttgaaatacagattatttcaaggcaggagctcccaccaatagtccaaaattgctgtttgcctgcagtagtagaacgatcagacaatttttgtagagcaggacttgctgttgtattgagacacataatccagaaatcctatgaagcagaccccttaaagaaggaacttttggaacttctgggctttaaaaagacttgcttgaaagcctgtgctgaagttagtcagtggaccaggctatgtgaactcaccatccctttggctattgagaattttctcagagaatcttctgaccagcccccaactatacctgtagaaatactacagctagagaaaaagcttagtgagcctgttagagtgcataatgatgataaactccgcaggcagaagctcaagcaacagaaggctgatggagttgggcctccccttactaagggaaaggcaaagagcaaggtccacacacaggaaacatctgaagggttggattcttcatccaagagtctggaactgaaagtggcattctcaaagctcacagtacaggaagaaccagctactaccaacagagagccttctcacatcagaaaagcaaaagcctccgaccttccacctctggagcatgtgtttgcagaagggctttacttcactctggcagatattgtgctcttgccctgtatccatcatttcttggtaattatcagcaggaaattttctgagaagctggtagaatttccattgctagcctcttggtaccagaggattcaggaagtgccaggagtaaaaacagcagcttctaagtgtgggatccaatttctccatttaccaaagttgttgacaacctcaactgaacagcatccaaacttatgtgaagtcccaggtgtagaagagcaaagcgatcctttatttataggaggaccaagaccaaccatggccaagttaatggaaaagggcattgaagtgatgttttctccccacccttgccctacttggactcttgattggaatgttctccctgcagcagtcagcccaaaggaaggtaaaatgtccagtgatcgagctttgaggaagcagcaacagttgaacaaccttgtctatgtggtaacaaatcaggccaaacctggtgacagaattgtggatttctgcagcggtgggggccatgttggaattgtccttgctcacatgctgccatcatgtcaggttacattaatagaaaacaaggaattatcattaattcgtgctaagaagagaagtgatgaactgggtttaagcaacatttggttcattcaagcaaatatggaatattttactgggatgtttaatattggagtagcattgcatgcttgtggagtggcaacagacatggtgattgagcactgtatcaaaacacgggcttccttcgtcacatgcccttgctgttatggtttcattcagaacacctcaaagttcaattttccaaaaagtgaacaattcaagaaaactttatcatacaaggaacacatgattctgtgcagatttgcagaccagacagctgtccagctcccaccccaacgaaggctcataggaaaacagtgcatgtgcttggtggatctggatcgagcaagagctgcagaagaatgtggatactccgttcaagtgatatccatggagccagagagctgctctcccaaaaataacatgattgtgggagtccccatttaaaatgagatattcacatttgatattttgccatccgtcttcacgttggatgcccagtggcattcaggaggttcttggcataactaggaaacagcattagccatcttgaacctattgtgctcaggaaggaaagcaacagggaaatcttggaagtaaaggctccctgcaaagcatcacaaatgctttacaatgtgtgattaaaggactgctggtttttatagtgagaatcccctgaagtctcagctgccaaaagaataatactagtggaggttccatcacaggaataacaatttccttctcacttcacaagctcctctgatcttgccaatgtgatgtttaattcaaaacagcgcacttacagcctttattttatacttatttagatattcacatgggaactgaaa

SEQ ID NO: 137867 - DNA, 4043 bp, Homo sapiens
  Payload ID: 6999
  Gene Symbol: GSTCD
  Gene Name: glutathione S-transferase, C-terminal domain containing
  Uniprot ID: Q8NEC7
  ENST ID: ENST00000394730
  CDS Start-End: 255-1895
gttacttccctttttccggtccgccggattatgaatgacggccggcgcgagtattttccacataaggtggctgtcgtttttctcctggcgtctgtggaggcgagtggtctgcgggcagcagctcccagaggcagccttggaattccagctcggactgggcgggaaggcgcaggcggcccaggtcgccgacacgctcacgcaccctccctgcctggccgcgcctctgcgaccaggtgacccaatgaaagaagaaaatgaaagccataaagaaaagtcttacagaagaagaatacctgtacctggacttttctcaccaaacagaaggatgcatctttcctcttcatacatctgtaactttatttctgttatcttactgtgactgtaaaatctttaaaatttgcttagttgtcaccaaagaggttagtcagtggaccaggctatgtgaactcaccatccctttggctattgagaattttctcagagaatcttctgaccagcccccaactatacctgtagaaatactacagctagagaaaaagcttagtgagcctgttagagtgcataatgatgataaactccgcaggcagaagctcaagcaacagaaggctgatggagttgggcctccccttactaagggaaaggcaaagagcaaggtccacacacaggaaacatctgaagggttggattcttcatccaagagtctggaactgaaagtggcattctcaaagctcacagtacaggaagaaccagctactaccaacagagagccttctcacatcagaaaagcaaaagcctccgaccttccacctctggagcatgtgtttgcagaagggctttacttcactctggcagatattgtgctcttgccctgtatccatcatttcttggtaattatcagcaggaaattttctgagaagctggtagaatttccattgctagcctcttggtaccagaggattcaggaagtgccaggagtaaaaacagcagcttctaagtgtgggatccaatttctccatttaccaaagttgttgacaacctcaactgaacagcatccaaacttatgtgaagtcccaggtgtagaagagcaaagcgatcctttatttataggaggaccaagaccaaccatggccaagttaatggaaaagggcattgaagtgatgttttctccccacccttgccctacttggactcttgattggaatgttctccctgcagcagtcagcccaaaggaaggtaaaatgtccagtgatcgagctttgaggaagcagcaacagttgaacaaccttgtctatgtggtaacaaatcaggccaaacctggtgacagaattgtggatttctgcagcggtgggggccatgttggaattgtccttgctcacatgctgccatcatgtcaggttacattaatagaaaacaaggaattatcattaattcgtgctaagaagagaagtgatgaactgggtttaagcaacatttggttcattcaagcaaatatggaatattttactgggatgtttaatattggagtagcattgcatgcttgtggagtggcaacagacatggtgattgagcactgtatcaaaacacgggcttccttcgtcacatgcccttgctgttatggtttcattcagaacacctcaaagttcaattttccaaaaagtgaacaattcaagaaaactttatcatacaaggaacacatgattctgtgcagatttgcagaccagacagctgtccagctcccaccccaacgaaggctcataggaaaacagtgcatgtgcttggtggatctggatcgagcaagagctgcagaagaatgtggatactccgttcaagtgatatccatggagccagagagctgctctcccaaaaataacatgattgtgggagtccccatttaaaatgagatattcacatttgatattttgccatccgtcttcacgttggatgcccagtggcattcaggaggttcttggcataactaggaaacagcattagccatcttgaacctattgtgctcaggaaggaaagcaacagggaaatcttggaagtaaaggctccctgcaaagcatcacaaatgctttacaatgtgtgattaaaggactgctggtttttatagtgagaatcccctgaagtctcagctgccaaaagaataatactagtggaggttccatcacaggaataacaatttccttctcacttcacaagctcctctgatcttgccaatgtgatgtttaattcaaaacagcgcacttacagcctttattttatacttatttagatattcacatgggaactgaaagtagactcagtggagttttttgttttttatatttttaacaattgtactttttctatcactttaaaaaaatctagtcaggtaattatagtacagttatttttaagctggggttagttgaacttgtatagcatttaatatactccttttaaatatatttctgccaggcatggtggctcatgcctataatcccagcactttgagaggccaaggtgggaggatcatttgagcccaggatatcgagaccagcctgcactacaaaaaaatccaaaaaatgaggtgggaggatcacttgagcccaggaagtcaaggctgcagtgagccttgatagcgccactgcactcctgcctgggaaaatgagacccagactcaaaataaatcaatgaatgaattaataaacaaataaataaataaataaatttcccataaattaccaaatgagattgtcactggttcaaattattaaataattgccataaatttcctattacgggaatgtggaatttggacatacattttaacaataagtacattgattaatacatttaagtttataagtaattattgaggatccagtattttcaagaccttggcctagtttcttttcaattcaaagatgagttgcaaaagacataatgttttgcctatggaagtagatcatctagaagaaaaagattaaagaattagttaagcttttttttttttttttttttgagacagagtttcactcttgttgcccaggctggaattcagtggctcgatcttggctcaccacaacctctgcattctcctgcctcagcctcccgagtagctaggattataggcacctgccaccatgcccggctaattttgtttgtaattttagtagagatggggtttctccatgttggccaggctggtttcgaactcctgacctcaggtgatctacccgcctcagcctcccaaagtgctgaaattacaggcgtgagccacctcacctggccatgttctttatggaatactacaatgtgttgtcacaggatttgttattcagatgtcaatcatttttatttatatatttctgggtaaaacttattagtggtgtgaggagtgcagaatatggaagcttacctaaattctttttctgccagccaacattttaaaagacaaatgatgcatcctttctcaatgctgctaattctttaaattttacatgtcccaatttattccatttgagatttattttaatgttttcaacccctgtgtaacatgtatcatgaggagaaagcactatcattgatcatcactatggattaaaatataggaatattttacagggcagtatgggtgggggtgggagacatattggaatcgtgttttctgggataaaatttttaaaaagaattaatcattagccctgagtattttagtcatttgtgcctatagaaaacaacatgctcttttattgtggactttcttcttttaagtgaggtttaatttatatacaatacaataacagatttttaagtattcatttgagatgttttgacaactgtatatatacatgtaaccatcactggaatcagatatagaatattccccttaaatattgtcaggtaaacacattgagaatattttttccagtctgtggcttacctacttattttcataatgaatgttttacttgtgatgaagatttaacttacccttttactttaatgattaatattttctgtgttctttctaataaattttacgaactctgaggtta

SEQ ID NO: 137868 - DNA, 4273 bp, Homo sapiens
  Payload ID: 6999
  Gene Symbol: GSTCD
  Gene Name: glutathione S-transferase, C-terminal domain containing
  Uniprot ID: Q8NEC7
  ENST ID: ENST00000515279
  CDS Start-End: 221-2122
atgacggccggcgcgagtattttccacataaggtggctgtcgtttttctcctggcgtctgtggaggcgagtggtctgcgggcagcagctcccagaggcagccttggaattccagctcggactgggcgggaaggcgcaggcggcccaggtcgccgacacgctcacgcaccctccctgcctggccgcgcctctgcgaccaggtgacccaatgaaagaagaaaatgaaagccataaagaaaagtcttacagaagaagaatacctgtacctggacttttctcaccaaacagaaggatgcatctttcctcttcatacatctgtaactttatttctgttatcttactgtgactgtaaaatctttaaaatttgcttagttgtcaccaaagaggtgagtagagatagttcactactaagagatgacctgatccaggatgttgaaatacagattatttcaaggcaggagctcccaccaatagtccaaaattgctgtttgcctgcagtagtagaacgatcagacaatttttgtagagcaggacttgctgttgtattgagacacataatccagaaatcctatgaagcagaccccttaaagaaggaacttttggaacttctgggctttaaaaagacttgcttgaaagcctgtgctgaagttagtcagtggaccaggctatgtgaactcaccatccctttggctattgagaattttctcagagaatcttctgaccagcccccaactatacctgtagaaatactacagctagagaaaaagcttagtgagcctgttagagtgcataatgatgataaactccgcaggcagaagctcaagcaacagaaggctgatggagttgggcctccccttactaagggaaaggcaaagagcaaggtccacacacaggaaacatctgaagggttggattcttcatccaagagtctggaactgaaagtggcattctcaaagctcacagtacaggaagaaccagctactaccaacagagagccttctcacatcagaaaagcaaaagcctccgaccttccacctctggagcatgtgtttgcagaagggctttacttcactctggcagatattgtgctcttgccctgtatccatcatttcttggtaattatcagcaggaaattttctgagaagctggtagaatttccattgctagcctcttggtaccagaggattcaggaagtgccaggagtaaaaacagcagcttctaagtgtgggatccaatttctccatttaccaaagttgttgacaacctcaactgaacagcatccaaacttatgtgaagtcccaggtgtagaagagcaaagcgatcctttatttataggaggaccaagaccaaccatggccaagttaatggaaaagggcattgaagtgatgttttctccccacccttgccctacttggactcttgattggaatgttctccctgcagcagtcagcccaaaggaaggtaaaatgtccagtgatcgagctttgaggaagcagcaacagttgaacaaccttgtctatgtggtaacaaatcaggccaaacctggtgacagaattgtggatttctgcagcggtgggggccatgttggaattgtccttgctcacatgctgccatcatgtcaggttacattaatagaaaacaaggaattatcattaattcgtgctaagaagagaagtgatgaactgggtttaagcaacatttggttcattcaagcaaatatggaatattttactgggatgtttaatattggagtagcattgcatgcttgtggagtggcaacagacatggtgattgagcactgtatcaaaacacgggcttccttcgtcacatgcccttgctgttatggtttcattcagaacacctcaaagttcaattttccaaaaagtgaacaattcaagaaaactttatcatacaaggaacacatgattctgtgcagatttgcagaccagacagctgtccagctcccaccccaacgaaggctcataggaaaacagtgcatgtgcttggtggatctggatcgagcaagagctgcagaagaatgtggatactccgttcaagtgatatccatggagccagagagctgctctcccaaaaataacatgattgtgggagtccccatttaaaatgagatattcacatttgatattttgccatccgtcttcacgttggatgcccagtggcattcaggaggttcttggcataactaggaaacagcattagccatcttgaacctattgtgctcaggaaggaaagcaacagggaaatcttggaagtaaaggctccctgcaaagcatcacaaatgctttacaatgtgtgattaaaggactgctggtttttatagtgagaatcccctgaagtctcagctgccaaaagaataatactagtggaggttccatcacaggaataacaatttccttctcacttcacaagctcctctgatcttgccaatgtgatgtttaattcaaaacagcgcacttacagcctttattttatacttatttagatattcacatgggaactgaaagtagactcagtggagttttttgttttttatatttttaacaattgtactttttctatcactttaaaaaaatctagtcaggtaattatagtacagttatttttaagctggggttagttgaacttgtatagcatttaatatactccttttaaatatatttctgccaggcatggtggctcatgcctataatcccagcactttgagaggccaaggtgggaggatcatttgagcccaggatatcgagaccagcctgcactacaaaaaaatccaaaaaatgaggtgggaggatcacttgagcccaggaagtcaaggctgcagtgagccttgatagcgccactgcactcctgcctgggaaaatgagacccagactcaaaataaatcaatgaatgaattaataaacaaataaataaataaataaatttcccataaattaccaaatgagattgtcactggttcaaattattaaataattgccataaatttcctattacgggaatgtggaatttggacatacattttaacaataagtacattgattaatacatttaagtttataagtaattattgaggatccagtattttcaagaccttggcctagtttcttttcaattcaaagatgagttgcaaaagacataatgttttgcctatggaagtagatcatctagaagaaaaagattaaagaattagttaagcttttttttttttttttttttgagacagagtttcactcttgttgcccaggctggaattcagtggctcgatcttggctcaccacaacctctgcattctcctgcctcagcctcccgagtagctaggattataggcacctgccaccatgcccggctaattttgtttgtaattttagtagagatggggtttctccatgttggccaggctggtttcgaactcctgacctcaggtgatctacccgcctcagcctcccaaagtgctgaaattacaggcgtgagccacctcacctggccatgttctttatggaatactacaatgtgttgtcacaggatttgttattcagatgtcaatcatttttatttatatatttctgggtaaaacttattagtggtgtgaggagtgcagaatatggaagcttacctaaattctttttctgccagccaacattttaaaagacaaatgatgcatcctttctcaatgctgctaattctttaaattttacatgtcccaatttattccatttgagatttattttaatgttttcaacccctgtgtaacatgtatcatgaggagaaagcactatcattgatcatcactatggattaaaatataggaatattttacagggcagtatgggtgggggtgggagacatattggaatcgtgttttctgggataaaatttttaaaaagaattaatcattagccctgagtattttagtcatttgtgcctatagaaaacaacatgctcttttattgtggactttcttcttttaagtgaggtttaatttatatacaatacaataacagatttttaagtattcatttgagatgttttgacaactgtatatatacatgtaaccatcactggaatcagatatagaatattccccttaaatattgtcaggtaaacacattgagaatattttttccagtctgtggcttacctacttattttcataatgaatgttttacttgtgatgaagatttaacttacccttttactttaatgattaatattttctgtgttctttctaataaattttacgaactctgaggttataa

SEQ ID NO: 137869 - DNA, 2091 bp, Homo sapiens
  Payload ID: 6999
  Gene Symbol: GSTCD
  Gene Name: glutathione S-transferase, C-terminal domain containing
  ENST ID: ENST00000507281
  CDS Start-End: 252-1274
acttccctttttccggtccgccggattatgaatgacggccggcgcgagtattttccacataaggtggctgtcgtttttctcctggcgtctgtggaggcgagtggtctgcgggcagcagctcccagaggcagccttggaattccagctcggactgggcgggaaggcgcaggcggcccaggtcgccgacacgctcacgcaccctccctgcctggccgcgcctctgcgaccaggtgacccaatgaaagaagaaaatgaaagccataaagaaaagtcttacagaagaagaatacctgtacctggacttttctcaccaaacagaaggatgcatctttcctcttcatacatctgtaactttatttctgttatcttactgtgactgtaaaatctttaaaatttgcttagttgtcaccaaagaggttagtcagtggaccaggctatgtgaactcaccatccctttggctattgagaattttctcagagaatcttctgaccagcccccaactatacctgtagaaatactacagctagagaaaaagcttagtgagcctgttagagtgcataatgatgataaactccgcaggcagaagctcaagcaacagaaggctgatggagttgggcctccccttactaagggaaaggcaaagagcaaggtccacacacaggaaacatctgaagggttggattcttcatccaagagtctggaactgaaagtggcattctcaaagctcacagtacaggaagaaccagctactaccaacagagagccttctcacatcagaaaagcaaaagcctccgaccttccacctctggagcatgtgtttgcagaagggctttacttcactctggcagatattgtgctcttgccctgtatccatcatttcttggtaattatcagcaggaaattttctgagaagctggtagaatttccattgctagcctcttggtaccagaggattcaggaagtgccaggagtaaaaacagcagcttctaagtgtgggatccaatttctccatttaccaaagttgttgacaacctcaactgaacagcatccaaacttatgtgaagtcccaggtgtagaagagcaaagcgatcctttatttataggaggaccaagaccaaccatggccaagttaatggaaaagggcattgaagtgatgttttctccccacccttgccctacttggactcttgattggaatgttctccctgcagcagtcagcccaaaggaagatggagtcttgctctgtcactcaggctggaatgcagtggtgtagtctcggctcactggaaccccagcctcccgggttcaagtaattctgctgcttcagcctcccaagtagctgggattataggagcccgccaccatatctggctaatttttgtatttttagtaaatatgaagtttcaccatattggccaggctggtctcgaactcctgacctcaagtgatccagccgcctcagcctcccaaagtgccaggattataggcttcagccaccactcggactcaatatgcttttaaatgtaattttctaaaaacagcttttggagagaacagaggcatcaatactgttacagtctattagttatctggccctatggacattagtaagtaacattctagagtatgagtgtcagagaccagtggtttgtctattaaaatagtagaattatcttacttgataattcttgagaaggctgtgactcagtttactaaatttactatatttattaaatataaagcaatgtttggctccttgattctgcacacctttatttgactctgcctgttttctttcacataaggactacagcattttttactgactcctccttgaccatcatttttttcataatataataaaaacctggcatttccgtgaagttgacttactggcttgtattgctatttacttctgggatgtagtaatatagggatatactatggaaagaaacttaacaaaaaacagagaaaattatctgtagttgtcaagggctcattaacctttctgtgccttaaatcgaagccacatttttgtgtctgtgtagcttgtcatcctcaataaaatctgcttgaatttgaaaattcta

SEQ ID NO: 137870 - DNA, 572 bp, Homo sapiens
  Payload ID: 6999
  Gene Symbol: GSTCD
  Gene Name: glutathione S-transferase, C-terminal domain containing
  ENST ID: ENST00000512828
  CDS Start-End: 451-572
agtgacgttacttccctttttccggtccgccggattatgaatgacggccggcgcgagtattttccacataaggtggctgtcgtttttctcctggcgtctgtggaggcgagtggtctgcgggcagcagctcccagaggcagccttggaattccagctcggactgggcgggaaggcgcaggcggcccaggtcgccgacacgctcacgcaccctccctgcctggccgcgcctctgcgaccaggtaaagagggcgctcgggccgccggcttctcagcctccgcgaccccctaagaactggtcttttcttcgggggtctgcagggctgaggatgcgggggaagggtgggaaggacaagggcgtggtatcatcgtcctgatttttctcccgccctggggccgcctcaaactcctttttggccactcctgctgaaggtgacccaatgaaagaagaaaatgaaagccataaagaaaagtcttacagaagaagaatacctgtacctggacttttctcaccaaacagaaggatgcatctttcctcttcatacatctgtaactttatttctgttatcttactg

SEQ ID NO: 137871 - DNA, 718 bp, Homo sapiens
  Payload ID: 6999
  Gene Symbol: GSTCD
  Gene Name: glutathione S-transferase, C-terminal domain containing
  ENST ID: ENST00000509336
  CDS Start-End: 217-718
acttcgtttgtggctaaggttactgtaagcttttcacttaaaaacttttcctacttctttaccagataagaaaacagctaattttaatcactggcttttgttctctaggacttaactgcatcccatattacgtatttaatgagcttgaaaaaatctcagtgtttttcttatcgtttttgaccctaaatatttaaggtgacccaatgaaagaagaaaatgaaagccataaagaaaagtcttacagaagaagaatacctgtacctggacttttctcaccaaacagaaggatgcatctttcctcttcatacatctgtaactttatttctgttatcttactgtgactgtaaaatctttaaaatttgcttagttgtcaccaaagaggtgagtagagatagttcactactaagagatgacctgatccaggatgttgaaatacagattatttcaaggcaggagctcccaccaatagtccaaaattgctgtttgcctgcagtagtagaacgatcagacaatttttgtagagcaggacttgctgttgtattgagacacataatccagaaatcctatgaagcagaccccttaaagaaggaacttttggaacttctgggctttaaaaagacttgcttgaaagcctgtgctgaagttagtcagtggaccaggctatgtgaactcaccatccctttggctattgagaattttctcagagaatcttctgacc

SEQ ID NO: 137872 - DNA, 578 bp, Homo sapiens
  Payload ID: 6999
  Gene Symbol: GSTCD
  Gene Name: glutathione S-transferase, C-terminal domain containing
  ENST ID: ENST00000510865
  CDS Start-End: 79-578
agatgattccctgattctccagagagattacacacttcgtttgtggctaaggttactgtgacccaatgaaagaagaaaatgaaagccataaagaaaagtcttacagaagaagaatacctgtacctggacttttctcaccaaacagaaggatgcatctttcctcttcatacatctgtaactttatttctgttatcttactgtgactgtaaaatctttaaaatttgcttagttgtcaccaaagaggtgagtagagatagttcactactaagagatgacctgatccaggatgttgaaatacagattatttcaaggcaggagctcccaccaatagtccaaaattgctgtttgcctgcagtagtagaacgatcagacaatttttgtagagcaggacttgctgttgtattgagacacataatccagaaatcctatgaagcagaccccttaaagaaggaacttttggaacttctgggctttaaaaagacttgcttgaaagcctgtgctgaagttagtcagtggaccaggctatgtgaactcaccatccctttggctattgagaattttctcagagaatcttctga

SEQ ID NO: 137873 - DNA, 1922 bp, Homo sapiens
  Payload ID: 7000
  Gene Symbol: GSS
  Gene Name: glutathione synthetase
  Uniprot ID: P48637
  ENST ID: ENST00000216951
  CDS Start-End: 100-1524
aagcgcactgggtcgcatcgaggccccgccccctgagcctgggtagcggcgcgagggccgggagaaccgttcgcggaggaaaggcgaactagtgttgggatggccaccaactgggggagcctcttgcaggataaacagcagctagaggagctggcacggcaggccgtggaccgggccctggctgagggagtattgctgaggacctcacaggagcccacttcctcggaggtggtgagctatgccccattcacgctcttcccctcactggtccccagtgccctgctggagcaagcctatgctgtgcagatggacttcaacctgctagtggatgctgtcagccagaacgctgccttcctggagcaaactctttccagcaccatcaaacaggatgactttaccgctcgtctctttgacatccacaagcaagtcctaaaagagggcattgcccagactgtgttcctgggcctgaatcgctcagactacatgttccagcgcagcgcagatggctccccagccctgaaacagatcgaaatcaacaccatctctgccagctttgggggcctggcctcccggaccccagctgtgcaccgacatgttctcagtgtcctgagtaagaccaaagaagctggcaagatcctctctaataatcccagcaagggactggccctgggaattgccaaagcctgggagctctacggctcacccaatgctctggtgctactgattgctcaagagaaggaaagaaacatatttgaccagcgtgccatagagaatgagctactggccaggaacatccatgtgatccgacgaacatttgaagatatctctgaaaaggggtctctggaccaagaccgaaggctgtttgtggatggccaggaaattgctgtggtttacttccgggatggctacatgcctcgtcagtacagtctacagaattgggaagcacgtctactgctggagaggtcacatgctgccaagtgcccagacattgccacccagctggctgggactaagaaggtgcagcaggagctaagcaggccgggcatgctggagatgttgctccctggccagcctgaggctgtggcccgcctccgcgccacctttgctggcctctactcactggatgtgggtgaagaaggggaccaggccatcgccgaggcccttgctgcccctagccggtttgtgctaaagccccagagagagggtggaggtaacaacctatatggggaggaaatggtacaggccctgaaacagctgaaggacagtgaggagagggcctcctacatcctcatggagaagatcgaacctgagccttttgagaattgcctgctacggcctggcagccctgcccgagtggtccagtgcatttcagagctgggcatctttggggtctatgtcaggcaggaaaagacactcgtgatgaacaagcacgtggggcatctacttcgaaccaaagccatcgagcatgcagatggtggtgtggcagcgggagtggcagtcctggacaacccataccctgtgtgagggcacaaccaggccacgggaccttctatcctctgtatttgtcattcctctcctagccctcctgaggggtatcctcctaaagacctccaaagtttttatggaagggtaaatactggtaccttcccccagctttccatctgaggaccagaaaagttgtgtctcccttagatgagatctagacgcccccaaatccttgagatgtgggtatagctcagggtaagctgctctgaggtaaaggtccatgaaccctgccccactcctgtcagcccctcatcagccttttcagcaggttccagtgcctgacttgggataggactgagtggtaggaggagggggagtggaggggcatagcctttccctaattctgccttaaataaaactgcattgctgattcagtg

SEQ ID NO: 137874 - DNA, 1092 bp, Homo sapiens
  Payload ID: 7000
  Gene Symbol: GSS
  Gene Name: glutathione synthetase
  Uniprot ID: P48637
  ENST ID: ENST00000451957
  CDS Start-End: 1-1092
atggccaccaactgggggagcctcttgcaggataaacagcagctagaggagctggcacggcaggccgtggaccgggccctggctgagggagtattgctgaggacctcacaggagcccacttcctcggaggtggtgagctatgccccattcacgctcttcccctcactggtccccagtgccctgctggagcaagcctatgctgtgcagatggacttcaacctgctagtggatgctgtcagccagaacgctgccttcctggagcaaactctttccagtgctctggtgctactgattgctcaagagaaggaaagaaacatatttgaccagcgtgccatagagaatgagctactggccaggaacatccatgtgatccgacgaacatttgaagatatctctgaaaaggggtctctggaccaagaccgaaggctgtttgtggatggccaggaaattgctgtggtttacttccgggatggctacatgcctcgtcagtacagtctacagaattgggaagcacgtctactgctggagaggtcacatgctgccaagtgcccagacattgccacccagctggctgggactaagaaggtgcagcaggagctaagcaggccgggcatgctggagatgttgctccctggccagcctgaggctgtggcccgcctccgcgccacctttgctggcctctactcactggatgtgggtgaagaaggggaccaggccatcgccgaggcccttgctgcccctagccggtttgtgctaaagccccagagagagggtggaggtaacaacctatatggggaggaaatggtacaggccctgaaacagctgaaggacagtgaggagagggcctcctacatcctcatggagaagatcgaacctgagccttttgagaattgcctgctacggcctggcagccctgcccgagtggtccagtgcatttcagagctgggcatctttggggtctatgtcaggcaggaaaagacactcgtgatgaacaagcacgtggggcatctacttcgaaccaaagccatcgagcatgcagatggtggtgtggcagcgggagtggcagtcctggacaacccataccctgtgtga

SEQ ID NO: 137875 - DNA, 1875 bp, Homo sapiens
  Payload ID: 7001
  Gene Symbol: GAPDH
  Gene Name: glyceraldehyde-3-phosphate dehydrogenase
  Uniprot ID: P04406
  ENST ID: ENST00000229239
  CDS Start-End: 667-1674
gggggaagtgggggctgggaaggaaccacgggcccccgcccgaggcccatgggcccctcctaggcctttgcctgagcagtccggtgtcactaccgcagagcctcgaggagaagttccccaactttcccgcctctcagcctttgaaagaaagaaaggggagggggcaggccgcgtgcagccgcgagcggtgctgggctccggctccaattccccatctcagtcgttcccaaagtcctcctgtttcatccaagcgtgtaagggtccccgtccttgactccctagtgtcctgctgcccacagtccagtcctgggaaccagcaccgatcacctcccatcgggccaatctcagtcccttcccccctacgtcggggcccacacgctcggtgcgtgcccagttgaaccaggcggctgcggaaaaaaaaaagcggggagaaagtagggcccggctactagcggttttacgggcgcacgtagctcaggcctcaagaccttgggctgggactggctgagcctggcgggaggcggggtccgagtcaccgcctgccgccgcgcccccggtttctataaattgagcccgcagcctcccgcttcgctctctgctcctcctgttcgacagtcagccgcatcttcttttgcgtcgccagccgagccacatcgctcagacaccatggggaaggtgaaggtcggagtcaacggatttggtcgtattgggcgcctggtcaccagggctgcttttaactctggtaaagtggatattgttgccatcaatgaccccttcattgacctcaactacatggtttacatgttccaatatgattccacccatggcaaattccatggcaccgtcaaggctgagaacgggaagcttgtcatcaatggaaatcccatcaccatcttccaggagcgagatccctccaaaatcaagtggggcgatgctggcgctgagtacgtcgtggagtccactggcgtcttcaccaccatggagaaggctggggctcatttgcaggggggagccaaaagggtcatcatctctgccccctctgctgatgcccccatgttcgtcatgggtgtgaaccatgagaagtatgacaacagcctcaagatcatcagcaatgcctcctgcaccaccaactgcttagcacccctggccaaggtcatccatgacaactttggtatcgtggaaggactcatgaccacagtccatgccatcactgccacccagaagactgtggatggcccctccgggaaactgtggcgtgatggccgcggggctctccagaacatcatccctgcctctactggcgctgccaaggctgtgggcaaggtcatccctgagctgaacgggaagctcactggcatggccttccgtgtccccactgccaacgtgtcagtggtggacctgacctgccgtctagaaaaacctgccaaatatgatgacatcaagaaggtggtgaagcaggcgtcggagggccccctcaagggcatcctgggctacactgagcaccaggtggtctcctctgacttcaacagcgacacccactcctccacctttgacgctggggctggcattgccctcaacgaccactttgtcaagctcatttcctggtatgacaacgaatttggctacagcaacagggtggtggacctcatggcccacatggcctccaaggagtaagacccctggaccaccagccccagcaagagcacaagaggaagagagagaccctcactgctggggagtccctgccacactcagtcccccaccacactgaatctcccctcctcacagttgccatgtagaccccttgaagaggggaggggcctagggagccgcaccttgtcatgtaccatcaataaagtaccctgtgctcaacca

SEQ ID NO: 137876 - DNA, 1266 bp, Homo sapiens
  Payload ID: 7001
  Gene Symbol: GAPDH
  Gene Name: glyceraldehyde-3-phosphate dehydrogenase
  ENST ID: ENST00000396856
  CDS Start-End: 314-1096
tgttcgacagtcagccgcatcttcttttgcgtcgccagccgagccacatcgctcagacaccatggggaaggtgaaggtcggagtcaacggatttggtcgtattgggcgcctggtcaccagggctgcttttaactctggtaaagtggatattgttgccatcaatgaccccttcattgacctcaactacatggtttacatgttccaatatgattccacccatggcaaattccatggcaccgtcaaggctgagaacgggaagcttgtcatcaatggaaatcccatcaccatcttccaggagtgagtggaagacagaatggaagaaatgcgagatccctccaaaatcaagtggggcgatgctggcgctgagtacgtcgtggagtccactggcgtcttcaccaccatggagaaggctggggctcatttgcaggggggagccaaaagggtcatcatctctgccccctctgctgatgcccccatgttcgtcatgggtgtgaaccatgagaagtatgacaacagcctcaagatcatcagcaatgcctcctgcaccaccaactgcttagcacccctggccaaggtcatccatgacaactttggtatcgtggaaggactcatgaccacagtccatgccatcactgccacccagaagactgtggatggcccctccgggaaactgtggcgtgatggccgcggggctctccagaacatcatccctgcctctactggcgctgccaaggctgtgggcaaggtcatccctgagctgaacgggaagctcactggcatggccttccgtgtccccactgccaacgtgtcagtggtggacctgacctgccgtctagaaaaacctgccaaatatgatgacatcaagaaggtggtgaagcaggcgtcggagggccccctcaagggcatcctgggctacactgagcaccaggtggtctcctctgacttcaacagcgacacccactcctccacctttgacgctggggctggcattgccctcaacgaccactttgtcaagctcatttcctggtatgacaacgaatttggctacagcaacagggtggtggacctcatggcccacatggcctccaaggagtaagacccctggaccaccagccccagcaagagcacaagaggaagagagagaccctcactgctggggagtccctgccacactcagtcccccaccacactgaatctcccctcctcacagttgccatgtagaccccttgaagaggggaggggcctagggagccgcaccttgtcatg

SEQ ID NO: 137877 - DNA, 1292 bp, Homo sapiens
  Payload ID: 7001
  Gene Symbol: GAPDH
  Gene Name: glyceraldehyde-3-phosphate dehydrogenase
  Uniprot ID: P04406
  ENST ID: ENST00000396858
  CDS Start-End: 266-1147
tgcaaccgggaaggaaatgaatgggcagccgttaggaaagcctgccggtgactaaccctgcgctcctgcctcgatgggtggagtcgcgtgtggcggggaagtcaggtggagcgaggctagctggcccgatttctcctccgggtgatgcttttcctagattattctctgatttggtcgtattgggcgcctggtcaccagggctgcttttaactctggtaaagtggatattgttgccatcaatgaccccttcattgacctcaactacatggtttacatgttccaatatgattccacccatggcaaattccatggcaccgtcaaggctgagaacgggaagcttgtcatcaatggaaatcccatcaccatcttccaggagcgagatccctccaaaatcaagtggggcgatgctggcgctgagtacgtcgtggagtccactggcgtcttcaccaccatggagaaggctggggctcatttgcaggggggagccaaaagggtcatcatctctgccccctctgctgatgcccccatgttcgtcatgggtgtgaaccatgagaagtatgacaacagcctcaagatcatcagcaatgcctcctgcaccaccaactgcttagcacccctggccaaggtcatccatgacaactttggtatcgtggaaggactcatgaccacagtccatgccatcactgccacccagaagactgtggatggcccctccgggaaactgtggcgtgatggccgcggggctctccagaacatcatccctgcctctactggcgctgccaaggctgtgggcaaggtcatccctgagctgaacgggaagctcactggcatggccttccgtgtccccactgccaacgtgtcagtggtggacctgacctgccgtctagaaaaacctgccaaatatgatgacatcaagaaggtggtgaagcaggcgtcggagggccccctcaagggcatcctgggctacactgagcaccaggtggtctcctctgacttcaacagcgacacccactcctccacctttgacgctggggctggcattgccctcaacgaccactttgtcaagctcatttcctggtatgacaacgaatttggctacagcaacagggtggtggacctcatggcccacatggcctccaaggagtaagacccctggaccaccagccccagcaagagcacaagaggaagagagagaccctcactgctggggagtccctgccacactcagtcccccaccacactgaatctcccctcctcacagttgccatgtagaccccttgaagaggggaggg

SEQ ID NO: 137878 - DNA, 1256 bp, Homo sapiens
  Payload ID: 7001
  Gene Symbol: GAPDH
  Gene Name: glyceraldehyde-3-phosphate dehydrogenase
  Uniprot ID: P04406
  ENST ID: ENST00000396859
  CDS Start-End: 80-1087
aggcgtgtgtgtcggccggggccactaggcgctcactgttctctccctccgcgcagccgagccacatcgctcagacaccatggggaaggtgaaggtcggagtcaacggatttggtcgtattgggcgcctggtcaccagggctgcttttaactctggtaaagtggatattgttgccatcaatgaccccttcattgacctcaactacatggtttacatgttccaatatgattccacccatggcaaattccatggcaccgtcaaggctgagaacgggaagcttgtcatcaatggaaatcccatcaccatcttccaggagcgagatccctccaaaatcaagtggggcgatgctggcgctgagtacgtcgtggagtccactggcgtcttcaccaccatggagaaggctggggctcatttgcaggggggagccaaaagggtcatcatctctgccccctctgctgatgcccccatgttcgtcatgggtgtgaaccatgagaagtatgacaacagcctcaagatcatcagcaatgcctcctgcaccaccaactgcttagcacccctggccaaggtcatccatgacaactttggtatcgtggaaggactcatgaccacagtccatgccatcactgccacccagaagactgtggatggcccctccgggaaactgtggcgtgatggccgcggggctctccagaacatcatccctgcctctactggcgctgccaaggctgtgggcaaggtcatccctgagctgaacgggaagctcactggcatggccttccgtgtccccactgccaacgtgtcagtggtggacctgacctgccgtctagaaaaacctgccaaatatgatgacatcaagaaggtggtgaagcaggcgtcggagggccccctcaagggcatcctgggctacactgagcaccaggtggtctcctctgacttcaacagcgacacccactcctccacctttgacgctggggctggcattgccctcaacgaccactttgtcaagctcatttcctggtatgacaacgaatttggctacagcaacagggtggtggacctcatggcccacatggcctccaaggagtaagacccctggaccaccagccccagcaagagcacaagaggaagagagagaccctcactgctggggagtccctgccacactcagtcccccaccacactgaatctcccctcctcacagttgccatgtagaccccttgaagaggggaggggcctagggagccgcaccttgtcat

SEQ ID NO: 137879 - DNA, 1348 bp, Homo sapiens
  Payload ID: 7001
  Gene Symbol: GAPDH
  Gene Name: glyceraldehyde-3-phosphate dehydrogenase
  Uniprot ID: P04406
  ENST ID: ENST00000396861
  CDS Start-End: 152-1159
ttcgacagtcagccgcatcttcttttgcgtcgccaggtgaagacgggcggagagaaacccgggaggctagggacggcctgaaggcggcaggggcgggcgcaggccggatgtgttcgcgccgctgcgggccgagccacatcgctcagacaccatggggaaggtgaaggtcggagtcaacggatttggtcgtattgggcgcctggtcaccagggctgcttttaactctggtaaagtggatattgttgccatcaatgaccccttcattgacctcaactacatggtttacatgttccaatatgattccacccatggcaaattccatggcaccgtcaaggctgagaacgggaagcttgtcatcaatggaaatcccatcaccatcttccaggagcgagatccctccaaaatcaagtggggcgatgctggcgctgagtacgtcgtggagtccactggcgtcttcaccaccatggagaaggctggggctcatttgcaggggggagccaaaagggtcatcatctctgccccctctgctgatgcccccatgttcgtcatgggtgtgaaccatgagaagtatgacaacagcctcaagatcatcagcaatgcctcctgcaccaccaactgcttagcacccctggccaaggtcatccatgacaactttggtatcgtggaaggactcatgaccacagtccatgccatcactgccacccagaagactgtggatggcccctccgggaaactgtggcgtgatggccgcggggctctccagaacatcatccctgcctctactggcgctgccaaggctgtgggcaaggtcatccctgagctgaacgggaagctcactggcatggccttccgtgtccccactgccaacgtgtcagtggtggacctgacctgccgtctagaaaaacctgccaaatatgatgacatcaagaaggtggtgaagcaggcgtcggagggccccctcaagggcatcctgggctacactgagcaccaggtggtctcctctgacttcaacagcgacacccactcctccacctttgacgctggggctggcattgccctcaacgaccactttgtcaagctcatttcctggtatgacaacgaatttggctacagcaacagggtggtggacctcatggcccacatggcctccaaggagtaagacccctggaccaccagccccagcaagagcacaagaggaagagagagaccctcactgctggggagtccctgccacactcagtcccccaccacactgaatctcccctcctcacagttgccatgtagaccccttgaagaggggaggggcctagggagccgcaccttgtcatgtaccatcaataaagtaccc

SEQ ID NO: 137880 - DNA, 1086 bp, Homo sapiens
  Payload ID: 7001
  Gene Symbol: GAPDH
  Gene Name: glyceraldehyde-3-phosphate dehydrogenase
  Uniprot ID: P04406
  ENST ID: ENST00000619601
  CDS Start-End: 1-882
atggtttacatgttccaatatgattccacccatggcaaattccatggcaccgtcaaggctgagaacgggaagcttgtcatcaatggaaatcccatcaccatcttccaggagcgagatccctccaaaatcaagtggggcgatgctggcgctgagtacgtcgtggagtccactggcgtcttcaccaccatggagaaggctggggctcatttgcaggggggagccaaaagggtcatcatctctgccccctctgctgatgcccccatgttcgtcatgggtgtgaaccatgagaagtatgacaacagcctcaagatcatcagcaatgcctcctgcaccaccaactgcttagcacccctggccaaggtcatccatgacaactttggtatcgtggaaggactcatgaccacagtccatgccatcactgccacccagaagactgtggatggcccctccgggaaactgtggcgtgatggccgcggggctctccagaacatcatccctgcctctactggcgctgccaaggctgtgggcaaggtcatccctgagctgaacgggaagctcactggcatggccttccgtgtccccactgccaacgtgtcagtggtggacctgacctgccgtctagaaaaacctgccaaatatgatgacatcaagaaggtggtgaagcaggcgtcggagggccccctcaagggcatcctgggctacactgagcaccaggtggtctcctctgacttcaacagcgacacccactcctccacctttgacgctggggctggcattgccctcaacgaccactttgtcaagctcatttcctggtatgacaacgaatttggctacagcaacagggtggtggacctcatggcccacatggcctccaaggagtaagacccctggaccaccagccccagcaagagcacaagaggaagagagagaccctcactgctggggagtccctgccacactcagtcccccaccacactgaatctcccctcctcacagttgccatgtagaccccttgaagaggggaggggcctagggagccgcaccttgtcatgtaccatcaataaagtaccctgtgctcaaccagtt

SEQ ID NO: 137881 - DNA, 1489 bp, Homo sapiens
  Payload ID: 7002
  Gene Symbol: GAPDHS
  Gene Name: glyceraldehyde-3-phosphate dehydrogenase, spermatogenic
  Uniprot ID: O14556
  ENST ID: ENST00000222286
  CDS Start-End: 117-1343
gtcactgggtgctgtgacatcagggcaattagcccaggacccacagccctggcgctccgcacgcacctcggtaacatcacagcaggtccaggccaatgataaccttataagaggccatgtcgaagcgcgacatcgtcctcaccaatgtcaccgttgtccagttgctgcgacagccgtgcccggtgaccagagcaccgcccccacctgagcctaaggctgaagtagagccccagccacaaccagagcccacaccagtcagggaggaaataaagccaccaccgccaccactgcctcctcaccccgctactcctcctcctaagatggtgtctgtggcccgggagctgactgtgggcatcaatggatttggacgcatcggtcgcctggtcctgcgcgcctgcatggagaagggtgttaaggtggtggctgtgaatgatccattcattgacccggaatacatggtgtacatgtttaagtatgactccacccacggccgatacaagggaagtgtggaattcaggaatggacaactggtcgtggacaaccatgagatctctgtctaccagtgcaaagagcccaaacagatcccctggagggctgtcgggagcccctacgtggtggagtccacaggcgtgtacctctccatacaggcagcttcggaccacatctctgcaggtgctcaacgtgtggtcatctccgcgccctcaccggatgcaccaatgttcgtcatgggtgtcaatgaaaatgactataaccctggctccatgaacattgtgagcaacgcgtcctgcaccaccaactgtttggctcccctcgccaaagtcatccacgagcgatttgggatcgtggaagggttgatgaccacagtccattcctacacggccacccagaagacagtggacgggccatcaaggaaggcctggcgagatgggcggggtgcccaccagaacatcatcccagcctccactggggctgcgaaagctgtgaccaaagtcatcccagagctcaaagggaagctgacagggatggcgttccgggtaccaaccccggatgtgtctgtcgtggacctgacctgccgcctcgcccagcctgccccctactcagccatcaaggaggctgtaaaagcagcagccaaggggcccatggctggcatccttgcctacaccgaggatgaggtcgtctctacggacttcctcggtgatacccactcgtccatcttcgatgctaaggccggcattgcgctcaatgacaatttcgtgaagctcatttcatggtacgacaacgaatatggctacagtcaccgggtggtcgacctcctccgctacatgttcagccgagacaagtgaaacgggaaggtcctttctttccttcccaggggccggggccggaacatgtgcctcccgttccagcatctggctgcccgggggaggaaggacacccggggcgggcgccccacgccgatgggtccatggtgaaataaaaaacagtgctc

SEQ ID NO: 137882 - DNA, 599 bp, Homo sapiens
  Payload ID: 7002
  Gene Symbol: GAPDHS
  Gene Name: glyceraldehyde-3-phosphate dehydrogenase, spermatogenic
  ENST ID: ENST00000586334
  CDS Start-End: 74-208
cagccctggcgctccgcacgcacctcggtaacatcacagcaggtccaggccaatgataaccttataagaggccatgtcgaagcgcgacatcgtcctcaccaatgtcaccgttgtccagttgctgcgacagccgtgcccggatttggacgcatcggtcgcctggtcctgcgcgcctgcatggagaagggtgttaaggtggtggctgtgaatgatccattcattgacccggaatacatggtgtacatgtttaagtatgactccacccacggccgatacaagggaagtgtggaattcaggaatggacaactggtcgtggacaaccatgagatctctgtctaccagtgcaaagagcccaaacagatcccctggagggctgtcgggagcccctacgtggtggagtccacaggcgtgtacctctccatacaggcagcttcggaccacatctctgcaggtgctcaacgtgtggtcatctccgcgccctcaccggatgcaccaatgttcgtcatgggtgtcaatgaaaatgactataaccctggctccatgaacattgtgagcaacgcgtcctgcaccaccaactgtttggctcccctcgccaaagt

SEQ ID NO: 137883 - DNA, 704 bp, Homo sapiens
  Payload ID: 7002
  Gene Symbol: GAPDHS
  Gene Name: glyceraldehyde-3-phosphate dehydrogenase, spermatogenic
  ENST ID: ENST00000585510
  CDS Start-End: 168-704
gcaacccattccctcccttcccccgcatagtgaccagagcaccgcccccacctgagcctaaggctgaagtagagccccagccacaaccagagcccacaccagtcagggaggaaataaagccaccaccgccaccactgcctcctcaccccgctactcctcctcctaagatggtgtctgtggcccgggagctgactgtgggcatcaatggatttggacgcatcggtcgcctggtcctgcgcgcctgcatggagaagggtgttaaggtggtggctgtgaatgatccattcattgacccggaatacatggtgtacatgtttaagtatgactccacccacggccgatacaagggaagtgtggaattcaggaatggacaactggtcgtggacaaccatgagatctctgtctaccagtgcaaagagcccaaacagatcccctggagggctgtcgggagcccctacgtggtggagtccacaggcgtgtacctctccatacaggcagcttcggaccacatctctgcaggtgctcaacgtgtggtcatctccgcgccctcaccggatgcaccaatgttcgtcatgggtgtcaatgaaaatgactataaccctggctccatgaacattgtgagcaacgcgtcctgcaccaccaactgtttggctcccctcgccaaagtcatccacgagcgatttgggatcgtggaagggttgatg

SEQ ID NO: 137884 - DNA, 1371 bp, Homo sapiens
  Payload ID: 7003
  Gene Symbol: GLYCTK
  Gene Name: glycerate kinase
  Uniprot ID: Q8IVS8
  ENST ID: ENST00000305690
  CDS Start-End: 97-801
caccccctagtacttccgttctccagcgctgggcaccgcggccggagctgtgggctggcagccatgggtgccaggcagtgctgagagcagtggggcatggctgcagccctgcaggtcctgccccgcttggcccgagcccccttgcatccactcctctggcggggctcagtggcccgtctggccagcagcatggccttggcagagcaggccaggcagctgtttgagagtgctgtaggtgcagtgctgccgggccccatgctgcaccgggcactatccttggaccctggtggcagacagctgaaggtgcgggaccggaactttcagctgaggcaaaacctctacctggtgggctttggcaaggctgtgctgggtatggcagctgcagctgaggaactactgggccagcatcttgtgcagggcgtgatcagcgttcccaaggggatccgtgctgccatggagcgtgccggcaagcaggagatgctgctgaagccacatagccgtgtccaggtattcgagggtgcggaggacaacctcccggaccgcgatgcgctgcgggctgcactggccatccagcaactggctgagggactcacagctgatgacctgctgctcgtgctgatctcaggtggtgagcctcatcctgtcagatgtggtgggggaccctgtggaggtgattgccagtggccccaccgtggccagttcccacaatgtgcaagattgcctgcatatcctcaatcgctacggcctccgtgcagccctgccacgttctgtgaagactgtgctgtctcgggccgactctgacccccatgggccacacacctgtggccatgtcctgaatgtgatcattggctctaatgtgctggcgctagctgaggcccagcggcaggccgaggcactgggctaccaggctgtggtgctgagtgcagccatgcaaggtgatgtaaaaagtatggcccagttctacgggctgctggcccatgtggctagaacccgcctcaccccatccatggctggggcttctgtggaggaagatgcacagctccatgagctggcagctgagcttcagatcccagacctgcagctggaggaggctctggagaccatggcatggggaaggggcccagtctgcctgctggctggtggcgagcccacagtacagctgcagggctcgggcaggggtggccggaaccaggaactggccctgcgtgttggagcagagttgagaaggtggccgctggggccgatagatgtgctgtttttgagcggtggcaccgatgggcaggatgggcccacagaggctgctggggcctgggtcacacctgagcttgccagccaggctgcagctgagggcctggacatagccaccttcct

SEQ ID NO: 137885 - DNA, 1982 bp, Homo sapiens
  Payload ID: 7003
  Gene Symbol: GLYCTK
  Gene Name: glycerate kinase
  Uniprot ID: Q8IVS8
  ENST ID: ENST00000436784
  CDS Start-End: 61-1632
cgcggccggagctgtgggctggcagccatgggtgccaggcagtgctgagagcagtggggcatggctgcagccctgcaggtcctgccccgcttggcccgagcccccttgcatccactcctctggcggggctcagtggcccgtctggccagcagcatggccttggcagagcaggccaggcagctgtttgagagtgctgtaggtgcagtgctgccgggccccatgctgcaccgggcactatccttggaccctggtggcagacagctgaaggtgcgggaccggaactttcagctgaggcaaaacctctacctggtgggctttggcaaggctgtgctgggtatggcagctgcagctgaggaactactgggccagcatcttgtgcagggcgtgatcagcgttcccaaggggatccgtgctgccatggagcgtgccggcaagcaggagatgctgctgaagccacatagccgtgtccaggtattcgagggtgcggaggacaacctcccggaccgcgatgcgctgcgggctgcactggccatccagcaactggctgagggactcacagctgatgacctgctgctcgtgctgatctcaggtgggggttcagctctgctgcctgcccccatcccacctgtcacactggaggagaagcagacactcactagactgctggcagcccgtggagccaccatccaggagttgaacaccattcggaaggccctgtcccagctcaagggtggggggctggctcaggccgcctaccctgcccaggtggtgagcctcatcctgtcagatgtggtgggggaccctgtggaggtgattgccagtggccccaccgtggccagttcccacaatgtgcaagattgcctgcatatcctcaatcgctacggcctccgtgcagccctgccacgttctgtgaagactgtgctgtctcgggccgactctgacccccatgggccacacacctgtggccatgtcctgaatgtgatcattggctctaatgtgctggcgctagctgaggcccagcggcaggccgaggcactgggctaccaggctgtggtgctgagtgcagccatgcaaggtgatgtaaaaagtatggcccagttctacgggctgctggcccatgtggctagaacccgcctcaccccatccatggctggggcttctgtggaggaagatgcacagctccatgagctggcagctgagcttcagatcccagacctgcagctggaggaggctctggagaccatggcatggggaaggggcccagtctgcctgctggctggtggcgagcccacagtacagctgcagggctcgggcaggggtggccggaaccaggaactggccctgcgtgttggagcagagttgagaaggtggccgctggggccgatagatgtgctgtttttgagcggtggcaccgatgggcaggatgggcccacagaggctgctggggcctgggtcacacctgagcttgccagccaggctgcagctgagggcctggacatagccaccttcctagcccacaatgactcacataccttcttctgctgcctccagggtggggcacacctgctgcacacagggatgacaggtaccaatgtcatggacacccacctcttgttcctgcggcctcggtgatggcataggtcacattttgggagttcagaggaggcctacaagggcaaggtcagatggcagagcaaggttggtcctcagggcctctctaagccttagggcccctcctctccttggccttggctgtttggttaactgtcaccttccactcagggcctctgctctatatctattcccttccagccagactggcagatgggggcttccccctacccctgaggatgaggacaagcccctcggccagttcagcgttcccgtgcttctcccttgggcagcctctctcttgagcccctcaccctgtttctttctgtgaagcgagaatgtctgaaaataaataggaccatgccatgggt

SEQ ID NO: 137886 - DNA, 889 bp, Homo sapiens
  Payload ID: 7003
  Gene Symbol: GLYCTK
  Gene Name: glycerate kinase
  ENST ID: ENST00000461183
  CDS Start-End: 6-857
gcagaatggaactcttgctaagccagagctgtatttggtggcccatggtgggagagggaagaacaataataagttgtggaataaaagccatggagaggagcgggaattacttaatctggctccagaagggggagatgctgctgaagccacatagccgtgtccaggtattcgagggtgcggaggacaacctcccggaccgcgatgcgctgcgggctgcactggccatccagcaactggctgagggactcacagctgatgacctgctgctcgtgctgatctcaggtgggggttcagctctgctgcctgcccccatcccacctgtcacactggaggagaagcagacactcactagactgctggcagcccgtggagccaccatccaggagttgaacaccattcggaaggccctgtcccagctcaagggtggggggctggctcaggccgcctaccctgcccaggtggtgagcctcatcctgtcagatgtggtgggggaccctgtggaggtgattgccagtggccccaccgtggccagttcccacaatgtgcaagattgcctgcatatcctcaatcgctacggcctccgtgcagccctgccacgttctgtgaagactgtgctgtctcgggccgactctgacccccatgggccacacacctgtggccatgtcctgaatgtgatcattggctctaatgtgctggcgctagctgaggcccagcggcaggccgaggcactgggctaccaggctgtggtgctgagtgcagccatgcaagggtggggcacacctgctgcacacagggatgacaggtaccaatgtcatggacacccacctcttgttcctgcggcctcggtgatggcataggtcacattttgggagttcagaggaggcctaca

SEQ ID NO: 137887 - DNA, 992 bp, Homo sapiens
  Payload ID: 7003
  Gene Symbol: GLYCTK
  Gene Name: glycerate kinase
  ENST ID: ENST00000471180
  CDS Start-End: 47-769
ccgttctccagcgctgggcaccgcggccggagctgtgggctgggagatgctgctgaagccacatagccgtgtccaggtattcgagggtgcggaggacaacctcccggaccgcgatgcgctgcgggctgcactggccatccagcaactggctgagggactcacagctgatgacctgctgctcgtgctgatctcaggtgggggttcagctctgctgcctgcccccatcccacctgtcacactggaggagaagcagacactcactagactgctggcagcccgtggagccaccatccaggagttgaacaccattcggaaggccctgtcccagctcaagggtggggggctggctcaggccgcctaccctgcccaggtggtgagcctcatcctgtcagatgtggtgggggaccctgtggaggtgattgccagtggccccaccgtggccagttcccacaatgtgcaagattgcctgcatatcctcaatcgctacggcctccgtgcagccctgccacgttctgtgaagactgtgctgtctcgggccgactctgacccccatgggccacacacctgtggccatgtcctgaatgtgatcattggctctaatgtgctggcgctagctgaggcccagcggcaggccgaggcactgggctaccaggctgtggtgctgagtgcagccatgcaagggtggggcacacctgctgcacacagggatgacaggtaccaatgtcatggacacccacctcttgttcctgcggcctcggtgatggcataggtcacattttgggagttcagaggaggcctacaagggcaaggtcagatggcagagcaagccagactggcagatgggggcttccccctacccctgaggatgaggacaagcccctcggccagttcagcgttcccgtgcttctcccttgggcagcctctctcttgagcccctcaccctgtttctttctgtgaagcgagaatgtctgaaaataaataggaccatgcca

SEQ ID NO: 137888 - DNA, 935 bp, Homo sapiens
  Payload ID: 7003
  Gene Symbol: GLYCTK
  Gene Name: glycerate kinase
  Uniprot ID: Q8IVS8
  ENST ID: ENST00000473032
  CDS Start-End: 97-714
caccccctagtacttccgttctccagcgctgggcaccgcggccggagctgtgggctggcagccatgggtgccaggcagtgctgagagcagtggggcatggctgcagccctgcaggtcctgccccgcttggcccgagcccccttgcatccactcctctggcggggctcagtggcccgtctggccagcagcatggccttggcagagcaggccaggcagctgtttgagagtgctgtaggtgcagtgctgccgggccccatgctgcaccgggcactatccttggaccctggtggcagacagctgaaggtgcgggaccggaactttcagctgaggcaaaacctctacctggtgggctttggcaaggctgtgctgggtatggcagctgcagctgaggaactactgggccagcatcttgtgcagggcgtgatcagcgttcccaaggggatccgtgctgccatggagcgtgccggcaagcaggagatgctgctgaagccacatagccgtgtccaggtattcgagggtgcggaggacaacctcccggaccgcgatgcgctgcgggctgcactggccatccagcaactggctgagggactcacagctgatgacctgctgctcgtgctgatctcagggtggggcacacctgctgcacacagggatgacaggtaccaatgtcatggacacccacctcttgttcctgcggcctcggtgatggcataggtcacattttgggagttcagaggaggcctacaagggcaaggtcagatggcagagcaagccagactggcagatgggggcttccccctacccctgaggatgaggacaagcccctcggccagttcagcgttcccgtgcttctcccttgggcagcctctctcttgagcccctcaccctgtttctttctgtgaagcgagaatgtctgaaaataaataggaccatgc

SEQ ID NO: 137889 - DNA, 1304 bp, Homo sapiens
  Payload ID: 7003
  Gene Symbol: GLYCTK
  Gene Name: glycerate kinase
  Uniprot ID: Q8IVS8
  ENST ID: ENST00000477382
  CDS Start-End: 30-734
gtgccaggcagtgctgagagcagtggggcatggctgcagccctgcaggtcctgccccgcttggcccgagcccccttgcatccactcctctggcggggctcagtggcccgtctggccagcagcatggccttggcagagcaggccaggcagctgtttgagagtgctgtaggtgcagtgctgccgggccccatgctgcaccgggcactatccttggaccctggtggcagacagctgaaggtgcgggaccggaactttcagctgaggcaaaacctctacctggtgggctttggcaaggctgtgctgggtatggcagctgcagctgaggaactactgggccagcatcttgtgcagggcgtgatcagcgttcccaaggggatccgtgctgccatggagcgtgccggcaagcaggagatgctgctgaagccacatagccgtgtccaggtattcgagggtgcggaggacaacctcccggaccgcgatgcgctgcgggctgcactggccatccagcaactggctgagggactcacagctgatgacctgctgctcgtgctgatctcaggtggtgagcctcatcctgtcagatgtggtgggggaccctgtggaggtgattgccagtggccccaccgtggccagttcccacaatgtgcaagattgcctgcatatcctcaatcgctacggcctccgtgcagccctgccacgttctgtgaagactgtgctgtctcgggccgactctgacccccatgggccacacacctgtggccatgtcctgaatgtgatcattggctctaatgtgctggcgctagctgaggcccagcggcaggccgaggcactgggctaccaggctgtggtgctgagtgcagccatgcaaggtgatgtaaaaagtatggcccagttctacgggctgctggcccatgtggctagaacccgcctcaccccatccatggctggggcttctgtggaggaagatgcacagctccatgagctggcagctgagcttcagatcccagacctgcagctggaggaggctctggagaccatggcatggggaaggggcccagtctgcctgctggctggtggcgagcccacagtacagctgcagggctcgggcaggggtggccggaaccaggaactggccctgcgtgttggagcagagttgagaaggtggccgctggggccgatagatgtgctgtttttgagcggtggcaccgatgggcaggatgggcccacagaggctgctggggcctgggtcacacctgagcttgccagccaggctgcagctgagggcctggacatagccaccttcct

SEQ ID NO: 137890 - DNA, 2019 bp, Homo sapiens
  Payload ID: 7003
  Gene Symbol: GLYCTK
  Gene Name: glycerate kinase
  ENST ID: ENST00000486393
  CDS Start-End: 97-735
caccccctagtacttccgttctccagcgctgggcaccgcggccggagctgtgggctggcagccatgggtgccaggcagtgctgagagcagtggggcatggctgcagccctgcaggtcctgccccgcttggcccgagcccccttgcatccactcctctggcggggctcagtggcccgtctggccagcagcatggccttggcagagcaggccaggcagctgtttgagagtgctgtaggtgcagtgctgccgggccccatgctgcaccgggcactatccttggaccctggtggcagacagctgaaggtgcgggaccggaactttcagctgaggcaaaacctctacctggtgggctttggcaaggctgtgctgggtatggcagctgcagctgaggaactactgggccagcatcttgtgcagggcgtgatcagcgttcccaaggggatccgtgctgccatggagcgtgccggcaagcaggagatgctgctgaagccacatagccgtgtccaggtattcgagggtgcggaggacaacctcccggaccgcgatgcgctgcgggctgcactggccatccagcaactggctgagggactcacagctgatgacctgctgctcgtgctgatctcagaggtgggggttcagctctgctgcctgcccccatcccacctgtcacactggaggagaagcagacactcactagactgctggcagcccgtggagccaccatccaggagttgaacaccattcggaaggccctgtcccagctcaagggtggggggctggctcaggccgcctaccctgcccaggtggtgagcctcatcctgtcagatgtggtgggggaccctgtggaggtgattgccagtggccccaccgtggccagttcccacaatgtgcaagattgcctgcatatcctcaatcgctacggcctccgtgcagccctgccacgttctgtgaagactgtgctgtctcgggccgactctgacccccatgggccacacacctgtggccatgtcctgaatgtgatcattggctctaatgtgctggcgctagctgaggcccagcggcaggccgaggcactgggctaccaggctgtggtgctgagtgcagccatgcaaggtgatgtaaaaagtatggcccagttctacgggctgctggcccatgtggctagaacccgcctcaccccatccatggctggggcttctgtggaggaagatgcacagctccatgagctggcagctgagcttcagatcccagacctgcagctggaggaggctctggagaccatggcatggggaaggggcccagtctgcctgctggctggtggcgagcccacagtacagctgcagggctcgggcaggggtggccggaaccaggaactggccctgcgtgttggagcagagttgagaaggtggccgctggggccgatagatgtgctgtttttgagcggtggcaccgatgggcaggatgggcccacagaggctgctggggcctgggtcacacctgagcttgccagccaggctgcagctgagggcctggacatagccaccttcctagcccacaatgactcacataccttcttctgctgcctccagggtggggcacacctgctgcacacagggatgacaggtaccaatgtcatggacacccacctcttgttcctgcggcctcggtgatggcataggtcacattttgggagttcagaggaggcctacaagggcaaggtcagatggcagagcaaggttggtcctcagggcctctctaagccttagggcccctcctctccttggccttggctgtttggttaactgtcaccttccactcagggcctctgctctatatctattcccttccagccagactggcagatgggggcttccccctacccctgaggatgaggacaagcccctcggccagttcagcgttcccgtgcttctcccttgggcagcctctctcttgagcccctcaccctgtttctttctgtgaagcgagaatgtctgaaaataaataggaccatgccatggg

SEQ ID NO: 137891 - DNA, 464 bp, Homo sapiens
  Payload ID: 7004
  Gene Symbol: GK
  Gene Name: glycerol kinase
  ENST ID: ENST00000378938
  CDS Start-End: 1-285
aagattttggatgccatgaatcgagactgtggaattccactcagtcatttgcaggtagatggaggaatgaccagcaacaaaattcttatgcagctacaagcagacattctgtatataccagtagtgaagccctcaatgcccgaaaccactgcactgggtgcggctatggcggcaggggctgcagaaggagtcggcgtatggagtctcgaacccgaggatttgtctgccgtcacgatggagcggtttgaacctcagattaatgcggagggtacatttaaagaatgaaatgttcagtgatatactgtgaaaacgaccttagtgcacgggagttttgtttttctgtttagttaaaagttaaggaaccaagtaaaatagtaaatgttatcattgcagattcggctgccaagcatattgggctttactgaataaatgtgaatgagagaaatcgttgcttatcaaaagaa

SEQ ID NO: 137892 - DNA, 458 bp, Homo sapiens
  Payload ID: 7004
  Gene Symbol: GK
  Gene Name: glycerol kinase
  ENST ID: ENST00000378941
  CDS Start-End: 1-357
atggcagcctcaaagaaggcagttttggggccattggtgggggcggtggaccagggcaccagttcgacgcgctttttggttttcaattcaaaaacagctgaactacttagtcatcatcaagtagaaataaaacaagagttcccaagagaaggatgggtggaacaggaccctaaggaaattctacattctgtctatgagtgtatagagaaaacatgtgagaaacttggacagctcaatattgatatttccaacataaaagctattggtgtcagcaaccagagggaaaccactgtagtctgggacaagataactggagagcctctctacaatgctgtggattgtcttacaaatgagtgaatgtttgccaaattgttttataacccctgctgtttgtgacatctaaaagagatcttacctccttaccctcaaaaaattaaaattacgtgtgttcacagtca

SEQ ID NO: 137893 - DNA, 3707 bp, Homo sapiens
  Payload ID: 7004
  Gene Symbol: GK
  Gene Name: glycerol kinase
  Uniprot ID: P32189
  ENST ID: ENST00000378943
  CDS Start-End: 180-1841
gggccggaggggcggggtgagaaggctgcgcgcgggtaaaggggccgcctcgagcgcggtccgagcgttcagcggacgcgcgcggcctcgatctctggactcgtcacctgcccctccccctcccgccgccgtcacccaggaaaccggccgcaatcgccggccgacctgaagctggtttcatggcagcctcaaagaaggcagttttggggccattggtgggggcggtggaccagggcaccagttcgacgcgctttttggttttcaattcaaaaacagctgaactacttagtcatcatcaagtagaaataaaacaagagttcccaagagaaggatgggtggaacaggaccctaaggaaattctacattctgtctatgagtgtatagagaaaacatgtgagaaacttggacagctcaatattgatatttccaacataaaagctattggtgtcagcaaccagagggaaaccactgtagtctgggacaagataactggagagcctctctacaatgctgtggtgtggcttgatctaagaacccagtctaccgttgagagtcttagtaaaagaattccaggaaataataactttgtcaagtccaagacaggccttccacttagcacttacttcagtgcagtgaaacttcgttggctccttgacaatgtgagaaaagttcaaaaggccgttgaagaaaaacgagctctttttgggactattgattcatggcttatttggagtttgacaggaggagtcaatggaggtgtccactgtacagatgtaacaaatgcaagtaggactatgcttttcaacattcattctttggaatgggataaacaactctgcgaattttttggaattccaatggaaattcttccaaatgtccggagttcttctgagatctatggcctaatgaaagctggggccttggaaggtgtgccaatatctgggtgtttaggggaccagtctgctgcattggtgggacaaatgtgcttccagattggacaagccaaaaatacgtatggaacaggatgtttcttactatgtaatacaggccataagtgtgtattttctgatcatggccttctcaccacagtggcttacaaacttggcagagacaaaccagtatattatgctttggaaggttctgtagctatagctggtgctgttattcgctggctaagagacaatcttggaattataaagacctcagaagaaattgaaaaacttgctaaagaagtaggtacttcttatggctgctacttcgtcccagcattttcggggttatatgcaccttattgggagcccagcgcaagagggataatctgtggactcactcagttcaccaataaatgccatattgcttttgctgcattagaagctgtttgtttccaaactcgagagattttggatgccatgaatcgagactgtggaattccactcagtcatttgcaggtagatggaggaatgaccagcaacaaaattcttatgcagctacaagcagacattctgtatataccagtagtgaagccctcaatgcccgaaaccactgcactgggtgcggctatggcggcaggggctgcagaaggagtcggcgtatggagtctcgaacccgaggatttgtctgccgtcacgatggagcggtttgaacctcagattaatgcggaggaaagtgaaattcgttattctacatggaagaaagctgtgatgaagtcaatgggttgggttacaactcaatctccagaaagtggtgaccctagtatcttctgtagtctgcccttgggcttttttatagtgagtagcatggtaatgttaatcggagcaaggtacatctcaggtattccataaaacctaccaactcatggattcccaagatgtgagctttttacataatgaaagaacccagcaattctgtctcttaatgcaatgacactattcatagactttgattttatttataagccacttgctgcatgaccctccaagtagacctgtggcttaaaataaagaaaatgcagcaaaaagaatgctatagaaatatttggtggttttttttttttttaaacatccacagttaaggttgggccagctacctttggggctgaccccctccattgccataacatcctgctccattccctctaagatgtaggaagaattcggatccttaccattggaatcttccatcgaacatactcaaacacttttggaccaggatttgagtctctgcatgacatatacttgattaaaaggttattactaacctgttaaaaatcagcagctctttgcttttaacagacaccctaaaagtcttcttttctacatagttgaagacagcaacatcttcactgaatgtttgaatagaaacctctactaaattattaaaatagacatttagtgttctcacagcttggatatttttctgaaaagttatttgccaaaactgaaatccttcagatgttttccatggtcccactaattataatgactttctgtctggatcttataggaaaagatactttcttttttcttccatctttcctttttatattttttactttgtatgtataacatacatgcctatatattttatacactgagggtagcccatttataaattaagagcacattatattcagaaggttctaacagggctggtcttaagtgaaccactgtgtatataaatatgttggaaaacagctgtatacatttttgggcaacggttatgcataatatttaccaggagaatttttttcttaacaagccaacatttaaaatttatgttttatgtcaataaaagaaaatatactttattgtgacttcaactatatttcttatcccttacatttttatttaattgtcttagcttaaaaaaagaagaaactgtggaatactacagtaaatattgttttcaaacacaagcaataattcaaatagttatttttcttttgaattaattttagacatattttggatcctattgaggggataagaggatgtcaaaaaagttaaatacctaagtagaaaaaaatatagaaataaagccaagaatctctttcagttcaaatgttatcaattgttaataagaaattgctatctgggatgacagaattacctctgcttagtatctcattataactgaaagaaggtttatcattacaaataccttccaatgaaaccaagaatttctcaaaatatttaatgtcacatattataagaagttacctaatcctgcttcttaacatcaatttttaaaaatatcttaaaattactttgttttgtagtaaacagtgaagaaaagattgcctcctaattatttttttcaatgagtgctgaatgggaaaacatttatatcttactataaaaggttctgttttgtttggaatcaatggtagctttattgactgttctgattgtgctgtttctaatttattgaatctgctaggttttattgatgcagccaccacttaagtgacataaatattatagaaaggtactgtgaaatgatcactttgtggcaggggtacttttaaacataaatgtttctacaaaagtaggttgagttcattgtaaataattgtgaaagccactgttcaaataattttaagattacattaatttttctataaattggaagatttataaatgtttgaaattgtacacattgatatttaatgacaaatttacttaaaataaattgaccccttgttctta

SEQ ID NO: 137894 - DNA, 2063 bp, Homo sapiens
  Payload ID: 7004
  Gene Symbol: GK
  Gene Name: glycerol kinase
  Uniprot ID: P32189
  ENST ID: ENST00000378945
  CDS Start-End: 61-1635
ctcccgccgccgtcacccaggaaaccggccgcaatcgccggccgacctgaagctggtttcatggcagcctcaaagaaggcagttttggggccattggtgggggcggtggaccagggcaccagttcgacgcgctttttggttttcaattcaaaaacagctgaactacttagtcatcatcaagtagaaataaaacaagagttcccaagagaaggatgggtggaacaggaccctaaggaaattctacattctgtctatgagtgtatagagaaaacatgtgagaaacttggacagctcaatattgatatttccaacataaaagctattggtgtcagcaaccagagggaaaccactgtagtctgggacaagataactggagagcctctctacaatgctgtggtgtggcttgatctaagaacccagtctaccgttgagagtcttagtaaaagaattccaggaaataataactttgtcaagtccaagacaggccttccacttagcacttacttcagtgcagtgaaacttcgttggctccttgacaatgtgagaaaagttcaaaaggccgttgaagaaaaacgagctctttttgggactattgattcatggcttatttggagtttgacaggaggagtcaatggaggtgtccactgtacagatgtaacaaatgcaagtaggactatgcttttcaacattcattctttggaatgggataaacaactctgcgaattttttggaattccaatggaaattcttccaaatgtccggagttcttctgagatctatggcctaatgaaagctggggccttggaaggtgtgccaatatctgggtgtttaggggaccagtctgctgcattggtgggacaaatgtgcttccagattggacaagccaaaaatacgtatggaacaggatgtttcttactatgtaatacaggccataagtgtgtattttctgatcatggccttctcaccacagtggcttacaaacttggcagagacaaaccagtatattatgctttggaaggttctgtagctatagctggtgctgttattcgctggctaagagacaatcttggaattataaagacctcagaagaaattgaaaaacttgctaaagaagtaggtacttcttatggctgctacttcgtcccagcattttcggggttatatgcaccttattgggagcccagcgcaagagggataatctgtggactcactcagttcaccaataaatgccatattgcttttgctgcattagaagctgtttgtttccaaactcgagagattttggatgccatgaatcgagactgtggaattccactcagtcatttgcaggtagatggaggaatgaccagcaacaaaattcttatgcagctacaagcagacattctgtatataccagtagtgaagccctcaatgcccgaaaccactgcactgggtgcggctatggcggcaggggctgcagaaggagtcggcgtatggagtctcgaacccgaggatttgtctgccgtcacgatggagcggtttgaacctcagattaatgcggaggaaagtgaaattcgttattctacatggaagaaagctgtgatgaagtcaatgggttgggttacaactcaatctccagaaagtggtattccataaaacctaccaactcatggattcccaagatgtgagctttttacataatgaaagaacccagcaattctgtctcttaatgcaatgacactattcatagactttgattttatttataagccacttgctgcatgaccctccaagtagacctgtggcttaaaataaagaaaatgcagcaaaaagaatgctatagaaatatttggtggttttttttttttttaaacatccacagttaaggttgggccagctacctttggggctgaccccctccattgccataacatcctgctccattccctctaagatgtaggaagaattcggatccttaccattggaatcttccatcgaacatactcaaacacttttggaccaggatttgagtctctgcatgacatatacttgattaaaaggttattactaacctgttaaaaatc

SEQ ID NO: 137895 - DNA, 3638 bp, Homo sapiens
  Payload ID: 7004
  Gene Symbol: GK
  Gene Name: glycerol kinase
  Uniprot ID: P32189
  ENST ID: ENST00000378946
  CDS Start-End: 180-1772
gggccggaggggcggggtgagaaggctgcgcgcgggtaaaggggccgcctcgagcgcggtccgagcgttcagcggacgcgcgcggcctcgatctctggactcgtcacctgcccctccccctcccgccgccgtcacccaggaaaccggccgcaatcgccggccgacctgaagctggtttcatggcagcctcaaagaaggcagttttggggccattggtgggggcggtggaccagggcaccagttcgacgcgctttttggttttcaattcaaaaacagctgaactacttagtcatcatcaagtagaaataaaacaagagttcccaagagaaggatgggtggaacaggaccctaaggaaattctacattctgtctatgagtgtatagagaaaacatgtgagaaacttggacagctcaatattgatatttccaacataaaagctattggtgtcagcaaccagagggaaaccactgtagtctgggacaagataactggagagcctctctacaatgctgtggtgtggcttgatctaagaacccagtctaccgttgagagtcttagtaaaagaattccaggaaataataactttgtcaagtccaagacaggccttccacttagcacttacttcagtgcagtgaaacttcgttggctccttgacaatgtgagaaaagttcaaaaggccgttgaagaaaaacgagctctttttgggactattgattcatggcttatttggagtttgacaggaggagtcaatggaggtgtccactgtacagatgtaacaaatgcaagtaggactatgcttttcaacattcattctttggaatgggataaacaactctgcgaattttttggaattccaatggaaattcttccaaatgtccggagttcttctgagatctatggcctaatgaaaatctctcatagcgtgaaagctggggccttggaaggtgtgccaatatctgggtgtttaggggaccagtctgctgcattggtgggacaaatgtgcttccagattggacaagccaaaaatacgtatggaacaggatgtttcttactatgtaatacaggccataagtgtgtattttctgatcatggccttctcaccacagtggcttacaaacttggcagagacaaaccagtatattatgctttggaaggttctgtagctatagctggtgctgttattcgctggctaagagacaatcttggaattataaagacctcagaagaaattgaaaaacttgctaaagaagtaggtacttcttatggctgctacttcgtcccagcattttcggggttatatgcaccttattgggagcccagcgcaagagggataatctgtggactcactcagttcaccaataaatgccatattgcttttgctgcattagaagctgtttgtttccaaactcgagagattttggatgccatgaatcgagactgtggaattccactcagtcatttgcaggtagatggaggaatgaccagcaacaaaattcttatgcagctacaagcagacattctgtatataccagtagtgaagccctcaatgcccgaaaccactgcactgggtgcggctatggcggcaggggctgcagaaggagtcggcgtatggagtctcgaacccgaggatttgtctgccgtcacgatggagcggtttgaacctcagattaatgcggaggaaagtgaaattcgttattctacatggaagaaagctgtgatgaagtcaatgggttgggttacaactcaatctccagaaagtggtattccataaaacctaccaactcatggattcccaagatgtgagctttttacataatgaaagaacccagcaattctgtctcttaatgcaatgacactattcatagactttgattttatttataagccacttgctgcatgaccctccaagtagacctgtggcttaaaataaagaaaatgcagcaaaaagaatgctatagaaatatttggtggttttttttttttttaaacatccacagttaaggttgggccagctacctttggggctgaccccctccattgccataacatcctgctccattccctctaagatgtaggaagaattcggatccttaccattggaatcttccatcgaacatactcaaacacttttggaccaggatttgagtctctgcatgacatatacttgattaaaaggttattactaacctgttaaaaatcagcagctctttgcttttaacagacaccctaaaagtcttcttttctacatagttgaagacagcaacatcttcactgaatgtttgaatagaaacctctactaaattattaaaatagacatttagtgttctcacagcttggatatttttctgaaaagttatttgccaaaactgaaatccttcagatgttttccatggtcccactaattataatgactttctgtctggatcttataggaaaagatactttcttttttcttccatctttcctttttatattttttactttgtatgtataacatacatgcctatatattttatacactgagggtagcccatttataaattaagagcacattatattcagaaggttctaacagggctggtcttaagtgaaccactgtgtatataaatatgttggaaaacagctgtatacatttttgggcaacggttatgcataatatttaccaggagaatttttttcttaacaagccaacatttaaaatttatgttttatgtcaataaaagaaaatatactttattgtgacttcaactatatttcttatcccttacatttttatttaattgtcttagcttaaaaaaagaagaaactgtggaatactacagtaaatattgttttcaaacacaagcaataattcaaatagttatttttcttttgaattaattttagacatattttggatcctattgaggggataagaggatgtcaaaaaagttaaatacctaagtagaaaaaaatatagaaataaagccaagaatctctttcagttcaaatgttatcaattgttaataagaaattgctatctgggatgacagaattacctctgcttagtatctcattataactgaaagaaggtttatcattacaaataccttccaatgaaaccaagaatttctcaaaatatttaatgtcacatattataagaagttacctaatcctgcttcttaacatcaatttttaaaaatatcttaaaattactttgttttgtagtaaacagtgaagaaaagattgcctcctaattatttttttcaatgagtgctgaatgggaaaacatttatatcttactataaaaggttctgttttgtttggaatcaatggtagctttattgactgttctgattgtgctgtttctaatttattgaatctgctaggttttattgatgcagccaccacttaagtgacataaatattatagaaaggtactgtgaaatgatcactttgtggcaggggtacttttaaacataaatgtttctacaaaagtaggttgagttcattgtaaataattgtgaaagccactgttcaaataattttaagattacattaatttttctataaattggaagatttataaatgtttgaaattgtacacattgatatttaatgacaaatttacttaaaataaattgaccccttgttctta

SEQ ID NO: 137896 - DNA, 4573 bp, Homo sapiens
  Payload ID: 7004
  Gene Symbol: GK
  Gene Name: glycerol kinase
  Uniprot ID: P32189
  ENST ID: ENST00000427190
  CDS Start-End: 180-1859
gggccggaggggcggggtgagaaggctgcgcgcgggtaaaggggccgcctcgagcgcggtccgagcgttcagcggacgcgcgcggcctcgatctctggactcgtcacctgcccctccccctcccgccgccgtcacccaggaaaccggccgcaatcgccggccgacctgaagctggtttcatggcagcctcaaagaaggcagttttggggccattggtgggggcggtggaccagggcaccagttcgacgcgctttttggttttcaattcaaaaacagctgaactacttagtcatcatcaagtagaaataaaacaagagttcccaagagaaggatgggtggaacaggaccctaaggaaattctacattctgtctatgagtgtatagagaaaacatgtgagaaacttggacagctcaatattgatatttccaacataaaagctattggtgtcagcaaccagagggaaaccactgtagtctgggacaagataactggagagcctctctacaatgctgtggtgtggcttgatctaagaacccagtctaccgttgagagtcttagtaaaagaattccaggaaataataactttgtcaagtccaagacaggccttccacttagcacttacttcagtgcagtgaaacttcgttggctccttgacaatgtgagaaaagttcaaaaggccgttgaagaaaaacgagctctttttgggactattgattcatggcttatttggagtttgacaggaggagtcaatggaggtgtccactgtacagatgtaacaaatgcaagtaggactatgcttttcaacattcattctttggaatgggataaacaactctgcgaattttttggaattccaatggaaattcttccaaatgtccggagttcttctgagatctatggcctaatgaaaatctctcatagcgtgaaagctggggccttggaaggtgtgccaatatctgggtgtttaggggaccagtctgctgcattggtgggacaaatgtgcttccagattggacaagccaaaaatacgtatggaacaggatgtttcttactatgtaatacaggccataagtgtgtattttctgatcatggccttctcaccacagtggcttacaaacttggcagagacaaaccagtatattatgctttggaaggttctgtagctatagctggtgctgttattcgctggctaagagacaatcttggaattataaagacctcagaagaaattgaaaaacttgctaaagaagtaggtacttcttatggctgctacttcgtcccagcattttcggggttatatgcaccttattgggagcccagcgcaagagggataatctgtggactcactcagttcaccaataaatgccatattgcttttgctgcattagaagctgtttgtttccaaactcgagagattttggatgccatgaatcgagactgtggaattccactcagtcatttgcaggtagatggaggaatgaccagcaacaaaattcttatgcagctacaagcagacattctgtatataccagtagtgaagccctcaatgcccgaaaccactgcactgggtgcggctatggcggcaggggctgcagaaggagtcggcgtatggagtctcgaacccgaggatttgtctgccgtcacgatggagcggtttgaacctcagattaatgcggaggaaagtgaaattcgttattctacatggaagaaagctgtgatgaagtcaatgggttgggttacaactcaatctccagaaagtggtgaccctagtatcttctgtagtctgcccttgggcttttttatagtgagtagcatggtaatgttaatcggagcaaggtacatctcaggtattccataaaacctaccaactcatggattcccaagatgtgagctttttacataatgaaagaacccagcaattctgtctcttaatgcaatgacactattcatagactttgattttatttataagccacttgctgcatgaccctccaagtagacctgtggcttaaaataaagaaaatgcagcaaaaagaatgctatagaaatatttggtggttttttttttttttaaacatccacagttaaggttgggccagctacctttggggctgaccccctccattgccataacatcctgctccattccctctaagatgtaggaagaattcggatccttaccattggaatcttccatcgaacatactcaaacacttttggaccaggatttgagtctctgcatgacatatacttgattaaaaggttattactaacctgttaaaaatcagcagctctttgcttttaacagacaccctaaaagtcttcttttctacatagttgaagacagcaacatcttcactgaatgtttgaatagaaacctctactaaattattaaaatagacatttagtgttctcacagcttggatatttttctgaaaagttatttgccaaaactgaaatccttcagatgttttccatggtcccactaattataatgactttctgtctggatcttataggaaaagatactttcttttttcttccatctttcctttttatattttttactttgtatgtataacatacatgcctatatattttatacactgagggtagcccatttataaattaagagcacattatattcagaaggttctaacagggctggtcttaagtgaaccactgtgtatataaatatgttggaaaacagctgtatacatttttgggcaacggttatgcataatatttaccaggagaatttttttcttaacaagccaacatttaaaatttatgttttatgtcaataaaagaaaatatactttattgtgacttcaactatatttcttatcccttacatttttatttaattgtcttagcttaaaaaaagaagaaactgtggaatactacagtaaatattgttttcaaacacaagcaataattcaaatagttatttttcttttgaattaattttagacatattttggatcctattgaggggataagaggatgtcaaaaaagttaaatacctaagtagaaaaaaatatagaaataaagccaagaatctctttcagttcaaatgttatcaattgttaataagaaattgctatctgggatgacagaattacctctgcttagtatctcattataactgaaagaaggtttatcattacaaataccttccaatgaaaccaagaatttctcaaaatatttaatgtcacatattataagaagttacctaatcctgcttcttaacatcaatttttaaaaatatcttaaaattactttgttttgtagtaaacagtgaagaaaagattgcctcctaattatttttttcaatgagtgctgaatgggaaaacatttatatcttactataaaaggttctgttttgtttggaatcaatggtagctttattgactgttctgattgtgctgtttctaatttattgaatctgctaggttttattgatgcagccaccacttaagtgacataaatattatagaaaggtactgtgaaatgatcactttgtggcaggggtacttttaaacataaatgtttctacaaaagtaggttgagttcattgtaaataattgtgaaagccactgttcaaataattttaagattacattaatttttctataaattggaagatttataaatgtttgaaattgtacacattgatatttaatgacaaatttacttaaaataaattgaccccttgttcttacttgcatttctcatttacagactagaacttagttgaaagttaaattaagaaagatgtttcagaggccgggcacggtggctgacgcctgtaatcccagcactttgggaggccgaggtgggcagatcacctgaggtcaggagttcgggactagcctaaccgacatggagaaaccctatctctactaaaaaaaaaaaaagatgtttcaggacatgtgaaacttggctgttagcgcttgatagggcacactctgaagagttaaccaacagccaaagaagtaatttctgtaatgatgaacactttaatcattctattagaagaaactacactgtcccatctcagcatttgcaaaaaataatgttggtaaggtcagcagccattatcaacagggccttgcatggctaactttgaccaccatttttctctcaacctgataggcaacacctcaatcctttgttctccaactaatcagtaaaataagtaatgcatctctgcttctgtaatgatatcttagaatttttagtatgtttcttttgaagtgcccaaagcccaattctttgggatatcttttgggtatctggtatcatgtgggagtgaagaaagaaagtttttggagaaaccaacaaatgaaagctgtgatagcacagaagctaatggcattgacagtggagtaggtagtatttaatctgtagtgtttacaacatagtagatagaagtacaaaaatttttttaactataactctttaatagcttgttttatctagtaatatttaaataatgaagtttccttgatcctttgcttttgcaacctaacaactttaataataagttcacacaataaacaaattagt

SEQ ID NO: 137897 - DNA, 371 bp, Homo sapiens
  Payload ID: 7004
  Gene Symbol: GK
  Gene Name: glycerol kinase
  ENST ID: ENST00000425166
  CDS Start-End: 1-371
aatgctccagctgctccagtttctcctggcccttcagttccagttgccgttgttccctctggctcttcagttccagctcctggtacttcctcagtgtggcttgatctaagaacccagtctaccgttgagagtcttagtaaaagaattccaggaaataataactttgtcaagtccaagacaggccttccacttagcacttacttcagtgcagtgaaacttcgttggctccttgacaatgtgagaaaagttcaaaaggccgttgaagaaaaacgagctctttttgggactattgattcatggcttatttggagtttgacaggaggagtcaatggaggtgtccactgtacagatgtaacaaatgcaagtaggac

SEQ ID NO: 137898 - DNA, 420 bp, Homo sapiens
  Payload ID: 7004
  Gene Symbol: GK
  Gene Name: glycerol kinase
  ENST ID: ENST00000471362
  CDS Start-End: 32-304
cgcaatcgccggccgacctgaagctggtttcatggcagcctcaaagaaggcagttttggggccattggtgggggcggtggaccagggcaccagttcgacgcgctttttggttttcaattcaaaaacagctgaactacttagtcatcatcaagtagaaataaaacaagagttcccaagagaaggctattggtgtcagcaaccagagggaaaccactgtagtctgggacaagataactggagagcctctctacaatgctgtggtccaagacaggccttccacttagcacttacttcagtgcagtgaaacttcgttggctccttgacaatgtgagaaaagttcaaaaggccgttgaagaaaaacgagctctttttgggactattgattcatggcttatttggagtttgacaggaggagtcaat

SEQ ID NO: 137899 - DNA, 2401 bp, Homo sapiens
  Payload ID: 7004
  Gene Symbol: GK
  Gene Name: glycerol kinase
  ENST ID: ENST00000481024
  CDS Start-End: 50-358
gtcacccaggaaaccggccgcaatcgccggccgacctgaagctggtttcatggcagcctcaaagaaggcagttttggggccattggtgggggcggtggaccagggcaccagttcgacgcgctttttggttttcaattcaaaaacagctgaactacttagtcatcatcaagtagaaataaaacaagagttcccaagagaaggatgggtggaacaggaccctaaggaaattctacattctgtctatgagtgtatagagaaaacatgtgagaaacttggacagctcaatattgatatttccaacataaaagataaccctacctcctgcttcatggagaaagttgagggtctgcggccttaaatcctcaccttcctgttgctgtgcttaatatctggatctcctgccaactttccttcatcacaagggcagcaatagccttctgccccacttggagctcctccctccacttgtgctgctattggtgtcagcaaccagagggaaaccactgtagtctgggacaagataactggagagcctctctacaatgctgtggtgtggcttgatctaagaacccagtctaccgttgagagtcttagtaaaagaattccaggaaataataactttgtcaagtccaagacaggccttccacttagcacttacttcagtgcagtgaaacttcgttggctccttgacaatgtgagaaaagttcaaaaggccgttgaagaaaaacgagctctttttgggactattgattcatggcttatttggagtttgacaggaggagtcaatggaggtgtccactgtacagatgtaacaaatgcaagtaggactatgcttttcaacattcattctttggaatgggataaacaactctgcgaattttttggaattccaatggaaattcttccaaatgtccggagttcttctgagatctatggcctaatgaaaatctctcatagcgtgaaagctggggccttggaaggtgtgccaatatctgggtgtttaggggaccagtctgctgcattggtgggacaaatgtgcttccagattggacaagccaaaaatacgtatggaacaggatgtttcttactatgtaatacaggccataagtgtgtattttctgatcatggccttctcaccacagtggcttacaaacttggcagagacaaaccagtatattatgctttggaaggttctgtagctatagctggtgctgttattcgctggctaagagacaatcttggaattataaagacctcagaagaaattgaaaaacttgctaaagaagtaggtacttcttatggctgctacttcgtcccagcattttcggggttatatgcaccttattgggagcccagcgcaagagggataatctgtggactcactcagttcaccaataaatgccatattgcttttgctgcattagaagctgtttgtttccaaactcgagagattttggatgccatgaatcgagactgtggaattccactcagtcatttgcaggtagatggaggaatgaccagcaacaaaattcttatgcagctacaagcagacattctgtatataccagtagtgaagccctcaatgcccgaaaccactgcactgggtgcggctatggcggcaggggctgcagaaggagtcggcgtatggagtctcgaacccgaggatttgtctgccgtcacgatggagcggtttgaacctcagattaatgcggaggaaagtgaaattcgttattctacatggaagaaagctgtgatgaagtcaatgggttgggttacaactcaatctccagaaagtggtgaccctagtatcttctgtagtctgcccttgggcttttttatagtgagtagcatggtaatgttaatcggagcaaggtacatctcaggtattccataaaacctaccaactcatggattcccaagatgtgagctttttacataatgaaagaacccagcaattctgtctcttaatgcaatgacactattcatagactttgattttatttataagccacttgctgcatgaccctccaagtagacctgtggcttaaaataaagaaaatgcagcaaaaagaatgctatagaaatatttggtggttttttttttttttaaacatccacagttaaggttgggccagctacctttggggctgaccccctccattgccataacatcctgctccattccctctaagatgtaggaagaattcggatccttaccattggaatcttccatcgaacatactcaaacacttttggaccaggatttgagtctctgcatgacatatacttgattaaaaggttattactaacctgttaaaaatcagcagctctttgcttttaacagacaccctaaaagtcttcttttctacatagttgaagacagcaacatcttcactgaatg

SEQ ID NO: 137900 - DNA, 565 bp, Homo sapiens
  Payload ID: 7004
  Gene Symbol: GK
  Gene Name: glycerol kinase
  ENST ID: ENST00000487652
  CDS Start-End: 39-152
aaccggccgcaatcgccggccgacctgaagctggtttcatggcagcctcaaagaaggcagttttggggccattggtgggggcggtggaccagggcaccagttcgacgcgctttttgctattggtgtcagcaaccagagggaaaccactgtagtctgggacaagataactggagagcctctctacaatgctgtggtgtggcttgatctaagaacccagtctaccgttgagagtcttagtaaaagaattccaggaaataataactttgtcaagtccaagacaggccttccacttagcacttacttcagtgcagtgaaacttcgttggctccttgacaatgtgagaaaagttcaaaaggccgttgaagaaaaacgagctctttttgggactattgattcatggcttatttggagtttgacaggaggagtcaatggaggtgtccactgtacagatgtaacaaatgcaagtaggactatgcttttcaacattcattctttggaatgggataaacaactctgcgaattttttggaattccaatggaaattcttccaaatgtccggagttct

SEQ ID NO: 137901 - DNA, 633 bp, Homo sapiens
  Payload ID: 7004
  Gene Symbol: GK
  Gene Name: glycerol kinase
  ENST ID: ENST00000488296
  CDS Start-End: 1-126
agtgcaagggtagctaagttcaggtgctgtttgattccagactcagacagtatcacctgcatccccctcaagcctgccttttctgggatggctcctgatgtggcatattcaactcccacttcatgagggcagcaggcccaagccacacactgccaagtgtggcttgatctaagaacccagtctaccgttgagagtcttagtaaaagaattccaggaaataataactttgtcaagtccaagacaggccttccacttagcacttacttcagtgcagtgaaacttcgttggctccttgacaatgtgagaaaagttcaaaaggccgttgaagaaaaacgagctctttttgggactattgattcatggcttatttggagtttgacaggaggagtcaatggaggtgtccactgtacagatgtaacaaatgcaagtaggactatgcttttcaacattcattctttggaatgggataaacaactctgcgaattttttggaattccaatggaaattcttccaaatgtccggagttcttctgagatctatggcctaatgaaagctggggccttggaaggtgtgccaatatctgggtgtttaggggaccagtctgctgcattggtgggacaaatgtgcttccag

SEQ ID NO: 137902 - DNA, 582 bp, Homo sapiens
  Payload ID: 7004
  Gene Symbol: GK
  Gene Name: glycerol kinase
  ENST ID: ENST00000479048
  CDS Start-End: 43-282
aggaaaccggccgcaatcgccggccgacctgaagctggtttcatggcagcctcaaagaaggcagttttggggccattggtgggggcggtggaccagggcaccagttcgacgcgctttttggttttcaattcaaaaacagctgaactacttagtcatcatcaagtagaaataaaacaagagttcccaagagaaggctattggtgtcagcaaccagagggaaaccactgtagtctgggacaagataactggagagcctctctacaatgctgtggtgtggcttgatctaagaacccagtctaccgttgagagtcttagtaaaagaattccaggaaataataactttgtcaagtccaagacaggccttccacttagcacttacttcagtgcagtgaaacttcgttggctccttgacaatgtgagaaaagttcaaaaggccgttgaagaaaaacgagctctttttgggactattgattcatggcttatttggataattttaaaacaaatgccagacatttcattttatttgtaaatatttcaagtttgacaggaggagtcaatggaggtgtccactgtacagatgta

SEQ ID NO: 137903 - DNA, 1942 bp, Homo sapiens
  Payload ID: 7005
  Gene Symbol: GK2
  Gene Name: glycerol kinase 2
  Uniprot ID: Q14410
  ENST ID: ENST00000358842
  CDS Start-End: 94-1755
gccttgtgctcctgactggctgcgctccctgcccccaacaccgccgtggcctgggaaacggtcccagagctgctgagccgacctactggtgtcatggcagccccaaagacagcagctgtggggccgttggtgggagcggtggtccagggcaccaactccactcgctttctggttttcaattcaaaaacagcggaactacttagtcatcacaaagtggaattaacacaagagttcccaaaagaaggatgggtggaacaagaccctaaagaaattcttcagtctgtctacgagtgtatagcgagaacgtgtgagaaacttgacgaactgaatattgatatatccaacataaaagctgttggtgtcagcaatcagagggaaaccactgtaatctgggacaagttaacaggagagcctctctacaatgctgtggtgtggcttgatctaagaacccagactactgttgaggatcttagtaaaaaaattccaggaaatagtaacttcgtcaagtctaagacaggccttccactcagcacttacttcagtgcagtaaaacttcgttggatgcttgacaatgtgagaaacgtccaaaaggctgttgaagaaggtagagctctttttggtaccattgattcatggcttatctggagtttgacaggaggagttaatggaggcgtgcattgtacagatgtaacaaatgcaagtaggacaatgctttttaatatccattctttggaatgggataaagagctctgtgacttttttgaaattccaatggaccttcttccaaatgtcttcagttcttctgagatctatggcctaattaaaactggagccctggaaggtgtgccaatatctgggtgtttgggggaccaatgtgctgcattagtaggacaaatgtgcttccaggagggacaagccaaaaacacctatggaacaggttgcttcttactgtgtaatacgggtcgtaaatgtgtgttttctgaacatggccttttgaccacagtagcttacaaactaggcagagagaagccagcatattatgcactggaaggttctgttgctatagcaggtgctgttattcgttggctaagagacaatcttggaattatagagacctcaggagacattgaaagacttgctaaagaagtaggaacttcttatggctgttactttgtcccagccttttcagggttatatgcaccttattgggagcccagtgcaagagggatactctgtggcctcactcagtttaccaataaatgtcatattgcttttgctgcattagaagctgtttgtttccaaacccgagagattttggaagccatgaaccgtgactgtggaattccacttcgtcatttgcaggtagatggaggaatgaccaacaacaaagttcttatgcagctacaagcagatattcttcatattccagtaataaaaccctttatgcctgaaacaactgcactaggagctgccatggcagcaggggctgcagagggagtaagcgtttggagccttgaaccccaggctttgtcagttctcaggatggaacgatttgaaccacagatccaggccacagaaagtgaaattcgttatgccacatggaagaaagccgtaatgaagtcaatgggttgggttaccagtcagtctcctgaaggtggtgatccttctatcttctctagtctgcctttgggattttttatagtgagtagcatggtaatgctaattggagcaagatatatctcgggtgtgccataataataccagctatggagtcccaagatgtaaacattttacataatgaaagcatatagcagttctgcctcttaatataatgacactattatagactctgattttgtttataaaccacttgctacatgacccatgaaaaccctagacttgtgacctgaaataaagaaaatacgttagaagagcactgtag

SEQ ID NO: 137904 - DNA, 520 bp, Homo sapiens
  Payload ID: 7006
  Gene Symbol: GK5
  Gene Name: glycerol kinase 5 (putative)
  ENST ID: ENST00000463349
  CDS Start-End: 1-52
ttttgttccatcttttagtggattacagaccctgtctcactctgtcacctaggctggagtgcagtaacgcgatcacggctcattgcagcctcaaacccctgggcacaagcaatccttccacctcagcctcccaagtagctgtaactacaggctccattaaatgacccctgggcatgtgcctcttttatgggtttgaagccttctaccagtaaataccatcttgtacgagcaatattggagtcaatagctttcagaaacaaacagttatatgagatgatgaagaaagagattcatattcctgtaagaaaaatccgggcagatggaggagtttgtaagaatggttttgtcatgcagatgacttcagacctgattaatgagaatatagacagacctgccgacattgacatgtcatgcctgggtgcagcttctctagctggccttgctgttgggttttggactgacaaggaggaactaaagaaactgagacaaagtgaagtggttttcaagccacagaagaaat

SEQ ID NO: 137905 - DNA, 9837 bp, Homo sapiens
  Payload ID: 7006
  Gene Symbol: GK5
  Gene Name: glycerol kinase 5 (putative)
  Uniprot ID: Q6ZS86
  ENST ID: ENST00000392993
  CDS Start-End: 153-1742
ggtggagccggcggcaggggccaggcctctctaggctctccggctgagccgggttggggcccgggttgggccgcccggggactctggagcattgggatttgtagcgcgccctctgggtaggcggctgtagcggagaggcgtgcgggatcgggatgtcggggctgctcacggacccggagcagagagcgcaggagccgcggtaccccggcttcgtgctggggctggatgtgggcagttctgtgatccgctgccacgtctatgaccgggcggcgcgggtctgcggctccagcgtgcagaaggtagaaaatctttatcctcaaattggctgggtagaaattgatcctgatgttctttggattcaatttgttgccgtaataaaagaagcagtcaaagctgcaggaatacagatgaatcaaattgttggtcttggcatttcaacacagagagcaacttttattacgtggaacaagaaaacaggaaatcattttcacaactttataagttggcaagacttaagagctgttgaacttgtaaaatcttggaataattctcttcttatgaagatatttcacagttcttgccgagtgcttcactttttcactagaagtaaacgactttttacagccagtttgttcactttcacaacccagcagacttctttgagattggtctggattttacagaacttgactgaggtgcaaaaggcagttgaagaagaaaattgctgctttgggactattgatacctggttgttatataagctcacaaaaggttctgtatatgccacagatttttcaaatgctagtacaactggactttttgacccatataagatgtgttggagtgggatgattacctctctaatttcgataccactttctctcctacctcctgtgagggacacaagccacaattttggatcagtggatgaagagatatttggtgtgcctataccaatagttgccttggttgctgaccagcaatcagccatgtttggagagtgctgcttccagacaggtgatgtgaaattaaccatgggaactgggacatttttggatattaacactggaaatagccttcaacagactactggaggcttttatccattaattgggtggaagattgggcaagaagtcgtatgcttagctgaaagcaatgcaggagacactggtactgccataaaatgggctcagcagttagaccttttcacagatgctgctgagactgaaaaaatggccaaaagtttggaggattctgaaggagtttgttttgttccatcttttagtggattacaggctccattaaatgacccctgggcatgtgcctcttttatgggtttgaagccttctaccagtaaataccatcttgtacgagcaatattggagtcaatagctttcagaaacaaacagttatatgagatgatgaagaaagagattcatattcctgtaagaaaaatccgggcagatggaggagtttgtaagaatggttttgtcatgcagatgacttcagacctgattaatgagaatatagacagacctgccgacattgacatgtcatgcctgggtgcagcttctctagctggccttgctgttgggttttggactgacaaggaggaactaaagaaactgagacaaagtgaagtggttttcaagccacagaagaaatgtcaagaatatgaaatgagtctggaaaactgggccaaagcagtgaaacgctccatgaattggtataacaagacataacactaaatgaaatgatcaaaaccataggtagctggtttatgtgacgtgcagatgagatgaagctcagggataacccatatgacaatgactaagaggagaaaattttaaataagcttcataacttaagaagcattgcttttaaaaaaacaaaacggaacaaaaaactcttatttttttcccctaaaccatggtaaggcagcaatacctcaaaactttatatcttctattttgtagcaaattccaaaggacattagtcatttccaaccacattttgacagttatgggtcctcttcctttttatactgggtcagtggtacataggaacataatgatttaccatccaagctaatagttctgggtcaagtaccatgcacatattgttccaaaattatgtgaaacgtatttctttaattctttaagtgggctatttgaagtacatatagctaaaaagaaagaataactgagaaaatgtggaattttgaaacattaatattttatgtttaaagccataatttcctaatattatatccaaatatgagcttaatatgtccctctcagataagcttatgagatagttaatgctttcctttactggtcttaaagacactgccttaatttttccttgttcaaccaaaatctgagcattctttctatgttgaaaacactgaaaaactaattttagttaatgaactagaaagaatattgatttttaagaaacagaaaaatactacttattttccttctcaaataacgtttctttcaaaaacttctggctgaagtataacatgctggtagttaacataaatcttgtctttctcttgttctttatctttctttgttatttagatgcttgtataaatgtcttttgtttttattaagtgcctaattgacagagcttaatttgaagaagtgccctaatttattgaccacttaagaattgcctttattggggtattttatttgttcctgcgtctttttgatgtttgttcagtctactcatccctgtgagtatgtgtgggggacagctgatagaagggaggagagtgtgtctatgctcaggattgccctttagccactcagccagagatccacagggagcaacaaggacagtttcacatgcttagactttcttggaagaaacagtgaggaggagtaagtcgtgagtagtgtcaagctggatgtagaattgtcctaaggcagttgaccccaccttccaacatgttttcactttatttgcccctccctacatttgggttaggttccatttggatttgcagcaataatgactttatttctctcttggtcaggatttggcacataaaatccttttattatagaactagctattttagttacatagtaatgtaactaatggagagatttatagagaattttgtttttgctgtcatatatgtccattttggagacagatatgatagaactagaaattaagttgcatttctgcaagtgccatttgaatgaacttcaagtatcttcttaattattaaattttctgatgaaggcattgtaacaaatatatagtattattaaatctaattaatatttggaaatattaataaataggtattttatttactgtaaaaagtcaaacttcattatgtagataaatcttattcttttcattctttcccctgtttacatcctttttacaaagcttagtcaccaattaaagctttcctatcaaaatcacatggaagctgctctgttgttttactgttacacattctgtttctcagtgggtgtaatttttttttctttttctttttttgtagagacagggtcttgctgtgttgcccagggtagtctttaattcctggcctcaagtgatcctcccaccttggcctcccaaagtgctgggattgcagccgtgaaccactgcacccagccaatgggtgtaatttcataggaaataattctttttgtcagaatgtactgaattgtaatattaatacctgaaaatttgttagttcacttcttttccacgttcttctttcccaacatataaccacaaaataaaggataaatactttgggctgtgtgcagtggctcatgcctgtaatcccagcactttggcaggctgaagtgggcggatcatttgaggtcaggagtccaacctggtcaaacacggtgaaaccctgtctccactaaaaatacaaaaattagctggatgtggtggtgcaagcctgtaatcccagctactcgggaggctgaggcaggagaattgcttgaatctggggggtggaagttgcagtgagccaagatcatgccactgcactgtagcctgggcaacagagcgacactgcgtctcaaaaaaaaaaaaaaaggatcaatacttttcagataatgttggaaagtaactttgaatgtccctcatcggaattgagcatctcctcaagtgtcagtggctatttttttcttctgtgaatctaaaaactaatattttatttttaatatttgtggccatttttagtgataagactttaataaatatttttggacttaactaaaatcagaaacatgaccacatttgcttttgtggttgcagaaacagttgataagatcaattgagcaacaaaattgtcctttcttttttttttttttttttgagacattgtcatgctctgttgcccaggctggagtgcagtggcatgatctcggctcactgcaacctccctctcctgggctcaagcagtcctcctgcctcagcctcccaagtagctgggatttcaggtatacgtcactacgcccagctgatttttgtatttttagtagagacagggttttaccatgttggccaggctggtctcaaactcctgaccttgtgacccacccacctcggcctcccaaagtgctaggattacaggcgtgagccaccatgcctggcttgtcctttctgtcttccaagtttgtttttcatttgtatgctaatatttgaagtttagaaaaatttgtgctacttctcagcatgttttattttcccattatagatctatcagatatttttagaaggtctgcaactgtctgataaaggaagagaatgttcctgttcaatctatcttaaagtgctactaattgcttttatactatagacatactgattttttcatcttttttatccaaccatggcatggtttcctaatctcagcattgacattttggactggataaatctttattttgggatgctatgctgtactttataggatgtttagcaatatccctgacctctgccctctagctacaagtaccatccccctagttgttatggccaaaaatgtcttcaaacattgccattctgagaggcaaaattgcccccagttgagagccactgatacaggctgttagaagaaaatcgaagactcagtgaatatagtgtcatactccttttctttctgcctcattttaccttaggaaatggttgttagcaaaaaaattagttaatcgtatcttgaaataaatagggtatctattttgctgattaataaagaaaaaataaatctcagctgggcacagtggctcacacctgtaatcctagcactttgggaggccaaggcaggcggatcacttcagctcaggagtttgagaccagcctgggcaacctggcgaatccctatctctacaaaaaatacacaaattagctgggtgtggtgacacacacatatagtcccagctaattagggggctgaggtgggaagatcacttgagctccaggaggtggaggctgcagtgagccaagttggtgtcactgtactctagcctgggtggcaaagtgagaccctgtctcaatcaatcaatcaatcaatcaatcaatatctcatgctgtaattgtcttctgatgttttcatccacccagccccacctctgcagccttaattactggagtaggtccatgatttcagtgtagggttaatgtattctgcagatcatctttgatttgacctgcttttttgcttcctttttatctctgaacaaaggagatcatcattctctttaatctgccttctgtgtaaatctctaccagactggaagctccctgaaagcagaaactgtctgcttccccagaacttagcactgtgctttcatgtatgtgggataaatttttactttgttagtgcaactttgtttgtacacgttatccttgatattacatacatttgttgatgggggcaatttatatttgttgtgagtaaaatacttttttgttggattaagaagaactatactcttcccagcactttgggaggccaaggaggacggattacctgaggttagtagcttgagaccagcctgaccaacatggagaaaccccatctctattaaaactacaaaaaaattagctgtgcgttgtggcacatgcctgtaatcccagctagtcaggaggctgaggcaggagaaccgcttgaacccctgaggcagaggttgcggttgagccgagatcgcgccattgcactccagcctgggcaacaagagttaaactccatttcaaaaaaacaaaaacaaaaacaaaaacaaaaaaacaaaagaagaactactctgtagtgagagctagaatcctcatgttgtttatttaaaatttttggccaagtacagtggctcatgcctgtaatcccagcactttgggaggctgaggccagaggatcacttgaagccaggagttcagttacagcttgggcagcaaagtgagaccttgtctctacaaaaaaattttttttaaattagccaggtgtggtggtatgcccctgtagtcccagctactcaggaaaccgaagcaggagaatcgcttgaacacaggagtttgagggtgctatgagctatgattgtgccactgcactccagcctgggcaacagggcaaggccctgtcttaataaaataaaataaaattcttaatatgtttatatatttgaaaaactatttgtgtagagacacatgtctgtaaatacacatagatatattaactttttaagctttaattgaagcctttctcttcacaggttttatatatttgactgcagatgactaacagattgaattttaagagtgcgaaacactctggtgctatagggaaggaacttcataaatagcccctcctgtaagggaccagtctttaatttaaaacagtccagcccaggaatcttgcaagaattttgtaattatttgaggagagatgtagatataccctggagttctttgactttaagttattctagagtcatcccagagatggcctagaagacttgaatgtaccccaaaggattctgaatccctttgggaaatttagactatgattttcagtaagaattaaaagccccaggataagcgtggtggttcacacctgtaatcccagcaatttgtgaggccaaggcgggaggatcgcttgagctcaggagttcgagaccagcctaggcaacatagtgagaccccacccatctcaatttaaaaaaagagagaaaaaggccaggtgtagtggctcacgcctgtaatcccagcactttgggaggccaaggcgggtggatcacctgaggtcaggagttcaagaccagcctgatcaatatggtgaaaccccatctctactaaaaatacaaaaattagccagtcctgatggcatgtgcctgtggtcccagcgacttgggaggctgagacaggagaattgcttgaacccgggacgtggaggttgcagtgagccgagattgggccactgcattccagcctgggtgagagagcgagactctgtctcaaaaaaaaaaaagagagagagagagagagagagagaaagccccaaacataccttgggcctttacaacctacttggtcccagaatcgtcttattgtaaacccaaagccaggtcttctggttcgaaccagtcaaaatgggtaatctaaaaaagttaaatagatgattcaaaatcgtgttggtggttttttctttttaaatcccctttccaagtaaaaggaatcttttttttttttttaagttttgaagcctcatagccataaatattttggcaccagcatctattggcacctaagtcattggctgtatcatattcccatgggacccttgttcctagaggaatgcaggaatgatcttggagtgggaaggacagaaacaggtgcttgcaaaatcagatatttctgaaattctctgttattctatttctactgtctttccccactttactataaatttgatctgttataaaatggctgtgtttagatagatacccgtgatgtttaggaaacaaatgatatagagactcccatttaaatgaatcttatctttataagaaacagccaaactgttttccagactggctataccatcttacattcccaccaggaatgtatgagtgatccagtttctctgcatgctcgccagcatttggtgttgtcactatttcttatttcaaccattctgtttatccttttcagtgaaatatctgttcatatcttttgcccatttgccaattgaggcaggaggatcacttgagcccaggagttcgaggctgcagtgagatatgatcactaaatgtttgcttaatgagccatatctttaaatatcttttttaaagtttttaaaagtcagtccagtggtttatgtgattatgtgggattttttaaatctttccaggcaaaatgtgtatagcattttgaacatatttacactgtactgagcccaagagttctcatattctttctttgctcattatagagtatggtactaatactgtataatagtaaattttcaaagatacctttatttagaatgttagagtatacagatatatactttgtacatagttatcataatgtttctaacctttttatttaaagcaggctgatttgtgtaaaggtttcagaatgattttgttaataagttattagaaactttcctatttgtacaagatggtaaatgtagattccaatttgtatgcctcagtaaattcataatcttatttctctgatgtgagccactgtgcctggccttctgtgatgctcttaatgaattttgcagttttattaaattgtcattgagaacctcataaatcattgttaagatctatacaaaaaatcaaggatccacagtaatagaatatttttcatctgcatatgaatttttcccttccctttttgtctacttttagatttaaaaaaaattaccaggacattcttattaaatactattacctgttttggtttctgcacattaagaaagtcacagagaagccagacacagtggcatgctcttctattcccagctactcaggaggctgaggctggagaatcacttgagcccaggagtttgaggatatcctgggcaacatggtgaaacttggcaaaaacaaaaacaaggccgggcatggtggctcacacgtgtagtcccagcactttgggaggccacggctggcggatcacgaggtcaggagatcgagaccatcctggctaacatggtgaaaccctgtctctactaaaaatacaaaaaattagccaggcgtggtggcgggtgcctgtactcccagctactcgggaggctgaggcaagagaatggcatgaacccaggaggcggagcttgcagtgagctgagatcgcgccactgcactcctgcctgggtgacagagtgagactccatctcaaaaaaaaaaaacaaaaacaacaacaacaacaacaaaaaacaaccagagaaatagcacttgttaactacaattgtgactctaggtaaacttgggccttaatatggttagacaagaagggttttaggtaacttgcctttttagatcctatttaggcttattagtctatattctacattcttgcacgatggaaattactagagaagtgggataattctttgttgtggggaaaataaaatttgttgtgaaaatatactgtattttaaaatatttagaaagattataaataactggagaaaagataatttcatatactaatatgatggaattagcctagcagatgttaaaaatcctttctgaaaattataatctaaaattatttgggaaattacaatggaactgaataatctgtacgttggtatattaaagccatttttatattgtg

SEQ ID NO: 137906 - DNA, 1103 bp, Homo sapiens
  Payload ID: 7006
  Gene Symbol: GK5
  Gene Name: glycerol kinase 5 (putative)
  ENST ID: ENST00000487672
  CDS Start-End: 138-599
aggggccaggcctctctaggctctccggctgagccgggttggggcccgggttgggccgcccggggactctggagcattgggatttgtagcgcgccctctgggtaggcggctgtagcggagaggcgtgcgggatcgggatgtcggggctgctcacggacccggagcagagagcgcaggagccgcggtaccccggcttcgtgctggggctggatgtgggcagttctgtgatccgctgccacgtctatgaccgggcggcgcgggtctgcggctccagcgtgcagaaggtagaaaatctttatcctcaaattggctgggtagaaattgatcctgatgttctttggattcaatttgttgccgtaataaaagaagcagtcaaagctgcaggaatacagatgaatcaaattgttggtcttggcatttcaacacagagagcaacttttattacgtggaacaagaaaacaggaaatcattttcacaactttataagttggcaagacttaagagctgttgaacttgtaaaatcttggaataattctcttcttatgaaggtaatctttttcttgtgtgatttggatattgttggttttttttttctgtaaatgtcccttaattgtattatttcctacctattttgttttaggacattaagaagacatacgcacacactccccattccagtgaagtttaataatagccaatcaaaggcgtatgtggtagacttcagtacttgtacctcaggaagttctaaggaggtttgtggtggaccagagtttcacatgttagtgagaatttgtgtttctgtccttgagaaatggaaaagatacagactagatgaatgaaatgcccaaatttcatcttttataaaagctcaggatggatattgagatattatagataactagcagactgttagaagctcttatcattacaggcatgatggctcgcgcctgtaatctcaacactttggaaggctgaggcagggggattgcttgaggccagaagttcaagaccagcttgggcaacatgatatttcacagttcttgccgagtgcttcactttttcactagaagtaaacgactttttacagccagtttgttcacttt

SEQ ID NO: 137907 - DNA, 4479 bp, Homo sapiens
  Payload ID: 7006
  Gene Symbol: GK5
  Gene Name: glycerol kinase 5 (putative)
  Uniprot ID: Q6ZS86
  ENST ID: ENST00000480757
  CDS Start-End: 94-999
cccgggttgggccgcccggggactctggagcattgggatttgtagcgcgccctctgggtaggcggctgtagcggagaggcgtgcgggatcgggatgtcggggctgctcacggacccggagcagagagcgcaggagccgcggtaccccggcttcgtgctggggctggatgtgggcagttctgtgatccgctgccacgtctatgaccgggcggcgcgggtctgcggctccagcgtgcagaaggtagaaaatctttatcctcaaattggctgggtagaaattgatcctgatgttctttggattcaatttgttgccgtaataaaagaagcagtcaaagctgcaggaatacagatgaatcaaattgttggtcttggcatttcaacacagagagcaacttttattacgtggaacaagaaaacaggaaatcattttcacaactttataagttggcaagacttaagagctgttgaacttgtaaaatcttggaataattctcttcttatgaagatatttcacagttcttgccgagtgcttcactttttcactagaagtaaacgactttttacagccagtttgttcactttcacaacccagcagacttctttgagattggtctggattttacagaacttgactgaggtgcaaaaggcagttgaagaagaaaattgctgctttgggactattgatacctggttgttatataagctcacaaaaggttctgtatatgccacagatttttcaaatgctagtacaactggactttttgacccatataagatgtgttggagtgggatgattacctctctaatttcgataccactttctctcctacctcctgtgagggacacaagccacaattttggatcagtggatgaagagatatttggtgtgcctataccaatagttgccttgttaaaggtccctggatatgaccagaatatctgctatatttttgggaaggggaccattgagccagtattctatcatggaagtactttataaccttttctgacttgcttgtatattgtttatcagaaaacttaaattaaaaaaaattttttttaattctgagtggtatttagtttacatttggtactctgagacaaaacacagtgatggggcgaatatttatgttctgtttgataatgtgtaaccacaaacagtgttagggcaacttaaactagcagagaaagttgtatgtacatttaataaagtccttagccatcatctaccagtaaataagtttgtagaataatgaaatatttgccatttttgatttttttttttttttttgagacagggtctcactctgtcactcaggctggagtgcagtggtataatcatgcctcactgcagcctcggcttcctgggctcaggtgattcttccaccccagcctcccaagtagccaagaccacaggtgtgtgccacgacacctggctaattttttgtatttttggtagacataggattttgctgtgttcccctggctgatctcgaactcctagactggggccttctgccacctttgcctcccaaagtgctgggactacaggcatgagtcactgtgccaagcctgtttttgatttttaagagtcctttcacattgcctttgatttcctgtggcagcttaagcaggaggtagagaccacctgttgcaagatgtgcagtctccacagtagctgggggagcagctgagggaaagggaatttaatttccaagttacaaaatcattatcatttagagaggatcggtcttattcaatctaggcataggtgcagggttagattaaggtatggctggaagagttaccaattagtgacagagggttctttaaatgagttgttgttgttgttgttgtttttgagatggagtttcactcttgtctcccagactggagtgcaatggcatgatctcaccgatggctcactgtgacctccgcctctcgggttcaagtgactcttctgcctcagcctcctgagtagctaggactataggttgctgaccagcaatcagccatgtttggagagtgctgcttccagacaggtgatgtgaaattaaccatgggaactgggacatttttggatattaacactggaaatagccttcaacagactactggaggcttttatccattaattgggtggaagattgggcaagaagtcgtatgcttagctgaaagcaatgcaggagacactggtactgccataaaatgggctcagcagttagaccttttcacagatgctgctgagactgaaaaaatggccaaaagtttggaggattctgaaggagtttgttttgttccatcttttagtggattacaggctccattaaatgacccctgggcatgtgcctcttttatgggtttgaagccttctaccagtaaataccatcttgtacgagcaatattggagtcaatagctttcagaaacaaacagttatatgagatgatgaagaaagagattcatattcctgtaagaaaaatccgggcagatggaggagtttgtaagaatggttttgtcatgcagatgacttcagacctgattaatgagaatatagacagacctgccgacattgacatgtcatgcctgggtgcagcttctctagctggccttgctgttgggttttggactgacaaggaggaactaaagaaactgagacaaagtgaagtggttttcaagccacagaagaaatgtcaagaatatgaaatgagtctggaaaactgggccaaagcagtgaaacgctccatgaattggtataacaagacataacactaaatgaaatgatcaaaaccataggtagctggtttatgtgacgtgcagatgagatgaagctcagggataacccatatgacaatgactaagaggagaaaattttaaataagcttcataacttaagaagcattgcttttaaaaaaacaaaacggaacaaaaaactcttatttttttcccctaaaccatggtaaggcagcaatacctcaaaactttatatcttctattttgtagcaaattccaaaggacattagtcatttccaaccacattttgacagttatgggtcctcttcctttttatactgggtcagtggtacataggaacataatgatttaccatccaagctaatagttctgggtcaagtaccatgcacatattgttccaaaattatgtgaaacgtatttctttaattctttaagtgggctatttgaagtacatatagctaaaaagaaagaataactgagaaaatgtggaattttgaaacattaatattttatgtttaaagccataatttcctaatattatatccaaatatgagcttaatatgtccctctcagataagcttatgagatagttaatgctttcctttactggtcttaaagacactgccttaatttttccttgttcaaccaaaatctgagcattctttctatgttgaaaacactgaaaaactaattttagttaatgaactagaaagaatattgatttttaagaaacagaaaaatactacttattttccttctcaaataacgtttctttcaaaaacttctggctgaagtataacatgctggtagttaacataaatcttgtctttctcttgttctttatctttctttgttatttagatgcttgtataaatgtcttttgtttttattaagtgcctaattgacagagcttaatttgaagaagtgccctaatttattgaccacttaagaattgcctttattggggtattttatttgttcctgcgtctttttgatgtttgttcagtctactcatccctgtgagtatgtgtgggggacagctgatagaagggaggagagtgtgtctatgctcaggattgccctttagccactcagccagagatccacagggagcaacaaggacagtttcacatgcttagactttcttggaagaaacagtgaggaggagtaagtcgtgagtagtgtcaagctggatgtagaattgtcctaaggcagttgaccccaccttccaacatgttttcactttatttgcccctccctacatttgggttaggttccatttggatttgcagcaataatgactttatttctctcttggtcaggatttggcacataaaatccttttattatagaactagctattttagttacatagtaatgtaactaatggagagatttatagagaattttgtttttgctgtcatatatgtccattttggagacagatatgatagaactagaaattaagttgcatttctgcaagtgccatttgaatgaacttcaagtatcttcttaattattaaattttctgatgaaggcattgtaacaaatatatagtattattaaatctaattaatatttggaaatattaataaataggtattttatttactgtaaaaagtcaaacttcattatgtagataaatcttattcttttcattctttcccctgtttacatcctttttacaaagcttagtcaccaattaaagctttcctatcaaaatcacat

SEQ ID NO: 137908 - DNA, 3049 bp, Homo sapiens
  Payload ID: 7006
  Gene Symbol: GK5
  Gene Name: glycerol kinase 5 (putative)
  Uniprot ID: Q6ZS86
  ENST ID: ENST00000492097
  CDS Start-End: 113-1018
cggctgagccgggttggggcccgggttgggccgcccggggactctggagcattgggatttgtagcgcgccctctgggtaggcggctgtagcggagaggcgtgcgggatcgggatgtcggggctgctcacggacccggagcagagagcgcaggagccgcggtaccccggcttcgtgctggggctggatgtgggcagttctgtgatccgctgccacgtctatgaccgggcggcgcgggtctgcggctccagcgtgcagaaggtagaaaatctttatcctcaaattggctgggtagaaattgatcctgatgttctttggattcaatttgttgccgtaataaaagaagcagtcaaagctgcaggaatacagatgaatcaaattgttggtcttggcatttcaacacagagagcaacttttattacgtggaacaagaaaacaggaaatcattttcacaactttataagttggcaagacttaagagctgttgaacttgtaaaatcttggaataattctcttcttatgaagatatttcacagttcttgccgagtgcttcactttttcactagaagtaaacgactttttacagccagtttgttcactttcacaacccagcagacttctttgagattggtctggattttacagaacttgactgaggtgcaaaaggcagttgaagaagaaaattgctgctttgggactattgatacctggttgttatataagctcacaaaaggttctgtatatgccacagatttttcaaatgctagtacaactggactttttgacccatataagatgtgttggagtgggatgattacctctctaatttcgataccactttctctcctacctcctgtgagggacacaagccacaattttggatcagtggatgaagagatatttggtgtgcctataccaatagttgccttgttaaaggtccctggatatgaccagaatatctgctatatttttgggaaggggaccattgagccagtattctatcatggaagtactttataaccttttctgacttgcttgtatattgtttatcagaaaacttaaattaaaaaaaattttttttaattctgagtggtatttagtttacatttggtactctgagacaaaacacagtgatggggcgaatatttatgttctgtttgataatgtgtaaccacaaacagtgttagggcaacttaaactagcagagaaagttgtatgtacatttaataaagtccttagccatcatctaccagtaaataagtttgtagaataatgaaatatttgccatttttgatttttttttttttttttgagacagggtctcactctgtcactcaggctggagtgcagtggtataatcatgcctcactgcagcctcggcttcctgggctcaggtgattcttccaccccagcctcccaagtagccaagaccacaggtgtgtgccacgacacctggctaattttttgtatttttggtagacataggattttgctgtgttcccctggctgatctcgaactcctagactggggccttctgccacctttgcctcccaaagtgctgggactacaggcatgagtcactgtgccaagcctgtttttgatttttaagagtcctttcacattgcctttgatttcctgtggcagcttaagcaggaggtagagaccacctgttgcaagatgtgcagtctccacagtagctgggggagcagctgagggaaagggaatttaatttccaagttacaaaatcattatcatttagagaggatcggtcttattcaatctaggcataggtgcagggttagattaaggtatggctggaagagttaccaattagtgacagagggttctttaaatgagttgttgttgttgttgttgtttttgagatggagtttcactcttgtctcccagactggagtgcaatggcatgatctcaccgatggctcactgtgacctccgcctctcgggttcaagtgactcttctgcctcagcctcctgagtagctaggactataggttgctgaccagcaatcagccatgtttggagagtgctgcttccagacaggtgatgtgaaattaaccatgggaactgggacatttttggatattaacactggaaatagccttcaacagactactggaggcttttatccattaattgggtggaagattgggcaagaagtcgtatgcttagctgaaagcaatgcaggagacactggtactgccataaaatgggctcagcagttagggttttttgttgtttgtttgtttttgcagaccttttcacagatgctgctgagactgaaaaaatggccaaaagtttggaggattctgaaggagtttgttttgttccatcttttagtggattacaggctccattaaatgacccctgggcatgtgcctcttttatgggtttgaagccttctaccagtaaataccatcttgtacgagcaatattggagtcaatagctttcagaaacaaacagttatatgagatgatgaagaaagagattcatattcctgtaagaaaaatccgggcagatggaggagtttgtaagaatggttttgtcatgcagatgacttcagacctgattaatgagaatatagacagacctgccgacattgacatgtcatgcctgggtgcagcttctctagctggccttgctgttgggttttggactgacaaggaggaactaaagaaactgagacaaagtgaagtggttttcaagccacagaagaaatgtcaagaatatgaaatgagtctggaaaactgggccaaagcagtgaaacgctccatgaattgggtcttgctgtgttgcccagggtagtctttaattcctggcctcaagtgatcctcccaccttggcctcccaaagtgctgggattgcagccgtgaaccactgcacccagccaatgggtgtaatttcataggaaataattctttttgtcagaatgtactgaattgtaatattaatacctgaaaatttgttagttcacttcttttccacgttcttctttcccaacatataaccacaaaataaaggataaatactt

SEQ ID NO: 137909 - DNA, 545 bp, Homo sapiens
  Payload ID: 7006
  Gene Symbol: GK5
  Gene Name: glycerol kinase 5 (putative)
  ENST ID: ENST00000486459
  CDS Start-End: 1-519
cagcagttagaccttttcacagatgctgctgagactgaaaaaatggccaaaagtttggaggattctgaaggagtttgttttgttccatcttttagtggattacaggctccattaaatgacccctgggcatgtgcctcttttatgggtttgaagccttctaccagtaaataccatcttgtacgagcaatattggagtcaatagctttcagaaacaaacagttatatgagatgatgaagaaagagattcatattcctgtaagaaaaatccgggcagatggaggagtttgtaagaatggttttgtcatgcagatgacttcagacctgattaatgagaatatagacagacctgccgacattgacatgtcatgcctgggtgcagcttctctagctggccttgctgttggtatgtgtgaaatttataagaatgagagttttcttgcaaactcttccttacagatagcatttctcctctcaaattacaaaattctagagagtctggaaagccttggcgtccattaaactccatacacatatgcatattactc

SEQ ID NO: 137910 - DNA, 2761 bp, Homo sapiens
  Payload ID: 7007
  Gene Symbol: GPAT2
  Gene Name: glycerol-3-phosphate acyltransferase 2, mitochondrial
  Uniprot ID: Q6NUI2
  ENST ID: ENST00000359548
  CDS Start-End: 161-2548
agtccacgccttgtggcggctttgcggagctgctgctttggcgggagttggaagctggtgtgaggtgagaggcgcggtggtcgctccccggcgaggccaggtttctgtggggagaaggagagtgccagaggtgactggttcatggttcttctaggctctcatggccaccatgttggaaggcagatgccaaactcagccaaggagcagccccagtggccgagaggctagcctgtggtcgtcaggctttgggatgaagctggaggctgtcactccattcctggggaagtatcgcccctttgtgggtcgctgttgccagacctgcacccccaagagctgggagtccctcttccacagaagcataacggacctaggcttctgcaatgtgatcctggtgaaggaggagaacacaaggtttcggggctggctggttcggaggctctgctatttcctgtggtccctggagcagcacatccccccctgccaggatgtcccacagaagatcatggaaagcaccggggtgcagaacctcctctcagggagggtcccaggaggcactggggaaggccaggtgcctgaccttgtgaagaaggaggtacagcgcatcctgggtcacatccaggccccaccccgtcccttcctggtcaggctgttcagctgggcgctgctgaggttcctgaactgcctgttcctgaatgtgcagctccacaagggtcagatgaagatggtccagaaggccgcccaggcaggcttgccgcttgtcctcctctctactcacaaaaccctcctggatgggatcctgctgccctttatgctgctctcccagggcctgggtgtgcttcgtgtggcctgggactcccgcgcctgctcccctgccctcagagctctgctgaggaagcttggggggcttttcctgcccccagaggccagcctctccctggacagctctgaggggctccttgccagggctgtggtccaggcggtcatagagcagctgctggttagtgggcagcccctgctcatcttcctggaggaacctcctggggctctggggccacggctgtcagccctgggccaggcttgggtggggtttgtggtgcaggcagtccaggtgggcatcgtcccagatgctctgctggtaccagtggccgtcacctatgacctggttccggatgcaccgtgtgacatagaccatgcctcggcccccctggggctgtggacaggagctctggctgtcctacgtagcttgtggagccgctggggctgcagccaccggatctgctcccgggtgcacctagctcagcccttttccctgcaggaatacatcgtcagtgccagaagctgctggggcggcagacagaccctggagcagctactgcagcccatcgtgctgggccaatgtactgctgtcccagacactgagaaggagcaggagtggacccccataactgggcctctcctggccctcaaggaagaggaccagctcctggtcaggagactgagctgtcatgtcctgagtgccagtgtagggagctctgcggtgatgagcacggccattatggcaacgctgctgctcttcaagcatcagaagctcctgggggagttctcctggctgacggaggagatactgttgcgtggctttgatgtaggcttctctgggcagctgcggagcctgctgcagcactcactgagcctgctgcgggcgcacgtggccctgctgcgcatccgtcagggtgacttgctggtggtgccgcagcctggcccaggcctcacacacctggcacaactgagtgctgagctgctgcccgtcttcctgagcgaggctgtgggcgcctgtgcagtgcgggggctgctggcaggcagagtgccgccccaggggccctgggagctgcagggcatattgctgctgagccagaatgagctgtaccgccagatcctgctgctgatgcacctgctgccgcaagacctgctgctgctaaagccctgccagtcttcctactgctactgtcaggaggtgctggaccggctcatccaatgcgggctcctggttgctgaggagaccccaggctcccggccagcctgtgacacagggcgacagcgattgagcagaaagctgctgtggaaaccgagtggggactttactgatagtgacagtgatgacttcggagaggctgacggccggtacttcaggctcagccagcagtcacactgcccagatttctttcttttcctctgccgcctgctcagcccgctgctcaaggcctttgcacaggctgccgccttcctccgccagggccagctgcccgatactgagttgggctacacagagcagctgttccagttcctgcaggccaccgcccaggaagaagggatcttcgagtgtgcggacccaaagctcgccatcagtgctgtctggaccttcagagacctaggggttctgcagcagacgccgagccctgcaggccccaggctccacctgtcccctacttttgccagcctggacaatcaggaaaaactagaacagttcatccggcagttcatttgtagctagaactgtgaggaggagcctgtgctgagacttctcagccccagaacacagctgtgtcctagagccagaagatggagaggaggctgcaaacccttagctgctctataaatataatcattgaggcttgattgtcccttgccatctcttgctttttcccttctttgatgtgataaacaaggggacgagacgagttgtcttttccccagcccagcagca

SEQ ID NO: 137911 - DNA, 3061 bp, Homo sapiens
  Payload ID: 7007
  Gene Symbol: GPAT2
  Gene Name: glycerol-3-phosphate acyltransferase 2, mitochondrial
  Uniprot ID: Q6NUI2
  ENST ID: ENST00000434632
  CDS Start-End: 461-2848
gtttttcagcgtcagagtctcaggatctcgatgtggacaggcaccctgatacaaaagaacgctcagaattttgctagagccgaaccccagcttggaggagcgtaagccctgggataacttctttaatcagaatctggcctgagtccctgctcgaagctcaagcacccggggcctcgcggccgcctgcagtactcccctcccaccgcgggccagggccgactggaaaacggagcaggccatccccagagcacgggtcccgtggccacgttgagtgtcgcagagtacgggacgcagggcggggcttctggaccagcgcgcatcccaattggctctcggggctgccttttagccggacgcgcggaggtgggcaatccgctccttcccttgagcagtccacgccttgtggcggctttgcggagctgctgctttggcgggagttggaagctggtgtgaggctctcatggccaccatgttggaaggcagatgccaaactcagccaaggagcagccccagtggccgagaggctagcctgtggtcgtcaggctttgggatgaagctggaggctgtcactccattcctggggaagtatcgcccctttgtgggtcgctgttgccagacctgcacccccaagagctgggagtccctcttccacagaagcataacggacctaggcttctgcaatgtgatcctggtgaaggaggagaacacaaggtttcggggctggctggttcggaggctctgctatttcctgtggtccctggagcagcacatccccccctgccaggatgtcccacagaagatcatggaaagcaccggggtgcagaacctcctctcagggagggtcccaggaggcactggggaaggccaggtgcctgaccttgtgaagaaggaggtacagcgcatcctgggtcacatccaggccccaccccgtcccttcctggtcaggctgttcagctgggcgctgctgaggttcctgaactgcctgttcctgaatgtgcagctccacaagggtcagatgaagatggtccagaaggccgcccaggcaggcttgccgcttgtcctcctctctactcacaaaaccctcctggatgggatcctgctgccctttatgctgctctcccagggcctgggtgtgcttcgtgtggcctgggactcccgcgcctgctcccctgccctcagagctctgctgaggaagcttggggggcttttcctgcccccagaggccagcctctccctggacagctctgaggggctccttgccagggctgtggtccaggcggtcatagagcagctgctggttagtgggcagcccctgctcatcttcctggaggaacctcctggggctctggggccacggctgtcagccctgggccaggcttgggtggggtttgtggtgcaggcagtccaggtgggcatcgtcccagatgctctgctggtaccagtggccgtcacctatgacctggttccggatgcaccgtgtgacatagaccatgcctcggcccccctggggctgtggacaggagctctggctgtcctacgtagcttgtggagccgctggggctgcagccaccggatctgctcccgggtgcacctagctcagcccttttccctgcaggaatacatcgtcagtgccagaagctgctggggcggcagacagaccctggagcagctactgcagcccatcgtgctgggccaatgtactgctgtcccagacactgagaaggagcaggagtggacccccataactgggcctctcctggccctcaaggaagaggaccagctcctggtcaggagactgagctgtcatgtcctgagtgccagtgtagggagctctgcggtgatgagcacggccattatggcaacgctgctgctcttcaagcatcagaagctcctgggggagttctcctggctgacggaggagatactgttgcgtggctttgatgtaggcttctctgggcagctgcggagcctgctgcagcactcactgagcctgctgcgggcgcacgtggccctgctgcgcatccgtcagggtgacttgctggtggtgccgcagcctggcccaggcctcacacacctggcacaactgagtgctgagctgctgcccgtcttcctgagcgaggctgtgggcgcctgtgcagtgcgggggctgctggcaggcagagtgccgccccaggggccctgggagctgcagggcatattgctgctgagccagaatgagctgtaccgccagatcctgctgctgatgcacctgctgccgcaagacctgctgctgctaaagccctgccagtcttcctactgctactgtcaggaggtgctggaccggctcatccaatgcgggctcctggttgctgaggagaccccaggctcccggccagcctgtgacacagggcgacagcgattgagcagaaagctgctgtggaaaccgagtggggactttactgatagtgacagtgatgacttcggagaggctgacggccggtacttcaggctcagccagcagtcacactgcccagatttctttcttttcctctgccgcctgctcagcccgctgctcaaggcctttgcacaggctgccgccttcctccgccagggccagctgcccgatactgagttgggctacacagagcagctgttccagttcctgcaggccaccgcccaggaagaagggatcttcgagtgtgcggacccaaagctcgccatcagtgctgtctggaccttcagagacctaggggttctgcagcagacgccgagccctgcaggccccaggctccacctgtcccctacttttgccagcctggacaatcaggaaaaactagaacagttcatccggcagttcatttgtagctagaactgtgaggaggagcctgtgctgagacttctcagccccagaacacagctgtgtcctagagccagaagatggagaggaggctgcaaacccttagctgctctataaatataatcattgaggcttgattgtcccttgccatctcttgctttttcccttctttgatgtgataaacaaggggacgagacgagttgtcttttccccagcccagcagca

SEQ ID NO: 137912 - DNA, 2466 bp, Homo sapiens
  Payload ID: 7007
  Gene Symbol: GPAT2
  Gene Name: glycerol-3-phosphate acyltransferase 2, mitochondrial
  ENST ID: ENST00000453542
  CDS Start-End: 80-2254
cccttgagcagtccacgccttgtggcggctttgcggagctgctgctttggcgggagttggaagctggtgtgaggctctcatggccaccatgttggaaggcagatgccaaactcagccaaggagcagccccagtggccgagaggctagcctgtggtcgtcaggctttgggatgaagctggaggctgtcactccattcctggggaagtatcgcccctttgtgggtcgctgttgccagacctgcacccccaagagctgggagtccctcttccacagaagcataacggacctaggcttctgcaatgtgatcctggtgaaggaggagaacacaaggtttcggggctggctggttcggaggctctgctatttcctgtggtccctggagcagcacatccccccctgccaggatgtcccacagaagatcatggaaagcaccggggtgcagaacctcctctcagggagggtcccaggaggcactggggaaggccaggtgcctgaccttgtgaagaaggaggtacagcgcatcctgggtcacatccaggccccaccccgtcccttcctggtcaggctgttcagctgggcgctgctgaggttcctgaactgcctgttcctgaatgtgcagctccacaagggtcagatgaagatggtccagaaggccgcccaggcaggcttgccgcttgtcctcctctctactcacaaaaccctcctggatgggatcctgctgccctttatgctgctctcccagggcctgggtgtgcttcgtgtggcctgggactcccgcgcctgctcccctgccctcagagctctgctgaggaagcttggggggcttttcctgcccccagaggccagcctctccctggacagctctgaggggctccttgccagggctgtggtccaggcggcctcggcccccctggggctgtggacaggagctctggctgtcctacgtagcttgtggagccgctggggctgcagccaccggatctgctcccgggtgcacctagctcagcccttttccctgcaggaatacatcgtcagtgccagaagctgctggggcggcagacagaccctggagcagctactgcagcccatcgtgctgggccaatgtactgctgtcccagacactgagaaggagcaggagtggacccccataactgggcctctcctggccctcaaggaagaggaccagctcctggtcaggagactgagctgtcatgtcctgagtgccagtgtagggagctctgcggtgatgagcacggccattatggcaacgctgctgctcttcaagcatcagaagctcctgggggagttctcctggctgacggaggagatactgttgcgtggctttgatgtaggcttctctgggcagctgcggagcctgctgcagcactcactgagcctgctgcgggcgcacgtggccctgctgcgcatccgtcagggtgacttgctggtggtgccgcagcctggcccaggcctcacacacctggcacaactgagtgctgagctgctgcccgtcttcctgagcgaggctgtgggcgcctgtgcagtgcgggggctgctggcaggcagagtgccgccccaggggccctgggagctgcagggcatattgctgctgagccagaatgagctgtaccgccagatcctgctgctgatgcacctgctgccgcaagacctgctgctgctaaagccctgccagtcttcctactgctactgtcaggaggtgctggaccggctcatccaatgcgggctcctggttgctgaggagaccccaggctcccggccagcctgtgacacagggcgacagcgattgagcagaaagctgctgtggaaaccgagtggggactttactgatagtgacagtgatgacttcggagaggctgacggccggtacttcaggctcagccagcagtcacactgcccagatttctttcttttcctctgccgcctgctcagcccgctgctcaaggcctttgcacaggctgccgccttcctccgccagggccagctgcccgatactgagttgggctacacagagcagctgttccagttcctgcaggccaccgcccaggaagaagggatcttcgagtgtgcggacccaaagctcgccatcagtgctgtctggaccttcagagacctaggggttctgcagcagacgccgagccctgcaggccccaggctccacctgtcccctacttttgccagcctggacaatcaggaaaaactagaacagttcatccggcagttcatttgtagctagaactgtgaggaggagcctgtgctgagacttctcagccccagaacacagctgtgtcctagagccagaagatggagaggaggctgcaaacccttagctgctctataaatataatcattgaggcttgattgtcccttgccatctcttgctttttcccttctttgatgtgataaacaaggggacgagacgagttgtcttttccccagcccagcagc

SEQ ID NO: 137913 - DNA, 588 bp, Homo sapiens
  Payload ID: 7007
  Gene Symbol: GPAT2
  Gene Name: glycerol-3-phosphate acyltransferase 2, mitochondrial
  ENST ID: ENST00000439254
  CDS Start-End: 109-588
gcagtccacgccttgtggcggctttgcggagctgctgctttggcgggagttggaagctggtgtgaggtgagaggcgcggtggtcgctccccggcgaggccaggctctcatggccaccatgttggaaggcagatgccaaactcagccaaggagcagccccagtggccgagaggctagcctgtggtcgtcaggctttgggatgaagctggaggctgtcactccattcctggggaagtatcgcccctttgtgggtcgctgttgccagacctgcacccccaagagctgggagtccctcttccacagaagcataacggacctaggcttctgcaatgtgatcctggtgaaggaggagaacacaaggtttcggggctggctggttcggaggctctgctatttcctgtggtccctggagcagcacatccccccctgccaggatgtcccacagaagatcatggaaagcaccggggtgcagaacctcctctcagggagggtcccaggaggcactggggaaggccaggtgcctgaccttgtgaagaaggaggtacagcgcatcctgggtcacatccaggccccaccccgtcccttcctg

SEQ ID NO: 137914 - DNA, 2625 bp, Homo sapiens
  Payload ID: 7008
  Gene Symbol: GPAT3
  Gene Name: glycerol-3-phosphate acyltransferase 3
  Uniprot ID: Q53EU6
  ENST ID: ENST00000264409
  CDS Start-End: 213-1517
gttaactggcaggggcgaggaggagcccagggaggaaggaaggatattgccgtaattctgaaagtttttttccttcctctcttcccttcgcagaggtgagtgccgggctcggcgctctgctcctggagctcccgcgggactgcctggggacagggactgctgtggcgctcggccctccactgcggacctctcctgagtgggtgcgccgagtcatggagggcgcagagctggccgggaagatcctttccacctggctgacgctggttctcggcttcatccttttaccttcggtcttcggagtgtctctgggcatctccgagatctacatgaagatcctagtgaaaactttagagtgggccacaatacgaattgaaaaaggaaccccaaaggagtcgattcttaaaaactctgcttctgttggtattatccaaagagatgagtcacccatggaaaaagggctctctggtctacgaggaagggactttgagctgtctgacgtgttttatttctccaagaagggattggaagccattgtagaagatgaagtgacccagaggttttcctcagaggagctagtgtcatggaatctcctcacaagaaccaatgtaaatttccagtacatcagtctgcggctcactatggtgtgggtgctgggcgtcatagtgcgctattgtgtcctactgcctctgagggttaccttggctttcattgggatcagtttgctggttataggaactacactggttgggcagctgccagacagcagcctcaaaaactggctgagtgaactggtccatctgacttgctgccggatctgtgtgcgagccctctctggtaccattcattatcataacaagcagtacagaccccagaagggaggcatttgtgttgccaaccatacttcccccattgatgttttaatcttgacaacggatggatgttatgctatggttggccaggttcatggcggcttgatgggaattattcagagagctatggtcaaggcttgtcctcatgtctggtttgaacgctcagaaatgaaggatcgacacctggttactaagagactaaaagaacatattgctgataagaagaaactacccatactaatttttcctgaaggaacttgcatcaacaatacttcagtcatgatgtttaaaaaggggagctttgaaattggaggaaccatacatccagttgcaattaagtataaccctcagttcggtgatgcattttggaacagtagtaaatacaacatggtgagctacctgcttcgaatgatgaccagctgggccatcgtctgtgacgtgtggtacatgccccccatgaccagagaggaaggagaagatgcagtccagtttgctaacagggttaagtctgctattgctatacaaggaggcctgactgaacttccctgggatggaggactaaagagagcaaaggtgaaggacatctttaaggaagagcagcagaaaaattacagcaagatgattgtgggcaatggatctctcagctaagaggacggatgacagcctttagatctagaactagcccttagaaatggaatggctttttttgttttgttttgttttattgttttgtttttattattgttaatcttttctacagaatgattgtctctacctctttatgccagaggcagaacctacaggtgccctttttggcttttgttgttgttgtaacattagccccatggattgtaaggtggtttactgagttaaaacagattctgcttttgtaaaatgatggcatcactgtggactgaatgaaatatttgtatagaaaaaagtgcttgaaaagtgtgtttggaactcatcgatagggtaattctccaaaaatgcccaaactctttttctgtaattagccttgccactttcttcagtcacttaaatggtgagattacacatcagtgcaagatgaccattatggttatggtctactgcaaggttgaaaggaaaaatggaggattgtatttaggaaaagggacaactttgtggccacctgctctgaaagtcaaaaggaaatgtaaattagtgtcattagtgtgttggaagagaaatactattcagtaagcttcgccaaagaaaagtgagtcaaagttaatgtgtgtgcgcatttatatgtaggcagctcgtagaccacattttaaccagcaactggtaacaaagagcttagttttccttgtttgaatgctgtagatctgtacctagtacccctcccatctactgatttgtttgtttttgtaaccaaacacattttcagatagaaggagccttaaaaaaaaaaaatcacattgagtaacttcagtatgaatgaatgagagtgtgtggagctacccctcaccctccacccctttgtgctttttattcccgaattttcccagtctcttaaacagaaaaatgactgatataattatcttttggaaactgagccttaattttttttagagggggaaataagttttccccaactcacacagcataagcaatgtttgacagcaatataatgccgttgtaaactactgagagtattgtatctgttctggtaaccatgtacagaatgtgaaactgtcttatgaatataaataaattctatatttctaaa

SEQ ID NO: 137915 - DNA, 2631 bp, Homo sapiens
  Payload ID: 7008
  Gene Symbol: GPAT3
  Gene Name: glycerol-3-phosphate acyltransferase 3
  Uniprot ID: Q53EU6
  ENST ID: ENST00000395226
  CDS Start-End: 219-1523
agcttccagcacagcccgcggcccggtgccagctccgccggcgaccggtgtgccaaagtgcggtgctcccgcagggaacctggctcggggagggcctccaggtgagtgccgggctcggcgctctgctcctggagctcccgcgggactgcctggggacagggactgctgtggcgctcggccctccactgcggacctctcctgagtgggtgcgccgagtcatggagggcgcagagctggccgggaagatcctttccacctggctgacgctggttctcggcttcatccttttaccttcggtcttcggagtgtctctgggcatctccgagatctacatgaagatcctagtgaaaactttagagtgggccacaatacgaattgaaaaaggaaccccaaaggagtcgattcttaaaaactctgcttctgttggtattatccaaagagatgagtcacccatggaaaaagggctctctggtctacgaggaagggactttgagctgtctgacgtgttttatttctccaagaagggattggaagccattgtagaagatgaagtgacccagaggttttcctcagaggagctagtgtcatggaatctcctcacaagaaccaatgtaaatttccagtacatcagtctgcggctcactatggtgtgggtgctgggcgtcatagtgcgctattgtgtcctactgcctctgagggttaccttggctttcattgggatcagtttgctggttataggaactacactggttgggcagctgccagacagcagcctcaaaaactggctgagtgaactggtccatctgacttgctgccggatctgtgtgcgagccctctctggtaccattcattatcataacaagcagtacagaccccagaagggaggcatttgtgttgccaaccatacttcccccattgatgttttaatcttgacaacggatggatgttatgctatggttggccaggttcatggcggcttgatgggaattattcagagagctatggtcaaggcttgtcctcatgtctggtttgaacgctcagaaatgaaggatcgacacctggttactaagagactaaaagaacatattgctgataagaagaaactacccatactaatttttcctgaaggaacttgcatcaacaatacttcagtcatgatgtttaaaaaggggagctttgaaattggaggaaccatacatccagttgcaattaagtataaccctcagttcggtgatgcattttggaacagtagtaaatacaacatggtgagctacctgcttcgaatgatgaccagctgggccatcgtctgtgacgtgtggtacatgccccccatgaccagagaggaaggagaagatgcagtccagtttgctaacagggttaagtctgctattgctatacaaggaggcctgactgaacttccctgggatggaggactaaagagagcaaaggtgaaggacatctttaaggaagagcagcagaaaaattacagcaagatgattgtgggcaatggatctctcagctaagaggacggatgacagcctttagatctagaactagcccttagaaatggaatggctttttttgttttgttttgttttattgttttgtttttattattgttaatcttttctacagaatgattgtctctacctctttatgccagaggcagaacctacaggtgccctttttggcttttgttgttgttgtaacattagccccatggattgtaaggtggtttactgagttaaaacagattctgcttttgtaaaatgatggcatcactgtggactgaatgaaatatttgtatagaaaaaagtgcttgaaaagtgtgtttggaactcatcgatagggtaattctccaaaaatgcccaaactctttttctgtaattagccttgccactttcttcagtcacttaaatggtgagattacacatcagtgcaagatgaccattatggttatggtctactgcaaggttgaaaggaaaaatggaggattgtatttaggaaaagggacaactttgtggccacctgctctgaaagtcaaaaggaaatgtaaattagtgtcattagtgtgttggaagagaaatactattcagtaagcttcgccaaagaaaagtgagtcaaagttaatgtgtgtgcgcatttatatgtaggcagctcgtagaccacattttaaccagcaactggtaacaaagagcttagttttccttgtttgaatgctgtagatctgtacctagtacccctcccatctactgatttgtttgtttttgtaaccaaacacattttcagatagaaggagccttaaaaaaaaaaaatcacattgagtaacttcagtatgaatgaatgagagtgtgtggagctacccctcaccctccacccctttgtgctttttattcccgaattttcccagtctcttaaacagaaaaatgactgatataattatcttttggaaactgagccttaattttttttagagggggaaataagttttccccaactcacacagcataagcaatgtttgacagcaatataatgccgttgtaaactactgagagtattgtatctgttctggtaaccatgtacagaatgtgaaactgtcttatgaatataaataaattctatatttctaaa

SEQ ID NO: 137916 - DNA, 2633 bp, Homo sapiens
  Payload ID: 7008
  Gene Symbol: GPAT3
  Gene Name: glycerol-3-phosphate acyltransferase 3
  Uniprot ID: Q53EU6
  ENST ID: ENST00000611707
  CDS Start-End: 224-1528
agatgaaaactctcctcctgaaaggacctttgctgagtgctgggggaggcggggcgcggggaagaacggagaccgcccaggaggctgcggcactcctgggctaaaggtgagtgccgggctcggcgctctgctcctggagctcccgcgggactgcctggggacagggactgctgtggcgctcggccctccactgcggacctctcctgagtgggtgcgccgagtcatggagggcgcagagctggccgggaagatcctttccacctggctgacgctggttctcggcttcatccttttaccttcggtcttcggagtgtctctgggcatctccgagatctacatgaagatcctagtgaaaactttagagtgggccacaatacgaattgaaaaaggaaccccaaaggagtcgattcttaaaaactctgcttctgttggtattatccaaagagatgagtcacccatggaaaaagggctctctggtctacgaggaagggactttgagctgtctgacgtgttttatttctccaagaagggattggaagccattgtagaagatgaagtgacccagaggttttcctcagaggagctagtgtcatggaatctcctcacaagaaccaatgtaaatttccagtacatcagtctgcggctcactatggtgtgggtgctgggcgtcatagtgcgctattgtgtcctactgcctctgagggttaccttggctttcattgggatcagtttgctggttataggaactacactggttgggcagctgccagacagcagcctcaaaaactggctgagtgaactggtccatctgacttgctgccggatctgtgtgcgagccctctctggtaccattcattatcataacaagcagtacagaccccagaagggaggcatttgtgttgccaaccatacttcccccattgatgttttaatcttgacaacggatggatgttatgctatggttggccaggttcatggcggcttgatgggaattattcagagagctatggtcaaggcttgtcctcatgtctggtttgaacgctcagaaatgaaggatcgacacctggttactaagagactaaaagaacatattgctgataagaagaaactacccatactaatttttcctgaaggaacttgcatcaacaatacttcagtcatgatgtttaaaaaggggagctttgaaattggaggaaccatacatccagttgcaattaagtataaccctcagttcggtgatgcattttggaacagtagtaaatacaacatggtgagctacctgcttcgaatgatgaccagctgggccatcgtctgtgacgtgtggtacatgccccccatgaccagagaggaaggagaagatgcagtccagtttgctaacagggttaagtctgctattgctatacaaggaggcctgactgaacttccctgggatggaggactaaagagagcaaaggtgaaggacatctttaaggaagagcagcagaaaaattacagcaagatgattgtgggcaatggatctctcagctaagaggacggatgacagcctttagatctagaactagcccttagaaatggaatggctttttttgttttgttttgttttattgttttgtttttattattgttaatcttttctacagaatgattgtctctacctctttatgccagaggcagaacctacaggtgccctttttggcttttgttgttgttgtaacattagccccatggattgtaaggtggtttactgagttaaaacagattctgcttttgtaaaatgatggcatcactgtggactgaatgaaatatttgtatagaaaaaagtgcttgaaaagtgtgtttggaactcatcgatagggtaattctccaaaaatgcccaaactctttttctgtaattagccttgccactttcttcagtcacttaaatggtgagattacacatcagtgcaagatgaccattatggttatggtctactgcaaggttgaaaggaaaaatggaggattgtatttaggaaaagggacaactttgtggccacctgctctgaaagtcaaaaggaaatgtaaattagtgtcattagtgtgttggaagagaaatactattcagtaagcttcgccaaagaaaagtgagtcaaagttaatgtgtgtgcgcatttatatgtaggcagctcgtagaccacattttaaccagcaactggtaacaaagagcttagttttccttgtttgaatgctgtagatctgtacctagtacccctcccatctactgatttgtttgtttttgtaaccaaacacattttcagatagaaggagccttaaaaaaaaaaaatcacattgagtaacttcagtatgaatgaatgagagtgtgtggagctacccctcaccctccacccctttgtgctttttattcccgaattttcccagtctcttaaacagaaaaatgactgatataattatcttttggaaactgagccttaattttttttagagggggaaataagttttccccaactcacacagcataagcaatgtttgacagcaatataatgccgttgtaaactactgagagtattgtatctgttctggtaaccatgtacagaatgtgaaactgtcttatgaatataaataaattctatatttct

SEQ ID NO: 137917 - DNA, 6298 bp, Homo sapiens
  Payload ID: 7009
  Gene Symbol: GPAT4
  Gene Name: glycerol-3-phosphate acyltransferase 4
  Uniprot ID: Q86UL3
  ENST ID: ENST00000396987
  CDS Start-End: 928-2298
gcagcttgggcccgcggcggcggcaagggcgggagggagcggtcgccgcgggatttggagctgcctagcctcgcggtcgctttggcagcatgtaagcagctgtttgccaagaacccaggtcactgctaagaaagggtgccttcgggagaagagtgtccagaggataccaatgccagatgcatctggagttacactcagcactcgcagtatgagacattgtgtgccagcatctctttccttctggcaaagactgtagctctccaggtaggaggatcctggaagctgtgagcaccaggagccttgccagaggaggatggggccagatatgaactctctaccatgaacatggttctcggcttatgaaggaattttaagtaaaacagttatttaatttccacatattcaagtcaaaagccttctgtgtgaagtgccagtgattacccctccacaggagttatcaggatttttctggcaccaagtttaattcttcttcgtacttctggtagtgacagatctgcaggacagatttatctgttgaatgctcttgggcaggaaaaccatgtaaaacctctggaagcagcatcaggacagcagagcagagcccccgtcctcactgctcacttgcacagaaactccatctggactcggatgcttttactgaagacccatctagcttcaatcatctttagagtccatccattctggagagacctggcgtttgcagttgcctcctgtggccgtgtttttctgtcattctgttcccaggccttctattcaggcggttgaagggtgtggactttggaatggggtttgctgttcttcgggaacttgcttcctttccctggctggtgctgtcaggaaggaccatctgaaggctgcaatttgttcttagggaggcaggtgctggcctggcctggatcttccaccatgttcctgttgctgccttttgatagcctgattgtcaaccttctgggcatctccctgactgtcctcttcaccctccttctcgttttcatcatagtgccagccatttttggagtctcctttggtatccgcaaactctacatgaaaagtctgttaaaaatctttgcgtgggctaccttgagaatggagcgaggagccaaggagaagaaccaccagctttacaagccctacaccaacggaatcattgcaaaggatcccacttcactagaagaagagatcaaagagattcgtcgaagtggtagtagtaaggctctggacaacactccagagttcgagctctctgacattttctacttttgccggaaaggaatggagaccattatggatgatgaggtgacaaagagattctcagcagaagaactggagtcctggaacctgctgagcagaaccaattataacttccagtacatcagccttcggctcacggtcctgtgggggttaggagtgctgattcggtactgctttctgctgccgctcaggatagcactggctttcacagggattagccttctggtggtgggcacaactgtggtgggatacttgccaaatgggaggtttaaggagttcatgagtaaacatgttcacttaatgtgttaccggatctgcgtgcgagcgctgacagccatcatcacctaccatgacagggaaaacagaccaagaaatggtggcatctgtgtggccaatcatacctcaccgatcgatgtgatcatcttggccagcgatggctattatgccatggtgggtcaagtgcacgggggactcatgggtgtgattcagagagccatggtgaaggcctgcccacacgtctggtttgagcgctcggaagtgaaggatcgccacctggtggctaagagactgactgaacatgtgcaagataaaagcaagctgcctatcctcatcttcccagaaggaacctgcatcaataatacatcggtgatgatgttcaaaaagggaagttttgaaattggagccacagtttaccctgttgctatcaagtatgaccctcaatttggcgatgccttctggaacagcagcaaatacgggatggtgacgtacctgctgcgaatgatgaccagctgggccattgtctgcagcgtgtggtacctgcctcccatgactagagaggcagatgaagatgctgtccagtttgcgaatagggtgaaatctgccattgccaggcagggaggacttgtggacctgctgtgggatgggggcctgaagagggagaaggtgaaggacacgttcaaggaggagcagcagaagctgtacagcaagatgatcgtggggaaccacaaggacaggagccgctcctgagcctgcctccagctggctggggccaccgtgcggggtgccaacgggctcagagctggagttgccgccgccgcccccactgctgtgtcctttccagactccagggctccccgggctgctctggatcccaggactccggctttcgccgagccgcagcgggatccctgtgcacccggcgcagcctacccttggtggtctaaacggatgctgctgggtgttgcgacccaggacgagatgccttgtttcttttacaataagtcgttggaggaatgccattaaagtgaactccccacctttgcacgctgtgcgggctgagtggttggggagatgtggccatggtcttgtgctagagatggcggtacaagagtctgttatgcaagcccgtgtgccagggatgtgctgggggcggccacccgctctccaggaaaggcacagctgaggcactgtggctggcttcggcctcaacatcgcccccagccttggagctctgcagacatgataggaaggaaactgtcatctgcaggggctttcagcaaaatgaagggttagatttttatgctgctgctgatggggttactaaagggaggggaagaggccaggtgggccgctgactgggccatggggagaacgtgtgttcgtactccaggctaaccctgaactccccatgtgatgcgcgctttgttgaatgtgtgtctcggtttccccatctgtaatatgagtcggggggaatggtggtgattcctacctcacagggctgttgtggggattaaagtgctgcgggtgagtgaaggacacatcacgttcagtgtttcaagtacaggcccacaaaacggggcacggcaggcctgagctcagagctgctgcactgggctttggatttgttcttgtgagtaaataaaactggctggtgaatgaactgggggacttctccctttactttctcccctggctgtggccctgagtagcaggcttctcgtgaggattcccgttctcttctgggagcatggccctggggctgcggagaagccaactgactgctggagcgaggaaccctgcagctcagaaggtgaacagctcgtctcagatgcttgcagatctttggttaatttagaatttccagcacagacgtggatttctccagagacggggtgtgtgcgggtcgctgatgtgaggcctaggggaagcaatgagtaaactccagggtgggggaggagcaagggcccggggagggctgcagaggggccggggcggggcagggcctgtgctgcatggtggcttctgcaggggagggacaggggagggctgcagaggggcagggtgggcagggcatgtgctgcatggcagcttctgcacagccagagcaggcaccacaggaaaagagtcggccactggtgcctgctgtacagtcacagtggaggcagagccaaggccaagcagcccctgtgggttctggggtttcaccagtttcatgctcctcagctccccattcatgccccaccagccctcacttgggacccatgctccctcgtggcacagtcatgatgcctctcaggattttgtgcctgtggtgctgagtgtcacgtccccaaggtcgccctctggcctgcagttcagggagtgggtgggagtgaagctgtgctcctggggctgcagacagatccactttgcatgtggtacctgctgggttggccctgcaatctccttttctctgcacctacctgtgacctccctgggagagcctcccatttcctcacctgccctgttgccagcccgggggaaatctttttgctctcaaatgaagactgaaaaaataaagtcagtgttatgactaataagtctcttaggaactgttttacaaaatgcttaagaataaaaagtgattttcagcttttataggtgatgtttacagtgtttgtaaaccaactggagggatcagtaattggtcttaaaagatcaggttctcttttaaaaagttcatctgaaactttatggtttgttactttcgtgatttgcataggtatttatatatacacacacacacaggttttgcttttgtctcacattcagcacagctgtctgcggcccctgccggcaggtgtggccgcacctggtgtgaagtcacgtggagtcagtgctgtggagggaagtcctgtgcgggccgggcagtgaggagagcactgattcacgcctgcagaaacgtaacctcccctttccgtgtatgccttttaccatcatccaggcgactgctccatccttttaaattaggggtcctgcaagccccaagtgacccatagtcagagtatctggtttggggtaaccgagttggtcttatggggcaaaaactcaagacacttagaaacatgcaaagtacaaaataatgtgttccctcctgttaccccagcaagggtggggctgagctgggaatgacacccagtggtgtaatgagtggaaagtgctggtcagctgctaacccccctccaagcctgctgcaccttcacttctctgcatccgtctcctgagtcataactagggacttggctagatgacctcagagacctcgtccacctctgaattctctgtttttaagcccatagttcaaactttggctttgatctctgaagtcttctgggtttggaaatacgggaagtcagctttgaatccattgcttctctaaaacatcagggctagtggaactaacccacttgagggtgacctcaagggctttaggcagccatggggctggggccatactgctctcaggctgggcagtatcttcattgtggttctcagacagccttttttactcaaacatgagactttccacccaccagttagggaactttttttttttttttaaacacggagtttcactcttgttgcccatgctggagtgcaatggcacaatctcagctccactgcaacctctacctcccgggttcaagtgattcttctgcctcagcctccaagtagctgagattacaggcatgcaccaccacacccagctaattttttgtatttagtagagactgggtttcaccatgttggtcaggctggtctccaactcctgacctcaggtgatccactctccttggcctcccaaagttctgggattacaggcgtgagccactgcgcccagccaagagggaactttttaataaagctagtgggattcccttgacagcagaaccagccttgggacttgatgcttcaccgtgtcagaatccgtccctggtgctgcctttcagagaagaggcttgatgtgtgaggggtcagggggagtgctccagatccctgaaatgcccttcccagaccagtgacaggcatttttgggtgccatcgtgtgaccttcacggcacagcaaacagtgggcactaaccctgttgtcctgtggaaatctgggtctctgaatcctgccatttccttcctggaattggccaggaacttgattttctgggctattgcttgctagtgtcccctgatgcatgaaggatccccccatgtcataggtcccacctgcctgctgtgcatcccgggtggccagactcggcttctccaggtgcacttgtcccaggtggcccggtccgtaggctggaagggcagctgcaggtgcactgcctcgcggacaggttaggatatggccacgcagccatccatcttctacagcacgcacaccccactctctcccccagtcaatatgtctctctccgatgggaaagttaataaattttgctctagattaaaagtattgatcatttcatttgtaaacgataaataaaaagggggaacttttcattgcgccaggggtggcacctggcgtgtgttgcgggggtgattgcgctggctgccggggggtgggcttctcatatgcattctggccggccagctgcattgatttcctattagtctcccagcaccacccagtaacacatcatttcagtacctgctattaatggtcttttgataaataatcacttgtaagtcaataaatttttattaaacagtg

SEQ ID NO: 137918 - DNA, 873 bp, Homo sapiens
  Payload ID: 7009
  Gene Symbol: GPAT4
  Gene Name: glycerol-3-phosphate acyltransferase 4
  ENST ID: ENST00000521806
  CDS Start-End: 93-632
ctttccctggctggtgctgtcaggaaggaccatctgaaggctgcaatttgttcttagggaggcaggtgctggcctggcctggatcttccaccatgttcctgttgctgccttttgatagcctgattgtcaaccttctgggcatctccctgactgtcctcttcaccctccttctcgttttcatcatagtgccagccatttttggagtctcctttggtatccgcaaactctacatgaaaagtctgttaaaaatctttgcgtgggctaccttgagaatggagcgaggagccaaggagaagaaccaccagctttacaagccctacaccaacggaatcattgcaaaggatcccacttcactagaagaagagatcaaagagattcgtcgaagtggtagtagtaaggctctggacaacactccagagttcgagctctctgacattttctacttttgccggaaaggaatggagaccattatggatgatgaggtgacaaagagattctcagcagaagaactggagtcctggaacctgctgagcagaaccaattataacttccagtacatcagccttcggctcacggtcctgtgggggttaggagtgctgattcggtactgctttctgctgccgctcaggtgaactctggtccaggtcccaggatagcactggctttcacagggattagccttctggtggtgggcacaactgtggtgggatacttgccaaatgggaggtttaaggagttcatgagtaaacatgttcacttaatgtgttaccggatctgcgtgcgagcgctgacagccatcatcacctaccatgacagggaaaacagaccaagaaatggtggcatctgtgtggccaatcatacctcaccgatcga

SEQ ID NO: 137919 - DNA, 1101 bp, Homo sapiens
  Payload ID: 7009
  Gene Symbol: GPAT4
  Gene Name: glycerol-3-phosphate acyltransferase 4
  ENST ID: ENST00000520223
  CDS Start-End: 1015-1101
aggaggcaccatcgccgcgccccggggatccccggcgggtggagcgggtgccccccgtccgggatggaacggtccgcgcccgccccgaaccccggccgcccgcctctccgctcgcctgctctccgagcccggctcctcggagcccctcgcctcccccaagtcccagctttggcagcatgtaagcagctgtttgccaagaacccaggtcactgctaagaaagggtgccttcgggagaagagtgtccagaggataccaatgccagatgcatctggagttacactcagcactcgcagtatgagacattgtgtgccagcatctctttccttctggcaaagactgtagctctccaggtaggaggatcctggaagctgtgagcaccaggagccttgccagaggaggatggggccagatatgaactctctaccatgaacatggttctcggcttatgaaggaattttaagtaaaacagttatttaatttccacatattcaagtcaaaagccttctgtgtgaagtgccagtgattacccctccacaggagttatcaggatttttctggcaccaagtttaattcttcttcgtacttctggtagtgacagatctgcaggacagatttatctgttgaatgctcttgggcaggaaaaccatgtaaaacctctggaagcagcatcaggacagcagagcagagcccccgtcctcactgctcacttgcacagaaactccatctggactcggatgcttttactgaagacccatctagcttcaatcatctttagagtccatccattctggagagacctggcgtttgcagttgcctcctgtggccgtgtttttctgtcattctgttcccaggccttctattcaggcggttgaagggtgtggactttggaatggggtttgctgttcttcgggaacttgcttcctttccctggctggtgctgtcaggaaggaccatctgaaggctgcaatttgttcttagggaggcaggtgctggcctggcctggatcttccaccatgttcctgttgctgccttttgatagcctgattgtcaaccttctgggcatctccctgactgtcctcttcaccctccttctcgttttc

SEQ ID NO: 137920 - DNA, 768 bp, Homo sapiens
  Payload ID: 7009
  Gene Symbol: GPAT4
  Gene Name: glycerol-3-phosphate acyltransferase 4
  ENST ID: ENST00000519853
  CDS Start-End: 294-768
ggcggcggcaagggcgggagggagcggtcgccgcgggatttggagctgcctagcctcgcggtcgctttggcagcatgtaagcagctgtttgccaagaacccaggtcactgctaagaaagggtgccttcgggagaagagtgtccagaggataccaatgccagatgcatctggagttacactcagcactcgcagtatgagacattgtgtgccagcatctctttccttctggcaaagactgtagctctccagtgccagccatttttggagtctcctttggtatccgcaaactctacatgaaaagtctgttaaaaatctttgcgtgggctaccttgagaatggagcgaggagccaaggagaagaaccaccagctttacaagccctacaccaacggaatcattgcaaaggatcccacttcactagaagaagagatcaaagagattcgtcgaagtggtagtagtaaggctctggacaacactccagagttcgagctctctgacattttctacttttgccggaaaggaatggagaccattatggatgatgaggtgacaaagagattctcagcagaagaactggagtcctggaacctgctgagcagaaccaattataacttccagtacatcagccttcggctcacggtcctgtgggggttaggagtgctgattcggtactgctttctgctgccgctcaggatagcactggctttcacagggattagccttctggtggtgggcacaactgtggtgggatacttgccaaatgggaggt

SEQ ID NO: 137921 - DNA, 6371 bp, Homo sapiens
  Payload ID: 7010
  Gene Symbol: GPAM
  Gene Name: glycerol-3-phosphate acyltransferase, mitochondrial
  Uniprot ID: Q9HCL2
  ENST ID: ENST00000348367
  CDS Start-End: 199-2685
gccactgcagctggcattggccgggactggaagtgcgggcttctgcagcagccgaagctggagctgctagggcagcagcggctcccctgttgtatggacattctgcacccgaaactgatagctgagtcctgaagttttatgttatgaaacagaagaactttcatcccagcacatgatttgggaattacactttgtgacatggatgaatctgcactgacccttggtacaatagatgtttcttatctgccacattcatcagaatacagtgttggtcgatgtaagcacacaagtgaggaatggggtgagtgtggctttagacccaccatcttcagatctgcaactttaaaatggaaagaaagcctaatgagtcggaaaaggccatttgttggaagatgttgttactcctgcactccccagagctgggacaaatttttcaaccccagtatcccgtctttgggtttgcggaatgttatttatatcaatgaaactcacacaagacaccgcggatggcttgcaagacgcctttcttacgttctttttattcaagagcgagatgtgcataagggcatgtttgccaccaatgtgactgaaaatgtgctgaacagcagtagagtacaagaggcaattgcagaagtggctgctgaattaaaccctgatggttctgcccagcagcaatcaaaagccgttaacaaagtgaaaaagaaagctaaaaggattcttcaagaaatggttgccactgtctcaccggcaatgatcagactgactgggtgggtgctgctaaaactgttcaacagcttcttttggaacattcaaattcacaaaggtcaacttgagatggttaaagctgcaactgagacgaatttgccgcttctgtttctaccagttcatagatcccatattgactatctgctgctcactttcattctcttctgccataacatcaaagcaccatacattgcttcaggcaataatctcaacatcccaatcttcagtaccttgatccataagcttgggggcttcttcatacgacgaaggctcgatgaaacaccagatggacggaaagatgttctctatagagctttgctccatgggcatatagttgaattacttcgacagcagcaattcttggagatcttcctggaaggcacacgttctaggagtggaaaaacctcttgtgctcgggcaggacttttgtcagttgtggtagatactctgtctaccaatgtcatcccagacatcttgataatacctgttggaatctcctatgatcgcattatcgaaggtcactacaatggtgaacaactgggcaaacctaagaagaatgagagcctgtggagtgtagcaagaggtgttattagaatgttacgaaaaaactatggttgtgtccgagtggattttgcacagccattttccttaaaggaatatttagaaagccaaagtcagaaaccggtgtctgctctactttccctggagcaagcgttgttaccagctatacttccttcaagacccagtgatgctgctgatgaaggtagagacacgtccattaatgagtccagaaatgcaacagatgaatccctacgaaggaggttgattgcaaatctggctgagcatattctattcactgctagcaagtcctgtgccattatgtccacacacattgtggcttgcctgctcctctacagacacaggcagggaattgatctctccacattggtcgaagacttctttgtgatgaaagaggaagtcctggctcgtgattttgacctggggttctcaggaaattcagaagatgtagtaatgcatgccatacagctgctgggaaattgtgtcacaatcacccacactagcaggaacgatgagttttttatcacccccagcacaactgtcccatcagtcttcgaactcaacttctacagcaatggggtacttcatgtctttatcatggaggccatcatagcttgcagcctttatgcagttctgaacaagaggggactggggggtcccactagcaccccacctaacctgatcagccaggagcagctggtgcggaaggcggccagcctgtgctaccttctctccaatgaaggcaccatctcactgccttgccagacattttaccaagtctgccatgaaacagtaggaaagtttatccagtatggcattcttacagtggcagagcacgatgaccaggaagatatcagtcctagtcttgctgagcagcagtgggacaagaagcttccagaacctttgtcttggagaagtgatgaagaagatgaagacagtgactttggggaggaacagcgagattgctacctgaaggtgagccaatccaaggagcaccagcagtttatcaccttcttacagagactccttgggcctttgctggaggcctacagctctgctgccatctttgttcacaacttcagtggtcctgttccagaacctgagtatctgcaaaagttgcacaaatacctaataaccagaacagaaagaaatgttgcagtatatgctgagagtgccacatattgtcttgtgaagaatgctgtgaaaatgtttaaggatattggggttttcaaggagaccaaacaaaagagagtgtctgttttagaactgagcagcacttttctacctcaatgcaaccgacaaaaacttctagaatatattctgagttttgtggtgctgtaggtaacgtgtggcactgctggcaaatgaaggtcatgagatgagttccttgtaggtaccagcttctggctcaagagttgaaggtgccatcgcagggtcaggcctgccctgtcccgaagtgatctcctggaagacaagtgccttctccctccatggatctgtgatcttcccagctctgcatcaacacagcagcctgcagataacacttggggggacctcagcctctattcgcaactcataatccgtagactacaagatgaaatctcaataaattatttttgagtttattaaagattgacattttaagtacaacttttaaggactaattactgtgatggacacagaaatgtagctgtgttctggaactgaatcttacatggtatacttagtgctgctgggtaatttgttggtatattatctggttagtggttaatgcttcctttaaaaataattgagtcatccattcactctttttcagttttatctgtcaatagtagctacatttttaatgggagcaccttttatcccaaagtgctttataaattgagtggactgatatatatcacacccaggtatcactgtgctgtcctttgctgtcagatttagaaatgtttttaagagctatgtgaaaacagacaatattagtttaggtcgggaactgagatattgtaatcaaatagttaacatcaggaagttaatttggctggcaaaattctagggaaacttggccagaaaactggtgttgaaggcttttgctcatataaacaagtgccattgagtttcaaatgaccagcaaatatatttagaacccttcctgttttatgtctgtacctcgtccacccctcaggtaatacctgcctctcacaggtacagctgtttcttggaaatcctccaaccaaatagcagttttcctaacttgattagcttgagctgacagactgttagaatacagttctctggccacagctgatgagggctttctgtactgcacacagattgtgtactgcaccccagtccaggtgactggtacccactcgagttgtgccgtgcacaacctgtccagtatatgcatgtggtggccctactgactggtaatggttagaggcatttatggatttttagctttgaggaaaaaccatgacttttaacaaatttttatgggttatatgcctaaacccttatgccacatagtggtaaataattatgaaaaatggtctgttcataattggtaggtgccttttgtgagcagggagcataattattggtttattatggtaattatggtgattttttaaatatcatgtaatgttaaaacgttttctaacagtttactgttgcttatctccaagatattatggaattaagaatttttccagatgagtgttacatagattctttgaatttagtataaaagtactgagaattaagtttgtacttccataagcttggattttaaacactgatagtatctcatgagtaatgtgtgttttgggagagggagggatgctgattgatatttcacattgtatgaaataccatgtttgaaactcatagcaataatgctatgctgttgtgatccctctcaagttctgcatttaaaatatattttttctttataggaattgatgtataccatgaagtcattgtcagttgtagtagctctgatgttgaatgagatatcatgttttagcattccattttactgactagggtagaagaacacttttcttggctacatttggaggatacccagggagtcttgggtgttccttatctggggaagcaaacatttcactagtctctttttttcatcctttaaattgtaaattaaggattactcaagctcaccattattcaagattgggactcgcttcccagtcgacactctgccctgcctgtcattgctgcaaagagctgctgctttgccaacctaagcaaagaaaatacggcttctcttgcattattttcccttttggttggtttgttttctagaagtacgttcagatgctttggggaatgcaatgtatgatttgctagctctctcaccacttaactcactgtgaggataaatatgcatgctttttgtaattaactggtgctttgaaaatcttttttaagggagaaaaatctcaaccaaagttatgctcatccagacaagctgacctttgagttaatttcagcacaactcattcttcagtgcctcatgactgaaaacaaaaaacaaaaaaacgaaagcatcttcacaatgaagcttccagatagcaccgttttgctaaaagatacattctcattgttttccaacagtgatggcttccacataaggttaaacaaactaggtgcttgtaaataatttattacagtttactctatcgcatttctgtaacatgaaatgcatgcccttcttcaggggaagactgtggtcaagttaaaaaaaaaaaacaatattaaacaacatgaaactgcagtctgtttttgaaaatgagaatgtcctaagtgattcagaagagaggagggaagttgtgcactctgaaaatgcatgaaaaacaaaggcaaaaactagtgggaaatgtgtagaactgttaactgagatggcttcgagtcttccttctggaatctgttaaatttcacaaagtcatgagggtaaatggagaaaatatttctgggattacaatgaatgtaagcccaaattgtggaattgccagtaacctggatggggaaaagcatttcccatagcactccatgtaatatgagtgctctgtgagatgttcatcagtgttttatagaaatggtgttgctgggaaaccaagtttgcacctggaaacttacaatgcactttagcgcagtaagggcttggcatccggtagtgaaaaactgtctaacccagcattgcccaaactattttgacaccaggacctttttctcctttgggatacttatgaacctctcactaatgtcctgtggagaacattttgggaaacactatgttagatagttctttaaggagacaaaacggtaatgaacagatagcactggggcagaatatgcatgcattttgtaacgtccagtgtggcgttgaatagatgtgtatttcctcccctgcagaaaataagcacagaaaattataatgtaggtgatcggagctctttcctttgatagagagaacagccccaatgatcctggctttttcactgaacgtatcagaatacatggatgaattggggtaaataaggttttaattcagatctagaagaaagtattgtacgtttgaatgcagatttttatccacagatagttgtagtgtttagacatgacaggacctatcgttgaggtttctaagacttactatgggctgtaaacctgttttttaaaactattttagaaacctgagacttgccgtctggcattttagtttaatacaaactaatgattgcatttgaaagagattcttgaccttatttctaaacgtctagagctctgaaatgtcttgatggaaggtattaaactatttgcctgttgtacaaagaaatgttaagactcgtgaaaagaattactataaggtactgtgaaataactgcgattttgtgagcaaaacatacttggaaatgctgattgatttttatgcttgttagtgtattgcaagaaacacagaaaatgtagttttgttttaataaaccaaaaattgaacatac

SEQ ID NO: 137922 - DNA, 5664 bp, Homo sapiens
  Payload ID: 7010
  Gene Symbol: GPAM
  Gene Name: glycerol-3-phosphate acyltransferase, mitochondrial
  ENST ID: ENST00000369425
  CDS Start-End: 165-2297
gaagctggagctgctagggtgcgaactgccagggcaggcagcagcggctcccctgttgtatggacattctgcacccgaaactgatagctgagtcctgaagttttatgttatgaaacagaagaactttcatcccagcacatgatttgggaattacactttgtgacatggatgaatctgcactgacccttggtacaatagatgtttcttatctgccacattcatcagaatacagtgttggtcgatgtaagcacacaagtgaggaatggggtgagtgtggctttagacccaccatcttcagatctgcaactttaaaatggaaagaaagcctaatgagtcggaaaaggccatttgttggaagatgttgttactcctgcactccccagagctgggacaaatttttcaaccccagtatcccgtctttgggtttgcggaatgttatttatatcaatgaaactcacacaagacaccgcggatggcttgcaagacgcctttcttacgttctttttattcaagagcgagatgtgcataagggcatgtttgccaccaatgtgactgaaaatgtgctgaacagcagtagagtacaagaggcaattgcagaagtggctgctgaattaaaccctgatggttctgcccagcagcaatcaaaagccgttaacaaagtgaaaaagaaagctaaaaggattcttcaagaaatggttgccactgtctcaccggcaatgatcagactgactgggtgggtgctgctaaaactgttcaacagcttcttttggaacattcaaattcacaaaggtcaacttgagatggttaaagctgcaactgagacgaatttgccgcttctgtttctaccagttcatagatcccatattgactatctgctgctcactttcattctcttctgccataacatcaaagcaccatacattgcttcaggcaataatctcaacatcccaatcttcagtaccttgatccataagcttgggggcttcttcatacgacgaaggctcgatgaaacaccagatggacggaaagatgttctctatagagctttgctccatgggcatatagttgaattacttcgacagcagcaattcttggagatcttcctggaaggcacacgttctaggagtggaaaaacctcttgtgctcgggcaggacttttgtcagttgtggtagatactctgtctaccaatgtcatcccagacatcttgataatacctgttggaatctcctatgatcgcattatcgaaggtcactacaatggtgaacaactgggcaaacctaagaagaatgagagcctgtggagtgtagcaagaggtgttattagaatgttacgaaaaaactatggttgtgtccgagtggattttgcacagccattttccttaaaggaatatttagaaagccaaagtcagaaaccggtgtctgctctactttccctggagcaagcgttgttaccagctatacttccttcaagacccagtgatgctgctgatgaaggtagagacacgtccattaatgagtccagaaatgcaacagatgaatccctacgaaggaggttgattgcaaatctggctgagcatattctattcactgctagcaagtcctgtgccattatgtccacacacattgtggcttgcctgctcctctacagacacaggcagggaattgatctctccacattggtcgaagacttctttgtgatgaaagaggaagtcctggctcgtgattttgacctggggttctcaggaaattcagaagatgtagtaatgcatgccatacagctgctgggaaattgtgtcacaatcacccacactagcaggaacgatgagttttttatcacccccagcacaactgtcccatcagtcttcgaactcaacttctacagcaatggggtacttcatgtctttatcatggaggccatcatagcttgcagcctttatgcagttctgaacaagaggggactggggggtcccactagcaccccacctaacctgatcagccaggagcagctggtgcggaaggcggccagcctgtgctaccttctctccaatgaaggcaccatctcactgccttgccagacattttaccaagtctgccatgaaacagtaggaaagtttatccagtatggcattcttacagtggcagagcacgatgaccaggaagatatcagtcctagtcttgctgagcagcagtgggacaagaagcttccagaacctttgtcttggagaagtgatgaagaagatgaagacagtgactttggggaggaacagcgagattgctacctgaaggtacttgggtgaagaattctggtggatattacagggatatgttgaggtttatgctgcagtgagatcagctggagtcctggtgatgtcttcttatctaaagaatcccccaactagctctggtaccttctgtgtggtaaagacactcaaactgtttgagttgaattaatagcattttaagtagaaaaggaaaggagagtctgaaaagtcaggaagatgaatgtcataggtgagactttcaccatccttttatgaaatacacaggtgcatacctgtttacctacacctgcacccctcatgaggcagcagttttgctattgagctgccactgacctggctgctctttttgagtcactcttgctgtccctcccaaaatttcatatattaagctctttgctgtcaattaaaacaaataccattataggagaaaattgagattaaaaaaaaagtccctgatttagaaaaatcaattttgtctaatttataattttagaacttagtaataatgacccgtcttttctgaatactctaagaggattactcttttttgacatttagaaattgtcttctttttcacttgggtggtattagtttagtttcaagatggggcagtgatcttgctttcacactccagaggggcttgaccgaaccagtgtgttttgggtaggtacagtgagagcctctcggccataaagcaccgccgtcacagtggccatcattccccacagtgctggactgtgggcaaaggccatttaggggaggcagggaataggtgctgcagaaggagtgagataatcttggtggtctcccattggtctttctgcagacttgagtgactgttgagcccaggcttcaaaccatggagggcctggtcttaggagcggctatttttagtgatgacagcgtatcacaagtagggcattcatttatgaaaatttcttctaggtggctgttcaatgaacacaagcctcaaataccataaaaaagtgaatgattacaataaagaatgtgtttgaaagccagcagttgtttccagcagagattctctgcatgaggggcagggggccgctttcatgtagtgctgatgtgagtggccatcttctcacgttactggctctccagagaaagtcctctgtccacttgccttgtgtctcttgtcccttcctcatgacttcatctcctgcttttgcacactcaggtgagccaatccaaggagcaccagcagtttatcaccttcttacagagactccttgggcctttgctggaggcctacagctctgctgccatctttgttcacaacttcagtggtcctgttccagaacctgagtatctgcaaaagttgcacaaatacctaataaccagaacagaaagaaatgttgcagtatatggtatgttaagtcactatttattcttttaaaatcttttttttttttttggatttcagaaatttgctaattgtagaaaattggaaaaatgcaaacttatcctgacctctaacaccgtagagtattactattatcttctttggcatgttatataagttgaatgatacagttatacactcttacatctggcttttttcacgtaacgttatttttgagattcatacatgttgcatatagttgttcctttgttcttgttgtgtagtgttccattgtataaatatttaccacattttattcattctgctgttgatggatatttgggttgttttcagttcacagctgctttgaacagtgttgctatgagcatatttgaatatgtcttttggtgaatatctgtgcccctatatacagcatgtatgtgggaacagaattgcctggttgtaggctctgggtatattcggctttggtagataccaccaaacagtttccaagggattatacctacttgtactcccacaacagtgtgtgtttcacttgctgcacatcttggccagcgctccgtcttctttgttttaggaggtgtgattggggtgggagtactattttatacagttgtagtttggagctgaaactacttgaatcactttttagagccaaaaggaatctaatctaatcacctcattttatagttgaggaaaataccccaggtcacactgctaattaatgggtaatctcgggatcagaattcttgtttcctaacctcgaggcctgtgctttctctggttccactgatgtacaatcatctgtgtaccactgggtagcttaaagaatatttatacactatctcatttgattctcacaacagtcctggaaaatggatgttttaggtatttctacttccctctgttctccctatttctctctctacaccctcttttctttccccttccctttcttatttacctcaatataggacaaagtaggtgtaagcaaagtaggtttaacagcaagtcatctgagaactcacaggttgccagtggtggaagtggggccccacccttgtctgctgacttgccctcattctcttcctagctccccatactttcttactgtggctgctgggattgtcatgatttgttgagcgtaaccatttgacagggttttattctctctcttcagctgagagtgccacatattgtcttgtgaagaatgctgtgaaaatgtttaaggatattggggtaggtgtccaccatttatggtataaaagctatctcaacttctgttctctttagatctagtctgtttgagctacctttgtggtggggtggaccccgagagaagcagtttctgctggcttaatgataaaggcatttttgggaacggggcatgtaggatgggttgggctatgttgaaggtgaagcccatcagtgtagatttatttgaatgttctggaattttactggtttcacatttattcccaagctgctatatataactggtatcaatatgtttcaaggtgctacaggttgaatatcccttatccaaaatgttgggaccagaaatgttttggatttcagatttttttgggattttggaatatgtgcattagacttacaggttgagcgtctctaatccaaaacccaaaatgctctgatgagcatgtcttttgagcatcatattgatgttcaaaatctttcagattttggagtacttcagatttttgattttgggattaggaccacaatcttggctcttaattattccatatgatttttagttactttcttgtatttttacaagaatttctagaagtatcctcaggtgtcctttaccttcatgattcatggggaatgtaagttctatagagatactagcggccttttgtgagggactgtttgtgactttattctaagtcattttagagtatagttatgttggttgaaattttagaatatagttaatgttggttgaactccatcaaaacaaaaaaaaaaaaa

SEQ ID NO: 137923 - DNA, 3082 bp, Homo sapiens
  Payload ID: 7011
  Gene Symbol: GPD1
  Gene Name: glycerol-3-phosphate dehydrogenase 1 (soluble)
  Uniprot ID: P21695
  ENST ID: ENST00000301149
  CDS Start-End: 233-1282
agaaaaagctgggcctagtctctgccccattcctgttccacacctgtctgtacccctgtctctcctttccctggctctgccagactctctatctccctgggcgccagcctccccacccacccctggagggcggggcttggctgcacccacgtgtggtggagttaaatgctcctagccggcagaggagctagggagtgtggcactgagccggctcaggcagagacgcggcaccatggctagcaagaaagtctgcattgtaggctccgggaactggggctcagccatcgccaagatcgtgggtggcaatgcagcccagctggcacagtttgacccacgggtgaccatgtgggtatttgaggaagacattggaggcaaaaagctgactgagatcatcaacacgcagcatgagaatgtcaaatacctgccagggcacaagttgcccccaaatgtggtggctgtcccagatgtggtccaggctgcagaggatgctgacatcctgatctttgtggtgccccatcagttcatcggcaagatctgtgaccagctcaagggccatctgaaggcaaacgccactggcatatctcttattaagggggtagacgagggccccaatgggctgaagctcatctcggaagtgattggggagcgcctcggcatccccatgagtgtgctgatgggggccaacattgccagcgaggtggctgatgagaagttctgtgagacaaccattggctgcaaggacccggcccagggacaactcctgaaagagctgatgcagacaccaaacttccgtatcacagtggtgcaagaggtggacacagtagagatctgtggagccttaaagaatgtagtggccgtgggggctggcttctgtgatggcctgggctttggcgacaacaccaaggcggcagtgatccggctgggactcatggagatgatagccttcgccaagctcttctgcagtggccctgtgtcctctgccaccttcttggagagctgtggtgttgctgacctgatcactacctgctatggagggcggaaccggaaagtggctgaggcctttgcgcgtacaggaaagtccattgagcagctggagaaagagttgctgaatgggcagaaactgcaggggcccgagacagcccgggagctatacagcatcctccagcacaagggcctggtagacaagtttcccttgttcatggctgtgtacaaggtgtgctacgagggccagccagtgggtgaattcatccactgcctgcagaatcatccagaacatatgtgagtggggccagggcccaggccaggccgcttttttaccccagtggagaccagcagaagcctggggtacctagtcaccaggatctccaggactcccagggagcagagtcttctcatcttttcactggaggacaggaggctatggggcccagctacgcacctggagatcctgaactgtcaagccactggcagcctcatgccaccacatttgccagaaatgcagttgccctgtccctctccagatgtggggctttctccatatcctctgggaggggtggaatcaagccccagtgctgcctgcttggtggcgggggtgatgtatgtggagaagggttgggggagaggccggtagggcaggggctgctagtggctgtctcacatacaccagtaatcctgttaaagggctgaagaagtatcttagccacaggagcgatgaggcaaggattgtcagggaggggtctgggcttctgagctgatgcaggccccaaggacccctttgctgacctctgccaggacccacacagcttcgatggatctcagtgtttgttaacaaaatacaaagatctcaaacaaaccccttttagcttctcctagcaacatctgtgtcctcagaaacctctggttctcccccttccccctcccccaggctgccctggcacccaaattgctgccatgctggcatctgtagctcggtggcttgacattctccccagggacttcccggttcctagttctttgccagctcctccccactctgtgcgacctttccaagccttccctcaccctccccgccagcaccctctttggggagcaggaacttaatctgctgacagagctacacctttcataacaggctcagatcactcagctccctgtgacctttgtattcacccaggcttccttctcagtagctctagctgggggaggtgtcagctgggcccctcctgtgctatctccccagaggacatccctgactccacccctttcttcctcccaaactctgcacctcttcctcagctgctccagaccggccagggtaaccagctaaccatgcctggcatctggaagccagcaggccagagggtggcccaaaggctgatgaacggtagggaagggtgagcagattcctatgttggtgggcaccaatattccaagggcagctctctttgctgaatgagggccttctcgtgaggtactgacaacaccagcaactcgagagctgggaaactcaaggaggaggaagaaaatcaaaaccaccctactccctggggtgaggaaagaacaggaggggaggaggaggagtgtgctctgcacttgccttgctccaggatggggtggcagcagaggaatgtcacaggtcagcagcctaggcctccagctataaatagtccggagggcccgagaggctcccgcccgtccagcagggctgtcagcttcctgtgtggcagcacctggcacactggctctggccagcattatgctaaaaccctgttactctccaatgaaccagggaggcgggctcctctctgcgcctatcccttgagaattctgtcttaccagtgaagggtggggctgcccagatcaggcagcaggagtgaggggcacagtcaccccaggccttgctgagcccaggtctgggtactgagtgtccagagctgcctccccaggaggttaaggtgggggcaaaggggaagcttcaagcactttgcctacttttgttcactccccagtgcactgtgactcaggccttcccatcaggcctatttgtctacccaataaagcgtgttttttccagaaacaagaa

SEQ ID NO: 137924 - DNA, 1591 bp, Homo sapiens
  Payload ID: 7011
  Gene Symbol: GPD1
  Gene Name: glycerol-3-phosphate dehydrogenase 1 (soluble)
  Uniprot ID: P21695
  ENST ID: ENST00000548814
  CDS Start-End: 44-1024
agggagtgtggcactgagccggctcaggcagagacgcggcaccatggctagcaagaaagtctgcattgtaggctccgggaactggggctcagccatcgccaagatcgtgggtggcaatgcagcccagctggcacagtttgacccacgggtgaccatgtgggtatttgaggaagacattggaggcaaaaagctgactgagatcatcaacacgcagcatgagaatgtcaaatacctgccagggcacaagttgcccccaaatgtgttcatcggcaagatctgtgaccagctcaagggccatctgaaggcaaacgccactggcatatctcttattaagggggtagacgagggccccaatgggctgaagctcatctcggaagtgattggggagcgcctcggcatccccatgagtgtgctgatgggggccaacattgccagcgaggtggctgatgagaagttctgtgagacaaccattggctgcaaggacccggcccagggacaactcctgaaagagctgatgcagacaccaaacttccgtatcacagtggtgcaagaggtggacacagtagagatctgtggagccttaaagaatgtagtggccgtgggggctggcttctgtgatggcctgggctttggcgacaacaccaaggcggcagtgatccggctgggactcatggagatgatagccttcgccaagctcttctgcagtggccctgtgtcctctgccaccttcttggagagctgtggtgttgctgacctgatcactacctgctatggagggcggaaccggaaagtggctgaggcctttgcgcgtacaggaaagtccattgagcagctggagaaagagttgctgaatgggcagaaactgcaggggcccgagacagcccgggagctatacagcatcctccagcacaagggcctggtagacaagtttcccttgttcatggctgtgtacaaggtgtgctacgagggccagccagtgggtgaattcatccactgcctgcagaatcatccagaacatatgtgagtggggccagggcccaggccaggccgcttttttaccccagtggagaccagcagaagcctggggtacctagtcaccaggatctccaggactcccagggagcagagtcttctcatcttttcactggaggacaggaggctatggggcccagctacgcacctggagatcctgaactgtcaagccactggcagcctcatgccaccacatttgccagaaatgcagttgccctgtccctctccagatgtggggctttctccatatcctctgggaggggtggaatcaagccccagtgctgcctgcttggtggcgggggtgatgtatgtggagaagggttgggggagaggccggtagggcaggggctgctagtggctgtctcacatacaccagtaatcctgttaaagggctgaagaagtatcttagccacaggagcgatgaggcaaggattgtcagggaggggtctgggcttctgagctgatgcaggccccaaggacccctttgctgacctctgccaggacccacacagcttcgatggatctcagtgtttgttaacaaaatacaaagatctcaaac

SEQ ID NO: 137925 - DNA, 573 bp, Homo sapiens
  Payload ID: 7011
  Gene Symbol: GPD1
  Gene Name: glycerol-3-phosphate dehydrogenase 1 (soluble)
  ENST ID: ENST00000547964
  CDS Start-End: 70-222
aaatgctcctagccggcagaggagctagggagtgtggcactgagccggctcaggcagagacgcggcaccatggctagcaagaaagtctgcattgtaggctccgggaactggtcactggggactatttgtcatgggagtggaggtgataaggaaggggctcagccatcgccaagatcgtgggtggcaatgcagcccagctggcacagtttgacccacgggtgaccatgtgggtatttgaggaagacattggaggcaaaaagctgactgagatcatcaacacgcagcatgagaatgtcaaatacctgccagggcacaagttgcccccaaatgtggtggctgtcccagatgtggtccaggctgcagaggatgctgacatcctgatctttgtggtgccccatcagttcatcggcaagatctgtgaccagctcaagggccatctgaaggcaaacgccactggcatatctcttattaagggggtagacgagggccccaatgggctgaagctcatctcggaagtgattggggagcgcctcggcatccccatgagtgtgctgatgggggccaacattgcca

SEQ ID NO: 137926 - DNA, 4060 bp, Homo sapiens
  Payload ID: 7012
  Gene Symbol: GPD1L
  Gene Name: glycerol-3-phosphate dehydrogenase 1-like
  Uniprot ID: Q8N335
  ENST ID: ENST00000282541
  CDS Start-End: 202-1257
gcagtggttcttgggagtggcgaagcgggtcctgccccgctgtcagctgcggcccccggcgccgggcgggggtggccgcgaccattggcggagaggcgaaaggggcggggccgccgccagccgctgcgggcaaggctgaacaggcggaggtgggcagccggccagggaagcacggtccaggcggctacattcggcccggccatggcagcggcgcccctgaaagtgtgcatcgtgggctcggggaactggggttcagctgttgcaaaaataattggtaataatgtcaagaaacttcagaaatttgcctccacagtcaagatgtgggtctttgaagaaacagtgaatggcagaaaactgacagacatcataaataatgaccatgaaaatgtaaaatatcttcctggacacaagctgccagaaaatgtggttgccatgtcaaatcttagcgaggctgtgcaggatgcagacctgctggtgtttgtcattccccaccagttcattcacagaatctgtgatgagatcactgggagagtgcccaagaaagcgctgggaatcaccctcatcaagggcatagacgagggccccgaggggctgaagctcatttctgacatcatccgtgagaagatgggtattgacatcagtgtgctgatgggagccaacattgccaatgaggtggctgcagagaagttctgtgagaccaccatcggcagcaaagtaatggagaacggccttctcttcaaagaacttctgcagactccaaattttcgaattaccgtggttgatgatgcagacactgttgaactctgtggtgcgcttaagaacatcgtagctgtgggagctgggttctgcgacggcctccgctgtggagacaacaccaaagcggccgtcatccgcctgggactcatggaaatgattgcttttgccaggatcttctgcaaaggccaagtgtctacagccaccttcctagagagctgcggggtggccgacctgatcaccacctgttacggagggcggaaccgcagggtggccgaggccttcgccagaactgggaagaccattgaagagttggagaaggagatgctgaatgggcaaaagctccaaggaccgcagacttctgctgaagtgtaccgcatcctcaaacagaagggactactggacaagtttccattgtttactgcagtgtatcagatctgctacgaaagcagaccagttcaagagatgttgtcttgtcttcagagccatccagagcatacataaagtgaatcatgcaacgtgttgggggaagttctgcctttctgatcaatcttttgggttcacgtggaaaccaggacttggcaacatgatgtttgactgtaatctcatcacggatatgtatgaatttttacaggttcgtttttgaattgtgagaggcagttcattagcaaagatgtactgggcagtaactaaacacacatgcaaacatgtgaatggtggtttattcctcattctgtggatgtttctatgagccaaaatttgatgtctttttttcaaaattgcttatgaaatttccacacaatcgtagcttataagattggaacgatctcagccaaatattttaggtgtaattcatatgtatttgagtggaggattttttttctcatttttctagtgttaaattttaaccagcattaacatggtagagtggaggagtgagtgtgttcaaagatcaacatatttaacttttaaacactatctcaaagccagcataattaactactttgattgtgggctgacctttgtttttttaacaatcaggcatttttaattagataatccactcatgtatttccccctcactgcagttgtctgcatttttagcctcttttctcttcgttagttgtcagaatatgccttcgtcaaggctcagaggtaacaagacagaaaattcatctgggattttcctgctgtggctggcacattcttctgattaacagacacttgtatgatgctttaggctagttagtgcattttttagcaaacatttatcttaaacatcacagatccactggggggtgcaaggggctactgttagtcctcttgttagatgcagtcactcctcctggtcacctagtgagcagggacagagccaggagtcaagtgcagtgccaaggtgcatgaccctctgagaagtcactgggctgatttgacctccgactcattggttgtgcaaatgccatgtgcagcctttcctgaggccataggagggcttcctgcagctgagatctatgcaggccatcctctcaacaagtgccactccaagggcggtcctcggtgcagcagcatcagcttcacttgtgggggggtgggggaaggggcggtctcagaaatgcaggttcccaggtcccaccctggacttctgaaggggtgtggcatctgtgtttctgatgcttactacaatatgtgaaccactactttagaaaatctgctttaacttggtattcctctaattgtgttccctaggaaatgactgtcccaagagccagtgattattccaggtgttccctggaaaggtcaagtgagtctgggaaacactatgtctgtacacctcttgaaggtgtcgaatgtatgtttatacatcagtggaacccatttttctagcctagcaagtcccaaacacattacactgaagagattttggtgaggaaacttgctggagttttcagggaacactgttctaggcttaggtgaccttaggatcactcaagtagacccttcactccctgcgagaaattaggatgaataactacctgtggcattgttggttctgaacttttacagttcaggcctgctgtgaatctttgatgaagctttaaggtgacactgttgtacaagatgtcagctttgctgaaacgcacattacctggaataagtgctttaattgtagaattagaatgggatttactgtactgttttaaatgagattggcttcagaatccattacagttaccttacatagcacttgatacgtgttaaatgaacatatgaatgtaatttatatattcctagaatttaagttactttgtgagatttgggcctgtccctcaatgccagtttaggatttctttttttctataccttgaaatgattataaaatagattttcatgggaattttaaaaactctatccaaaacatttttggagcattttaaagccccatacacagaagtatacgaaagcacacaaaacactccaagtttcagcagttttagcgccaccattaacccactttgcttgtctcatgaaaaatctttgttaaagtttgtacacaggtaacaaaaagttactttaaaagatatataaagggctgtaagctaattgtggtgtctagtaagtagcataatgagatgtgaggagttggaactttgcgtgttttgcgtattttcatctgcattcagcttcttactctgggtttgtactcgagtgttatttctttacaaatgcccttgtaattaccactctgaagtctgctgactgtgtctcttgaacatacttaggatattctgcacattatggaaaaaggtaaattttagaagtttctgctctactaactgtagatatttatgactctgcgagttatctatttttataaccacctgtggtccattgttcattttaattcacatttcttatgaagtatggtaacagggagggagacacctagattagcagctcaatttgtactacttcagccaatctgtgaatgtaaaaactacactgttgccttgctaggatccaccctcctataatatggaacaaatatctgaatgaaatccaccctaggagacggagtcaaactaaacttgtggtttttcatttaacttttgactacagcatggccccatggcatccacaccaagagggtgttgtgatgaggtgccggtgtgcaaagggaactttagtttttccactggttcttatctgctagccttttacatacatgtgtactatatttgtttatagactgtaggtggatatataatttaaaagcttgatttaataaacatttaaccccctaaacttg

SEQ ID NO: 137927 - DNA, 822 bp, Homo sapiens
  Payload ID: 7012
  Gene Symbol: GPD1L
  Gene Name: glycerol-3-phosphate dehydrogenase 1-like
  ENST ID: ENST00000428684
  CDS Start-End: 101-295
ggggcggggccgccgccagccgctgcgggcaaggctgaacaggcggaggtgggcagccggccagggaagcacggtccaggcggctacattcggcccggccatggcagcggcgcccctgaaagtgtgcatcgtgggctcggggaactggttgccatgtcaaatcttagcgaggctgtgcaggatgcagacctgctggtgtttgtcattccccaccagttcattcacagaatctgtgatgagatcactgggagagtgcccaagaaagcgctgggaatcaccctcatcaagggcatagacgagggccccgaggggctgaagctcatttctgacatcatccgtgagaagatgggtattgacatcagtgtgctgatgggagccaacattgccaatgaggtggctgcagagaagttctgtgagaccaccatcggcagcaaagtaatggagaacggccttctcttcaaagaacttctgcagactccaaattttcgaattaccgtggttgatgatgcagacactgttgaactctgtggtgcgcttaagaacatcgtagctgtgggagctgggttctgcgacggcctccgctgtggagacaacaccaaagcggccgtcatccgcctgggactcatggaaatgattgcttttgccaggatcttctgcaaaggccaagtgtctacagccaccttcctagagagctgcggggtggccgacctgatcaccacctgttacggagggcggaaccgcagggtggccgaggccttcgccagaactgggaagaccattgaagagttggagaaggagatgctgaatgggcaaaagctccaa

SEQ ID NO: 137928 - DNA, 594 bp, Homo sapiens
  Payload ID: 7012
  Gene Symbol: GPD1L
  Gene Name: glycerol-3-phosphate dehydrogenase 1-like
  ENST ID: ENST00000429432
  CDS Start-End: 212-594
atgtatttattttttgttgagacagggtctcactgtccttcagtctggagtgcagtggccctatcctggctcactgaagcctcgacctcctgggcacatgcaattctcccgcctcagcctcctgagtagctaggactataggggttcagctgttgcaaaaataattggtaataatgtcaagaaacttcagaaatttgcctccacagtcaagatgtgggtctttgaagaaacagtgaatggcagaaaactgacagacatcataaataatgaccatgaaaatgtaaaatatcttcctggacacaagctgccagaaaatgtggttgccatgtcaaatcttagcgaggctgtgcaggatgcagacctgctggtgtttgtcattccccaccagttcattcacagaatctgtgatgagatcactgggagagtgcccaagaaagcgctgggaatcaccctcatcaagggcatagacgagggccccgaggggctgaagctcatttctgacatcatccgtgagaagatgggtattgacatcagtgtgctgatgggagccaacattgccaatgaggtggctgcagagaagttctgtgagaccac

SEQ ID NO: 137929 - DNA, 599 bp, Homo sapiens
  Payload ID: 7012
  Gene Symbol: GPD1L
  Gene Name: glycerol-3-phosphate dehydrogenase 1-like
  ENST ID: ENST00000425459
  CDS Start-End: 80-599
gctgcgggcaaggctgaacaggcggaggtgggcagccggccagggaagcacggtccaggcggctacattcggcccggccatggcagcggcgcccctgaaagtgtgcatcgtgggctcggggaactggggttcagctgttgcaaaaataattggtaataatgtcaagaaacttcagaaatttgcctccacagtcaagatgtgggtctttgaagaaacagtgaatggcagaaaactgacagacatcataaataatgaccatgaaaatgtaaaatatcttcctggacacaagctgccagaaaatgtgggcatagacgagggccccgaggggctgaagctcatttctgacatcatccgtgagaagatgggtattgacatcagtgtgctgatgggagccaacattgccaatgaggtggctgcagagaagttctgtgagaccaccatcggcagcaaagtaatggagaacggccttctcttcaaagaacttctgcagactccaaattttcgaattaccgtggttgatgatgcagacactgttgaactctgtggtgcgcttaagaacatcgtagctgtgggagctgggttctgcgacggcctccgct

SEQ ID NO: 137930 - DNA, 621 bp, Homo sapiens
  Payload ID: 7012
  Gene Symbol: GPD1L
  Gene Name: glycerol-3-phosphate dehydrogenase 1-like
  ENST ID: ENST00000431009
  CDS Start-End: 190-621
attcggcccggccatggcagcggcgcccctgaaagtgtgcatcgtgggctcggggaactggtgagcggcggcgggctggaggccggggctccgcttccaggaagcgcctctcccgggcggggttcagctgttgcaaaaataattggtaataatgtcaagaaacttcagaaatttgcctccacagtcaagatgtgggtctttgaagaaacagtgaatggcagaaaactgacagacatcataaataatgaccatgaaaatgtaaaatatcttcctggacacaagctgccagaaaatgtggttgccatgtcaaatcttagcgaggctgtgcaggatgcagacctgctggtgtttgtcattccccaccagttcattcacagaatctgtgatgagatcactgggagagtgcccaagaaagcgctgggaatcaccctcatcaagggcatagacgagggccccgaggggctgaagctcatttctgacatcatccgtgagaagatgggtattgacatcagtgtgctgatgggagccaacattgccaatgaggtggctgcagagaagttctgtgagaccaccatcggcagcaaagtaatggagaacggccttctcttcaaagaacttctg

SEQ ID NO: 137931 - DNA, 6041 bp, Homo sapiens
  Payload ID: 7013
  Gene Symbol: GPD2
  Gene Name: glycerol-3-phosphate dehydrogenase 2 (mitochondrial)
  Uniprot ID: P43304
  ENST ID: ENST00000310454
  CDS Start-End: 373-2556
ttttttttttttgggtggcggggggttgcaagtgggaagcctgctgttcagctgccggggctctccgcctccccccacctgtatgaggctgggtctggggaacctgtgctcagcattccaccccctggagcttgggcttggtcttccctgcgggtccctgcgctgacattcaggcggggagccaggaggcctggcgcgcctccagagcccgccgggggagccgggcgagggttctgggctctgacggcggggtcgcagggtcgcccgcctcctggacacgtctgtaggcctagggaagcctgccggccgggaggtacagagtaggagaagccagatcccagggcggacaacgagaagtcgtcaggctaagaaatggcatttcaaaaggcagtgaaagggacgattcttgttggaggaggtgctcttgcaactgttttaggactttctcagtttgctcattacagaaggaaacaaatgaacctggcctatgttaaagcagcagactgcatttcagaaccagttaacagggagcctccttccagagaagctcagctactgactttgcaaaacacatctgaatttgatatccttgttattggaggaggagcaacaggaagtggctgtgcgctagatgctgtcaccagaggactaaaaacagcccttgtagaaagagatgatttctcatcagggaccagcagcagaagcactaaattgatccatggtggtgtgagatatctgcagaaggccatcatgaagttggatattgagcagtataggatggtaaaagaagcccttcatgagcgtgccaacctgctagaaattgctccccatttatcagctccattgcctataatgcttccagtttacaagtggtggcagttaccttactactgggtaggaatcaagctgtatgatttggttgcaggaagcaattgcctaaaaagcagttatgtcctcagcaaatcaagagcccttgaacatttcccaatgctccagaaggacaaactggtaggagcaattgtctactatgacggacaacataacgatgcacggatgaaccttgccattgctctgactgctgccaggtatggggctgccacagccaattacatggaggtagtgagcttgctcaagaagacagacccccagacagggaaagtgcgtgtgagcggcgcacggtgcaaggatgtcctcacagggcaggaatttgacgtgagagccaaatgtgttatcaatgccacgggacctttcacggactctgtgcgcaaaatggatgataaagacgcagcagctatctgccagccaagtgctggtgtccatattgtgatgcctggttattacagcccagagagcatgggacttcttgacccagcgaccagtgatgggcgagttattttcttcttaccctggcaaaagatgacgatcgctggcactactgatactccaactgatgttacacaccatccaattccttcagaagaagatatcaacttcattttgaatgaagtgcgtaattacctgagttgtgatgttgaagtgagaagaggggatgtcctggcagcatggagtggaatccgtcctcttgttacagaccccaaatctgcagatactcagtctatctcccgaaatcatgttgttgatatcagtgagagtggccttattactatagcaggtggaaagtggacaacttatcggtctatggcagaagataccataaatgctgctgtcaaaactcataatttaaaagcaggaccaagtagaacagttgggcttttccttcaagggggtaaagattggagccccacactctacattaggcttgtgcaggattatggacttgaaagcgaggtggcacagcatcttgccgccacctatggtgataaggcctttgaggtggccaaaatggcaagtgtgactggcaaaaggtggcctattgttggagtacgtcttgtgtcagaatttccatatattgaagcagaggtgaaatatgggattaaggagtatgcctgcactgctgtggatatgatttcacgtcgtactcgcctggcctttctaaatgtccaggcagcagaggaagccctacccaggattgttgaactgatgggcagggaactgaattgggatgattataagaagcaggaacaacttgaaacagccaggaagtttctatattatgaaatgggctataaatctcgatcagaacagttaacagatcgctctgaaattagcctactgccttcagacattgacaggtataagaagagatttcataagtttgatgcagaccagaaaggctttattaccattgttgatgttcagcgtgtattagagagtatcaatgtccaaatggatgaaaatacactccatgaaattctaaatgaagttgatttgaataaaaatggacaggttgaactcaatgaatttttgcagctgatgagtgctattcaaaaaggaagggtatctggaagccggcttgctatactaatgaaaactgcagaagagaacctcgacagaagagttccaattccagtggaccgtagttgtggaggattgtgagtctgggcagtaaatccacagccaacaaacatagaaacgacaaatcaccatgtaacaaccagagatgactgaaaccactctgaaataatgaatgtggatagctgccttttttaacactagaaaacattccaaaactttaaggtgttggtgtatttgccagctttatttgctgtactttatttgtatttgccattcagtctagcttttaagtatatttttttctttttctcattttcaatgcacattagttttgcatctgttttgtgacctgttagatgtgacacattctctttttgtttattcccttattctaaatgagttctaaaaacataatattttggcaaaaattgaaaaaagctggagacattttgtgacatgcatacagatagcatgtgttattaaaaagagttgcctattgaaatgatcatgtttctggagaaattaagcttatagacagcatgtgttattaaaaagagttacctattgaaatgatagtgtttctggagatttctcagccccatcttcctccagcttgtctaccttcctcatgcaaacaatattccacatttttatatctagagcatgactggctaactggagagggaaggaaaagtttagatctggttactggagcaagtctcaaagagaaactctgaaagcttccagaatcacaggtataagataaggatagcattgacatttgctgggagttacagtgatagtttcatctcagcagttcatttttttcttcagtcactgctggttttctttgactattatagttgccaggaagatccttgctcttcttactttaaaaccagcatttaagtggcaatttggatgtaataggatgagaccaaatttatctaattattacagtagtaatacatttaagagttaaaaatgtgtttttatatatccacatatgataacaaaagattcaattcccaagcctaaattttgaagcatgtggtattgtcaaatctagcttaccatcttttttgggggtacttgcaaccatagtaaaggaagatggaatagactttagttaactttaattataattatatgttaaataaggcacataaccagtttccaaggtcatcatggttgcttaaagtctttccccttctgtactccatggaaatattctcagtaaaccaaaaacaaaaatggaaaaataatcaccaacccccatcccgacacacacacagagtccaaagcaaaagtcagtgtgtattgaatttaacaagtaatgcagtttgggatgcttttgctacattttggtggcattttaactagttatctgaatatttattaatcgtacttcctcttgtaaagttaactacttacttttttgttgttgtttttttaacatcaggttctgtatctaataggagatgtaacactttatttcatggcaggtttttattgcagagacttgaagtcttagttttttaaactggcacataaaacactttttgctgttatttttatttatgtcaatactgcagagtatctttatgccttattcaagtggattctgagcctgtatgtcacaatgtaaacactggaggttcactcacctacgcactcacccaccacctctgaaagaaacagaaactgcagagaaagacagcatcttagctcattttgtttttaaatgaggttttagacgcttgccacttcctaagggaaatcctaaaacagagcaagtgatgctcccaggtatcactgtgaacttttttctttcaaagtgtgaatttttacactggctttttcatttttttaaagtaattgaagcttgtggctttacaacttagtgttttttgctatccagataacaagtttcattgtttagaacccagtgacacttaataggtagataaattgtcctttaaaatatcccagatgatatacacaatatggtacatttgtgctctctctctctgtttttctctctttctctttctagttagatcaagataacgatgacttgtaccctccctgattctgttacagtagggcccgggcagatctgtgtttgttaaacaggccttgtttgtgcatgctttgctatgaatgaagttcctttaaggacaaagaaaagcacacttttcttcttttgagcatatctgcttttactttaaatctgctaatttctaaaatgtagagtccttcaccaatcccagagactcaatttggaaatgaactgatttcaagccgttactgtgaataaagcaccccagcattttgtataagctcttaattaaacctgtacagcttctttacctgatttaagaaagggagacaagcaataggggggaataagcttcttcaaaattcattccaagcacaaaagaaattttttccctttgcatataaacttgacatcagttgattctgttggggtcggggtgggtatgcagggattgccttttattatcaagtgatttatttcaagagcctttgaggggattcaggtgaaggaacccccatctgtgctggagagttggatactcctttaaatagcccccaccacagtcataacaataatgataatgctggattatttgttaagccaaggttgtctgcctcatatccatcatgctgtttgcaatattcttgctttcaatcaatttatactgagtgtaactttaggatttctgctattaaatgcatgctctctatcctgcttcagtttctggctttgctttgtctgtttcaaaatatgtagcttcctcttttgtacaacaaaaaactcattctcacttttactaaatatactgtaggagtcatcattgatgttatttttctcttatgtatctgtaaagatttttggcatatgaatgtaatattaaagtcaatgatgctataacttgcgatgtttgcatcatgtcaacctttttgaaggagtgaaaaagccctactatgtttttaaatagcaagtgtaagctcagtgctagagtggatatacacaccgcatgttttcatatgtggcacttttatgtatcatgttgggttattgttctagactggactgttaaatactatgtttgaggctgggttgtcatttttataactgtcttggtgttttatggccattatttattacttttgatacacagaatgagctgcatgcatttatagagcaataagaggatgtatttaatgtgccttgtttttaactgaataagaactggaagcatgaatcaataaaactgattaaaatggtctatttgctagcattttgatgttacttgcagtcagataactttgattactgttgaagtttaaaaaaagtttgaaaatatttttacaaactgtgtttttgatgacacaaaagtgaaatatctacagagatagatgtaattttataagactgccagaattatttgtattaatttgttgctgtagcctttagggcatgacttctgtatttgtgcaatcctattctacaattacattcatcctattacaactca

SEQ ID NO: 137932 - DNA, 2397 bp, Homo sapiens
  Payload ID: 7013
  Gene Symbol: GPD2
  Gene Name: glycerol-3-phosphate dehydrogenase 2 (mitochondrial)
  Uniprot ID: P43304
  ENST ID: ENST00000409674
  CDS Start-End: 74-2257
agtcacaacactcatatcctagggaccaccacactgctatgagtcaggcatgtgcgttgtttaaggctaagaaatggcatttcaaaaggcagtgaaagggacgattcttgttggaggaggtgctcttgcaactgttttaggactttctcagtttgctcattacagaaggaaacaaatgaacctggcctatgttaaagcagcagactgcatttcagaaccagttaacagggagcctccttccagagaagctcagctactgactttgcaaaacacatctgaatttgatatccttgttattggaggaggagcaacaggaagtggctgtgcgctagatgctgtcaccagaggactaaaaacagcccttgtagaaagagatgatttctcatcagggaccagcagcagaagcactaaattgatccatggtggtgtgagatatctgcagaaggccatcatgaagttggatattgagcagtataggatggtaaaagaagcccttcatgagcgtgccaacctgctagaaattgctccccatttatcagctccattgcctataatgcttccagtttacaagtggtggcagttaccttactactgggtaggaatcaagctgtatgatttggttgcaggaagcaattgcctaaaaagcagttatgtcctcagcaaatcaagagcccttgaacatttcccaatgctccagaaggacaaactggtaggagcaattgtctactatgacggacaacataacgatgcacggatgaaccttgccattgctctgactgctgccaggtatggggctgccacagccaattacatggaggtagtgagcttgctcaagaagacagacccccagacagggaaagtgcgtgtgagcggcgcacggtgcaaggatgtcctcacagggcaggaatttgacgtgagagccaaatgtgttatcaatgccacgggacctttcacggactctgtgcgcaaaatggatgataaagacgcagcagctatctgccagccaagtgctggtgtccatattgtgatgcctggttattacagcccagagagcatgggacttcttgacccagcgaccagtgatgggcgagttattttcttcttaccctggcaaaagatgacgatcgctggcactactgatactccaactgatgttacacaccatccaattccttcagaagaagatatcaacttcattttgaatgaagtgcgtaattacctgagttgtgatgttgaagtgagaagaggggatgtcctggcagcatggagtggaatccgtcctcttgttacagaccccaaatctgcagatactcagtctatctcccgaaatcatgttgttgatatcagtgagagtggccttattactatagcaggtggaaagtggacaacttatcggtctatggcagaagataccataaatgctgctgtcaaaactcataatttaaaagcaggaccaagtagaacagttgggcttttccttcaagggggtaaagattggagccccacactctacattaggcttgtgcaggattatggacttgaaagcgaggtggcacagcatcttgccgccacctatggtgataaggcctttgaggtggccaaaatggcaagtgtgactggcaaaaggtggcctattgttggagtacgtcttgtgtcagaatttccatatattgaagcagaggtgaaatatgggattaaggagtatgcctgcactgctgtggatatgatttcacgtcgtactcgcctggcctttctaaatgtccaggcagcagaggaagccctacccaggattgttgaactgatgggcagggaactgaattgggatgattataagaagcaggaacaacttgaaacagccaggaagtttctatattatgaaatgggctataaatctcgatcagaacagttaacagatcgctctgaaattagcctactgccttcagacattgacaggtataagaagagatttcataagtttgatgcagaccagaaaggctttattaccattgttgatgttcagcgtgtattagagagtatcaatgtccaaatggatgaaaatacactccatgaaattctaaatgaagttgatttgaataaaaatggacaggttgaactcaatgaatttttgcagctgatgagtgctattcaaaaaggaagggtatctggaagccggcttgctatactaatgaaaactgcagaagagaacctcgacagaagagttccaattccagtggaccgtagttgtggaggattgtgagtctgggcagtaaatccacagccaacaaacatagaaacgacaaatcaccatgtaacaaccagagatgactgaaaccactctgaaataatgaatgtggatagctgccttttttaacactagaaaacattccaaaactttaa

SEQ ID NO: 137933 - DNA, 2661 bp, Homo sapiens
  Payload ID: 7013
  Gene Symbol: GPD2
  Gene Name: glycerol-3-phosphate dehydrogenase 2 (mitochondrial)
  Uniprot ID: P43304
  ENST ID: ENST00000409125
  CDS Start-End: 546-2351
agtcacaacactcatatcctagggaccaccacactgctatgagtcaggcatgtgcgttgtttaaggctaagaaatggcatttcaaaaggcagtgaaagggacgattcttgttggaggaggtgctcttgcaactgttttaggactttctcagtttgctcattacagaaggaaacaaatgaacctggcctatgttaaagcagcagactgcatttcagaaccagttaacagggagcctccttccagagaagctcagctactgactttgcaaaacacatctgaatttgatatccttgttattggaggaggagcaacaggaagtggctgtgcgctagatgctgtcaccagagggtcagcggaatcgacttaagaaactgtaaaactttaagaagagaactacgcctgtgagatttactagactgattttgaaaaagactactgataaactaaaaacagcccttgtagaaagagatgatttctcatcagggaccagcagcagaagcactaaattgatccatggtggtgtgagatatctgcagaaggccatcatgaagttggatattgagcagtataggatggtaaaagaagcccttcatgagcgtgccaacctgctagaaattgctccccatttatcagctccattgcctataatgcttccagtttacaagtggtggcagttaccttactactgggtaggaatcaagctgtatgatttggttgcaggaagcaattgcctaaaaagcagttatgtcctcagcaaatcaagagcccttgaacatttcccaatgctccagaaggacaaactggtaggagcaattgtctactatgacggacaacataacgatgcacggatgaaccttgccattgctctgactgctgccaggtatggggctgccacagccaattacatggaggtagtgagcttgctcaagaagacagacccccagacagggaaagtgcgtgtgagcggcgcacggtgcaaggatgtcctcacagggcaggaatttgacgtgagagccaaatgtgttatcaatgccacgggacctttcacggactctgtgcgcaaaatggatgataaagacgcagcagctatctgccagccaagtgctggtgtccatattgtgatgcctggttattacagcccagagagcatgggacttcttgacccagcgaccagtgatgggcgagttattttcttcttaccctggcaaaagatgacgatcgctggcactactgatactccaactgatgttacacaccatccaattccttcagaagaagatatcaacttcattttgaatgaagtgcgtaattacctgagttgtgatgttgaagtgagaagaggggatgtcctggcagcatggagtggaatccgtcctcttgttacagaccccaaatctgcagatactcagtctatctcccgaaatcatgttgttgatatcagtgagagtggccttattactatagcaggtggaaagtggacaacttatcggtctatggcagaagataccataaatgctgctgtcaaaactcataatttaaaagcaggaccaagtagaacagttgggcttttccttcaagggggtaaagattggagccccacactctacattaggcttgtgcaggattatggacttgaaagcgaggtggcacagcatcttgccgccacctatggtgataaggcctttgaggtggccaaaatggcaagtgtgactggcaaaaggtggcctattgttggagtacgtcttgtgtcagaatttccatatattgaagcagaggtgaaatatgggattaaggagtatgcctgcactgctgtggatatgatttcacgtcgtactcgcctggcctttctaaatgtccaggcagcagaggaagccctacccaggattgttgaactgatgggcagggaactgaattgggatgattataagaagcaggaacaacttgaaacagccaggaagtttctatattatgaaatgggctataaatctcgatcagaacagttaacagatcgctctgaaattagcctactgccttcagacattgacaggtataagaagagatttcataagtttgatgcagaccagaaaggctttattaccattgttgatgttcagcgtgtattagagagtatcaatgtccaaatggatgaaaatacactccatgaaattctaaatgaagttgatttgaataaaaatggacaggttgaactcaatgaatttttgcagctgatgagtgctattcaaaaaggaagggtatctggaagccggcttgctatactaatgaaaactgcagaagagaacctcgacagaagagttccaattccagtggaccgtagttgtggaggattgtgagtctgggcagtaaatccacagccaacaaacatagaaacgacaaatcaccatgtaacaaccagagatgactgaaaccactctgaaataatgaatgtggatagctgccttttttaacactagaaaacattccaaaactttaaggtgttggtgtatttgccagctttatttgctgtactttatttgtatttgccattcagtctagcttttaagtatatttttttctttttctcattttcaatgcacattagttttgcatctgttttgtgacctgttagatgtgacacattctctttttgtttattcccttatt

SEQ ID NO: 137934 - DNA, 2640 bp, Homo sapiens
  Payload ID: 7013
  Gene Symbol: GPD2
  Gene Name: glycerol-3-phosphate dehydrogenase 2 (mitochondrial)
  Uniprot ID: P43304
  ENST ID: ENST00000409861
  CDS Start-End: 74-2257
agtcacaacactcatatcctagggaccaccacactgctatgagtcaggcatgtgcgttgtttaaggctaagaaatggcatttcaaaaggcagtgaaagggacgattcttgttggaggaggtgctcttgcaactgttttaggactttctcagtttgctcattacagaaggaaacaaatgaacctggcctatgttaaagcagcagactgcatttcagaaccagttaacagggagcctccttccagagaagctcagctactgactttgcaaaacacatctgaatttgatatccttgttattggaggaggagcaacaggaagtggctgtgcgctagatgctgtcaccagaggactaaaaacagcccttgtagaaagagatgatttctcatcagggaccagcagcagaagcactaaattgatccatggtggtgtgagatatctgcagaaggccatcatgaagttggatattgagcagtataggatggtaaaagaagcccttcatgagcgtgccaacctgctagaaattgctccccatttatcagctccattgcctataatgcttccagtttacaagtggtggcagttaccttactactgggtaggaatcaagctgtatgatttggttgcaggaagcaattgcctaaaaagcagttatgtcctcagcaaatcaagagcccttgaacatttcccaatgctccagaaggacaaactggtaggagcaattgtctactatgacggacaacataacgatgcacggatgaaccttgccattgctctgactgctgccaggtatggggctgccacagccaattacatggaggtagtgagcttgctcaagaagacagacccccagacagggaaagtgcgtgtgagcggcgcacggtgcaaggatgtcctcacagggcaggaatttgacgtgagagccaaatgtgttatcaatgccacgggacctttcacggactctgtgcgcaaaatggatgataaagacgcagcagctatctgccagccaagtgctggtgtccatattgtgatgcctggttattacagcccagagagcatgggacttcttgacccagcgaccagtgatgggcgagttattttcttcttaccctggcaaaagatgacgatcgctggcactactgatactccaactgatgttacacaccatccaattccttcagaagaagatatcaacttcattttgaatgaagtgcgtaattacctgagttgtgatgttgaagtgagaagaggggatgtcctggcagcatggagtggaatccgtcctcttgttacagaccccaaatctgcagatactcagtctatctcccgaaatcatgttgttgatatcagtgagagtggccttattactatagcaggtggaaagtggacaacttatcggtctatggcagaagataccataaatgctgctgtcaaaactcataatttaaaagcaggaccaagtagaacagttgggcttttccttcaagggggtaaagattggagccccacactctacattaggcttgtgcaggattatggacttgaaagcgaggtggcacagcatcttgccgccacctatggtgataaggcctttgaggtggccaaaatggcaagtgtgactggcaaaaggtggcctattgttggagtacgtcttgtgtcagaatttccatatattgaagcagaggtgaaatatgggattaaggagtatgcctgcactgctgtggatatgatttcacgtcgtactcgcctggcctttctaaatgtccaggcagcagaggaagccctacccaggattgttgaactgatgggcagggaactgaattgggatgattataagaagcaggaacaacttgaaacagccaggaagtttctatattatgaaatgggctataaatctcgatcagaacagttaacagatcgctctgaaattagcctactgccttcagacattgacaggtataagaagagatttcataagtttgatgcagaccagaaaggctttattaccattgttgatgttcagcgtgtattagagagtatcaatgtccaaatggatgaaaatacactccatgaaattctaaatgaagttgatttgaataaaaatggacaggttgaactcaatgaatttttgcagctgatgagtgctattcaaaaaggaagggtatctggaagccggcttgctatactaatgaaaactgcagaagagaacctcgacagaagagttccaattccagtggaccgtagttgtggaggattatgagatttaaaatcattttgatgatttctctaagattatgttgagtttctaaaacttggtttgtgttaaatctgttcattgatttggagactgacagatataaaagatgtaaaacttttttacatgttcatagccttctatgaagagtgtggaagaatcacaacaatgaagagaagatatgtttcttggggagcatgttcaatctaattcaagtagatacatggagtcgtgaagataaattctgatcacaccgcattctggtcatcattacctagttgaagaggtttattggagaagaactatcagtgttttaaagcagtggtcttcaaacgggggcacacaaagactttccaaggggggtacataaatataaatagttttaaggt

SEQ ID NO: 137935 - DNA, 537 bp, Homo sapiens
  Payload ID: 7013
  Gene Symbol: GPD2
  Gene Name: glycerol-3-phosphate dehydrogenase 2 (mitochondrial)
  ENST ID: ENST00000416888
  CDS Start-End: 74-244
agtcacaacactcatatcctagggaccaccacactgctatgagtcaggcatgtgcgttgtttaaggctaagaaatggcatttcaaaaggcagtgaaagggacgattcttgttggaggaggtgctcttgcaactgttttaggactttctcagtttgctcattacagaaggaaacaaaatatagttttgtcaggagaactgaggaatgaagaatgtatacttctgagaaagtgtggaaagacatgaagtcctttttcctcctccttcaccactttaatatgtcatctgaatgaattgctagtactggatgaacctggcctatgttaaagcagcagactgcatttcagaaccagttaacagggagcctccttccagagaagctcagctactgactttgcaaaacacatctgaatttgatatccttgttattggaggaggagcaacaggaagtggctgtgcgctagatgctgtcaccagagggtcagcggaatcgacttaagaaactgtaaaactttaagaagagaactacgcctgtgaga

SEQ ID NO: 137936 - DNA, 496 bp, Homo sapiens
  Payload ID: 7013
  Gene Symbol: GPD2
  Gene Name: glycerol-3-phosphate dehydrogenase 2 (mitochondrial)
  ENST ID: ENST00000430992
  CDS Start-End: 54-224
agggaccaccacactgctatgagtcaggcatgtgcgttgtttaaggctaagaaatggcatttcaaaaggcagtgaaagggacgattcttgttggaggaggtgctcttgcaactgttttaggactttctcagtttgctcattacagaaggaaacaaaatatagttttgtcaggagaactgaggaatgaagaatgtatacttctgagaaagtgtggaaagacatgaagtcctttttcctcctccttcaccactttaatatgtcatctgaatgaattgctagtactggatgaacctggcctatgttaaagcagcagactgcatttcagaaccagttaacagggagcctccttccagagaagctcagctactgactttgcaaaacacatctgaatttgatatccttgttattggaggaggagcaacaggaagtggctgtgcgctagatgctgtcaccagaggactaaaaacagcccttgtagaaagagatgatttctcat

SEQ ID NO: 137937 - DNA, 2457 bp, Homo sapiens
  Payload ID: 7013
  Gene Symbol: GPD2
  Gene Name: glycerol-3-phosphate dehydrogenase 2 (mitochondrial)
  Uniprot ID: P43304
  ENST ID: ENST00000438166
  CDS Start-End: 134-2317
cccgcgcgcctcgctgggagcacccgggccgaggctctgattctggggggaggccgactccaccctggctggaggaactgggtgctcctgcccgctggcccctcgcgcgtgaggatctatctcaggctaagaaatggcatttcaaaaggcagtgaaagggacgattcttgttggaggaggtgctcttgcaactgttttaggactttctcagtttgctcattacagaaggaaacaaatgaacctggcctatgttaaagcagcagactgcatttcagaaccagttaacagggagcctccttccagagaagctcagctactgactttgcaaaacacatctgaatttgatatccttgttattggaggaggagcaacaggaagtggctgtgcgctagatgctgtcaccagaggactaaaaacagcccttgtagaaagagatgatttctcatcagggaccagcagcagaagcactaaattgatccatggtggtgtgagatatctgcagaaggccatcatgaagttggatattgagcagtataggatggtaaaagaagcccttcatgagcgtgccaacctgctagaaattgctccccatttatcagctccattgcctataatgcttccagtttacaagtggtggcagttaccttactactgggtaggaatcaagctgtatgatttggttgcaggaagcaattgcctaaaaagcagttatgtcctcagcaaatcaagagcccttgaacatttcccaatgctccagaaggacaaactggtaggagcaattgtctactatgacggacaacataacgatgcacggatgaaccttgccattgctctgactgctgccaggtatggggctgccacagccaattacatggaggtagtgagcttgctcaagaagacagacccccagacagggaaagtgcgtgtgagcggcgcacggtgcaaggatgtcctcacagggcaggaatttgacgtgagagccaaatgtgttatcaatgccacgggacctttcacggactctgtgcgcaaaatggatgataaagacgcagcagctatctgccagccaagtgctggtgtccatattgtgatgcctggttattacagcccagagagcatgggacttcttgacccagcgaccagtgatgggcgagttattttcttcttaccctggcaaaagatgacgatcgctggcactactgatactccaactgatgttacacaccatccaattccttcagaagaagatatcaacttcattttgaatgaagtgcgtaattacctgagttgtgatgttgaagtgagaagaggggatgtcctggcagcatggagtggaatccgtcctcttgttacagaccccaaatctgcagatactcagtctatctcccgaaatcatgttgttgatatcagtgagagtggccttattactatagcaggtggaaagtggacaacttatcggtctatggcagaagataccataaatgctgctgtcaaaactcataatttaaaagcaggaccaagtagaacagttgggcttttccttcaagggggtaaagattggagccccacactctacattaggcttgtgcaggattatggacttgaaagcgaggtggcacagcatcttgccgccacctatggtgataaggcctttgaggtggccaaaatggcaagtgtgactggcaaaaggtggcctattgttggagtacgtcttgtgtcagaatttccatatattgaagcagaggtgaaatatgggattaaggagtatgcctgcactgctgtggatatgatttcacgtcgtactcgcctggcctttctaaatgtccaggcagcagaggaagccctacccaggattgttgaactgatgggcagggaactgaattgggatgattataagaagcaggaacaacttgaaacagccaggaagtttctatattatgaaatgggctataaatctcgatcagaacagttaacagatcgctctgaaattagcctactgccttcagacattgacaggtataagaagagatttcataagtttgatgcagaccagaaaggctttattaccattgttgatgttcagcgtgtattagagagtatcaatgtccaaatggatgaaaatacactccatgaaattctaaatgaagttgatttgaataaaaatggacaggttgaactcaatgaatttttgcagctgatgagtgctattcaaaaaggaagggtatctggaagccggcttgctatactaatgaaaactgcagaagagaacctcgacagaagagttccaattccagtggaccgtagttgtggaggattgtgagtctgggcagtaaatccacagccaacaaacatagaaacgacaaatcaccatgtaacaaccagagatgactgaaaccactctgaaataatgaatgtggatagctgccttttttaacactagaaaacattccaaaactttaa

SEQ ID NO: 137938 - DNA, 456 bp, Homo sapiens
  Payload ID: 7013
  Gene Symbol: GPD2
  Gene Name: glycerol-3-phosphate dehydrogenase 2 (mitochondrial)
  ENST ID: ENST00000415049
  CDS Start-End: 129-456
attagtacagcacccagaggtcttcggagcaaagctgttaaagaagtggggtccatttgagccccaactttgccttccttaggtccccttgggcttgtctagccctaggagttccaacaagctaagaaatggcatttcaaaaggcagtgaaagggacgattcttgttggaggaggtgctcttgcaactgttttaggactttctcagtttgctcattacagaaggaaacaaatgaacctggcctatgttaaagcagcagactgcatttcagaaccagttaacagggagcctccttccagagaagctcagctactgactttgcaaaacacatctgaatttgatatccttgttattggaggaggagcaacaggaagtggctgtgcgctagatgctgtcaccagaggactaaaaacagcccttgtagaaagagatgatttctcatcagggaccagcagca

SEQ ID NO: 137939 - DNA, 1961 bp, Homo sapiens
  Payload ID: 7013
  Gene Symbol: GPD2
  Gene Name: glycerol-3-phosphate dehydrogenase 2 (mitochondrial)
  ENST ID: ENST00000540309
  CDS Start-End: 38-1177
ggcccctcgcgcgtgaggatctatctcaggctaagaaatggcatttcaaaaggcagtgaaagggacgattcttgttggaggaggtgctcttgcaactgttttaggactttctcagtttgctcattacagaaggaaacaaatgaacctggcctatgttaaagcagcagactgcatttcagaaccagttaacagggagcctccttccagagaagctcagctactgactttgcaaaacacatctgaatttgatatccttgttattggaggaggagcaacaggaagtggctgtgcgctagatgctgtcaccagaggactaaaaacagcccttgtagaaagagatgatttctcatcagggaccagcagcagaagcactaaattgatccatggtggtgtgagatatctgcagaaggccatcatgaagttggatattgagcagtataggatggtaaaagaagcccttcatgagcgtgccaacctgctagaaattgctccccatttatcagctccattgcctataatgcttccagtttacaagtggtggcagttaccttactactgggtaggaatcaagctgtatgatttggttgcaggaagcaattgcctaaaaagcagttatgtcctcagcaaatcaagagcccttgaacatttcccaatgctccagaaggacaaactggtaggagcaattgtctactatgacggacaacataacgatgcacggatgaaccttgccattgctctgactgctgccaggtatggggctgccacagccaattacatggaggtagtgagcttgctcaagaagacagacccccagacagggaaagtgcgtgtgagcggcgcacggtgcaaggatgtcctcacagggcaggaatttgacgtgagagccaaatgtgttatcaatgccacgggacctttcacggactctgtgcgcaaaatggatgataaagacgcagcagctatctgccagccaagtgctggtgtccatattgtgatgcctggttattacagcccagagagcatgggacttcttgacccagcgaccagtgatgggcgagttattttcttcttaccctggcaaaagatgacgatcgctggcactactgatactccaactgatgttacacaccatccaattccttcagaagaagatatcaacttcattttgaatgaagtataagaagagatttcataagtttgatgcagaccagaaaggctttattaccattgttgatgttcagcgtgtattagagagtatcaatgtccaaatggatgaaaatacactccatgaaattctaaatgaagttgatttgaataaaaatggacaggttgaactcaatgaatttttgcagctgatgagtgctattcaaaaaggaagggtatctggaagccggcttgctatactaatgaaaactgcagaagagaacctcgacagaagagttccaattccagtggaccgtagttgtggaggattgtgagtctgggcagtaaatccacagccaacaaacatagaaacgacaaatcaccatgtaacaaccagagatgactgaaaccactctgaaataatgaatgtggatagctgccttttttaacactagaaaacattccaaaactttaaggtgttggtgtatttgccagctttatttgctgtactttatttgtatttgccattcagtctagcttttaagtatatttttttctttttctcattttcaatgcacattagttttgcatctgttttgtgacctgttagatgtgacacattctctttttgtttattcccttattctaaatgagttctaaaaacataatattttggcaaaaattgaaaaaagctggagacattttgtgacatgcatacagatagcatgtgttattaaaaagagttgcctattgaaatgatcatgtttctggagaaattaagcttatagacagcatgtgttattaaaaagagttacctattg

SEQ ID NO: 137940 - DNA, 2643 bp, Homo sapiens
  Payload ID: 7014
  Gene Symbol: GNPAT
  Gene Name: glyceronephosphate O-acyltransferase
  Uniprot ID: O15228
  ENST ID: ENST00000366647
  CDS Start-End: 170-2212
ttccgtcctggctgagatggcggcgcccgggatcctgtgtagcggctgcagagggtgccgccgccctaggcgaagtagggccgtcctgagcgaaagaaccgcccccagcaggagcaccaccacggcttagcaaagaatcccagaccccgcccgggaaggcagccgcaccatggagtcttccagttcatctaactcttatttctccgttggcccaaccagtcccagcgctgtcgtgctcctctactcgaaggagctcaaaaagtgggatgagtttgaagatattttagaagagaggaggcatgtcagtgacttgaaatttgcaatgaaatgctacacacctcttgtctataagggaattactccatgtaaaccaattgatattaaatgtagtgttctcaattctgaggagattcattatgtcattaaacagctttccaaggaatcccttcaatctgtggatgtcctccgagaggaagtgagtgagatcttagatgaaatgagtcacaaactgcgtcttggagccattcggttttgtgccttcaccctgagcaaagtatttaaacaaattttctcgaaggtgtgtgtaaatgaagaaggtattcagaaactacaaagagccatccaggagcatcctgttgttctgctgcctagtcatcgaagttacattgacttcctcatgttgtcttttcttctatacaattatgatttgcctgtgccagttatagcagcaggaatggacttcctgggaatgaaaatggttggtgagctgctacgaatgtcgggtgcctttttcatgcggcgtacctttggtggcaataaactctactgggctgtattctctgaatatgtaaaaactatgttacggaatggttatgctcctgttgaatttttcctcgaagggacaagaagccgctctgccaagacattgactcctaaatttggtcttctgaatattgtgatggagccattttttaaaagagaagtttttgatacctaccttgtcccaattagtatcagttatgataagatcttggaagaaactctttatgtgtatgagcttctaggggttcctaaaccaaaagagtctacaactgggttgctgaaagccagaaagattctctctgaaaattttggaagcatccatgtgtactttggagatcctgtgtcacttcgatctttggcagctgggaggatgagtcggagctcatataacttggttccaagatacattcctcagaaacagtctgaggacatgcatgcctttgtcactgaagttgcctacaaaatggagcttctgcaaattgaaaacatggttttgagcccctggaccctaatagttgctgttctgcttcagaaccggccatccatggactttgatgctctggtggaaaagactttatggctaaaaggcttaacccaggcatttggagggtttctcatttggcctgataataaacctgctgaagaagttgtcccggccagcattcttctgcattccaacattgccagccttgtcaaagaccaggtgattctgaaagtggactccggagactcggaagtggtcgatgggcttatgctccagcacatcactctcctcatgtgctcagcttataggaaccagctgctcaacatttttgtgcgcccatccttagtagcagtagcattgcagatgacaccagggttcaggaaagaggatgtctacagttgctttcgcttcctacgtgatgtttttgcagatgagttcatcttccttccaggaaacacactaaaggactttgaagaaggctgttacctgctttgtaaaagtgaagccatacaagtgactacgaaagacatcctagttacagagaaaggaaatactgtgttagaatttttagtaggactctttaaaccttttgtggaaagctatcagataatttgcaagtaccttttgagtgaagaagaggaccacttcagtgaggaacagtacttggctgcagtcagaaaattcacaagtcagcttctcgatcaaggtacctctcaatgttatgatgtattatcttctgatgtgcagaaaaacgccttagcagcctgtgtgaggctcggagtagtggagaagaagaagataaataataactgtatatttaatgtgaatgaacctgccacaaccaaattagaagaaatgcttggttgtaagacaccaataggaaaaccagccactgcaaaactttaataatcaacaaatagttatggaaaattcggtcacgtaattactctcatcgaaggactcattacaacaaacagggaagtaaaggaagagacacatcctctcatactccctgagactctgagaacagtggacgcagagggaagagatgatcattggaagcaatcagtttactcttccccaccacagtggttaaaaggcgtttgtatctgacactatgtgtgtgttttaaaataaacttttggaaacatgtttggaaaagcaaagctcagctcatttcactaacacttttcagcttactatatgtattaaacttttatgttgacttttgaattaaagtatgacaacactgaaagctctggatattaaaagaaaatgaaaagggcatatctacgttacttgtagcttgctttaattaaagttgcctcaaacaagta

SEQ ID NO: 137941 - DNA, 839 bp, Homo sapiens
  Payload ID: 7014
  Gene Symbol: GNPAT
  Gene Name: glyceronephosphate O-acyltransferase
  ENST ID: ENST00000436239
  CDS Start-End: 173-839
ggcttccgtcctggctgagatggcggcgcccgggatcctgtgtagcggctgcagagggtgccgccgccctaggcgaagtagggccgtcctgagcgaaagaaccgcccccagcaggagcaccaccacggcttagcaaagaatcccagaccccgcccgggaaggcagccgcaccatggagtcttccagttcatctaactcttatttctccgttggcccaaccagtcccagcgctgtcgtgctcctctactcgctttccaaggaatcccttcaatctgtggatgtcctccgagaggaagtgagtgagatcttagatgaaatgagtcacaaactgcgtcttggagccattcggttttgtgccttcaccctgagcaaagtatttaaacaaattttctcgaaggtgtgtgtaaatgaagaaggtattcagaaactacaaagagccatccaggagcatcctgttgttctgctgcctagtcatcgaagttacattgacttcctcatgttgtcttttcttctatacaattatgatttgcctgtgccagttatagcagcaggaatggacttcctgggaatgaaaatggttggtgagctgctacgaatgtcgggtgcctttttcatgcggcgtacctttggtggcaataaactctactgggctgtattctctgaatatgtaaaaactatgttacggaatggttatgctcctgttgaatttttcctcgaagggacaagaagccgctctgccaagacattgactcctaaatttggtcttctgaatattgtgatggagccattttttaaaagagaagtttttgatacctaccttgtcccaattagtatcagtt

SEQ ID NO: 137942 - DNA, 1924 bp, Homo sapiens
  Payload ID: 7014
  Gene Symbol: GNPAT
  Gene Name: glyceronephosphate O-acyltransferase
  ENST ID: ENST00000416000
  CDS Start-End: 164-1924
cctggctgagatggcggcgcccgggatcctgtgtagcggctgcagagggtgccgccgccctaggcgaagtagggccgtcctgagcgaaagaaccgcccccagcaggagcaccaccacggcttagcaaagaatcccagaccccgcccgggaaggcagccgcaccatggagtcttccagttcatctaactcttatttctccgttggcccaaccagtcccagcgctgtcgtgctcctctactcgaaggagctcaaaaagtgggatgagtttgaagatattttagaagagaggaggcatgtcagtgacttgaaatttgcaatgaaatgctacacacctcttgtctataagggaattactccatgtaaaccaattgatattaaatgtagtgttctcaattctgaggagattcattatgtcattaaacagctttccaaggaatcccttcaatctgtggatgtcctccgagaggaagtgagtgagatcttagatgaaatgagtcacaaactgcgtcttggagccattcggttttgtgccttcaccctgagcaaagtatttaaacaaattttctcgaagctacaaagagccatccaggagcatcctgttgttctgctgcctagtcatcgaagttacattgacttcctcatgttgtcttttcttctatacaattatgatttgcctgtgccagttatagcagcaggaatggacttcctgggaatgaaaatggttggtgagctgctacgaatgtcgggtgcctttttcatgcggcgtacctttggtggcaataaactctactgggctgtattctctgaatatgtaaaaactatgttacggaatggttatgctcctgttgaatttttcctcgaagggacaagaagccgctctgccaagacattgactcctaaatttggtcttctgaatattgtgatggagccattttttaaaagagaagtttttgatacctaccttgtcccaattagtatcagttatgataagatcttggaagaaactctttatgtgtatgagcttctaggggttcctaaaccaaaagagtctacaactgggttgctgaaagccagaaagattctctctgaaaattttggaagcatccatgtgtactttggagatcctgtgtcacttcgatctttggcagctgggaggatgagtcggagctcatataacttggttccaagatacattcctcagaaacagtctgaggacatgcatgcctttgtcactgaagttgcctacaaaatggagcttctgcaaattgaaaacatggttttgagcccctggaccctaatagttgctgttctgcttcagaaccggccatccatggactttgatgctctggtggaaaagactttatggctaaaaggcttaacccaggcatttggagggtttctcatttggcctgataataaacctgctgaagaagttgtcccggccagcattcttctgcattccaacattgccagccttgtcaaagaccaggtgattctgaaagtggactccggagactcggaagtggtcgatgggcttatgctccagcacatcactctcctcatgtgctcagcttataggaaccagctgctcaacatttttgtgcgcccatccttagtagcagtagcattgcagatgacaccagggttcaggaaagaggatgtctacagttgctttcgcttcctacgtgatgtttttgcagatgagttcatcttccttccaggaaacacactaaaggactttgaagaaggctgttacctgctttgtaaaagtgaagccatacaagtgactacgaaagacatcctagttacagagaaaggaaatactgtgttagaatttttagtaggactctttaaaccttttgtggaaagctatcagataatttgcaagtaccttttgagtgaagaagaggaccacttcagtgag

SEQ ID NO: 137943 - DNA, 5489 bp, Homo sapiens
  Payload ID: 7015
  Gene Symbol: GPCPD1
  Gene Name: glycerophosphocholine phosphodiesterase 1
  Uniprot ID: Q9NPB8
  ENST ID: ENST00000379019
  CDS Start-End: 214-2232
agtttggtctggagcagctgaaaccggtttgagcgtggctgcttcctgccgctcgacgccgcggcaggccgcctggggggagcgctggcgaggcacggacggcgggcgcccggtacctctgcccgcggtcctcgctctcgggcggggcggcggcgacgcggacctgcggactagcgaacccggagcacgacatcataaaataaatccatcagaatgacaccttctcaggttgcctttgaaataagaggaactcttttaccaggagaagtttttgcgatatgtggaagctgtgatgctttgggaaactggaatcctcaaaatgctgtggctcttcttccagagaatgacacaggtgaaagcatgctatggaaagcaaccattgtactcagtagaggagtatcagttcagtatcgctacttcaaagggtactttttagaaccaaagactatcggtggtccatgtcaagtgatagttcacaagtgggagactcatctacaaccacgatcaataacccctttagaaagcgaaattattattgacgatggacaatttggaatccacaatggtgttgaaactctggattctggatggctgacatgtcagactgaaataagattacgtttgcattattctgaaaaacctcctgtgtcaataaccaagaaaaaattaaaaaaatctagatttagggtgaagctgacactagaaggcctggaggaagatgacgatgatagggtatctcccactgtactccacaaaatgtccaatagcttggagatatccttaataagcgacaatgagttcaagtgcaggcattcacagccggagtgtggttatggcttgcagcctgatcgttggacagagtacagcatacagacgatggaaccagataacctggaactaatctttgattttttcgaagaagatctcagtgagcacgtagttcagggtgatgcccttcctggacatgtgggtacagcttgtctcttatcatccaccattgctgagagtggaaagagtgctggaattcttactcttcccatcatgagcagaaattcccggaaaacaataggcaaagtgagagttgactatataattattaagccattaccaggatacagttgtgacatgaaatcttcattttccaagtattggaagccaagaataccattggatgttggccatcgaggtgcaggaaactctacaacaactgcccagctggctaaagttcaagaaaatactattgcttctttaagaaatgctgctagtcatggtgcagcctttgtagaatttgacgtacacctttcaaaggactttgtgcccgtggtatatcatgatcttacctgttgtttgactatgaaaaagaaatttgatgctgatccagttgaattatttgaaattccagtaaaagaattaacatttgaccaactccagttgttaaagctcactcatgtgactgcactgaaatctaaggatcggaaagaatctgtggttcaggaggaaaattccttttcagaaaatcagccatttccttctcttaagatggttttagagtctttgccagaagatgtagggtttaacattgaaataaaatggatctgccagcaaagggatggaatgtgggatggtaacttatcaacatattttgacatgaatctgtttttggatataattttaaaaactgttttagaaaattctgggaagaggagaatagtgttttcttcatttgatgcagatatttgcacaatggttcggcaaaagcagaacaaatatccgatactatttttaactcaaggaaaatctgagatttatcctgaactcatggacctcagatctcggacaacccccattgcaatgagctttgcacagtttgaaaatctactggggataaatgtacatactgaagacttgctcagaaacccatcctatattcaagaggcaaaagctaagggactagtcatattctgctggggtgatgataccaatgatcctgaaaacagaaggaaattgaaggaacttggagttaatggtctaatttatgataggatatatgattggatgcctgaacaaccaaatatattccaagtggagcaattggaacgcctgaagcaggaattgccagagcttaagagctgtttgtgtcccactgttagccgctttgttccctcatctttgtgtggggagtctgatatccatgtggatgccaacggcattgataacgtggagaatgcttagtttttattgcacagaggtcattttgggggcgtgcaccgctgttctgggtattcatttttcatcactgagcattgttgatctatgccttttgggcttctcagttcaatgaagcaataatgaagtatttaactctttcactacagttcttgcaagtatgctatttaaattacttggccaggtataattgccagtcagtctctttatagtgagaaaatttattggttagtaatataaatattttaaactaaatatataaatctataatgttaaacatatgttcattaaaagcatagcactttgaaattaactatataaatagctcatatttacacttacagcttttcatttgatcaggtctgaaatctttagcacttaaggaaaatgactatgcataattatacctgaccatgaaaaaaataagtacctcaaatgcatgcatttgcactggtgattccaactgcacaaatctttgtgccatcttgtatataggtattttttacatgggttgacatgcacacaacaccattttcattcagtatgaaccttgaggctgctgccatttttccacttaaccaaaccagcctgaaggtgaacctcgaaacttgtttcataaatctttcaaaagttgttttacatcaatgttaaaatttcaaaatgctgcagggtaatttaatgtataaaatattagtaagaaaaagtatgtattgcatacttagtagaatagatcacaacatacaaattcaattcagtgcatgctttaggtgttaagcatgagattgtacatgtttactgttaggtccttgcatctgtggtgctaggtgagtatgagaagatgtcaaggactggacgtattttgttgcctaaaaaaaaaaggctgtttgtaggcgttttaaatatgcttattttgtgtgtctctcactacctattacacactgttgctttgtgggtttgttttgtatgtgcgtgtgttatacagtagttaaatttccatgcagaaaaataaatgtcctgaattttcatattagtattctttattgtatatcatgcatgtaatttatttagaaatgtaggtcttactaaatgtatatgcatgtatttcagattatactaggatttcttggattagaagcagattgtgttaactgtaacttaaagaatgaatgttaaataaaatgatacagatttattttcttcattacaaaatgaaatttcaagaaggtgttacttttgtagaatggttttataatatgacaagaaattttaatatagtgtctaccctaaagggatggcttatttgcatctaccttttactgcatgtttttcacaaggcagtttattcatatattgacatattttggtagtagctgagaacctaagacttgaaattatacattgtgtagtattttttaagctaagcaatgcaattttggtcagatcttatttgtgtgaagataggctctgaaatcctatggtattgcgtttgtaacgttgatattaatgcaaaatagtttaggaaatggagtcttctgcaagggttctgtatacttttcccacattgtatgagattttccaaaattttggtgtgaattgggcacttttggaaaactcctgaaaaagaattagtttccttcatctgcagacctttgtccaatacggttaccatttctttatagtaactcgattagccatatatgtttgtttctagtcctgctcctttgctcctctcctatgccttcccagtgctggctccattttgaagactcaaggacagaggggaagcagatcataaagagaaaaaggagacagaagaaaggatgaaggaaggaggtcatggggagtgtggcttctgagcagtttagttgctggggagagcagacagtcactgcctacaatacagacagaaccttcctgctcactttctgtcctatctcttcctgaccttatgaaccagtgttagtagatgattaaaacatgacaagcaatggctccttattttcacaggactaagtccgggccttcgtatcactagctgttgccttttacaccctgcttcagccaccctgtccctgtcattggccctggacttcctctctgtgcccgtgtgtcctctgcctgggagccctctcctcccatagtcactttctctctgccaaactcatttcttcttgtgcccaagacctctctcctgagcccttgtggaaacttcaggaaggatgaatccgtctttgtgctccacggctcgtaccttgatcaggctgtgcatcacagtaattctgttctaggtaggcagagttgatctttgtctcatctgccaggctgcaggctcttcaagggcagggaccttgtcatagtcatttttattttcacagtgcttggaacatggtggaaaatgaatgttggaattattggagtaatataatttgtatcaaatgtccttttgaattaagagatttagttatgtttactaagaatgtaaactttgaattggtttgcattttaacaattaggatggtttattgatgtgaattttgaaatgtagaggtataatgttaaattattttatactttatggaaatcaagtgaaatgtttgaaaaaatgccgccattatcctctggtattttctactctctggaattatgtgctgtaaatgatcggctgtaaatgtgaggcacaccacccacccctgtgtggaaagtgttgtggcgcttcctgccacccacccacctctctgccgttgctccttgtgacacttgtctgtcgtctcccatccaaactccaagcttacagctacctcagtactgctttgcttgtctgaaacacctcctttgccttccttcagtgtcccgctcaggtgcagcctcctccctaaagctcatctcagcttttgatctgaatgatgatggaaacatgcagacagcctctcagtcttactatttaatgttgtagctgggaaaaaacccagagaggttaactgatatactgggttgggactaggatgtgggttttgtgactctgaatcccatgttctcaaactacgctgccttccgaagtctggcatttgttagctcatgcttccttgtagtccagcttcttatgtgcctgttatattctccagtaagattgtaagccccttaagggcagggacgtctttgcatctctagcactgctatagtgttctatccttagttatgaactagataaataaatggtggtggcaacaatcctagtttcctaactcagattgtttcacgataaa

SEQ ID NO: 137944 - DNA, 4015 bp, Homo sapiens
  Payload ID: 7015
  Gene Symbol: GPCPD1
  Gene Name: glycerophosphocholine phosphodiesterase 1
  ENST ID: ENST00000418646
  CDS Start-End: 1-793
ttgtgacatgaaatcttcattttccaagtattggaagccaagaataccattggatgttggccatcgaggtgcaggaaactctacaacaactgcccagctggctaaagttcaagaaaatactattgcttctttaagaaatgctgctagtcatggtgcagcctttgtagaatttgacgtacacctttcaaaggactttgtgcccgtggtatatcatgatcttacctgttgtttgactatgaaaaagaatctgtggttcaggaggaaaattccttttcagaaaatcagccatttccttctcttaagatgggttcggcaaaagcagaacaaatatccgatactatttttaactcaaggaaaatctgagatttatcctgaactcatggacctcagatctcggacaacccccattgcaatgagctttgcacagtttgaaaatctactggggataaatgtacatactgaagacttgctcagaaacccatcctatattcaagaggcaaaagctaagggactagtcatattctgctggggtgatgataccaatgatcctgaaaacagaaggaaattgaaggaacttggagttaatggtctaatttatgataggatatatgattggatgcctgaacaaccaaatatattccaagtggagcaattggaacgcctgaagcaggaattgccagagcttaagagctgtttgtgtcccactgttagccgctttgttccctcatctttgtgtggggagtctgatatccatgtggatgccaacggcattgataacgtggagaatgcttagtttttattgcacagaggtcattttgggggcgtgcaccgctgttctgggtattcatttttcatcactgagcattgttgatctatgccttttgggcttctcagttcaatgaagcaataatgaagtatttaactctttcactacagttcttgcaagtatgctatttaaattacttggccaggtataattgccagtcagtctctttatagtgagaaaatttattggttagtaatataaatattttaaactaaatatataaatctataatgttaaacatatgttcattaaaagcatagcactttgaaattaactatataaatagctcatatttacacttacagcttttcatttgatcaggtctgaaatctttagcacttaaggaaaatgactatgcataattatacctgaccatgaaaaaaataagtacctcaaatgcatgcatttgcactggtgattccaactgcacaaatctttgtgccatcttgtatataggtattttttacatgggttgacatgcacacaacaccattttcattcagtatgaaccttgaggctgctgccatttttccacttaaccaaaccagcctgaaggtgaacctcgaaacttgtttcataaatctttcaaaagttgttttacatcaatgttaaaatttcaaaatgctgcagggtaatttaatgtataaaatattagtaagaaaaagtatgtattgcatacttagtagaatagatcacaacatacaaattcaattcagtgcatgctttaggtgttaagcatgagattgtacatgtttactgttaggtccttgcatctgtggtgctaggtgagtatgagaagatgtcaaggactggacgtattttgttgcctaaaaaaaaaaggctgtttgtaggcgttttaaatatgcttattttgtgtgtctctcactacctattacacactgttgctttgtgggtttgttttgtatgtgcgtgtgttatacagtagttaaatttccatgcagaaaaataaatgtcctgaattttcatattagtattctttattgtatatcatgcatgtaatttatttagaaatgtaggtcttactaaatgtatatgcatgtatttcagattatactaggatttcttggattagaagcagattgtgttaactgtaacttaaagaatgaatgttaaataaaatgatacagatttattttcttcattacaaaatgaaatttcaagaaggtgttacttttgtagaatggttttataatatgacaagaaattttaatatagtgtctaccctaaagggatggcttatttgcatctaccttttactgcatgtttttcacaaggcagtttattcatatattgacatattttggtagtagctgagaacctaagacttgaaattatacattgtgtagtattttttaagctaagcaatgcaattttggtcagatcttatttgtgtgaagataggctctgaaatcctatggtattgcgtttgtaacgttgatattaatgcaaaatagtttaggaaatggagtcttctgcaagggttctgtatacttttcccacattgtatgagattttccaaaattttggtgtgaattgggcacttttggaaaactcctgaaaaagaattagtttccttcatctgcagacctttgtccaatacggttaccatttctttatagtaactcgattagccatatatgtttgtttctagtcctgctcctttgctcctctcctatgccttcccagtgctggctccattttgaagactcaaggacagaggggaagcagatcataaagagaaaaaggagacagaagaaaggatgaaggaaggaggtcatggggagtgtggcttctgagcagtttagttgctggggagagcagacagtcactgcctacaatacagacagaaccttcctgctcactttctgtcctatctcttcctgaccttatgaaccagtgttagtagatgattaaaacatgacaagcaatggctccttattttcacaggactaagtccgggccttcgtatcactagctgttgccttttacaccctgcttcagccaccctgtccctgtcattggccctggacttcctctctgtgcccgtgtgtcctctgcctgggagccctctcctcccatagtcactttctctctgccaaactcatttcttcttgtgcccaagacctctctcctgagcccttgtggaaacttcaggaaggatgaatccgtctttgtgctccacggctcgtaccttgatcaggctgtgcatcacagtaattctgttctaggtaggcagagttgatctttgtctcatctgccaggctgcaggctcttcaagggcagggaccttgtcatagtcatttttattttcacagtgcttggaacatggtggaaaatgaatgttggaattattggagtaatataatttgtatcaaatgtccttttgaattaagagatttagttatgtttactaagaatgtaaactttgaattggtttgcattttaacaattaggatggtttattgatgtgaattttgaaatgtagaggtataatgttaaattattttatactttatggaaatcaagtgaaatgtttgaaaaaatgccgccattatcctctggtattttctactctctggaattatgtgctgtaaatgatcggctgtaaatgtgaggcacaccacccacccctgtgtggaaagtgttgtggcgcttcctgccacccacccacctctctgccgttgctccttgtgacacttgtctgtcgtctcccatccaaactccaagcttacagctacctcagtactgctttgcttgtctgaaacacctcctttgccttccttcagtgtcccgctcaggtgcagcctcctccctaaagctcatctcagcttttgatctgaatgatgatggaaacatgcagacagcctctcagtcttactatttaatgttgtagctgggaaaaaacccagagaggttaactgatatactgggttgggactaggatgtgggttttgtgactctgaatcccatgttctcaaactacgctgccttccgaagtctggcatttgttagctcatgcttccttgtagtccagcttcttatgtgcctgttatattctccagtaagattgtaagccccttaagggcagggacgtctttgcatctctagcactgctatagtgttctatccttagttatgaactagataaataaatggtggtggcaacaa

SEQ ID NO: 137945 - DNA, 571 bp, Homo sapiens
  Payload ID: 7015
  Gene Symbol: GPCPD1
  Gene Name: glycerophosphocholine phosphodiesterase 1
  ENST ID: ENST00000633552
  CDS Start-End: 1-187
agaaaatactattgcttctttaagaaatgctgctagtcatggtgcagcctttgtagaatttgacgtacacctttcaaaggactttgtgcccgtggtatatcatgatcttacctgttgtttgactatgaaaaagctgtcttcagcgctacagctttctgccagctgcattttccttccagaaatttgatgctgatccagttgaattatttgaaattccagtaaaagaattaacatttgaccaactccagttgttaaagctcactcatgtgactgcactgaaatctaaggatcggaaagaatctgtggttcaggaggaaaattccttttcagaaaatcagccatttccttctcttaagatggttttagagtctttgccagaagatgtagggtttaacattgaaataaaatggatctgccagcaaagggatggaatgtgggatggtaacttatcaacatattttgacatgaatctgtttttggatataattttaaaaactgttttagaaaattctgggaagaggagaatagtgttttcttcatttgatgcagatatttgcacaatggttcggca

SEQ ID NO: 137946 - DNA, 819 bp, Homo sapiens
  Payload ID: 7015
  Gene Symbol: GPCPD1
  Gene Name: glycerophosphocholine phosphodiesterase 1
  ENST ID: ENST00000481690
  CDS Start-End: 112-417
cgggcgcccggtacctctgcccgcggtcctcgctctcgggcggggcggcggcgacgcggacctgcggactagcgaacccggagcacgacatcataaaataaatccatcagaatgacaccttctcaggttgcctttgaaataagaggaactcttttaccaggagaagtttttgcgatatgtggaagctgtgatgctttgggaaactggaatcctcaaaatgctgtggctcttcttccagagaatgacacaggtgaaagcatgctatggaaagcaaccattgtactcagtagaggagtatcagttcagtatcgctacttcaaagggtactttttagaaccaaagaaagcgaaattattattgacgatggacaatttggaatccacaatggtgttgaaactctggattctggatggctgacatgtcagactgaaataagattacgtttgcattattctgaaaaacctcctgtgtcaataaccaagaaaaaattaaaaaaatctagatttagggtgaagctgacactagaaggcctggaggaagatgacgatgatagggtatctcccactgtactccacaaaatgtccaatagcttggagatatccttaataagcgacaatgagttcaagtgcaggcattcacagccggagtgtggttatggcttgcagcctgatcgttggacagagtacagcatacagacgatggaaccagataacctggaactaatctttgattttttcgaagaagatctcagtgagcacgtagttcagggtgatgcccttcctggacatgtgggtacagcttgtctcttatcatccacca

SEQ ID NO: 137947 - DNA, 2958 bp, Homo sapiens
  Payload ID: 7016
  Gene Symbol: GDE1
  Gene Name: glycerophosphodiester phosphodiesterase 1
  Uniprot ID: Q9NZC3
  ENST ID: ENST00000353258
  CDS Start-End: 182-1177
gattggctgggcggccgactccctctctggatgtgtctgctgccgccattgtgcggcgctggtcccctcagagggttcctgctgctgccggtgccttggaccctccccctcgcttctcgttctactgccccaggagcccggcgggtccgggactcccgtccgtgccggtgcgggcgccggcatgtggctgtgggaggaccagggcggcctcctgggccctttctccttcctgctgctagtgctgctgctggtgacgcggagcccggtcaatgcctgcctcctcaccggcagcctcttcgttctactgcgcgtcttcagctttgagccggtgccctcttgcagggccctgcaggtgctcaagccccgggaccgcatttctgccatcgcccaccgtggcggcagccacgacgcgcccgagaacacgctggcggccattcggcaggcagctaagaatggagcaacaggcgtggagttggacattgagtttacttctgacgggattcctgtcttaatgcacgataacacagtagataggacgactgatgggactgggcgattgtgtgatttgacatttgaacaaattaggaagctgaatcctgcagcaaaccacagactcaggaatgatttccctgatgaaaagatccctaccctaagggaagctgttgcagagtgcctaaaccataacctcacaatcttctttgatgtcaaaggccatgcacacaaggctactgaggctctaaagaaaatgtatatggaatttcctcaactgtataataatagtgtggtctgttctttcttgccagaagttatctacaagatgagacaaacagatcgggatgtaataacagcattaactcacagaccttggagcctaagccatacaggagatgggaaaccacgctatgatactttctggaaacattttatatttgttatgatggacattttgctcgattggagcatgcataatatcttgtggtacctgtgtggaatttcagctttcctcatgcaaaaggattttgtatccccggcctacttgaagaagtggtcagctaaaggaatccaggttgttggttggactgttaatacctttgatgaaaagagttactacgaatcccatcttggttccagctatatcactgacagcatggtagaagactgcgaacctcacttctagactttcacggtgggacgaaacgggttcagaaactgccaggggcctcatacagggatatcaaaataccctttgtgctagcccaggccctggggaatcaggtgactcacacaaatgcaatagttggtcactgcatttttacctgaaccaaagctaaacccggtgttgccaccatgcaccatggcatgccagagttcaacactgttgctcttgaaaatctgggtctgaaaaaacgcacaagagcccctgccctgccctagctgaggcacacagggagacccagtgaggataagcacagattgaattgtacagtttgcagatgcagatgtaaatgcatgggacatgcatgataactcagagttgacattttaaaacttgccacacttatttcaaatatttgtactcagctatgttaacatgtactgtagacatcaaacttgtggccatactaataaaattattaaaaggagcactaaaggaaaactgtgtgccaagcatcatatcctaaggcatacggaatttggggaagccaccatgcaatccagtgaggcttcagtgtacagcaaccaaaatggtagggaggtcttgaagccaatgagggatttatagcatcttgaatagagagctgcaaaccaccagggggcagagttgcatttttccaggctttttaggaagctctgcaacagatgtgatctgatcataggcaattagaactggaagaaacttccaaaaatatctaggtttgtcctcattttacaaatgaggaaactaaactctgtggaagggaaggggttgcctcaaaagtcacagcttagctgggcacagtggctcatgccgataatcccagcaattcagaaagctgaggcaggaggattacttgaggccagactgggcaatatagcaagaccccatctctaaaaaattaggcatggtggtgcatgcctgtattcccagctactcaggaggttgaggtgggaggatcacttgagcccagaagttcaaggctgcaatgagccatgattacaccacggcactacaaccttggtggcacagtgagaacctgactcttaaaaaaaaaaaaaaaaaaaaaaaaaaaaagataactagaacttctagaacatcttgtttacagttagccagaaactatacaagtggtttaacatgcattatcttactcaatccatacaaaagtcttatggaggtgttagcactctttctactgatgaagaactgaggtacttcataaaaccacttacccaaggtgtcttgagtctggtacaactggcattcaaatctaggtcagtctgcccccagagccactacccttacccctcactgaatctgcctttatattgttgagcccatgaccccaaactgctctttccaatttgaacttccagggattttattgtgaacttacatagcaacattaaaatgaagttgaattgtttttaatggcaacgccgtctgtctcctctagcttaccgcttctcacctttcaaccccatctgtggcctttgtccaggcccacagcttagccatggcttccctcctgcatccctgccgtgggttgctggcctcacacttgcagcagctggacagtgattttagaaggccaccagtccccatagctatgtgacaatgagaagcaaacttttttgtgacagattgtattggcataggcatgatagatggggattggtacgttttgaatcagcatttgcaaaaaaattgtcttgaattttaaaataaacaacaaagatttgttcattgagtgcaacaaa

SEQ ID NO: 137948 - DNA, 739 bp, Homo sapiens
  Payload ID: 7016
  Gene Symbol: GDE1
  Gene Name: glycerophosphodiester phosphodiesterase 1
  ENST ID: ENST00000569773
  CDS Start-End: 432-739
aaggcacactcccggcccttgatcgctcccagtgtctagggatctccggacttgaggttttatatttacagaagacagcagatatgtatatagtttctgtgcgcctgacgctaaggttacatacagccaggaacaaggtcaaaagtgtccctggtttacagagtgtacatcggaatgggggaggcaagccttaaacaagtaaacacataaatgagataactttaagagagtgaaaggtgcaatgaagaaatcgggggaactcgaaggaaagagttacgctattttatttagatggaatagtcaagagaaatcgtctccgaagaagcaacatttgaacagaaaccggaattataaggagccaggcagctaagaatggagcaacaggcgtggagttggacattgagtttacttctgacgggattcctgtcttaatgcacgataacacagtagataggacgactgatgggactgggcgattgtgtgatttgacatttgaacaaattaggaagctgaatcctgcagcaaaccacagactcaggaatgatttccctgatgaaaagatccctaccctaagggaagctgttgcagagtgcctaaaccataacctcacaatcttctttgatgtcaaaggccatgcacacaaggctactgaggctctaaagaaaatgtatatggaatttcctcaactgtataataatagtgtggtctgttctttcttgccagaagttatctacaaggt

SEQ ID NO: 137949 - DNA, 1618 bp, Homo sapiens
  Payload ID: 7016
  Gene Symbol: GDE1
  Gene Name: glycerophosphodiester phosphodiesterase 1
  ENST ID: ENST00000569899
  CDS Start-End: 1-390
ggcgtggagttggacattgagtttacttctgacgggattcctgtcttaatgcacgataacacagtagataggacgactgatgggactgggcgattgtgtgatttgacatttgaacaaattaggaagctgaatcctgcagcaaaccacagactcaggaatgatttccctgatgaaaagatccctaccctaagggaagctgttgcagagtgcctaaaccataacctcacaatcttctttgatgtcaaaggccatgcacacaaggctactgaggctctaaagaaaatgtatatggaatttcctcaactgtataataatagtgtggtctgttctttcttgccagaagttatctacaaggtaacattcgggatttttcttgtacatattagatgagacaaacagatcgggatgtaataacagcattaactcacagaccttggagcctaagccatacaggagatgggaaaccacgctatgatactttctggaaacattttatatttgttatgatggacattttgctcgattggagcatgcataatatcttgtggtacctgtgtggaatttcagctttcctcatgcaaaaggattttgtatccccgtaagttggaaggttttttattttacccagacagacatcctgaatgctcttatttgaaaggaaggattaacagagtagacaacctgaattggttctgacctgcaaagcttaccatacctctaaattggattaccaatttcgcttcttaggtgggaagagttcaggcatatttcactgttttcagaccgagtcgatcacatattttcggttttttagtgtattttgaagaaaaaaaatgaacctgtgacactatgctgagcaagggattttatttctgtgactggtttttttgaaagccaacacaggatcctgggcagaaccacagtgaagacatcctgtgggcaccagcctccccactaccgtcttatgttataggcactcccccacctctccccataaaatttccatttcctaacctgctagcgatctcggaatcatttctttggcaattctgtatctgtatatttcagctaattagagttgtaggtctagtattatttcagacatacatgattcagttcaataaatatttggtaagtgcctatactattgcaaggttccatgttgagaagctgaagatgcagtgggtaaagaatcaaagccatgatctctgccctcgtgacgtttatagccaagtgggagagtgagagatgctaatcaaataaaaatccaatcaatataaagttaaaactaagatacaggctatgtcagagaaaactgtgcatgggctataatctaatctggtctgggttgtcagaaacagcatccccaaggaagtgacagttaagctaagatctgaagggtgagtgggaattgggaggaatccagatcagagagaaaaatacatgtaatgtgctctggcaggaaggaacatggttctttccaggaagtgaaagaaaattaatattctttcaattaatttaaaattaatcagcacagaaaagaaagggggaatgtggtgtgagatgaagccaaggagacaggtcggggccaggtcaggcacaccttcagtggctgtgc

SEQ ID NO: 137950 - DNA, 2238 bp, Homo sapiens
  Payload ID: 7016
  Gene Symbol: GDE1
  Gene Name: glycerophosphodiester phosphodiesterase 1
  ENST ID: ENST00000564172
  CDS Start-End: 160-486
ctctctggatgtgtctgctgccgccattgtgcggcgctggtcccctcagagggttcctgctgctgccggtgccttggaccctccccctcgcttctcgttctactgccccaggagcccggcgggtccgggactcccgtccgtgccggtgcgggcgccggcatgtggctgtgggaggaccagggcggcctcctgggccctttctccttcctgctgctagtgctgctgctggtgacgcggagcccggtcaatgcctgcctcctcaccggcagcctcttcgttctactgcgcgtcttcagctttgagccggtgccctcttgcagggccctgcaggtgctcaagccccgggaccgcatttctgccatcgcccaccgtggcggcagccacgacgcgcccgagaacacgctggcggccattcggcagctaagaatggagcaacaggcgtggagttggacattgagtttacttctgacgggattcctgtcttaatgcacgataacacagtagataggacgactgatgggactgggcgattgtgtgatttgacatttgaacaaattaggaagctgaatcctgcagcaaaccacagactcaggaatgatttccctgatgaaaagatccctaccctaagggaagctgttgcagagtgcctaaaccataacctcacaatcttctttgatgtcaaaggccatgcacacaaggctactgaggctctaaagaaaatgtatatggaatttcctcaactgtataataatagtgtggtctgttctttcttgccagaagttatctacaagatgagacaaacagatcgggatgtaataacagcattaactcacagaccttggagcctaagccatacaggagatgggaaaccacgctatgatactttctggaaacattttatatttgttatgatggacattttgctcgattggagcatgcataatatcttgtggtacctgtgtggaatttcagctttcctcatgcaaaaggattttgtatccccggcctacttgaagaagtggtcagctaaaggaatccaggttgttggttggactgttaatacctttgatgaaaagagttactacgaatcccatcttggttccagctatatcactgacagcatggtagaagactgcgaacctcacttctagactttcacggtgggacgaaacgggttcagaaactgccaggggcctcatacagggatatcaaaataccctttgtgctagcccaggccctggggaatcaggtgactcacacaaatgcaatagttggtcactgcatttttacctgaaccaaagctaaacccggtgttgccaccatgcaccatggcatgccagagttcaacactgttgctcttgaaaatctgggtctgaaaaaacgcacaagagcccctgccctgccctagctgaggcacacagggagacccagtgaggataagcacagattgaattgtacagtttgcagatgcagatgtaaatgcatgggacatgcatgataactcagagttgacattttaaaacttgccacacttatttcaaatatttgtactcagctatgttaacatgtactgtagacatcaaacttgtggccatactaataaaattattaaaaggagcactaaaggaaaactgtgtgccaagcatcatatcctaaggcatacggaatttggggaagccaccatgcaatccagtgaggcttcagtgtacagcaaccaaaatggtagggaggtcttgaagccaatgagggatttatagcatcttgaatagagagctgcaaaccaccagggggcagagttgcatttttccaggctttttaggaagctctgcaacagatgtgatctgatcataggcaattagaactggaagaaacttccaaaaatatctaggtttgtcctcattttacaaatgaggaaactaaactctgtggaagggaaggggttgcctcaaaagtcacagcttagctgggcacagtggctcatgccgataatcccagcaattcagaaagctgaggcaggaggattacttgaggccagactgggcaatatagcaagaccccatctctaaaaaattaggcatggtggtgcatgcctgtattcccagctactcaggaggttgaggtgggaggatcacttgagcccagaagttcaaggctgcaatgagccatgattacaccacggcactacaaccttggtggcacagtgagaacctgactcttaaaaaaaaaaaaaaaaaaaaa

SEQ ID NO: 137951 - DNA, 1821 bp, Homo sapiens
  Payload ID: 7017
  Gene Symbol: GDPD1
  Gene Name: glycerophosphodiester phosphodiesterase domain containing 1
  Uniprot ID: Q8N9F7
  ENST ID: ENST00000284116
  CDS Start-End: 138-1082
ccgacaagtgcgctgcaccagtggcaccggctgggggcgagccgacctcgagcagccgccgccgccgccgtcgttgctactgccgcagcggagttcagagggcccggaggtgggagacttcccacacggtgactgagatgtcgtccactgcggctttttaccttctctctacgctaggaggatacttggtgacctcattcttgttgcttaaatacccgaccttgctgcaccagagaaagaagcagcgattcctcagtaaacacatctctcaccgcggaggtgctggagaaaatttggagaatacaatggcagcctttcagcatgcggttaaaatcggaactgatatgctagaattggactgccatatcacaaaagatgaacaagttgtagtgtcacatgatgagaatctaaagagagcaactggggtcaatgtaaacatctctgatctcaaatactgtgagctcccaccttaccttggcaaactggatgtctcatttcaaagagcatgccagtgtgaaggaaaagataaccgaattccattactgaaggaagtttttgaggcctttcctaacactcccattaacatcgatatcaaagtcaacaacaatgtgctgattaagaaggtttcagagttggtgaagcggtataatcgagaacacttaacagtgtggggtaatgccaattatgaaattgtagaaaagtgctacaaagagaattcagatattcctatactcttcagtctacaacgtgtcctgctcattcttggccttttcttcactggcctcttgccctttgtgcccattcgagaacagttttttgaaatcccaatgccttctattatactgaagctaaaagaaccacacaccatgtccagaagtcaaaagtttctcatctggctttctgatctcttactaatgaggaaagctttgtttgaccacctaactgctcgaggcattcaagtgtatatttgggtattaaatgaagaacaagaatacaaaagagcttttgatttgggagcaactggggtgatgacagactatccaacaaagcttagggattttttacataacttttcagcatagaaaaagaggtacttagaagtattgaaggaaaaaatgaagacctaagaaaaaaatatttcatgatcatttccctaagccatttccagaatggtaaaaggtttaatcagtttttattacctcatttttaagcctgtatgagaatgtagaaactatatattatatgtatatttattttaaataatattgtatattttatgtttgtaaattgtttagaaagataattggttatgagatgtaagttttaatttcttaatgtgcatttttgtttctagatcttatacagaaatcttgattaataacatacacagaaatgtacatactacatcatctacagaaatcttgatcaataacctagaaactaggttatctaggttattgatcaagatttctgtagatgatgcagtgttctatcataagtaattctggaatcaaagactattggatacatttggcattgggctgagtgtggtggctcatgcctgtaatcccagcactttgggaggctgagacaggcggatcatctgaagtcaggagttaaagaccagcctggccaacatggcaaaaccccatctctaccaaaaatacaaaaattaaccatgcgtggtggtacacgtctgtcatcccagcagctcttaaggctgaggcacaagaattgcttgaacccgggaggcagaggctgtagtgagccaagatagcaccactgcactccagcctgggagacagagtgagactccgtctc

SEQ ID NO: 137952 - DNA, 934 bp, Homo sapiens
  Payload ID: 7017
  Gene Symbol: GDPD1
  Gene Name: glycerophosphodiester phosphodiesterase domain containing 1
  ENST ID: ENST00000578026
  CDS Start-End: 144-536
ccggcaccgacaagtgcgctgcaccagtggcaccggctgggggcgagccgacctcgagcagccgccgccgccgccgtcgttgctactgccgcagcggagttcagagggcccggaggtgggagacttcccacacggtgactgagatgtcgtccactgcggctttttaccttctctctacgctaggaggatacttggtgacctcattcttgttgcttaaatacccgaccttgctgcaccagagaaagaagcagcgattcctcagtaaacacatctctcaccgcggaggtgctggagaaaatttggagaatacaatggcagcctttcagcatgcggttaaaatcggaactgatatgctagaattggactgccatatcacaaaagatgaacaagttgtagtgtcacatgatgagaatctaaagagagcaactggggtcaatgtaaacatctctgatctcaaatactgtgagctcccaccttaccttggcaaactggatgtctcatttcaaagaggtttcagagttggtgaagcggtataatcgagaacacttaacagtgtggggtaatgccaattatgaaattgtagaaaagtgctacaaagagaattcagatattcctatactcttcagtctacaacgtgtcctgctcattcttggccttttcttcactggcctcttgccctttgtgcccattcgagaacagttttttgaaatcccaatgccttctattatactgaagctaaaagaaccacacaccatgtccagaagtcaaaagtttctcatctggctttctgatctcttactaatgaggaaagctttgtttgaccacctaactgctcgaggcattcaagtgtatatttgggtattaaatgaagaacaagaatacaaaagagcttttgatttgggagcaactggggtgatgacagactatccaacaa

SEQ ID NO: 137953 - DNA, 1265 bp, Homo sapiens
  Payload ID: 7017
  Gene Symbol: GDPD1
  Gene Name: glycerophosphodiester phosphodiesterase domain containing 1
  Uniprot ID: Q8N9F7
  ENST ID: ENST00000581140
  CDS Start-End: 89-958
gagcagccgccgccgccgccgtcgttgctactgccgcagcggagttcagagggcccggaggtgggagacttcccacacggtgactgagatgtcgtccactgcggctttttaccttctctctacgctaggaggatacttggtgacctcattcttgttgcttaaatacccgaccttgctgcaccagagaaagaagcagcgattcctcagtaaacacatctctcaccgcggaggtgctggagaaaatttggagaatacaatggcagcctttcagcatgcggttaaaatcggaactgatatgctagaattggactgccatatcacaaaagatgaacaagttgtagtgtcacatgatgagaatctaaagagagcaactggggtcaatgtaaacatctctgatctcaaatactgtgagctcccaccttaccttggcaaactggatgtctcatttcaaagagcatgccagtgtgaaggaaaagataaccgaattccattactgaaggaagtttttgaggcctttcctaacactcccattaacatcgatatcaaagtcaacaacaatgtgctgattaagaaggtttcagagttggtgaagcggtataatcgagaacacttaacagtgtggggtaatgccaattatgaaattgtagaaaagtgctacaaagagaattcagatattcctatactcttcagtctacaacgtgtcctgctcattcttggccttttcttcactggcctcttgccctttgtgcccattcgagaacagttttttgaaatcccaatgccttctattatactgaagctaaaagaaccacacaccatgtccagaagtcaaaagtttctcatctggctttctgatctcttactaatgaggaaagctttgtttgaaccactgcacccggccagtaaaagaaattttgaaggccattgcagctatttggtagtgtcttgttatttctaggtgtaccttagttaaagaggaaaaataaaacggaaaaaagcttggaaatcagtgatgtgtagttatttggcaagttatacataatcagcagcagccaggctcaagaaaataaaagttgattagttgatcagaaataaaatctgtagagtgaattagatttctgagttgttgttgttaatggaacattctatttgagacctttttcaggtgtgtagcaattctaccatgtccatttttttaagcattaaaaaggaacttaccagttgtaaattaagacaagatccaaatagtcatatttttgtgtttc

SEQ ID NO: 137954 - DNA, 834 bp, Homo sapiens
  Payload ID: 7017
  Gene Symbol: GDPD1
  Gene Name: glycerophosphodiester phosphodiesterase domain containing 1
  ENST ID: ENST00000579020
  CDS Start-End: 81-713
gccgccgccgccgtcgttgctactgccgcagcggagttcagagggcccggaggtgggagacttcccacacggtgactgagatgtcgtccactgcggctttttaccttctctctacgctaggaggatacttggtgacctcattcttgttgcttaaatacccgaccttgctgcaccagagaaagaagcagcgattcctcagtaaacacatctctcaccgcggaggtgctggagaaaatttggagaatacaatggcagcctttcagcatgcggttaaaatcggaactgatatgctagaattggactgccatatcacaaaagatgaacaagttgtagtgtcacatgatgagaatctaaagagagcaactggggtcaatgtaaacatctctgatctcaaatactgtgagctcccaccttaccttggcaaactggatgtctcatttcaaagagcatgccagtgtgaaggaaaagataaccgaattccattactgaaggaagtttttgaggcctttcctaacactcccattaacatcgatatcaaagtcaacaacaatgtgctgattaagaaggtttcagagttggtgaagcggtataatcgagaacacttaacagtgtggggtaatgccaattatgaaattgtagaaaagtgctacaaagaggctaaaagaaccacacaccatgtccagaagtcaaaagtttctcatctggctttctgatctcttactaatgaggaaagctttgtttgaccacctaactgctcgaggcattcaagtgtatatttgggtattaaatgaagaacaagaatacaaaagagcttttgatttgggagcaactggg

SEQ ID NO: 137955 - DNA, 585 bp, Homo sapiens
  Payload ID: 7017
  Gene Symbol: GDPD1
  Gene Name: glycerophosphodiester phosphodiesterase domain containing 1
  ENST ID: ENST00000579076
  CDS Start-End: 1-366
tcagatattcctatactcttcagtctacaacgtgtcctgctcattcttggccttttcttcactggcctcttgccctttgtgcccattcgagaacagttttttgaaatcccaatgccttctattatactgaagctaaaagaaccacacaccatgtccagaagtcaaaagtttctcatctggctttctgatctcttactaatgaggaaagctttgtttgaccacctaactgctcgaggcattcaagtgtatatttgggtattaaatgaagaacaagaatacaaaagagcttttgatttgggagcaactggggtgatgacagactatccaacaaagcttagggattttttacataacttttcagcatagaaaaagaggtacttagaagtattgaaggaaaaaatgaagacctaagaaaaaaatatttcatgatcatttccctaagccatttccagaatgattacatctctcatttggagtttggcaatgaaactgctatgaagaatgactgtactctcctatctgtccctggatgacataaatatcatttgctttgttgtttaaactgaaataaagttttccaagaac

SEQ ID NO: 137956 - DNA, 1055 bp, Homo sapiens
  Payload ID: 7017
  Gene Symbol: GDPD1
  Gene Name: glycerophosphodiester phosphodiesterase domain containing 1
  Uniprot ID: Q8N9F7
  ENST ID: ENST00000581276
  CDS Start-End: 49-921
ggagttcagagggcccggaggtgggagacttcccacacggtgactgagatgtcgtccactgcggctttttaccttctctctacgctaggaggatacttggtgacctcattcttgttgcttaaatacccgaccttgctgcaccagagaaagaagcagcgattcctcagtaaacacatctctcaccgcggaggtgctggagaaaatttggagaatacaatggcagcctttcagcatgcggttaaaatcggaactgatatgctagaattggactgccatatcacaaaagatgaacaagttgtagtgtcacatgatgagaatctaaagagagcaactggggtcaatgtaaacatctctgatctcaaatactgtgagctcccaccttaccttggcaaactggatgtctcatttcaaagagcatgccagtgtgaaggaaaagataaccgaattccattactgaaggaagtttttgaggcctttcctaacactcccattaacatcgatatcaaagtcaacaacaatgtgctgattaagaaggtttcagagttggtgaagcggtataatcgagaacacttaacagtgtggggtaatgccaattatgaaattgtagaaaagtgctacaaagagaattcagatattcctatactcttcagtctacaacgtgtcctgctcattcttggccttttcttcactggcctcttgccctttgtgcccattcgagaacagttttttgaaatcccaatgccttctattatactgaagctaaaagaaccacacaccatgtccagaagtcaaaagtttctcatctggctttctgatctcttactaatgaggaaagctttgtttgaccacctaactgctcgaggcattcaagtaagtttctggaatgatgcattttggaagcagcatagctcaccagtttaacacaaatataaagggcaagaacttttaactgacttagtttggcccttgactctgatgctgctgctttactgatccacaaatgaggaccttaagctcttccttacacttagcaataaagcattggcatttctgga

SEQ ID NO: 137957 - DNA, 2169 bp, Homo sapiens
  Payload ID: 7018
  Gene Symbol: GDPD2
  Gene Name: glycerophosphodiester phosphodiesterase domain containing 2
  Uniprot ID: Q9HCC8
  ENST ID: ENST00000374382
  CDS Start-End: 252-1871
gcagatttgctctccctcccgcttcctccctcccatcttcccacccgggctgtgcccaggccacagagcagctgcaggccttgggagaggacccacacagcctcctgtaggtggcaacagtgccacctgtttgactcatagggctgaaccgaggactgaaaaagggaggaggcagaccactcggagaggagctgggaagcagtgcagagaggagagcggagcggagctgccgctgagcaaaggccttcaccatggccgagtcccccggctgctgctccgtctgggcccgctgcctccactgcctgtatagctgccactggaggaaatgccccagagagaggatgcaaaccagcaagtgcgactgtatctggtttggcctgctcttcctcaccttcctcctttccctgagctggctgtacatcgggctcgtccttctcaatgacctgcacaacttcaatgaattcctcttccgccgctggggacactggatggactggtccctggcattcctgctggtcatctctctactggtcacatatgcatccttgctattggtcctggccctgctcctgcggctttgtagacagcccctgcatctgcacagcctccacaaggtgctgctgctcctcattatgctgcttgtggcggctggccttgtgggactggacatccaatggcagcaggagtggcatagcttgcgtgtgtcactgcaggccacagccccattccttcatattggagcagccgctggaattgccctcctggcctggcctgtggctgataccttctaccgtatccaccgaagaggtcccaagattctgctactgctcctattttttggagttgtcctggtcatctacttggcccccctatgcatctcctcaccctgcatcatggaacccagagacttaccacccaagcctgggctggtgggacaccgaggggcccccatgctggctcccgagaacaccctgatgtccttgcggaagacagctgaatgcggagctactgtgtttgagactgatgtgatggtcagctccgatggggtccccttcctcatgcatgatgagcacctcagcaggaccacgaatgtagcctctgtattcccaacccgaatcacagcccacagcagtgacttctcctggactgaactgaagagactcaatgctggatcctggttcctagagaggcgacccttctggggggccaaaccgctggcaggccctgatcagaaagaggctgagagtcagacggtaccagcattagaagagctattggaggaagctgcagccctcaacctttccatcatgttcgacttgcgccgacccccacagaaccacacatactatgacacttttgtgatccagacattggagactgtgctgaatgcaagggtgccccaagccatggtcttttggctaccagatgaagatcgggctaatgtccaacgacgggcacctggaatgcgccagatatatggacgtcagggaggcaacagaacggagaggccccagtttcttaacctcccctatcaagatctgccactattggatatcaaggcattgcataaggataatgtctcggtgaacctatttgtagtgaacaagccctggctcttctctctgctttggtgtgcaggggtggattcggtcaccaccaacgactgccagctgctgcagcagatgcgttaccctatctggcttattacccctcaaacctacctaatcatatgggtcattaccaattgtgtttccaccatgctgcttttgtggaccttcctcctccaaagaagatttgttaagaagagagggaaaactggcttagaaacagcagtgctgctgacaaggatcaacaatttcatgatggagtgaatgccctgccctgcttccccacccaagccagtctacattgcccaaacagcaagggttggagagtggcttaagtggaatgcttcaggggtggtgggttgcaagtggggggagctttgccaacaggaggttttgaaccatgagggccctctgcccaggtgatgggcattccctaagctgctatggaatctgctccctttggggttttgacctgagatgtttgggaagagagtgagtaatgagaagtttctcctcaaatgaaactagaacagaggaagtaaaagggagattgctcggataa

SEQ ID NO: 137958 - DNA, 2438 bp, Homo sapiens
  Payload ID: 7018
  Gene Symbol: GDPD2
  Gene Name: glycerophosphodiester phosphodiesterase domain containing 2
  Uniprot ID: Q9HCC8
  ENST ID: ENST00000453994
  CDS Start-End: 362-2134
aaagccccggcagtgactgggaggggaacaggaggagggacagagggatgggaaagcctgcacaaaggaattcctcaccccaagccccctgaccgccagcgagtaaagaagcagatttgctctccctcccgcttcctccctcccatcttcccacccgggctgtgcccaggccacagagcagctgcaggccttgggagaggacccacacagcctcctgtaggtggcaacagtgccacctgtttgactcatagggctgaaccgaggactgaaaaagggaggaggcagaccactcggagaggagctgggaagcagtgcagagaggagagcggagcggagctgccgctgagcaaaggccttcaccatggccgagtcccccggctgctgctccgtctgggcccgctgcctccactgcctgtatagctgccactggaggaaatgccccagagagaggatgcaaaccagcaagtgcgactgtatctggtttggcctgctcttcctcaccttcctcctttccctgagctggctgtacatcgggctcgtccttctcaatgacctgcacaacttcaatgaattcctcttccgccgctggggacactggatggactggtccctggcattcctgctggtcatctctctactggtcacatatgcatccttgctattggtcctggccctgctcctgcggctttgtagacagcccctgcatctgcacagcctccacaaggtgctgctgctcctcattatgctgcttgtggcggctggccttgtgggactggacatccaatggcagcaggagtggcatagcttgcgtgtgtcactgcaggccacagccccattccttcatattggagcagccgctggaattgccctcctggcctggcctgtggctgataccttctaccgtatccaccgaagaggtcccaagattctgctactgctcctattttttggagttgtcctggtcatctacttggcccccctatgcatctcctcaccctgcatcatggaacccagagacttaccacccaagcctgggctggtgggacaccgaggggcccccatgctggctcccgagaacaccctgatgtccttgcggaagacagctgaatgcggagctactgtgtttgagactgatgtgatggtcagctccgatggggtccccttcctcatgcatgatgagcacctcagcaggaccacgaatgtagcctctgtattcccaacccgaatcacagcccacagcagtgacttctcctggactgaactgaagagactcaatgctggatcctggttcctagagaggcgacccttctggggggccaaaccgctggcaggccctgatcagaaagaggctgagagtcagacggtaccagcattagaagagctattggaggaagctgcagccctcaacctttccatcatgttcgacttgcgccgacccccacagaaccacacatactatgacacttttgtgatccagacattggagactgtgctgaatgcaagggtgccccaagccatggtcttttggctaccagatgaagatcgggctaatgtccaacgacgggcacctggaatgcgccagatatatggacgtcagggaggcaacagaacggagaggccccagtttcttaacctcccctatcaagatctgccactattggatatcaaagacaggttcctactacctgcccaggctggtctcaaactactggcctcaagcaatcttcctgcctcggcctcccaaagtgctgggattacaggcctgagccactgcccccctcagcctcccggttataagcatgagctatctcacctagctatggcattgcataaggataatgtctcggtgaacctatttgtagtgaacaagccctggctcttctctctgctttggtgtgcaggggtggattcggtcaccaccaacgactgccagctgctgcagcagatgcgttaccctatctggcttattacccctcaaacctacctaatcatatgggtcattaccaattgtgtttccaccatgctgcttttgtggaccttcctcctccaaagaagatttgttaagaagagagggaaaactggcttagaaacagcagtgctgctgacaaggatcaacaatttcatgatggagtgaatgccctgccctgcttccccacccaagccagtctacattgcccaaacagcaagggttggagagtggcttaagtggaatgcttcaggggtggtgggttgcaagtggggggagctttgccaacaggaggttttgaaccatgagggccctctgcccaggtgatgggcattccctaagctgctatggaatctgctccctttggggttttgacctgagatgtttgggaagagagtgagtaatgagaagtttctcctcaaatgaaactagaacagaggaagtaaaagggagattgctcggataatgtctc

SEQ ID NO: 137959 - DNA, 2067 bp, Homo sapiens
  Payload ID: 7018
  Gene Symbol: GDPD2
  Gene Name: glycerophosphodiester phosphodiesterase domain containing 2
  Uniprot ID: Q9HCC8
  ENST ID: ENST00000538649
  CDS Start-End: 381-1763
aaagccccggcagtgactgggaggggaacaggaggagggacagagggatgggaaagcctgcacaaaggaattcctcaccccaagccccctgaccgccagcgagtaaagaagcagatttgctctccctcccgcttcctccctcccatcttcccacccgggctgtgcccaggccacagagcagctgcaggccttgggagaggacccacacagcctcctgtaggtggcaacagtgccacctgtttgactcatagggctgaaccgaggactgaaaaagggaggaggcagaccactcggagaggagctgggaagcagtgcagagaggagagcggagcggagctgccgctgagcaaagattcctcttccgccgctggggacactggatggactggtccctggcattcctgctggtcatctctctactggtcacatatgcatccttgctattggtcctggccctgctcctgcggctttgtagacagcccctgcatctgcacagcctccacaaggtgctgctgctcctcattatgctgcttgtggcggctggccttgtgggactggacatccaatggcagcaggagtggcatagcttgcgtgtgtcactgcaggccacagccccattccttcatattggagcagccgctggaattgccctcctggcctggcctgtggctgataccttctaccgtatccaccgaagaggtcccaagattctgctactgctcctattttttggagttgtcctggtcatctacttggcccccctatgcatctcctcaccctgcatcatggaacccagagacttaccacccaagcctgggctggtgggacaccgaggggcccccatgctggctcccgagaacaccctgatgtccttgcggaagacagctgaatgcggagctactgtgtttgagactgatgtgatggtcagctccgatggggtccccttcctcatgcatgatgagcacctcagcaggaccacgaatgtagcctctgtattcccaacccgaatcacagcccacagcagtgacttctcctggactgaactgaagagactcaatgctggatcctggttcctagagaggcgacccttctggggggccaaaccgctggcaggccctgatcagaaagaggctgagagtcagacggtaccagcattagaagagctattggaggaagctgcagccctcaacctttccatcatgttcgacttgcgccgacccccacagaaccacacatactatgacacttttgtgatccagacattggagactgtgctgaatgcaagggtgccccaagccatggtcttttggctaccagatgaagatcgggctaatgtccaacgacgggcacctggaatgcgccagatatatggacgtcagggaggcaacagaacggagaggccccagtttcttaacctcccctatcaagatctgccactattggatatcaaggcattgcataaggataatgtctcggtgaacctatttgtagtgaacaagccctggctcttctctctgctttggtgtgcaggggtggattcggtcaccaccaacgactgccagctgctgcagcagatgcgttaccctatctggcttattacccctcaaacctacctaatcatatgggtcattaccaattgtgtttccaccatgctgcttttgtggaccttcctcctccaaagaagatttgttaagaagagagggaaaactggcttagaaacagcagtgctgctgacaaggatcaacaatttcatgatggagtgaatgccctgccctgcttccccacccaagccagtctacattgcccaaacagcaagggttggagagtggcttaagtggaatgcttcaggggtggtgggttgcaagtggggggagctttgccaacaggaggttttgaaccatgagggccctctgcccaggtgatgggcattccctaagctgctatggaatctgctccctttggggttttgacctgagatgtttgggaagagagtgagtaatgagaagtttctcctcaaatgaaactagaacagaggaagtaaaagggagattgctcggataatgtctc

SEQ ID NO: 137960 - DNA, 2171 bp, Homo sapiens
  Payload ID: 7018
  Gene Symbol: GDPD2
  Gene Name: glycerophosphodiester phosphodiesterase domain containing 2
  Uniprot ID: Q9HCC8
  ENST ID: ENST00000536730
  CDS Start-End: 485-1867
aaagccccggcagtgactgggaggggaacaggaggagggacagagggatgggaaagcctgcacaaaggaattcctcaccccaagccccctgaccgccagcgagtaaagaagcagatttgctctccctcccgcttcctccctcccatcttcccacccgggctgtgcccaggccacagagcagctgcaggccttgggagaggacccacacagcctcctgtaggtggcaacagtgccacctgtttgactcatagggctgaaccgaggactgaaaaagggaggaggcagaccactcggagaggagctgggaagcagtgcagagaggagagcggagcggagctgccgctgagcaaagtgcgactgtatctggtttggcctgctcttcctcaccttcctcctttccctgagctggctgtacatcgggctcgtccttctcaatgacctgcacaacttcaatgaattcctcttccgccgctggggacactggatggactggtccctggcattcctgctggtcatctctctactggtcacatatgcatccttgctattggtcctggccctgctcctgcggctttgtagacagcccctgcatctgcacagcctccacaaggtgctgctgctcctcattatgctgcttgtggcggctggccttgtgggactggacatccaatggcagcaggagtggcatagcttgcgtgtgtcactgcaggccacagccccattccttcatattggagcagccgctggaattgccctcctggcctggcctgtggctgataccttctaccgtatccaccgaagaggtcccaagattctgctactgctcctattttttggagttgtcctggtcatctacttggcccccctatgcatctcctcaccctgcatcatggaacccagagacttaccacccaagcctgggctggtgggacaccgaggggcccccatgctggctcccgagaacaccctgatgtccttgcggaagacagctgaatgcggagctactgtgtttgagactgatgtgatggtcagctccgatggggtccccttcctcatgcatgatgagcacctcagcaggaccacgaatgtagcctctgtattcccaacccgaatcacagcccacagcagtgacttctcctggactgaactgaagagactcaatgctggatcctggttcctagagaggcgacccttctggggggccaaaccgctggcaggccctgatcagaaagaggctgagagtcagacggtaccagcattagaagagctattggaggaagctgcagccctcaacctttccatcatgttcgacttgcgccgacccccacagaaccacacatactatgacacttttgtgatccagacattggagactgtgctgaatgcaagggtgccccaagccatggtcttttggctaccagatgaagatcgggctaatgtccaacgacgggcacctggaatgcgccagatatatggacgtcagggaggcaacagaacggagaggccccagtttcttaacctcccctatcaagatctgccactattggatatcaaggcattgcataaggataatgtctcggtgaacctatttgtagtgaacaagccctggctcttctctctgctttggtgtgcaggggtggattcggtcaccaccaacgactgccagctgctgcagcagatgcgttaccctatctggcttattacccctcaaacctacctaatcatatgggtcattaccaattgtgtttccaccatgctgcttttgtggaccttcctcctccaaagaagatttgttaagaagagagggaaaactggcttagaaacagcagtgctgctgacaaggatcaacaatttcatgatggagtgaatgccctgccctgcttccccacccaagccagtctacattgcccaaacagcaagggttggagagtggcttaagtggaatgcttcaggggtggtgggttgcaagtggggggagctttgccaacaggaggttttgaaccatgagggccctctgcccaggtgatgggcattccctaagctgctatggaatctgctccctttggggttttgacctgagatgtttgggaagagagtgagtaatgagaagtttctcctcaaatgaaactagaacagaggaagtaaaagggagattgctcggataatgtctc

SEQ ID NO: 137961 - DNA, 1397 bp, Homo sapiens
  Payload ID: 7019
  Gene Symbol: GDPD3
  Gene Name:: glycerophosphodiester phosphodiesterase domain containing 3
  Uniprot ID: Q7L5L3
  ENST ID: ENST00000406256
  CDS Start-End: 379-1335
cctacacacccctggatcctctgaaatggcaaggggtaggcatgttggatgcgctggctacaagtaccagtgagagggagaggtcctgacagtcctgggtggtttttactcccctcatgtagcccaggacggggctgctgggggctgggaagggcctggggatatgagagccagggctacttgcctcacctcctgacactaccccagcttcagccgaaccctgcagcctggctccaagccagcccagcggcaggctcagcaggtcccaggggcgtggcagtggccagtagtagagccggcccacactggctaggcaggcagcacagtcccgcggacggctgagcgtgtggctgcaggagcttctgtgggagtacggtcatgagccttttgctgtactatgccctccctgccctgggcagctatgccatgctctccatcttcttcctgcgccggcctcatctgctgcacacgcccagggctcccaccttccgcatccgcctgggggcccaccgaggaggatctggagagctgctggagaacaccatggaggccatggagaactccatggcccagcgctcggacctcctggagctcgactgtcagctgacacgggacagagtggtggtggtgtcacatgatgagaacctgtgccgccagtcgggcctaaacagggatgtgggcagcctggacttcgaggacctgcccctctacaaggagaagctggaggtttacttctctccaggccactttgctcacgggtcagaccggcgcatggttcgtctggaggacctgttccagaggtttccaaggacacccatgagcgtagagatcaaagggaagaacgaagagctcatccgtgagatagcaggcttggtgagacgctatgaccgtaatgaaatcaccatctgggcctcggagaagagctcggtcatgaagaaatgcaaggctgccaaccccgagatgcccctgtccttcacaataagccgaggattctgggtgctgctttcctactacctggggctgctgcccttcatcccaatccctgagaagttcttcttctgcttcctgcccaacatcatcaacaggacctatttcccattttcctgctcttgcctgaaccagttattggctgtggtttcgaaatggctgatcatgaggaagagtctgatccgacacttggaggagcgaggggtgcaggtggtcttttggtgccttaatgaagagtcggattttgaagcagccttcagcgtgggagccactggcgtcataacggattatcccacagccctgcggcactacctggacaaccatggaccagctgcccggacctcctaagtccagaagcctcgaggtctcctgtttctcttcctgaaaaataaatatttgcctttcgatca

SEQ ID NO: 137962 - DNA, 235 bp, Homo sapiens
  Payload ID: 7019
  Gene Symbol: GDPD3
  Gene Name: glycerophosphodiester phosphodiesterase domain containing 3
  ENST ID: ENST00000566613
  CDS Start-End: 1-142
catcaacaggacctatttcccattttcctgctcttgcctgaaccagttattggctgtggtttcgaaatggtggtcttttggtgccttaatgaagagtcggattttgaagcagccttcagcgtgggagccactggcgtcataacggattatcccacagccctgcggcactacctggacaaccatggaccagctgcccggacctcctaagtccagaagcctcgaggtctcctgtttc

SEQ ID NO: 137963 - DNA, 399 bp, Homo sapiens
  Payload ID: 7019
  Gene Symbol: GDPD3
  Gene Name: glycerophosphodiester phosphodiesterase domain containing 3
  ENST ID: ENST00000566434
  CDS Start-End: 1-124
gacctatttcccattttcctgctcttgcctgaaccagttattggctgtggtttcgaaatggctgatcatgaggaagagtctgatccgacacttggaggagcgaggggtgcaggtgaggccgtgaccaccacttccaccgcacacagacctggcagcagggttccggtcccactctgctgccaactagctgcatcactcgggcaggtggtcttttggtgccttaatgaagagtcggattttgaagcagccttcagcgtgggagccactggcgtcataacggattatcccacagccctgcggcactacctggacaaccatggaccagctgcccggacctcctaagtccagaagcctcgaggtctcctgtttctcttcctgaaaaataaatatttgcctttc

SEQ ID NO: 137964 - DNA, 2533 bp, Homo sapiens
  Payload ID: 7020
  Gene Symbol: GDPD4
  Gene Name: glycerophosphodiester phosphodiesterase domain containing 4
  Uniprot ID: Q6W3E5
  ENST ID: ENST00000315938
  CDS Start-End: 252-1814
aaagggtgaatcatgtttaagaaggtcaacaggattgagcacaagaggaataagacagaaaaaccaaaaaagcttaatccatggattccacgcatcttcaaccacaaatgctttgtcaccttccttactggctgctatagttgcctctggaaattcagacaatgggaaaaaactaaagttggattttgttgctgcacttggaaagagcaattattttgccgtgcctggtaatttcatttgtcttgtctctgatgttgctgttcctgtggatagaaacatccagtgaatactttaactttgactgggtcacttttctaggaacaggatactggtttttctggtctatttttattctgagtttagctaggatcctgactgcctactcttcattgctgttgttacttggatttttgttgctttgggaaaggattgaactatacctgcacttgtgtcataagatcctgattctgctagtgattcttctgtgtgtcattttaatgttcattatatgcaaattctggaaagaaaggtggctggtagctgggctgtcaatgcagatctttgctccctacgtgcacctggtcagcataactgtgatggttatccttttctggcctgtggccttctacgtggcatgtttggaaagagaagttagaatgagaagatacaggatgacacattctgagaaaaaaagactcaagcaatgtaatgtaatcacaaggttaagaggtctacaagtgcctgttggattaccctttcttcttatccttttaggtctctatttgatgccactggggatttattctccctgcattcaggagaaggagaatttggggcccaagccaaccatctttggacatagaggtgcacccatgttggggcctgagaataccatgatgtcctttgagaaagctgttgaacatggagcccatggattggagactgatatacacttaagttatgatcatgtgcctttcctcatgcatgactttgacctgaaaagaacaaccaatattggggaagttcagccagaatctgcctgcgagaaccctgccttcttcaactgggatttcctatcgactctgaatgcaggcaaatggtttgtaaaaccagagctcaggccattttacaatatgaaacctctatcagaggcagataaagaaagagcaagaaatcagtcaattccaacactagctgatttattgacacttgcagagaaggaaagaaaatttgtgatatttgatcttcatcgccctccaccaaaacatcctctcagacacacatttgtccgccaagtagtaagcgtgatccttgcctctaaaatcgagcaacatctgattttttggttgccagctcatgataggcaatacgtcaggtccgtggctcctggttttcagcatgtgggccgtttagtatccattgaaacccttgctaaaaacaatatcagtataataaatgttgactacaagaagttgttccctaatgggttaagagattataaagcagctaacatccatatcaacgtatacaccgtcaatgagccttggcttttctcactggcctggtgctccaggattaactcagtgaccacagacaacattgggctcctgagtcagcttgatcaccctcacttcttcatgacaccaaagttctatgtgttcatgtggctccttgcagatatcatttctgtgctttttattgttgccatattttgttttcactggcggagagagactgaaaaagaaaaattgtttgaaacctccagcactcgcacagatactcagagtggaagtaagaatgaggaagatagatagatagatagatttgcacatagccatgaaacctcctgtccgagttgtggaaggtccttggactctagcagccctctacccggctctacccaagagtggaaaggaacaccaaggccatttcaattttgcagcaccatccaagaaactactacctatcaagaatgctgtcacacctttgaagcctggcaagcatgagattcaaccaccgatgcccaccgtggtctttgaactcacccaagcacccaccaggcaggctacaagtgaggctacctttcaaactacattgcccaccctgaaggtggataagccaaccatgccctccatagaggtcccctatccttaaataagagacctctaagagatccccatggctgaatactccaaataatcctatgtcacaatatattccattgcatctgacatagccttctgtgtttccaaagaagaattagccacatctcccctgcttcttcctctctctgcctaagggtggtgatggtggggagtggttgataaaggcacacagaagggccacggaggctctcaggggaaccattgtgctctcgctatcaagaatgcatctcaaggggctaggcaaggggaaaactgctgtgtgtggtcttggaactggttgctgtcaggtttatctcatcctaacacctccataatattttctgctaaaggagtgactgtgcatataagtaaaggcaacctctcaggaa

SEQ ID NO: 137965 - DNA, 2502 bp, Homo sapiens
  Payload ID: 7020
  Gene Symbol: GDPD4
  Gene Name: glycerophosphodiester phosphodiesterase domain containing 4
  Uniprot ID: Q6W3E5
  ENST ID: ENST00000376217
  CDS Start-End: 252-2123
aaagggtgaatcatgtttaagaaggtcaacaggattgagcacaagaggaataagacagaaaaaccaaaaaagcttaatccatggattccacgcatcttcaaccacaaatgctttgtcaccttccttactggctgctatagttgcctctggaaattcagacaatgggaaaaaactaaagttggattttgttgctgcacttggaaagagcaattattttgccgtgcctggtaatttcatttgtcttgtctctgatgttgctgttcctgtggatagaaacatccagtgaatactttaactttgactgggtcacttttctaggaacaggatactggtttttctggtctatttttattctgagtttagctaggatcctgactgcctactcttcattgctgttgttacttggatttttgttgctttgggaaaggattgaactatacctgcacttgtgtcataagatcctgattctgctagtgattcttctgtgtgtcattttaatgttcattatatgcaaattctggaaagaaaggtggctggtagctgggctgtcaatgcagatctttgctccctacgtgcacctggtcagcataactgtgatggttatccttttctggcctgtggccttctacgtggcatgtttggaaagagaagttagaatgagaagatacaggatgacacattctgagaaaaaaagactcaagcaatgtaatgtaatcacaaggttaagaggtctacaagtgcctgttggattaccctttcttcttatccttttaggtctctatttgatgccactggggatttattctccctgcattcaggagaaggagaatttggggcccaagccaaccatctttggacatagaggtgcacccatgttggggcctgagaataccatgatgtcctttgagaaagctgttgaacatggagcccatggattggagactgatatacacttaagttatgatcatgtgcctttcctcatgcatgactttgacctgaaaagaacaaccaatattggggaagttcagccagaatctgcctgcgagaaccctgccttcttcaactgggatttcctatcgactctgaatgcaggcaaatggtttgtaaaaccagagctcaggccattttacaatatgaaacctctatcagaggcagataaagaaagagcaagaaatcagtcaattccaacactagctgatttattgacacttgcagagaaggaaagaaaatttgtgatatttgatcttcatcgccctccaccaaaacatcctctcagacacacatttgtccgccaagtagtaagcgtgatccttgcctctaaaatcgagcaacatctgattttttggttgccagctcatgataggcaatacgtcaggtccgtggctcctggttttcagcatgtgggccgtttagtatccattgaaacccttgctaaaaacaatatcagtataataaatgttgactacaagaagttgttccctaatgggttaagagattataaagcagctaacatccatatcaacgtatacaccgtcaatgagccttggcttttctcactggcctggtgctccaggattaactcagtgaccacagacaacattgggctcctgagtcagcttgatcaccctcacttcttcatgacaccaaagttctatgtgttcatgtggctccttgcagatatcatttctgtgctttttattgttgccatattttgttttcactggcggagagagactgaaaaagaaaaattgtttgaaacctccagcactcgcacagatactcagagtggaaatttgcacatagccatgaaacctcctgtccgagttgtggaaggtccttggactctagcagccctctacccggctctacccaagagtggaaaggaacaccaaggccatttcaattttgcagcaccatccaagaaactactacctatcaagaatgctgtcacacctttgaagcctggcaagcatgagattcaaccaccgatgcccaccgtggtctttgaactcacccaagcacccaccaggcaggctacaagtgaggctacctttcaaactacattgcccaccctgaaggtggataagccaaccatgccctccatagaggtcccctatccttaaataagagacctctaagagatccccatggctgaatactccaaataatcctatgtcacaatatattccattgcatctgacatagccttctgtgtttccaaagaagaattagccacatctcccctgcttcttcctctctctgcctaagggtggtgatggtggggagtggttgataaaggcacacagaagggccacggaggctctcaggggaaccattgtgctctcgctatcaagaatgcatctcaaggggctaggcaaggggaaaactgctgtgtgtggtcttggaactggttgctgtcaggtttatctcatcctaacacctccataatattttctgctaaaggagtgactgtgcatataagtaaaggcaacctctcaggaa

SEQ ID NO: 137966 - DNA, 3523 bp, Homo sapiens
  Payload ID: 7021
  Gene Symbol: GDPD5
  Gene Name: glycerophosphodiester phosphodiesterase domain containing 5
  Uniprot ID: Q8WTR4
  ENST ID: ENST00000336898
  CDS Start-End: 839-2656
cggggatgacagcggaggtggcagcggcgcggcgctgagcgagcggcgagggagcaggggaagaggaggaagtggagccgcggccgggagctcgggagtcggccgccgcgccgaggttcgccccgttttgcagagagagccgagtcgggacctggaaagacttccccgcggggctccggccgccgcgcctccccgccggcgcctgccctgccctgcccgtcccagccccgcggttcggggcgtgcggccgggacgcgcggagccccggccctgacccgctgcgccgggacgggacgctcctaacgccgccgtaccggtccgtggttgcagggtcgctccgcgcctttccgtcagtgagggtcggaaccccagctccagggctagcgcagtgtggccccaggccctcgcctccggtgcacgggaccccggacccccccagcctctggcttcacgagaccccaaccttcagttggaacagcttggaacagcgcgagcgcccgggaagccctggccgggtcgtgcgctcggtgaggggtcctaggcgggcaggacagtcggaccgaaccgccgggctggtgccgcgagcccaggctgtcaccttcgtcccgcctcaggtgaggggttcagcgcctgccccgaagataacacaggggtccccttctgtcccggcggcctgcgagagccaaggctgcagctctcccagtgaagtgatatcactgcctctgtggacaagacacctccaggagcccagctcacagccaccggtaccttcttccaggacaagctgggggcctccatgggcgcctgagggccaggcgccagggccgtgggcacgagtatggtgagacaccagcccctgcagtactacgagccacagctgtgcctctcctgcctcacgggcatctacggctgccgttggaagcgctaccagcgctcccatgatgataccacaccgtgggagcgcctctggttcctgctcctcaccttcacctttggcctcacgctcacctggctttacttctggtgggaagtccacaatgactatgatgaattcaactggtacctctacaaccgcatgggctactggagcgactggcccgtacccatccttgtgaccacagctgctgccttcgcatacatcgctggcctcctggtcctggcactatgtcacattgccgtggggcagcagatgaacctgcactggctgcacaagatcgggctggtggtcatcctggcttccacggtggtggccatgtcggccgtggcccagctgtgggaggacgagtgggaggtgctgctgatctccctgcagggcacagcgccattcctgcatgtgggggctgtggcagcagtcaccatgctctcctggatcgtggcaggacagttcgcccgcgcagagcggacctcctcccaggtgaccattctctgtaccttcttcaccgtggtgtttgccctctacctggcccctctcaccatctcctctccctgcatcatggagaagaaagacctcggccccaagcctgctctcattggccaccgcggggcccccatgctggctccagagcacacgctcatgtccttccggaaggccctcgagcagaagctgtacgggctccaggctgacattaccatcagcctggacggcgtgcccttcctcatgcatgacaccaccctgcggcgcaccaccaacgtggaggaggagttcccggagctggcccgcaggcctgcctccatgcttaactggaccaccctgcagagactcaacgctggccagtggttcctgaagactgaccccttctggacagccagctccctgtcaccctccgaccacagagaggcccagaaccagtccatctgcagcctggcagagctcctggagctggccaagggcaatgccacactgctgctcaacctgcgtgacccgccccgggagcacccctaccgcagcagttttatcaacgtgactctggaggccgtgctgcactccggcttcccccagcaccaggtcatgtggctgcctagcaggcagaggcccctggtgcggaaggtggctcccggcttccaacagacatcaggctccaaggaggcagtcgccagcctgcggagaggccacatccagcggctgaacctgcgctacactcaggtgtcccgccaggagctcagggactacgcgtcctggaacctgagtgtgaacctctacacagtcaacgcaccgtggctcttctccctgctgtggtgtgcgggggtcccatccgtcacctctgacaactcccacgccctgtcccaggtgccttcccccctctggatcatgcccccggacgagtactgtctcatgtgggtcactgccgacctggtctccttcaccctcatcgtgggcatcttcgtgctccagaagtggcgcctgggtggcatacggagctacaaccctgagcagatcatgctgagtgctgcggtgcgccggaccagccgggacgtcagcatcatgaaggagaagcttattttctcagagatcagcgatggtgtagaggtctccgatgtgctctccgtatgttcagacaacagttatgacacatatgccaacagcaccgccacccctgtgggcccccgagggggtggcagccacaccaagaccctcatagagcggagtgggcgttagctgaagacatgtctgtcccacctgtacctgacacagaagctggggagcctaggagagctggtggaagtgtgtctgaactcggagtgctctgggagcgggctccacagcctccttgtgggctccagccccttgtcagccgcagcctctcttgagggggactccctgtctcctgaggcccagctgggccaggactccatcctttcagatgcccctgcaggcctggggctccttctgggaagtatggggcctagggcttggtccccctcttctgaggccctctcctgtatcccgacctggaagctttgatgggtcatgggccatgccataccccctgtggcaatggagtgtgtggatgctcacctgtgccatctgtcctcctgtctgtgccaggaggcacctgagttctctgctgttatcctgccccaagggcctgggccgagcctctacctgaagcaactctgctcttcctgtcagtctcaaagcacaaggaggttcagcccaggaggaagccagctgcaatgtggagacacgtcctcctccccaacccacctcatgccaccgccaaccccctgccccaggagcgggcctgagccacgtcctctaggagcagctggagatggccaaaagagtgagctcaggactactggatcccatgcccaggtgtccagcagacctcaaggcagaagggtcacctaacccaggagtccacagactgatgtgacctcaggttcccacatcagtggccacagggcagggcccacctggtagaagtgttctggatatggccagggtgggtgtgtggctaagtgggcctgaacagagggaacctagggcccttggccaatgtgattaaagctgccatcttga

SEQ ID NO: 137967 - DNA, 3106 bp, Homo sapiens
  Payload ID: 7021
  Gene Symbol: GDPD5
  Gene Name: glycerophosphodiester phosphodiesterase domain containing 5
  ENST ID: ENST00000443276
  CDS Start-End: 117-524
tggtgcctgactcctcacccttcccctgcctcactgccctgtgcttcctcctgcaggacaagctgggggcctccatgggcgcctgagggccaggcgccagggccgtgggcacgagtatggtgagacaccagcccctgcagtactacgagccacagctgtgcctctcctgcctcacgggcatctacggctgccgttggaagcgctaccagcgctcccatgatgataccacaccgtgggagcgcctctggttcctgctcctcaccttcacctttggcctcacgctcacctggctttacttctggtgggaagtccacaatgactatgatgaattcaactggtacctctacaaccgcatgggctactggagcgactggcccgtacccatccttgtgaccacagctgctgccttcgcatacatcgctggcctcctggtcctggcactatgtcacattgccgtggggcagcagatgaacctgcactggctgcacaaggcctcctctgggcttccactatcccctctgtgagggagtttcttctcctggctgcaaagctggcatttgaaagaactgcaccagctggcaccccgggtggggctggcacatgctgtggtcaccttctggggccatgcctggctctcagcaggctgccctgagcacactgcactgctcttctgtcctcgcctgactcccctgcctcagtggcagcagcccccagcccaggacctgcacagaggaggcgtctgtcagcgacccaacctgagccccagagaggagcactgggtaccacacagccccaagatcgggctggtggtcatcctggcttccacggtggtggccatgtcggccgtggcccagctgtgggaggacgagtgggaggtgctgctgatctccctgcagggcacagcgccattcctgcatgtgggggctgtggcagcagtcaccatgctctcctggatcgtggcaggacagttcgcccgcgcagagcggacctcctcccaggtgaccattctctgtaccttcttcaccgtggtgtttgccctctacctggcccctctcaccatctcctctccctgcatcatggagaagaaagacctcggccccaagcctgctctcattggccaccgcggggcccccatgctggctccagagcacacgctcatgtccttccggaaggccctcgagcagaagctgtacgggctccaggctgacattaccatcagcctggacggcgtgcccttcctcatgcatgacaccaccctgcggcgcaccaccaacgtggaggaggagttcccggagctggcccgcaggcctgcctccatgcttaactggaccaccctgcagagactcaacgctggccagtggttcctgaagactgaccccttctggacagccagctccctgtcaccctccgaccacagagaggcccagaaccagtccatctgcagcctggcagagctcctggagctggccaagggcaatgccacactgctgctcaacctgcgtgacccgccccgggagcacccctaccgcagcagttttatcaacgtgactctggaggccgtgctgcactccggcttcccccagcaccaggtcatgtggctgcctagcaggcagaggcccctggtgcggaaggtggctcccggcttccaacagacatcaggctccaaggaggcagtcgccagcctgcggagaggccacatccagcggctgaacctgcgctacactcaggtgtcccgccaggagctcagggactacgcgtcctggaacctgagtgtgaacctctacacagtcaacgcaccgtggctcttctccctgctgtggtgtgcgggggtcccatccgtcacctctgacaactcccacgccctgtcccaggtgccttcccccctctggatcatgcccccggacgagtactgtctcatgtgggtcactgccgacctggtctccttcaccctcatcgtgggcatcttcgtgctccagaagtggcgcctgggtggcatacggagctacaaccctgagcagatcatgctgagtgctgcggtgcgccggaccagccgggacgtcagcatcatgaaggagaagcttattttctcagagatcagcgatggtgtagaggtctccgatgtgctctccgtatgttcagacaacagttatgacacatatgccaacagcaccgccacccctgtgggcccccgagggggtggcagccacaccaagaccctcatagagcggagtgggcgttagctgaagacatgtctgtcccacctgtacctgacacagaagctggggagcctaggagagctggtggaagtgtgtctgaactcggagtgctctgggagcgggctccacagcctccttgtgggctccagccccttgtcagccgcagcctctcttgagggggactccctgtctcctgaggcccagctgggccaggactccatcctttcagatgcccctgcaggcctggggctccttctgggaagtatggggcctagggcttggtccccctcttctgaggccctctcctgtatcccgacctggaagctttgatgggtcatgggccatgccataccccctgtggcaatggagtgtgtggatgctcacctgtgccatctgtcctcctgtctgtgccaggaggcacctgagttctctgctgttatcctgccccaagggcctgggccgagcctctacctgaagcaactctgctcttcctgtcagtctcaaagcacaaggaggttcagcccaggaggaagccagctgcaatgtggagacacgtcctcctccccaacccacctcatgccaccgccaaccccctgccccaggagcgggcctgagccacgtcctctaggagcagctggagatggccaaaagagtgagctcaggactactggatcccatgcccaggtgtccagcagacctcaaggcagaagggtcacctaacccaggagtccacagactgatgtgacctcaggttcccacatcagtggccacagggcagggcccacctggtagaagtgttctggatatggccagggtgggtgtgtggctaagtgggcctgaacagagggaacctagggcccttggccaatgtgattaaagctgccatcttg

SEQ ID NO: 137968 - DNA, 3222 bp, Homo sapiens
  Payload ID: 7021
  Gene Symbol: GDPD5
  Gene Name: glycerophosphodiester phosphodiesterase domain containing 5
  Uniprot ID: Q8WTR4
  ENST ID: ENST00000529721
  CDS Start-End: 538-2355
ggctgctttagaagaacaagctggtttggcagctacctcagagaagcaggaccctgggcagcgtgaaagggcctctgcccccagggtggctgggctttggatcctggatccgtgggtcctggaggggcaggagtggttcaggaaacagctctcccagtgaagtgatatcactgcctctgtggacaagacacctccaggagcccagctcacagccaccggtaccttcttccagggctgctgttatagtttctgcatggaaagcacttggaacaatgcctggctgttcccctctttggccctctcagggccctaggagcctttgtgtgtcctgctcacattgtctccagggcctcggacagggcctggtacagaacatatgactgagtttctggagtcccacaggccagcgttggagtcctgacacctcagtatagctgtgcacctctgggcaaatagtttctctgctctgagccccaggacaagctgggggcctccatgggcgcctgagggccaggcgccagggccgtgggcacgagtatggtgagacaccagcccctgcagtactacgagccacagctgtgcctctcctgcctcacgggcatctacggctgccgttggaagcgctaccagcgctcccatgatgataccacaccgtgggagcgcctctggttcctgctcctcaccttcacctttggcctcacgctcacctggctttacttctggtgggaagtccacaatgactatgatgaattcaactggtacctctacaaccgcatgggctactggagcgactggcccgtacccatccttgtgaccacagctgctgccttcgcatacatcgctggcctcctggtcctggcactatgtcacattgccgtggggcagcagatgaacctgcactggctgcacaagatcgggctggtggtcatcctggcttccacggtggtggccatgtcggccgtggcccagctgtgggaggacgagtgggaggtgctgctgatctccctgcagggcacagcgccattcctgcatgtgggggctgtggcagcagtcaccatgctctcctggatcgtggcaggacagttcgcccgcgcagagcggacctcctcccaggtgaccattctctgtaccttcttcaccgtggtgtttgccctctacctggcccctctcaccatctcctctccctgcatcatggagaagaaagacctcggccccaagcctgctctcattggccaccgcggggcccccatgctggctccagagcacacgctcatgtccttccggaaggccctcgagcagaagctgtacgggctccaggctgacattaccatcagcctggacggcgtgcccttcctcatgcatgacaccaccctgcggcgcaccaccaacgtggaggaggagttcccggagctggcccgcaggcctgcctccatgcttaactggaccaccctgcagagactcaacgctggccagtggttcctgaagactgaccccttctggacagccagctccctgtcaccctccgaccacagagaggcccagaaccagtccatctgcagcctggcagagctcctggagctggccaagggcaatgccacactgctgctcaacctgcgtgacccgccccgggagcacccctaccgcagcagttttatcaacgtgactctggaggccgtgctgcactccggcttcccccagcaccaggtcatgtggctgcctagcaggcagaggcccctggtgcggaaggtggctcccggcttccaacagacatcaggctccaaggaggcagtcgccagcctgcggagaggccacatccagcggctgaacctgcgctacactcaggtgtcccgccaggagctcagggactacgcgtcctggaacctgagtgtgaacctctacacagtcaacgcaccgtggctcttctccctgctgtggtgtgcgggggtcccatccgtcacctctgacaactcccacgccctgtcccaggtgccttcccccctctggatcatgcccccggacgagtactgtctcatgtgggtcactgccgacctggtctccttcaccctcatcgtgggcatcttcgtgctccagaagtggcgcctgggtggcatacggagctacaaccctgagcagatcatgctgagtgctgcggtgcgccggaccagccgggacgtcagcatcatgaaggagaagcttattttctcagagatcagcgatggtgtagaggtctccgatgtgctctccgtatgttcagacaacagttatgacacatatgccaacagcaccgccacccctgtgggcccccgagggggtggcagccacaccaagaccctcatagagcggagtgggcgttagctgaagacatgtctgtcccacctgtacctgacacagaagctggggagcctaggagagctggtggaagtgtgtctgaactcggagtgctctgggagcgggctccacagcctccttgtgggctccagccccttgtcagccgcagcctctcttgagggggactccctgtctcctgaggcccagctgggccaggactccatcctttcagatgcccctgcaggcctggggctccttctgggaagtatggggcctagggcttggtccccctcttctgaggccctctcctgtatcccgacctggaagctttgatgggtcatgggccatgccataccccctgtggcaatggagtgtgtggatgctcacctgtgccatctgtcctcctgtctgtgccaggaggcacctgagttctctgctgttatcctgccccaagggcctgggccgagcctctacctgaagcaactctgctcttcctgtcagtctcaaagcacaaggaggttcagcccaggaggaagccagctgcaatgtggagacacgtcctcctccccaacccacctcatgccaccgccaaccccctgccccaggagcgggcctgagccacgtcctctaggagcagctggagatggccaaaagagtgagctcaggactactggatcccatgcccaggtgtccagcagacctcaaggcagaagggtcacctaacccaggagtccacagactgatgtgacctcaggttcccacatcagtggccacagggcagggcccacctggtagaagtgttctggatatggccagggtgggtgtgtggctaagtgggcctgaacagagggaacctagggcccttggccaatgtgattaaagctgccatcttga

SEQ ID NO: 137969 - DNA, 825 bp, Homo sapiens
  Payload ID: 7021
  Gene Symbol: GDPD5
  Gene Name: glycerophosphodiester phosphodiesterase domain containing 5
  ENST ID: ENST00000532435
  CDS Start-End: 605-825
ttggaacagcgcgagcgcccgggaagccctggccgggtcgtgcgctcggtgaggggtcctaggcgggcaggacagtcggaccgaaccgccgggctggtgccgcgagcccaggctgtcaccttcgtcccgcctcaggtgaggggttcagcgcctgccccgaagataacacaggggtccccttctgtcccggcggcctgcgagagccaaggctgcagctctcccagtgaagtgatatcactgcctctgtggacaagacacctccaggagcccagctcacagccaccggtaccttcttccagggctgctgttatagtttctgcatggaaagcacttggaacaatgcctggctgttcccctctttggccctctcagggccctaggagcctttgtgtgtcctgctcacattgtctccagggcctcggacagggcctggtacagaacatatgactgagtttctggagtcccacaggccagcgttggagtcctgacacctcagtatagctgtgcacctctgggcaaatagtttctctgctctgagccccaggacaagctgggggcctccatgggcgcctgagggccaggcgccagggccgtgggcacgagtatggtgagacaccagcccctgcagtactacgagccacagctgtgcctctcctgcctcacgggcatctacggctgccgttggaagcgctaccagcgctcccatgatgataccacaccgtgggagcgcctctggttcctgctcctcaccttcacctttggcctcacgctcacctggctttacttctggtgggaagtccacaatgactatgatgaattcaactg

SEQ ID NO: 137970 - DNA, 4150 bp, Homo sapiens
  Payload ID: 7021
  Gene Symbol: GDPD5
  Gene Name: glycerophosphodiester phosphodiesterase domain containing 5
  Uniprot ID: Q8WTR4
  ENST ID: ENST00000526177
  CDS Start-End: 1880-3283
tcacagctctggaaaggtccctggagaggatgtggaaagatccccagtaggtagcagagccaggattcgactgaagaccgtgattcaagtgaggctcttaaccctgggccagctgtctgccatttggactgcaaaacccagaggccagatacccctaagaggccagctgttgcacctctgcaaggcggggttccacctcctctcgggtcccggcacctaggccagactcatcgaatgaatgaaagactctgttgtatcccctgtacccaccatggctatcacaagccacagtcccatgaagacagagaacccaaggccactttctcagaggaggacggtgatctgtctctgggcctctagggtgggattcatccttctcagtcagatttcaggagcgatggtggttgcgtttttgggtgtcagtgctattgctataacttaatgatgcaaggtagggaagtcccacagacactgaacatgcagtgatgctgctgagtgtgttgattagcaccaaagcaactgtggaactcagagataataacatttttaattgtattagggtttggggaatcagttttattgcaagtcgtttccattaataggtattgtgatgagatgctcctggaaaccatccttaactcactgtgtgcagggccacctcccacgatggccacaagggggagctgcgcgccgggggcagccgggagaaggggcctgagtgccgagggcggggttctcaggggttcggaggcgcagctgggcctcccagagactgcgcagcctctctgacaccagcgtgctgtctgtccgagaaagcgcacacccccttaccccctgagatgggcagaaggtgttcgtttctggttctgccccttcaaagctccgtgacccagccagctgttcctctccccgaacctcgcttcccgtgtgtgagatgaggatgctcgtgcctccgcggaaccaacctggggaccacgcgaagcgcccccacaggcccaggctgatgggctggaatgaaaagcctccaaagggaaacttcatcccaggcgagactcagcattccccgccggcgagtgaaggtccctgggtagggagcggagatgctggccaccgccccaccctcatcgtctagaaatgccactgtccctgctcggcatcagagggccctggccgctgctgcctctgggaaaggttgcctcgggagaaagggggtgaaggccctgccagcagctagaacggctccagggaggcagggcggccggcagtgctgtgggagaaggacaggcctttggagggagatgggagacgagtctggagaaactagggggacggaggtggcggctttgactgacccttccagagactgggatctgcgggaggctttggaggagagccacaacctgggcttcggggaggcacgcctgggggtgtggaggggggtgggtggagtgagatccacggctaggggcgaggggctgggggccgaggagccgaaaacctctgccgagcttcacgtggttaaagatttcaggtcttacctgtcaccagagatctctgtcccgtagaggtgccacctcatcctccatgagagctgtgctttgctttcttctggaggctgcaaggaggatggcccccatcacggcggacctagatgctgggagtccgggagagggcaggccgtggagatggggcaggtggcgatgtgtttcaccacccactcccgcctgaagtgccactgtgagcccagcccagggtgccaggctgggctgcactccaggctcctgcagcagacccagttcctcagcctccttcccctgaggcctgggcatggcctggacaaatcgggctggtggtcatcctggcttccacggtggtggccatgtcggccgtggcccagctgtgggaggacgagtgggaggtgctgctgatctccctgcagggcacagcgccattcctgcatgtgggggctgtggcagcagtcaccatgctctcctggatcgtggcaggacagttcgcccgcgcagagcggacctcctcccaggtgaccattctctgtaccttcttcaccgtggtgtttgccctctacctggcccctctcaccatctcctctccctgcatcatggagaagaaagacctcggccccaagcctgctctcattggccaccgcggggcccccatgctggctccagagcacacgctcatgtccttccggaaggccctcgagcagaagctgtacgggctccaggctgacattaccatcagcctggacggcgtgcccttcctcatgcatgacaccaccctgcggcgcaccaccaacgtggaggaggagttcccggagctggcccgcaggcctgcctccatgcttaactggaccaccctgcagagactcaacgctggccagtggttcctgaagactgaccccttctggacagccagctccctgtcaccctccgaccacagagaggcccagaaccagtccatctgcagcctggcagagctcctggagctggccaagggcaatgccacactgctgctcaacctgcgtgacccgccccgggagcacccctaccgcagcagttttatcaacgtgactctggaggccgtgctgcactccggcttcccccagcaccaggtcatgtggctgcctagcaggcagaggcccctggtgcggaaggtggctcccggcttccaacagacatcaggctccaaggaggcagtcgccagcctgcggagaggccacatccagcggctgaacctgcgctacactcaggtgtcccgccaggagctcagggactacgcgtcctggaacctgagtgtgaacctctacacagtcaacgcaccgtggctcttctccctgctgtggtgtgcgggggtcccatccgtcacctctgacaactcccacgccctgtcccaggtgccttcccccctctggatcatgcccccggacgagtactgtctcatgtgggtcactgccgacctggtctccttcaccctcatcgtgggcatcttcgtgctccagaagtggcgcctgggtggcatacggagctacaaccctgagcagatcatgctgagtgctgcggtgcgccggaccagccgggacgtcagcatcatgaaggagaagcttattttctcagagatcagcgatggtgtagaggtctccgatgtgctctccgtatgttcagacaacagttatgacacatatgccaacagcaccgccacccctgtgggcccccgagggggtggcagccacaccaagaccctcatagagcggagtgggcgttagctgaagacatgtctgtcccacctgtacctgacacagaagctggggagcctaggagagctggtggaagtgtgtctgaactcggagtgctctgggagcgggctccacagcctccttgtgggctccagccccttgtcagccgcagcctctcttgagggggactccctgtctcctgaggcccagctgggccaggactccatcctttcagatgcccctgcaggcctggggctccttctgggaagtatggggcctagggcttggtccccctcttctgaggccctctcctgtatcccgacctggaagctttgatgggtcatgggccatgccataccccctgtggcaatggagtgtgtggatgctcacctgtgccatctgtcctcctgtctgtgccaggaggcacctgagttctctgctgttatcctgccccaagggcctgggccgagcctctacctgaagcaactctgctcttcctgtcagtctcaaagcacaaggaggttcagcccaggaggaagccagctgcaatgtggagacacgtcctcctccccaacccacctcatgccaccgccaaccccctgccccaggagcgggcctgagccacgtcctctaggagcagctggagatggccaaaagagtgagctcaggactactggatcccatgcccaggtgtccagcagacctcaaggcagaagggtcacctaacccaggagtccacagactgatgtgacctcaggttcccacatcagtggccacagggcagggcccacctggtagaagtgttctggatatggccagggtgggtgtgtggctaagtgggcctgaacagagggaacctagggcccttggccaatgtgattaaagctgccatcttga

SEQ ID NO: 137971 - DNA, 2424 bp, Homo sapiens
  Payload ID: 7021
  Gene Symbol: GDPD5
  Gene Name: glycerophosphodiester phosphodiesterase domain containing 5
  Uniprot ID: Q8WTR4
  ENST ID: ENST00000533805
  CDS Start-End: 476-1558
cggccgtggcccagctgtgggaggacgagtgggaggtgctgctgatctccctgcagggcacagcgccattcctgcatgtgggggctgtggcagcagtcaccatgctctcctggatcgtggcaggacagttcgcccgcgcagagcggacctcctcccaggtgaccattctctgtaccttcttcaccgtggtgtttgccctctacctggcccctctcaccatctcctctccctgcatcatggagaagaaagacctcggccccaagcctgctctcattggccaccgcggggcccccatggcatcaggagaaccctccaggagagctgggaggcagctcagagcccactgtgacagtgagtacggctgaaccgacgtgagttggagaaagacgaagggatcaaagtcagcgccgcattctgccaccagtgcactccatagccctgcaggagagcttcgctggctccagagcacacgctcatgtccttccggaaggccctcgagcagaagctgtacgggctccaggctgacattaccatcagcctggacggcgtgcccttcctcatgcatgacaccaccctgcggcgcaccaccaacgtggaggaggagttcccggagctggcccgcaggcctgcctccatgcttaactggaccaccctgcagagactcaacgctggccagtggttcctgaagactgaccccttctggacagccagctccctgtcaccctccgaccacagagaggcccagaaccagtccatctgcagcctggcagagctcctggagctggccaagggcaatgccacactgctgctcaacctgcgtgacccgccccgggagcacccctaccgcagcagttttatcaacgtgactctggaggccgtgctgcactccggcttcccccagcaccaggtcatgtggctgcctagcaggcagaggcccctggtgcggaaggtggctcccggcttccaacagacatcaggctccaaggaggcagtcgccagcctgcggagaggccacatccagcggctgaacctgcgctacactcaggtgtcccgccaggagctcagggactacgcgtcctggaacctgagtgtgaacctctacacagtcaacgcaccgtggctcttctccctgctgtggtgtgcgggggtcccatccgtcacctctgacaactcccacgccctgtcccaggtgccttcccccctctggatcatgcccccggacgagtactgtctcatgtgggtcactgccgacctggtctccttcaccctcatcgtgggcatcttcgtgctccagaagtggcgcctgggtggcatacggagctacaaccctgagcagatcatgctgagtgctgcggtgcgccggaccagccgggacgtcagcatcatgaaggagaagcttattttctcagagatcagcgatggtgtagaggtctccgatgtgctctccgtatgttcagacaacagttatgacacatatgccaacagcaccgccacccctgtgggcccccgagggggtggcagccacaccaagaccctcatagagcggagtgggcgttagctgaagacatgtctgtcccacctgtacctgacacagaagctggggagcctaggagagctggtggaagtgtgtctgaactcggagtgctctgggagcgggctccacagcctccttgtgggctccagccccttgtcagccgcagcctctcttgagggggactccctgtctcctgaggcccagctgggccaggactccatcctttcagatgcccctgcaggcctggggctccttctgggaagtatggggcctagggcttggtccccctcttctgaggccctctcctgtatcccgacctggaagctttgatgggtcatgggccatgccataccccctgtggcaatggagtgtgtggatgctcacctgtgccatctgtcctcctgtctgtgccaggaggcacctgagttctctgctgttatcctgccccaagggcctgggccgagcctctacctgaagcaactctgctcttcctgtcagtctcaaagcacaaggaggttcagcccaggaggaagccagctgcaatgtggagacacgtcctcctccccaacccacctcatgccaccgccaaccccctgccccaggagcgggcctgagccacgtcctctaggagcagctggagatggccaaaagagtgagctcaggactactggatcccatgcccaggtgtccagcagacctcaaggcagaagggtcacctaacccaggagtccacagactgatgtgacctcaggttcccacatcagtggccacagggcagggcccacctggtagaagtgttctggatatggccagggtgggtgtgtggctaagtgggcctgaacagagggaacctagggcccttggccaatgtgattaaagctgccatcttg

SEQ ID NO: 137972 - DNA, 527 bp, Homo sapiens
  Payload ID: 7021
  Gene Symbol: GDPD5
  Gene Name: glycerophosphodiester phosphodiesterase domain containing 5
  ENST ID: ENST00000534322
  CDS Start-End: 1-527
gcagtcgccagcctgcggagaggccacatccagcggctgaacctgcgctacactcaggtgtcccgccaggagctcagggactacgcgtcctggaacctgagtgtgaacctctacacagtcaacgcaccgtggctcttctccctgctgtggtgtgcgggggtcccatccgtcacctctgacaactcccacgccctgtcccaggtgccttcccccctctggatcatgcccccggacgagtactgtctcatgtgggtcactgccgacctggtctccttcaccctcatcgtgggcatcttcgtgctccagaactatcacttgatcaggtggcgcctgggtggcatacggagctacaaccctgagcagatcatgctgagtgctgcggtgcgccggaccagccgggacgtcagcatcatgaaggagaagcttattttctcagagatcagcgatggtgtagaggtctccgatgtgctctccgtatgttcagacaacagttatgacacatatgccaacagcaccgccacccctgt

SEQ ID NO: 137973 - DNA, 2441 bp, Homo sapiens
  Payload ID: 7021
  Gene Symbol: GDPD5
  Gene Name: glycerophosphodiester phosphodiesterase domain containing 5
  Uniprot ID: Q8WTR4
  ENST ID: ENST00000533784
  CDS Start-End: 114-1574
tggacaagacacctccaggagcccagctcacagccaccggtaccttcttccaggacaagctgggggcctccatgggcgcctgagggccaggcgccagggccgtgggcacgagtatggtgagacaccagcccctgcagtactacgagccacagctgtgcctctcctgcctcacgggcatctacggctgccgttggaagcgctaccagcgctcccatgatgataccacaccgggcacagcgccattcctgcatgtgggggctgtggcagcagtcaccatgctctcctggatcgtggcaggacagttcgcccgcgcagagcggacctcctcccaggtgaccattctctgtaccttcttcaccgtggtgtttgccctctacctggcccctctcaccatctcctctccctgcatcatggagaagaaagacctcggccccaagcctgctctcattggccaccgcggggcccccatgctggctccagagcacacgctcatgtccttccggaaggccctcgagcagaagctgtacgggctccaggctgacattaccatcagcctggacggcgtgcccttcctcatgcatgacaccaccctgcggcgcaccaccaacgtggaggaggagttcccggagctggcccgcaggcctgcctccatgcttaactggaccaccctgcagagactcaacgctggccagtggttcctgaagactgaccccttctggacagccagctccctgtcaccctccgaccacagagaggcccagaaccagtccatctgcagcctggcagagctcctggagctggccaagggcaatgccacactgctgctcaacctgcgtgacccgccccgggagcacccctaccgcagcagttttatcaacgtgactctggaggccgtgctgcactccggcttcccccagcaccaggtcatgtggctgcctagcaggcagaggcccctggtgcggaaggtggctcccggcttccaacagacatcaggctccaaggaggcagtcgccagcctgcggagaggccacatccagcggctgaacctgcgctacactcaggtgtcccgccaggagctcagggactacgcgtcctggaacctgagtgtgaacctctacacagtcaacgcaccgtggctcttctccctgctgtggtgtgcgggggtcccatccgtcacctctgacaactcccacgccctgtcccaggtgccttcccccctctggatcatgcccccggacgagtactgtctcatgtgggtcactgccgacctggtctccttcaccctcatcgtgggcatcttcgtgctccagaagtggcgcctgggtggcatacggagctacaaccctgagcagatcatgctgagtgctgcggtgcgccggaccagccgggacgtcagcatcatgaaggagaagcttattttctcagagatcagcgatggtgtagaggtctccgatgtgctctccgtatgttcagacaacagttatgacacatatgccaacagcaccgccacccctgtgggcccccgagggggtggcagccacaccaagaccctcatagagcggagtgggcgttagctgaagacatgtctgtcccacctgtacctgacacagaagctggggagcctaggagagctggtggaagtgtgtctgaactcggagtgctctgggagcgggctccacagcctccttgtgggctccagccccttgtcagccgcagcctctcttgagggggactccctgtctcctgaggcccagctgggccaggactccatcctttcagatgcccctgcaggcctggggctccttctgggaagtatggggcctagggcttggtccccctcttctgaggccctctcctgtatcccgacctggaagctttgatgggtcatgggccatgccataccccctgtggcaatggagtgtgtggatgctcacctgtgccatctgtcctcctgtctgtgccaggaggcacctgagttctctgctgttatcctgccccaagggcctgggccgagcctctacctgaagcaactctgctcttcctgtcagtctcaaagcacaaggaggttcagcccaggaggaagccagctgcaatgtggagacacgtcctcctccccaacccacctcatgccaccgccaaccccctgccccaggagcgggcctgagccacgtcctctaggagcagctggagatggccaaaagagtgagctcaggactactggatcccatgcccaggtgtccagcagacctcaaggcagaagggtcacctaacccaggagtccacagactgatgtgacctcaggttcccacatcagtggccacagggcagggcccacctggtagaagtgttctggatatggccagggtgggtgtgtggctaagtgggcctgaacagagggaacctagggcccttggccaatgtgattaaagctgccatcttga

SEQ ID NO: 137974 - DNA, 3211 bp, Homo sapiens
  Payload ID: 7021
  Gene Symbol: GDPD5
  Gene Name: glycerophosphodiester phosphodiesterase domain containing 5
  ENST ID: ENST00000527820
  CDS Start-End: 221-628
ctttgtgtgtcctgctcacattgtctccagggcctcggacagggcctggtacagaacatatgactgagtttctggagtcccacaggccagcgttggagtcctgacacctcagtatagctgtgcacctctgggcaaatagtttctctgctctgagccccaggacaagctgggggcctccatgggcgcctgagggccaggcgccagggccgtgggcacgagtatggtgagacaccagcccctgcagtactacgagccacagctgtgcctctcctgcctcacgggcatctacggctgccgttggaagcgctaccagcgctcccatgatgataccacaccgtgggagcgcctctggttcctgctcctcaccttcacctttggcctcacgctcacctggctttacttctggtgggaagtccacaatgactatgatgaattcaactggtacctctacaaccgcatgggctactggagcgactggcccgtacccatccttgtgaccacagctgctgccttcgcatacatcgctggcctcctggtcctggcactatgtcacattgccgtggggcagcagatgaacctgcactggctgcacaaggcctcctctgggcttccactatcccctctgtgagggagtttcttctcctggctgcaaagctggcatttgaaagaactgcaccagctggcaccccgggtggggctggcacatgctgtggtcaccttctggggccatgcctggctctcagcaggctgccctgagcacactgcactgctcttctgtcctcgcctgactcccctgcctcagtggcagcagcccccagcccaggacctgcacagaggaggcgtctgtcagcgacccaacctgagccccagagaggagcactgggtaccacacagccccaagatcgggctggtggtcatcctggcttccacggtggtggccatgtcggccgtggcccagctgtgggaggacgagtgggaggtgctgctgatctccctgcagggcacagcgccattcctgcatgtgggggctgtggcagcagtcaccatgctctcctggatcgtggcaggacagttcgcccgcgcagagcggacctcctcccaggtgaccattctctgtaccttcttcaccgtggtgtttgccctctacctggcccctctcaccatctcctctccctgcatcatggagaagaaagacctcggccccaagcctgctctcattggccaccgcggggcccccatgctggctccagagcacacgctcatgtccttccggaaggccctcgagcagaagctgtacgggctccaggctgacattaccatcagcctggacggcgtgcccttcctcatgcatgacaccaccctgcggcgcaccaccaacgtggaggaggagttcccggagctggcccgcaggcctgcctccatgcttaactggaccaccctgcagagactcaacgctggccagtggttcctgaagactgaccccttctggacagccagctccctgtcaccctccgaccacagagaggcccagaaccagtccatctgcagcctggcagagctcctggagctggccaagggcaatgccacactgctgctcaacctgcgtgacccgccccgggagcacccctaccgcagcagttttatcaacgtgactctggaggccgtgctgcactccggcttcccccagcaccaggtcatgtggctgcctagcaggcagaggcccctggtgcggaaggtggctcccggcttccaacagacatcaggctccaaggaggcagtcgccagcctgcggagaggccacatccagcggctgaacctgcgctacactcaggtgtcccgccaggagctcagggactacgcgtcctggaacctgagtgtgaacctctacacagtcaacgcaccgtggctcttctccctgctgtggtgtgcgggggtcccatccgtcacctctgacaactcccacgccctgtcccaggtgccttcccccctctggatcatgcccccggacgagtactgtctcatgtgggtcactgccgacctggtctccttcaccctcatcgtgggcatcttcgtgctccagaagtggcgcctgggtggcatacggagctacaaccctgagcagatcatgctgagtgctgcggtgcgccggaccagccgggacgtcagcatcatgaaggagaagcttattttctcagagatcagcgatggtgtagaggtctccgatgtgctctccgtatgttcagacaacagttatgacacatatgccaacagcaccgccacccctgtgggcccccgagggggtggcagccacaccaagaccctcatagagcggagtgggcgttagctgaagacatgtctgtcccacctgtacctgacacagaagctggggagcctaggagagctggtggaagtgtgtctgaactcggagtgctctgggagcgggctccacagcctccttgtgggctccagccccttgtcagccgcagcctctcttgagggggactccctgtctcctgaggcccagctgggccaggactccatcctttcagatgcccctgcaggcctggggctccttctgggaagtatggggcctagggcttggtccccctcttctgaggccctctcctgtatcccgacctggaagctttgatgggtcatgggccatgccataccccctgtggcaatggagtgtgtggatgctcacctgtgccatctgtcctcctgtctgtgccaggaggcacctgagttctctgctgttatcctgccccaagggcctgggccgagcctctacctgaagcaactctgctcttcctgtcagtctcaaagcacaaggaggttcagcccaggaggaagccagctgcaatgtggagacacgtcctcctccccaacccacctcatgccaccgccaaccccctgccccaggagcgggcctgagccacgtcctctaggagcagctggagatggccaaaagagtgagctcaggactactggatcccatgcccaggtgtccagcagacctcaaggcagaagggtcacctaacccaggagtccacagactgatgtgacctcaggttcccacatcagtggccacagggcagggcccacctggtagaagtgttctggatatggccagggtgggtgtgtggctaagtgggcctgaacagagggaacctagggcccttggccaatgtgattaaagctgccatcttga

SEQ ID NO: 137975 - DNA, 2597 bp, Homo sapiens
  Payload ID: 7022
  Gene Symbol: GATM
  Gene Name: glycine amidinotransferase (L-arginine:glycine amidinotransferase)
  Uniprot ID: P50440
  ENST ID: ENST00000396659
  CDS Start-End: 341-1612
aacgggccttcttgcgacgctcgggtctgggtccgggtccggacgtgcaacagaagccgtcagtggccccgctggctaaaaaagggcaagcatcggaggctcgagccagcggccgcggcgcttcccgacagttcctaattcggggcgctacgccggccccaccacctgttcccggcagccaatggggccgcggggggcggccggggcggagcgcggctacaaaaggcctcgggccccgcgcgcccgcccaccccgctccgggcgcgctctcgggaaggcttggaccgacgcggcccagaggccaggaacattccgcgcgtggaccagccgggccagggcgatgctgcgggtgcggtgtctgcgcggcgggagccgcggcgccgaggcggtgcactacatcggatctcggcttggacgaaccttgacaggatgggtgcagcgaactttccagagcacccaggcagctacggcttcctcccggaactcctgtgcagctgacgacaaagccactgagcctctgcccaaggactgccctgtctcttcttacaacgaatgggaccccttagaggaagtgatagtgggcagagcagaaaacgcctgtgttccaccgttcaccatcgaggtgaaggccaacacatatgaaaagtactggccattttaccagaagcaaggagggcattattttcccaaagatcatttgaaaaaggctgttgctgaaattgaagaaatgtgcaatattttaaaaacggaaggagtgacagtaaggaggcctgaccccattgactggtcattgaagtataaaactcctgattttgagtctacgggtttatacagtgcaatgcctcgagacatcctgatagttgtgggcaatgagattatcgaggctcccatggcatggcgttcacgcttctttgagtaccgagcgtacaggtcaattatcaaagactacttccaccgtggcgccaagtggacaacagctcctaagcccacaatggctgatgagctttataaccaggattatcccatccactctgtagaagacagacacaaattggctgctcagggaaaatttgtgacaactgagtttgagccatgctttgatgctgctgacttcattcgagctggaagagatatttttgcacagagaagccaggttacaaactacctaggcattgaatggatgcgtaggcatcttgctccagactacagagtgcatatcatctcctttaaagatcccaatcccatgcatattgatgctaccttcaacatcattggacctggtattgtgctttccaaccctgaccgaccatgtcaccagattgatcttttcaagaaagcaggatggactatcattactcctccaacaccaatcatcccagacgatcatccactctggatgtcatccaaatggctttccatgaatgtcttaatgctagatgaaaaacgtgttatggtggatgccaatgaagttccaattcaaaagatgtttgaaaagctgggtatcactaccattaaagttaacattcgtaatgccaattccctgggaggaggcttccattgctggacctgcgatgtccggcgccgaggcaccttacagtcctacttggactgaacaggcctgatggagcttgtggctggcctcagatacacctaagaagcttaggggcaaggttcattctcctgctttaaaaagtgcatgaactgtagtgctttaaacaatcatctccttaacaggggtcgtaagcctggtttgcttctattacttttctttgacataaagaaaataacttctgctaggtattactctctactcctaaagttatttactatttggcttcaagtataaaattttggtgaatgtgtaccaagaaaaaattagtcacctgagtaacttggccactaataattaaccatctacctctgtttttaattttctttccaaaaggcagcttgaaatgttggtcctaatcttaattttttttcctcttctatagacttgagaatgtttttctctaaatgagagaaagacttagaatgtacacagatccaaaatagaatcagattatctctttttttctaaaggagagaaagacttagaacatacacagatcctaagtagaaccaggtaattgtctctttttctaataaggaatttgggtaatttttaattttttgttttttaaaaaataacctagactatgcaaaacatcaaagtgaattttccatgaatgtttttaatattctcatctcaacattgtgatatatgctactaaaaaccttttcatatacatcttacctcatttcaagtgaattattttaatctttttctctctttccaaaaatttaggaatgtttagtgtaattggatttcgctatcagttcccatccttaagttttgatattcaatatctgatagatacactgcatctttggtcatctaagatttgtttacaaatgtgcaaattatttagagcatagactttataagcattaaaaaaaactaatggaggtaaaacctaaatgcgatgtgaaataattttagtgttgataccgtatgtgtatttttattctaataaacttttgtgttccagattgaa

SEQ ID NO: 137976 - DNA, 554 bp, Homo sapiens
  Payload ID: 7022
  Gene Symbol: GATM
  Gene Name: glycine amidinotransferase (L-arginine:glycine amidinotransferase)
  ENST ID: ENST00000558118
  CDS Start-End: 32-322
attccgcgcgtggaccagccgggccagggcgatgctgcgggtgcggtgtctgcgcggcgggagccgcggcgccgaggcggtgcactacatcggatctcggcttggacgaaccttgacaggatgggtgcagcgaactttccagagcacccaggcagctacggcttcctcccggaactcctgtgcagctgacgacaaagccactgagcctctgcccaaggactgccctgtctcttcttacaacgaatgggaccccttagaggaagtgatagtgggcagagcagaaaacgcctgtgttccaccgttcaccatcgaggtgaagtagagacggggtttcaccgtgttagccaggatggtctcgatctcctgacctcgtgatccacacgccttggcctcccaaagtgctgggattgcaggggccaacacatatgaaaagtactggccattttaccagaagcaaggagggcattattttcccaaagatcatttgaaaaaggctgttgctgaaattgaagaaatgtgcaatattttaaaaacggaaggagtgacagtaagga

SEQ ID NO: 137977 - DNA, 579 bp, Homo sapiens
  Payload ID: 7022
  Gene Symbol: GATM
  Gene Name: glycine amidinotransferase (L-arginine:glycine amidinotransferase)
  ENST ID: ENST00000559885
  CDS Start-End: 535-579
tagataagaagacaatttgtagataaacaagagggttaaaaaaattatctgtaatcccactacccacctacacactgttaacgtcttggtttatgctgttctaaaggggtttaagtggcaatgttatgctggatttttactccatctccacttcctcctctctgtaagtactgatagagcaatgcaatacaataatcttttctttgttcttggaagcttggacgaaccttgacaggatgggtgcagcgaactttccagagcacccaggcagctacggcttcctcccggaactcctgtgcagctgacgacaaagccactgagcctctgcccaaggactgccctgtctcttcttacaacgaatgggaccccttagaggaagtgatagtgggcagagcagaaaacgcctgtgttccaccgttcaccatcgaggtgaaggccaacacatatgaaaagtactggccattttaccagaagcaaggagggcattattttcccaaagatcatttgaaaaaggctgttgctgaaattgaagaaatgtgcaatattttaaaaacggaaggagtgacagtaaggaggcct

SEQ ID NO: 137978 - DNA, 493 bp, Homo sapiens
  Payload ID: 7022
  Gene Symbol: GATM
  Gene Name: glycine amidinotransferase (L-arginine:glycine amidinotransferase)
  ENST ID: ENST00000558537
  CDS Start-End: 398-493
accggaccttggtgcgctgcaccaagcttcccgctcggagcaaggggttgggacgacggaggctcctcttagtaaaaggcttggacgaaccttgacaggatgggtgcagcgaactttccagagcacccaggcagctacggcttcctcccggaactcctgtgcagctgacgacaaagccactgagcctctgcccaaggactgccctgtctcttcttacaacgaatgggaccccttagaggaagtgatagtgggcagagcagaaaacgcctgtgttccaccgttcaccatcgaggtgaaggccaacacatatgaaaagtactggccattttaccagaagcaaggagggcattattttcccaaagatcatttgaaaaaggctgttgctgaaattgaagaaatgtgcaatattttaaaaacggaaggagtgacagtaaggaggcctgaccccattgactggtcattgaagtataaaactcctgattttgagtctacg

SEQ ID NO: 137979 - DNA, 569 bp, Homo sapiens
  Payload ID: 7022
  Gene Symbol: GATM
  Gene Name: glycine amidinotransferase (L-arginine:glycine amidinotransferase)
  ENST ID: ENST00000558163
  CDS Start-End: 67-569
aaggcttggaccgacgcggcccagaggccaggaacattccgcgcgtggaccagccgggccagggcgatgctgcgggtgcggtgtctgcgcggcgggagccgcggcgccgaggcggtgcactacatcggatctcgggccaacacatatgaaaagtactggccattttaccagaagcaaggagggcattattttcccaaagatcatttgaaaaaggctgttgctgaaattgaagaaatgtgcaatattttaaaaacggaaggagtgacagtaaggaggcctgaccccattgactggtcattgaagtataaaactcctgattttgagtctacgggtttatacagtgcaatgcctcgagacatcctgatagttgtgggcaatgagattatcgaggctcccatggcatggcgttcacgcttctttgagtaccgagcgtacaggtcaattatcaaagactacttccaccgtggcgccaagtggacaacagctcctaagcccacaatggctgatgagctttataaccaggattatcccatccactctgtagaagacagacacaaattggctgctca

SEQ ID NO: 137980 - DNA, 903 bp, Homo sapiens
  Payload ID: 7022
  Gene Symbol: GATM
  Gene Name: glycine amidinotransferase (L-arginine:glycine amidinotransferase)
  ENST ID: ENST00000561148
  CDS Start-End: 810-903
aaatcgagttgcctaacccagagctttcccgagatggtcttcgttacaggtgtctgggaggcggcttaagctcacttcactaggtcattaagcatgtactttggtggttacatatatcttggaagtcaccggctttacattctgttttcctggccttcgaactggagcatcagtactaccgccgttggaatagcaacctagagactttgctattttgtgaagaaactctaactatccgcatgggcacagaattttgggtgctctggtgcaaatgtctcagttctggaggctgggaagtcaaagacaaggcactggcagattccatgactggaaaggagagaaggtctctgaggaagtgacattccagctgagacgtgaaggataagtagaaaccaagcagaagaattggaagaggaaagggaagagggaaaagcctgtgccaatgccctgagattggaatatgctttttgtgtttaagaaattaacagaagcttggacgaaccttgacaggatgggtgcagcgaactttccagagcacccaggcagctacggcttcctcccggaactcctgtgcagctgacgacaaagccactgagcctctgcccaaggactgccctgtctcttcttacaacgaatgggaccccttagaggaagtgatagtgggcagagcagaaaacgcctgtgttccaccgttcaccatcgaggtgaaggccaacacatatgaaaagtactggccattttaccagaagcaaggagggcattattttcccaaagatcatttgaaaaaggctgttgctgaaattgaagaaatgtgcaatattttaaaaacggaaggagtgacagtaaggaggcctgaccccattgactggtcattgaagtataaaactcctgattttgagtcta

SEQ ID NO: 137981 - DNA, 1522 bp, Homo sapiens
  Payload ID: 7022
  Gene Symbol: GATM
  Gene Name: glycine amidinotransferase (L-arginine:glycine amidinotransferase)
  Uniprot ID: P50440
  ENST ID: ENST00000558336
  CDS Start-End: 95-1270
cccaccccgctccgggcgcgctctcgggaaggcttggaccgacgcggcccagaggccaggaacattccgcgcgtggaccagccgggccagggcgatgctgcgggtgcggtgtctgcgcggcgggagccgcggcgccgaggcggtgcactacatcggatctcggcttggacgaaccttgacaggatgggtgcagcgaactttccagagcacccaggcagctacggcttcctcccggaactcctgtgcagctgacgacaaagccactgagcctctgcccaaggactgccctgtctcttcttacaacgaatgggaccccttagaggaagtgatagtgggcagagcagaaaacgcctgtgttccaccgttcaccatcgaggtgaaggccaacacatatgaaaagtactggccattttaccagaagcaaggagggcattattttcccaaagatcatttgaaaaaggctgttgctgaaattgaagaaatgtgcaatattttaaaaacggaaggagtgacagtaaggaggcctgaccccattgactggtcattgaagtataaaactcctgattttgagtctacgggtttatacagtgcaatgcctcgagacatcctgatagttgtgggcaatgagattatcgaggctcccatggcatggcgttcacgcttctttgagtaccgagcgtacaggtcaattatcaaagactacttccaccgtggcgccaagtggacaacagctcctaagcccacaatggctgatgagctttataaccaggattatcccatccactctgtagaagacagacacaaattggctgctcagggaaaatttgtgacaactgagtttgagccatgctttgatgctgctgacttcattcgagctggaagagatatttttgcacagagaagccaggttacaaactacctaggcattgaatggatgcgtaggcatcttgctccagactacagagtgcatatcatctcctttaaagatcccaatcccatgcatattgatgctaccttcaacatcattggacctggtattgtgctttccaaccctgaccgaccatgtcaccagattgatcttttcaagaaagcaggatggactatcattactcctccaacaccaatcatcccagacgatcatccactctggatgtcatccaaatggctttccatgaatgtcttaatgctagatgaaaaacgtgttatggtggatgccaatgaagttccaattcaaaagatgtttgaaaagctgggtatgtacaacaaatgaaacatgttgtcatacatgaaaacgttaaatgagaagaactaaagaaatgacatgctaggtttgataaatggtttgtctaattcaattttgattccttttagaggcaccaagttattatttcacagaaagtcagtatttttattttcaacacacgtagccccaacaagttggagatgcatcctgagctcctgagacatccccttaacaataagtttataaatcttatatgacttagccaacgttttggtgccc

SEQ ID NO: 137982 - DNA, 1497 bp, Homo sapiens
  Payload ID: 7023
  Gene Symbol: GCAT
  Gene Name: glycine C-acetyltransferase
  Uniprot ID: O75600
  ENST ID: ENST00000248924
  CDS Start-End: 57-1316
gtccgcgatgcgcacggctcccaggcaggcaggcgcgctcgggcgaggtaggagcgatgtggcctgggaacgcctggcgcgccgcactcttctgggtgccccgcggccgccgcgcacagtcagcgctggcccagctgcgtggcattctggagggggagctggaaggcatccgcggagctggcacttggaagagtgagcgggtcatcacgtcccgtcaggggccgcacatccgcgtggacggcgtctccggaggaatccttaacttctgtgccaacaactacctgggcctgagcagccaccctgaggtgatccaggcaggtctgcaggctctggaggagtttggagctggcctcagctctgtccgctttatctgtggaacccagagcatccacaagaatctagaagcaaaaatagcccgcttccaccagcgggaggatgccatcctctatcccagctgttatgacgccaacgccggcctctttgaggccctgctgaccccagaggacgcagtcctgtcggacgagctgaaccatgcctccatcatcgacggcatccggctgtgcaaggcccacaagtaccgctatcgccacctggacatggccgacctagaagccaagctgcaggaggcccagaagcatcggctgcgcctggtggccactgatggggccttttccatggatggcgacatcgcacccctgcaggagatctgctgcctcgcctctagatatggtgccctggtcttcatggatgaatgccatgccactggcttcctggggcccacaggacggggcacagatgagctgctgggtgtgatggaccaggtcaccatcatcaactccaccctggggaaggccctgggtggagcatcagggggctacacgacagggcctgggcccctggtgtccctgctgcggcagcgcgcccggccatacctcttctccaacagtctgccacctgctgtcgttggctgcgcctccaaggccctagatctgctgatggggagtaacaccattgtccagtctatggctgccaagacccagaggttccgtagtaagatggaagctgctggcttcactatctcgggagccagtcaccccatctgccctgtgatgctgggtgatgcccggctggcctctcgcatggcggatgacatgctgaagagaggcatctttgtcatcgggttcagctaccccgtggtccccaagggcaaggcccggatccgggtacagatctcagcagtgcatagcgaggaagacattgaccgctgcgtggaggccttcgtggaagtggggcgactgcacggggcactgccctgagctctgggtaaggacgagaagagccaaggtccgcctactgccacagggtcaaaggaggttttcgatcagcccagaccagaggctctgagccctgaaccaaagtcccagagctgggctgggacgtgacctgtgctgagggctgtgagaatgtgaaacaacagtgtgaaaattggctgtgaca

SEQ ID NO: 137983 - DNA, 1656 bp, Homo sapiens
  Payload ID: 7023
  Gene Symbol: GCAT
  Gene Name: glycine C-acetyltransferase
  Uniprot ID: O75600
  ENST ID: ENST00000323205
  CDS Start-End: 64-1401
aggctgcgtccgcgatgcgcacggctcccaggcaggcaggcgcgctcgggcgaggtaggagcgatgtggcctgggaacgcctggcgcgccgcactcttctgggtgccccgcggccgccgcgcacagtcagcgctggcccagctgcgtggcattctggagggggagctggaaggcatccgcggagctggcacttggaagagtgagcgggtcatcacgtcccgtcaggggccgcacatccgcgtggacggcgtctccggagggcctggcactgtcatctttccaggcctgcccttgccccacctgagctgctgtatccatctcctctccttcacctcaggaatccttaacttctgtgccaacaactacctgggcctgagcagccaccctgaggtgatccaggcaggtctgcaggctctggaggagtttggagctggcctcagctctgtccgctttatctgtggaacccagagcatccacaagaatctagaagcaaaaatagcccgcttccaccagcgggaggatgccatcctctatcccagctgttatgacgccaacgccggcctctttgaggccctgctgaccccagaggacgcagtcctgtcggacgagctgaaccatgcctccatcatcgacggcatccggctgtgcaaggcccacaagtaccgctatcgccacctggacatggccgacctagaagccaagctgcaggaggcccagaagcatcggctgcgcctggtggccactgatggggccttttccatggatggcgacatcgcacccctgcaggagatctgctgcctcgcctctagatatggtgccctggtcttcatggatgaatgccatgccactggcttcctggggcccacaggacggggcacagatgagctgctgggtgtgatggaccaggtcaccatcatcaactccaccctggggaaggccctgggtggagcatcagggggctacacgacagggcctgggcccctggtgtccctgctgcggcagcgcgcccggccatacctcttctccaacagtctgccacctgctgtcgttggctgcgcctccaaggccctagatctgctgatggggagtaacaccattgtccagtctatggctgccaagacccagaggttccgtagtaagatggaagctgctggcttcactatctcgggagccagtcaccccatctgccctgtgatgctgggtgatgcccggctggcctctcgcatggcggatgacatgctgaagagaggcatctttgtcatcgggttcagctaccccgtggtccccaagggcaaggcccggatccgggtacagatctcagcagtgcatagcgaggaagacattgaccgctgcgtggaggccttcgtggaagtggggcgactgcacggggcactgccctgagctctgggcccagtcctgtggccggttgaagaatcaggcaggagccagggctctgaggggaggcgcctgaggactgcagatctccactgacctctttccctagattaagatgggacccagtggccgggcacggtggctcaggcctgtaatcccagcactttgggaggccaaggtaggcggatcacctgaggtcgggagtttgagaccagcctgaccaacatggagaaaccccgtctctactaaaaatacgaaatt

SEQ ID NO: 137984 - DNA, 716 bp, Homo sapiens
  Payload ID: 7023
  Gene Symbol: GCAT
  Gene Name: glycine C-acetyltransferase
  ENST ID: ENST00000451984
  CDS Start-End: 1-716
gcggccgccgcgcacagtcagcgctggcccagctgcgtggcattctggagggggagctggaaggcatccgcggagctggcacttggaagagtgagcgggtcatcacgtcccgtcaggggccgcacatccgcgtggacggcgtctccggaggaatccttaacttctgtgccaacaactacctgggcctgagcagccaccctgaggtgatccaggcaggtctgcaggctctggaggagtttggagctggcctcagctctgtccgctttatctgtggaacccagagcatccacaagaatctagaagcaaaaatagcccgcttccaccagcgggaggatgccatcctctatcccagctgttatgacgccaacgccggcctctttgagagcagggcgctggtccagcccggcactgagacacgggggccccagagagaagcacagaacaccttgcctctctacccagaggagcgccctggctggcagtacagttttttgatttgctggagtcccggtcaagggagaagcccagggtggttaaatgatggctctacgctcactgcctccctccaggccctgctgaccccagaggacgcagtcctgtcggacgagctgaaccatgcctccatcatcgacggcatccggctgtgcaaggcccacaagtaccgctatcgccacctggacatggccgacctagaagccaagctgcaggaggcccag

SEQ ID NO: 137985 - DNA, 558 bp, Homo sapiens
  Payload ID: 7023
  Gene Symbol: GCAT
  Gene Name: glycine C-acetyltransferase
  ENST ID: ENST00000426858
  CDS Start-End: 31-306
aggcaggcgcgctcgggcgaggtaggagcgatgtggcctgggaacgcctggcgcgccgcactcttctgggtgccccgcggccgccgcgcacagtcagcgctggcccagctgcgtggcattctggagggggagctggaaggcatccgcggagctggcacttggaagagtgagcgggtcatcacgtcccgtcaggggccgcacatccgcgtggacggcgtctccggagagcatccacaagaatctagaagcaaaaatagcccgcttccaccagcgggaggatgccatcctctatcccagctgttatgacgccaacgccggcctctttgaggccctgctgaccccagaggacgcagtcctgtcggacgagctgaaccatgcctccatcatcgacggcatccggctgtgcaaggcccacaagtaccgctatcgccacctggacatggccgacctagaagccaagctgcaggaggcccagaagcatcggctgcgcctggtggccactgatggggccttttccatggatggcgacatcgcacccctgcaggagatctgctgcct

SEQ ID NO: 137986 - DNA, 583 bp, Homo sapiens
  Payload ID: 7023
  Gene Symbol: GCAT
  Gene Name: glycine C-acetyltransferase
  ENST ID: ENST00000445195
  CDS Start-End: 53-583
gcgatgcgcacggctcccaggcaggcaggcgcgctcgggcgaggtaggagcgatgtggcctgggaacgcctggcgcgccgcactcttctgggtgccccgcggccgccgcgcacagtcagcgctggcccagctgcgtggcattctggagggggagctggaaggcatccgcggagctggcacttggaagagtgagcgggtcatcacgtcccgtcaggggccgcacatccgcgtggacggcgtctccggagggcctggcactgtcatctttccaggcctgcccttgccccacctgagctgctgtatccatctcctctccttcacctcaggaatccttaacttctgtgccaacaactacctgggcctgagcagccaccctgaggtgatccaggcaggtctgcaggctctggaggagtttggagctggcctcagctctgtccgctttatctgtggaacccagagcatccacaagaatctagaagcaaaaatagcccgcttccaccagcgggaggatgccatcctctatcccagctgttatgacgccaacgccggcctctttgagagcagggcgctggtccagcccggc

SEQ ID NO: 137987 - DNA, 1552 bp, Homo sapiens
  Payload ID: 7024
  Gene Symbol: GCSH
  Gene Name: glycine cleavage system protein H (aminomethyl carrier)
  Uniprot ID: P23434
  ENST ID: ENST00000315467
  CDS Start-End: 126-647
cccgcggcaccgcctccgcgcctccatccagccggctccctccggccgcgaactgcccctccccgccccgcctcccggcgcgggtggccgaggcgtagcgctgcgacccccgcacccctgcgaacatggcgctgcgagtggtgcggagcgtgcgggccctgctctgcaccctgcgcgcggtcccgtcacccgccgcgccctgcccgccgaggccctggcagctgggggtgggcgccgtccgtacgctgcgcactggacccgctctgctctcggtgcgtaaattcacagagaaacacgaatgggtaacaacagaaaatggcattggaacagtgggaatcagcaattttgcacaggaagcgttgggagatgttgtttattgtagtctccctgaagttgggacaaaattgaacaaacaagatgagtttggtgctttggaaagtgtgaaagctgctagtgaactctattctcctttatcaggagaagtaactgaaattaatgaagctcttgcagaaaatccaggacttgtaaacaaatcttgttatgaagatggttggctgatcaagatgacactgagtaacccttcagaactagatgaacttatgagtgaagaagcatatgagaaatacataaaatctattgaggagtgaaaatggaactcctaaataaactagtatgaaataacgcaagccagcagagttgtcttaaattagtggtggatagaagacttagaatagaaacttttagtattaccgatggggaaaaaaaaactactgttaacactgctaatgaaagaaaatgccctttaactttctaatgattatagataaatataatatgcgtctttttcacaatatcctatgatttttagactaggctctagtgttcagaattcatgaaattatccatggtaaaaactagttataaaaattacataattcaaagataacattgttattcttaagccttatataatattgtaacttgcatgtatccatacctggatttgggatgaaatacttaatgatctttccattggaaataactggaagtgaagaggttttgttgcttgtacagtgtcagatgaggaacaccactatcttaattttgcgatacactgcatttgctggtgctatttttatacagtgaagcaacagctttgcagcaaaataataaaatacttcttcgttaatcatgtttgttttgatgttaatatttcatttagtaactctgctagtatttgtgaaagtgctaactttaacttacggaaagttactttttaaaaggaaatttaagccagaacaatgcaaagctccaagaaaatgttttctttagtcacaaatctggtttttcttaagccaagatctgtcacctttaacataataaaaaataaatcaccaactttgattttctatcatgcgaggtctgaagaaagaagaggaaagacagaggaaggtggaagttttgatcagtatagcacatggtgtttttaagttgttaaaccacgttcaggtttccacttaagtcatgggaataaaagtggacaaggactgaa

SEQ ID NO: 137988 - DNA, 592 bp, Homo sapiens
  Payload ID: 7024
  Gene Symbol: GCSH
  Gene Name: glycine cleavage system protein H (aminomethyl carrier)
  ENST ID: ENST00000566566
  CDS Start-End: 22-510
gacccccgcacccctgcgaacatggcgctgcgagtggtgcggagcgtgcgggccctgctctgcaccctgcgcgcggtcccgtcacccgccgcgccctgcccgccgaggccctggcagctgggggtgggcgccgtccgtacgctgcgcactggacccgctctgctctcggtgcgtaaattcacagagaaacacgaatgggtaacaacagaaaatggcattggaacagtgggaatcagcaattttgcacaggaagcgttgggagatgttgtttattgtagtctccctgaagttgggacaaaattgaacaaacaagatgagtttggtgctttggaaagtgtgaaagctgctagtgaactctattctcctttatcaggagaagtaactgaaattaatgaagctcttgcagaaaatccaggacttgtaaacaaatcttgttatgaagatggtaagctgttgctagaaatttctcaaggaattactactacagtaaatattttatctagaatttaaagcaagtttagctgattgtgacttcatctttttctacttcttggtactaaatagagatgttctgctttaaaagaaaaacaga

SEQ ID NO: 137989 - DNA, 792 bp, Homo sapiens
  Payload ID: 7024
  Gene Symbol: GCSH
  Gene Name: glycine cleavage system protein H (aminomethyl carrier)
  ENST ID: ENST00000564477
  CDS Start-End: 41-193
ggccgaggcgtagcgctgcgacccccgcacccctgcgaacatggcgctgcgagtggtgcggagcgtgcgggccctgctctgcaccctgcgcgcggtcccgtcacccgccgcgccctgcccgccgaggccctggcagctgggggtgggcgccgtccgtacgctgcgcactggacccgctctgctctcgggttaaatcatttcttatatgagccatctttatgctgcctccctaaacctcatcaccccaaatttgtcttcagaggcacagatttttttttctgcaagacagaccagtaatatgcgtaaattcacagagaaacacgaatgggtaacaacagaaaatggcattggaacagtgggaatcagcaattttgcacaggaagcgttgggagatgttgtttattgtagtctccctgaagttgggacaaaattgaacaaacaagatgagtttggtgctttggaaagtgtgaaagctgctagtgaactctattctcctttatcaggagaagtaactgaaattaatgaagctcttgcagaaaatccaggacttgtaaacaaatcttgttatgaagatggtaagctgttgctagaaatttctcaaggaattactactacagtaaatattttatctagaatttaaagcaagtttagctgattgtgacttcatctttttctacttcttggtactaaatagagatgttctgctttaaaagaaaaacagaggttagttgaatacttaaagttatgtttaagatttctggctaggcgcagtggctcgcgcctgtgatccca

SEQ ID NO: 137990 - DNA, 645 bp, Homo sapiens
  Payload ID: 7024
  Gene Symbol: GCSH
  Gene Name: glycine cleavage system protein H (aminomethyl carrier)
  ENST ID: ENST00000569885
  CDS Start-End: 1-199
ctgcaccctgcgcgcggtcccgtcacccgccgcgccctgcccgccgaggccctggcagctgggggtgggcgccgtccgtacgctgcgcactggacccgctctgctctcggtgcgtaaattcacagagaaacacgaatgggtaacaacagaaaatggcattggaacagtgggaatcagcaattttgcacaggttggctgatcaagatgacactgagtaacccttcagaactagatgaacttatgagtgaagaagcatatgagaaatacataaaatctattgaggagtgaaaatggaactcctaaataaactagtatgaaataacgcaagccagcagagttgtcttaaattagtggtggatagaagacttagaatagaaacttttagtattaccgatggggaaaaaaaaactactgttaacactgctaatgaaagaaaatgccctttaactttctaatgattatagataaatataatatgcgtctttttcacaatatcctatgatttttagactaggctctagtgttcagaattcatgaaattatccatggtaaaaactagttataaaaattacataattcaaagataacattgttattcttaagccttatataatattgtaacttgcatgtatccatacctggatt

SEQ ID NO: 137991 - DNA, 972 bp, Homo sapiens
  Payload ID: 7024
  Gene Symbol: GCSH
  Gene Name: glycine cleavage system protein H (aminomethyl carrier)
  ENST ID: ENST00000564386
  CDS Start-End: 1-239
tgcggagcgtgcgggccctgctctgcaccctgcgcgcggtcccgtcacccgccgcgccctgcccgccgaggccctggcagctgggggtgggcgccgtccgtacgctgcgcactggacccgctctgctctcggtgcgtaaattcacagagaaacacgaatgggtaacaacagaaaatggcattggaacagtgggaatcagcaattttgcacagatgagtttggtgctttggaaagtgtgaaagctgctagtgaactctattctcctttatcaggagaagtaactgaaattaatgaagctcttgcagaaaatccaggacttgtaaacaaatcttgttatgaagatggttggctgatcaagatgacactgagtaacccttcagaactagatgaacttatgagtgaagaagcatatgagaaatacataaaatctattgaggagtgaaaatggaactcctaaataaactagtatgaaataacgcaagccagcagagttgtcttaaattagtggtggatagaagacttagaatagaaacttttagtattaccgatggggaaaaaaaaactactgttaacactgctaatgaaagaaaatgccctttaactttctaatgattatagataaatataatatgcgtctttttcacaatatcctatgatttttagactaggctctagtgttcagaattcatgaaattatccatggtaaaaactagttataaaaattacataattcaaagataacattgttattcttaagccttatataatattgtaacttgcatgtatccatacctggatttgggatgaaatacttaatgatctttccattggaaataactggaagtgaagaggttttgttgcttgtacagtgtcagatgaggaacaccactatcttaattttgcgatacactgcatttgctggtgctatttttatacagtgaagcaacagctttgcagcaaaataataaaata

SEQ ID NO: 137992 - DNA, 400 bp, Homo sapiens
  Payload ID: 7024
  Gene Symbol: GCSH
  Gene Name: glycine cleavage system protein H (aminomethyl carrier)
  ENST ID: ENST00000561801
  CDS Start-End: 1-131
agcgtgcgggccctgctctgcaccctgcgcgcggtcccgtcacccgccgcgccctgcccgccgaggccctggcagctgggggtgggcgccgtccgtacgctgcgcactggacccgctctgctctcggatgagtttggtgctttggaaagtgtgaaagctgctagtgaactctattctcctttatcaggagaagtaactgaaattaatgaagctcttgcagaaaatccaggacttgtaaacaaatcttgttatgaagatggttggctgatcaagatgacactgagtaacccttcagaactagatgaacttatgagtgaagaagcatatgagaaatacataaaatctattgaggagtgaaaatggaactcctaaataaactagtatgaaataacgcaagcca

SEQ ID NO: 137993 - DNA, 3767 bp, Homo sapiens
  Payload ID: 7025
  Gene Symbol: GLDC
  Gene Name: glycine dehydrogenase (decarboxylating)
  Uniprot ID: P23378
  ENST ID: ENST00000321612
  CDS Start-End: 152-3214
cccgcgagcgtccatccatctgtccggccgactgtccagcgaaaggggctccaggccgggcgcagccgccacccgggggaccgaggccaggagaggggccaagagcgcggctgacccttgcgggccggggcaggggacggtggccgcggccatgcagtcctgtgccagggcgtgggggctgcgcctgggccgcggggtcgggggcggccgccgcctggctgggggatcggggccgtgctgggcgccgcggagccgggacagcagcagtggcggcggggacagcgccgcggctggggcctcgcgcctcctggagcgccttctgcccagacacgacgacttcgctcggaggcacatcggccctggggacaaagaccagagagagatgctgcagaccttggggctggcgagcattgatgaattgatcgagaagacggtccctgccaacatccgtttgaaaagacccttgaaaatggaagaccctgtttgtgaaaatgaaatccttgcaactctgcatgccatttcaagcaaaaaccagatctggagatcgtatattggcatgggctattataactgctcagtgccacagacgattttgcggaacttactggagaactcaggatggatcacccagtatactccataccagcctgaggtgtctcaggggaggctggagagtttactcaactaccagaccatggtgtgtgacatcacaggcctggacatggccaatgcatccctgctggatgaggggactgcagccgcagaggcactgcagctgtgctacagacacaacaagaggaggaaatttctcgttgatccccgttgccacccacagacaatagctgttgtccagactcgagccaaatatactggagtcctcactgagctgaagttaccctgtgaaatggacttcagtggaaaagatgtcagtggagtgttgttccagtacccagacacggaggggaaggtggaagactttacggaactcgtggagagagctcatcagagtgggagcctggcctgctgtgctactgaccttttagctttgtgcatcttgaggccacctggagaatttggggtagacatcgccctgggcagctcccagagatttggagtgccactgggctatgggggaccccatgcagcattttttgctgtccgagaaagcttggtgagaatgatgcctggaagaatggtgggggtaacaagagatgccactgggaaagaagtgtatcgtcttgctcttcaaaccagggagcaacacattcggagagacaaggctaccagcaacatctgtacagctcaggccctcttggcgaatatggctgccatgtttgcaatctaccatggttcccatgggctggagcatattgctaggagggtacataatgccactttgattttgtcagaaggtctcaagcgagcagggcatcaactccagcatgacctgttctttgataccttgaagattcagtgtggctgctcagtgaaggaggtcttgggcagggccgctcagcggcagatcaattttcggctttttgaggatggcacacttggtatttctcttgatgaaacagtcaatgaaaaagatctggacgatttgttgtggatctttggttgtgagtcatctgcagaactggttgctgaaagcatgggagaggagtgcagaggtattccagggtctgtgttcaagaggaccagcccgttcctcacccatcaagtgttcaacagctaccactctgaaacaaacattgtccggtacatgaagaaactggaaaataaagacatttcccttgttcacagcatgattccactgggatcctgcaccatgaaactgaacagttcgtctgaactcgcacctatcacatggaaagaatttgcaaacatccacccctttgtgcctctggatcaagctcaaggatatcagcagcttttccgagagcttgagaaggatttgtgtgaactcacaggttatgaccaggtctgtttccagccaaacagcggagcccagggagaatatgctggactggccactatccgagcctacttaaaccagaaaggagaggggcacagaacggtttgcctcattccgaaatcagcacatgggaccaacccagcaagtgcccacatggcaggcatgaagattcagcctgtggaggtggataaatatgggaatatcgatgcagttcacctcaaggccatggtggataagcacaaggagaacctagcagctatcatgattacatacccatccaccaatggggtgtttgaagagaacatcagtgacgtgtgtgacctcatccatcaacatggaggacaggtctacctagacggggcaaatatgaatgctcaggtgggaatctgtcgccctggagacttcgggtctgatgtctcgcacctaaatcttcacaagaccttctgcattccccacggaggaggtggtcctggcatggggcccatcggagtgaagaaacatctcgccccgtttttgcccaatcatcccgtcatttcactaaagcggaatgaggatgcctgtcctgtgggaaccgtcagtgcggccccatggggctccagttccatcttgcccatttcctgggcttatatcaagatgatgggaggcaagggtcttaaacaagccacggaaactgcgatattaaatgccaactacatggccaagcgattagaaacacactacagaattcttttcaggggtgcaagaggttatgtgggtcatgaatttattttggacacgagacccttcaaaaagtctgcaaatattgaggctgtggatgtggccaagagactccaggattatggatttcacgcccctaccatgtcctggcctgtggcagggaccctcatggtggagcccactgagtcggaggacaaggcagagctggacagattctgtgatgccatgatcagcattcggcaggaaattgctgacattgaggagggccgcatcgaccccagggtcaatccgctgaagatgtctccacactccctgacctgcgttacatcttcccactgggaccggccttattccagagaggtggcagcattcccactccccttcgtgaaaccagagaacaaattctggccaacgattgcccggattgatgacatatatggagatcagcacctggtttgtacctgcccacccatggaagtttatgagtctccattttctgaacaaaagagggcgtcttcttagtcctctgtccctaagtttaaaggactgatttgatgcctctccccagagcatttgataagcaagaaagatttcatctcccaccccagcctcaagtaggagttttatatactgtgtatatctctgtaatctctgtcaaggtaaatgtaaatacagtagctggagggagtcgaagctgatggttggaagacggatttgctttggtattctgcttccacatgtgccagttgcctggattgggagccattttgtgttttgcgtagaaagttttaggaactttaacttttaatgtggcaagtttgcagatgtcatagaggctatcctggagacttaatagacatttttttgttccaaaagagtccatgtggactgtgccatctgtgggaaatcccagggcaaatgtttacattttgtataccctgaagaactctttttcctctaatatgcctaatctgtaatcacatttctgagtgttctcctctttttctgtgtgaggtttttttttttttaatctgcatttattagtattctaataaaagcatcttgatcggaagaa

SEQ ID NO: 137994 - DNA, 1072 bp, Homo sapiens
  Payload ID: 7026
  Gene Symbol: GNMT
  Gene Name: glycine N-methyltransferase
  Uniprot ID: Q14749
  ENST ID: ENST00000372808
  CDS Start-End: 11-898
gcggcgcaggatggtggacagcgtgtaccggacccgctccctgggggtggcggccgaagggctcccggaccagtacgcggacggggaggcggcgcgcgtgtggcagctgtatatcggagacacccgcagccgcaccgccgagtacaaggcatggctgcttgggctgctgcgccagcacggctgccagcgggtgctcgacgtagcctgtggcactggggtggactccattatgctggtggaagagggcttcagtgtgacgagtgtggatgccagtgacaagatgctgaagtatgcacttaaggagcgctggaaccggcggcacgagcccgccttcgacaagtgggtcatcgaagaagccaactggatgactctggacaaagatgtgccccagtcagcagagggtggctttgatgctgtcatctgccttggaaacagtttcgctcacttgccagactgcaaaggggaccagagtgagcaccggctggcgctgaaaaacattgcgagcatggtgcgggcagggggcctactggtcattgatcatcgcaactacgaccacatcctcagtacaggctgtgcacccccagggaagaacatctactataagagtgacttgaccaaggacgtcacaacatcagtgctgatagtgaacaacaaggcccacatggtgaccctggactatacggtgcaggtgccgggggctggccaggatggctctcctggcttgagtaagttccggctctcctactacccacactgtctggcatccttcacggagctgctccaagcagccttcggaggtaagtgccagcacagcgtcctgggcgacttcaagccttacaagccaggccaaacctacattccctgctacttcatccacgtgctcaagaggacagactgagtgtggcctcagctcccacaagcctctgcccaggcactgctaggctctgtctggaagatggggaccagcagccccacaccagggccagcctctagagcagactacagctggggtgcagggatgtgggttccacagacggaagggtaaacaatatagtctttttcagttcctgca

SEQ ID NO: 137995 - DNA, 1803 bp, Homo sapiens
  Payload ID: 7027
  Gene Symbol: GLRA1
  Gene Name: glycine receptor, alpha 1
  Uniprot ID: P23415
  ENST ID: ENST00000274576
  CDS Start-End: 294-1643
gggagccaacagacacgctggagtttaacaaacagcaatactcttcgcgctcctgaaaagcaggtctggacgctctccgtggtgctgaaacgcctcgcagccgccgctgtccgtggtatctacgaccccctcgctccaatttcccctggggctctccctccgcgcccctgttccccgcctccctttaacatctggattattttttgcaatagcgctttctggttttgtaagtgccaatttgaaacatttttgcccccataactcgtggactacaaagcacaaggacctgaaaaatgtacagcttcaatactcttcgactctacctttgggagaccattgtattcttcagccttgctgcttctaaggaggctgaagctgctcgctccgcacccaagcctatgtcaccctcggatttcctggataagctaatggggagaacctccggatatgatgccaggatcaggcccaattttaaaggtcccccagtgaacgtgagctgcaacattttcatcaacagctttggttccattgctgagacaaccatggactatagggtcaacatcttcctgcggcagcaatggaacgacccccgcctggcctataatgaataccctgacgactctctggacctggacccatccatgctggactccatctggaaacctgacctgttctttgccaacgagaagggggcccacttccatgagatcaccacagacaacaaattgctaaggatctcccggaatgggaatgtcctctacagcatcagaatcaccctgacactggcctgccccatggacttgaagaatttccccatggatgtccagacatgtatcatgcaactggaaagctttggatatacgatgaatgacctcatctttgagtggcaggaacagggagccgtgcaggtagcagatggactaactctgccccagtttatcttgaaggaagagaaggacttgagatactgcaccaagcactacaacacaggtaaattcacctgcattgaggcccggttccacctggagcggcagatgggttactacctgattcagatgtatattcccagcctgctcattgtcatcctctcatggatctccttctggatcaacatggatgctgcacctgctcgtgtgggcctaggcatcaccactgtgctcaccatgaccacccagagctccggctctcgagcatctctgcccaaggtgtcctatgtgaaagccattgacatttggatggcagtttgcctgctctttgtgttctcagccctattagaatatgctgccgttaactttgtgtctcggcaacataaggagctgctccgattcaggaggaagcggagacatcacaaggaggatgaagctggagaaggccgctttaacttctctgcctatgggatgggcccagcctgtctacaggccaaggatggcatctcagtcaagggcgccaacaacagtaacaccaccaacccccctcctgcaccatctaagtccccagaggagatgcgaaaactcttcatccagagggccaagaagatcgacaaaatatcccgcattggcttccccatggccttcctcattttcaacatgttctactggatcatctacaagattgtccgtagagaggacgtccacaaccagtgaagggtctgaaaggttgggggaggctgggagaggggaacgtgggaatagcacaggaatctgagagactaaggaagagaaggggaacggagggagggggcacacttacacaactctctctgcaatatgtgcaatagcaaaatgcagtgatgcatgaatttta

SEQ ID NO: 137996 - DNA, 1707 bp, Homo sapiens
  Payload ID: 7027
  Gene Symbol: GLRA1
  Gene Name: glycine receptor, alpha 1
  Uniprot ID: P23415
  ENST ID: ENST00000455880
  CDS Start-End: 288-1661
caacagacacgctggagtttaacaaacagcaatactcttcgcgctcctgaaaagcaggtctggacgctctccgtggtgctgaaacgcctcgcagccgccgctgtccgtggtatctacgaccccctcgctccaatttcccctggggctctccctccgcgcccctgttccccgcctccctttaacatctggattattttttgcaatagcgctttctggttttgtaagtgccaatttgaaacatttttgcccccataactcgtggactacaaagcacaaggacctgaaaaatgtacagcttcaatactcttcgactctacctttgggagaccattgtattcttcagccttgctgcttctaaggaggctgaagctgctcgctccgcacccaagcctatgtcaccctcggatttcctggataagctaatggggagaacctccggatatgatgccaggatcaggcccaattttaaaggtcccccagtgaacgtgagctgcaacattttcatcaacagctttggttccattgctgagacaaccatggactatagggtcaacatcttcctgcggcagcaatggaacgacccccgcctggcctataatgaataccctgacgactctctggacctggacccatccatgctggactccatctggaaacctgacctgttctttgccaacgagaagggggcccacttccatgagatcaccacagacaacaaattgctaaggatctcccggaatgggaatgtcctctacagcatcagaatcaccctgacactggcctgccccatggacttgaagaatttccccatggatgtccagacatgtatcatgcaactggaaagctttggatatacgatgaatgacctcatctttgagtggcaggaacagggagccgtgcaggtagcagatggactaactctgccccagtttatcttgaaggaagagaaggacttgagatactgcaccaagcactacaacacaggtaaattcacctgcattgaggcccggttccacctggagcggcagatgggttactacctgattcagatgtatattcccagcctgctcattgtcatcctctcatggatctccttctggatcaacatggatgctgcacctgctcgtgtgggcctaggcatcaccactgtgctcaccatgaccacccagagctccggctctcgagcatctctgcccaaggtgtcctatgtgaaagccattgacatttggatggcagtttgcctgctctttgtgttctcagccctattagaatatgctgccgttaactttgtgtctcggcaacataaggagctgctccgattcaggaggaagcggagacatcacaagagccccatgttgaatctattccaggaggatgaagctggagaaggccgctttaacttctctgcctatgggatgggcccagcctgtctacaggccaaggatggcatctcagtcaagggcgccaacaacagtaacaccaccaacccccctcctgcaccatctaagtccccagaggagatgcgaaaactcttcatccagagggccaagaagatcgacaaaatatcccgcattggcttccccatggccttcctcattttcaacatgttctactggatcatctacaagattgtccgtagagaggacgtccacaaccagtgaagggtctgaaaggttgggggaggctgggagaggggaacgtgggaat

SEQ ID NO: 137997 - DNA, 1555 bp, Homo sapiens
  Payload ID: 7027
  Gene Symbol: GLRA1
  Gene Name: glycine receptor, alpha 1
  ENST ID: ENST00000462581
  CDS Start-End: 288-401
caacagacacgctggagtttaacaaacagcaatactcttcgcgctcctgaaaagcaggtctggacgctctccgtggtgctgaaacgcctcgcagccgccgctgtccgtggtatctacgaccccctcgctccaatttcccctggggctctccctccgcgcccctgttccccgcctccctttaacatctggattattttttgcaatagcgctttctggttttgtaagtgccaatttgaaacatttttgcccccataactcgtggactacaaagcacaaggacctgaaaaatgtacagcttcaatactcttcgactctacctttgggagaccattgtattcttcaggtcccccagtgaacgtgagctgcaacattttcatcaacagctttggttccattgctgagacaaccatggactatagggtcaacatcttcctgcggcagcaatggaacgacccccgcctggcctataatgaataccctgacgactctctggacctggacccatccatgctggactccatctggaaacctgacctgttctttgccaacgagaagggggcccacttccatgagatcaccacagacaacaaattgctaaggatctcccggaatgggaatgtcctctacagcatcagaatcaccctgacactggcctgccccatggacttgaagaatttccccatggatgtccagacatgtatcatgcaactggaaagctttggatatacgatgaatgacctcatctttgagtggcaggaacagggagccgtgcaggtagcagatggactaactctgccccagtttatcttgaaggaagagaaggacttgagatactgcaccaagcactacaacacaggtaaattcacctgcattgaggcccggttccacctggagcggcagatgggttactacctgattcagatgtatattcccagcctgctcattgtcatcctctcatggatctccttctggatcaacatggatgctgcacctgctcgtgtgggcctaggcatcaccactgtgctcaccatgaccacccagagctccggctctcgagcatctctgcccaaggtgtcctatgtgaaagccattgacatttggatggcagtttgcctgctctttgtgttctcagccctattagaatatgctgccgttaactttgtgtctcggcaacataaggagctgctccgattcaggaggaagcggagacatcacaaggaggatgaagctggagaaggccgctttaacttctctgcctatgggatgggcccagcctgtctacaggccaaggatggcatctcagtcaagggcgccaacaacagtaacaccaccaacccccctcctgcaccatctaagtccccagaggagatgcgaaaactcttcatccagagggccaagaagatcgacaaaatatcccgcattggcttccccatggccttcctcattttcaacatgttctactggatcatctacaagattgtccgtagagaggacgtccacaaccagtgaagggtctgaaaggttgggggaggctgggagaggggaacgtgggaat

SEQ ID NO: 137998 - DNA, 3216 bp, Homo sapiens
  Payload ID: 7028
  Gene Symbol: GLRA2
  Gene Name: glycine receptor, alpha 2
  Uniprot ID: P23416
  ENST ID: ENST00000218075
  CDS Start-End: 531-1889
acgtctccgtctcattctatagccctcattccagcacaggatctcagcaatttttccctcttccccccacccactccagcgcgcagagtcctttcttctctctcatttacaacttctttttaaaagaaaacattttctagaaaaagggctttgctaaacagaaaagatataaaacaaaagccacagctatctagcatggcattgtcaccaactccctttgcatggtgatgcgattaaggtagcagcatttttattattcaggaaaagcagctgggggattcatcagttctgaggctttgtctttctgggttaactgatggtcccaagcctcggtttgacctgaccatgatgcccaggactggcactttttcttttttctcagcaaactgtacaaaaccaaatctctttttgattttcaaggaaactaggttcctgccaaattttgaatctggacaataaacagacactttgtcctagcatctttctggaatcatttcgggatattttccacaagcaacacagaaacaggaatgaaccggcagctagtgaacattttgacagccttgtttgcatttttcttagagacaaaccacttcaggacggctttctgcaaagaccatgactccaggtctggaaaacaaccttcacagaccctatctccttcagatttcttggacaagttaatgggaaggacatcaggatatgatgcaagaatcaggccaaattttaaaggtcctccagtaaacgttacttgcaatatttttatcaacagttttggatcagtcacagaaacgaccatggactaccgagtgaatatttttctgagacaacagtggaatgattcacggctggcgtacagtgagtacccagatgactccctggacttggacccatccatgctagactccatttggaaaccagatttgttctttgccaatgagaagggtgccaacttccacgatgtcaccactgacaacaaattgctacggatttcgaaaaatggcaaagtgctctacagtatcagactcaccttgaccttatcctgtcccatggacttgaagaactttccgatggatgtccagacctgtacaatgcagctggagagttttgggtacacgatgaatgacctgatatttgagtggttaagtgatggtccagtgcaagttgctgaaggattgaccctgccccagtttattttgaaagaagagaaggaacttggctactgtacaaagcactacaacactggaaagtttacctgcattgaggtcaagtttcatctggaacgccaaatgggatattatttgatccagatgtacatcccaagcctgcttatagtaattttgtcctgggtttccttttggataaatatggatgcagcccctgccagggtcgcactgggcatcaccacagtcttaacgatgaccacccagagttcaggctccagggcatctctgccaaaggtctcctatgtaaaagcgattgacatctggatggcggtgtgccttctgtttgtgtttgctgccttactggaatacgcagcggtgaacttcgtctccaggcaacacaaggagttcctgcgcctccgaagaagacagaagaggcagaataaggaagaagacgttactcgtgaaagtcgttttaattttagcggttatgggatgggtcactgcctccaagtgaaagatggaacagctgtcaaggccacacctgccaacccactcccacaaccgccaaaagatggagatgctatcaagaagaagtttgtggaccgggcaaaaaggattgacacgatatctcgagctgccttcccattggccttcctcattttcaacatcttttactggatcacatacaagatcattcggcatgaagatgtccacaagaaatagatgtgccctacagaccctgggaccttcttgcctcagtgttgtgcttgtaaatacacagtgaaattgtctttatatcactttgacagaggagaagattgagggaggggggagggagggtcatgggggtgggtttcctggcacctacatgaaaaaaaagacaagttatatgggtgatgaagaaaactgcacaaaattaaggggttgcagaatcacgggagcataataattcccttccataatctttagcattgttctttcagtcagacatgatatgcgcaacattcagacatgatatgcgcatcattcagacatgatatgcggggtcaagttcttaagggctgtttgccttttggtccttttggtttggtttggctttgactaattctggtactgaaaagttagctatacacacacacacacacacacacacacacacacacacacacacacacacacacacacacaaacttcaaaaatgcttaaccatctgaccatagtgactagcctatagtgagtcgaggaccaaactttttcaggaaaatgctgcctcgtttttaaaacaagcctcctaagctatgttctttacaatgtctgtaattagtgtttcacttgagaaagccttttgtgggtcgtaaattatttctacttatccagtaaataacaatgacaaaataaacaccaatgacagaaaaatttctactttactgtccatataggtgtgcattttaatatttttctttccaagataaaattttgaaacttaaattgtgtattgtgtaattaatttgatagtgtaccctcttaataaatgcccactttattttatatccaagttagtgcattatatatatatttttgctttggctatatttacacgtgactttaatcgcccaactgtgactagtcattgcagctactcagctacagtatttatggagatggtgtgtcctgaacagtgtagctcaggtcagcttgaactttccatttctgctctcattgtaggtgtaactactagtcctaatgtcaactgacccatgatttctactgtcagtcaatataagtgaacattgttttaaatatccttaactaacttaaagaattttaaaattgtactgtgattttcataacccgttgcctttttggtaccagagctacgtggtttgaattctggctacatgttttaagtaagaaaaaaaaagacgtatttttgcttactcagataaaagacaacctgtaaaaatataataattaaattttacatgtgctgtacaaggggttattttaaaaagcatttgttcaatttcaataaagctaagtgtgccgcaaa

SEQ ID NO: 137999 - DNA, 1730 bp, Homo sapiens
  Payload ID: 7028
  Gene Symbol: GLRA2
  Gene Name: glycine receptor, alpha 2
  Uniprot ID: P23416
  ENST ID: ENST00000355020
  CDS Start-End: 287-1645
gcatttttattattcaggaaaagcagctgggggattcatcagttctgaggctttgtctttctgggttaactgatggtcccaagcctcggtttgacctgaccatgatgcccaggactggcactttttcttttttctcagcaaactgtacaaaaccaaatctctttttgattttcaaggaaactaggttcctgccaaattttgaatctggacaataaacagacactttgtcctagcatctttctggaatcatttcgggatattttccacaagcaacacagaaacaggaatgaaccggcagctagtgaacattttgacagccttgtttgcatttttcttagagacaaaccacttcaggacggctttctgcaaagaccatgactccaggtctggaaaacaaccttcacagaccctatctccttcagatttcttggacaagttaatgggaaggacatcaggatatgatgcaagaatcaggccaaattttaaagggcctcctgtaaatgttacctgcaacatatttatcaacagctttgggtcaatagcagaaactacaatggactaccgagtgaatatttttctgagacaacagtggaatgattcacggctggcgtacagtgagtacccagatgactccctggacttggacccatccatgctagactccatttggaaaccagatttgttctttgccaatgagaagggtgccaacttccacgatgtcaccactgacaacaaattgctacggatttcgaaaaatggcaaagtgctctacagtatcagactcaccttgaccttatcctgtcccatggacttgaagaactttccgatggatgtccagacctgtacaatgcagctggagagttttgggtacacgatgaatgacctgatatttgagtggttaagtgatggtccagtgcaagttgctgaaggattgaccctgccccagtttattttgaaagaagagaaggaacttggctactgtacaaagcactacaacactggaaagtttacctgcattgaggtcaagtttcatctggaacgccaaatgggatattatttgatccagatgtacatcccaagcctgcttatagtaattttgtcctgggtttccttttggataaatatggatgcagcccctgccagggtcgcactgggcatcaccacagtcttaacgatgaccacccagagttcaggctccagggcatctctgccaaaggtctcctatgtaaaagcgattgacatctggatggcggtgtgccttctgtttgtgtttgctgccttactggaatacgcagcggtgaacttcgtctccaggcaacacaaggagttcctgcgcctccgaagaagacagaagaggcagaataaggaagaagacgttactcgtgaaagtcgttttaattttagcggttatgggatgggtcactgcctccaagtgaaagatggaacagctgtcaaggccacacctgccaacccactcccacaaccgccaaaagatggagatgctatcaagaagaagtttgtggaccgggcaaaaaggattgacacgatatctcgagctgccttcccattggccttcctcattttcaacatcttttactggatcacatacaagatcattcggcatgaagatgtccacaagaaatagatgtgccctacagaccctgggaccttcttgcctcagtgttgtgcttgtaaatacacagtgaaattgtctttatatcactttgaca

SEQ ID NO: 138000 - DNA, 3182 bp, Homo sapiens
  Payload ID: 7028
  Gene Symbol: GLRA2
  Gene Name: glycine receptor, alpha 2
  Uniprot ID: P23416
  ENST ID: ENST00000443437
  CDS Start-End: 767-1858
acttccctcaccctctccgtctcccgacctctcttctcctcttgctgtcatcgtacccccttcagtatcccctcgctgaacggccagtcactctttgccttcgaacagcaggcacgtcccctcttgaatgcttttccccgacccccgccccaagcaactgaaaaaggaaacatgcgcacttcagagcttggagctgtccgagtgctgaaatttataggctgggaaactaggttcctgccaaattttgaatctggacaataaacagacactttgtcctagcatctttctggaatcatttcgggatattttccacaagcaacacagaaacaggaatgaaccggcagctagtgaacattttgacagccttgtttgcatttttcttagagacaaaccacttcagaaccaagataaatggaacacatagtaataatgctatgaatactgggaaaacccactatgttcctttcaggtttacacctcctactatgattaagaaaaaatataggctggtttttattagaatcatcatcatcatcatcatcctcaccaccaccaccatcataatcaaataatacttgattaatcagatgaatctgcatatgagaatgacggctttctgcaaagaccatgactccaggtctggaaaacaaccttcacagaccctatctccttcagatttcttggacaagttaatgggaaggacatcaggatatgatgcaagaatcaggccaaattttaaagttttggatcagtcacagaaacgaccatggactaccgagtgaatatttttctgagacaacagtggaatgattcacggctggcgtacagtgagtacccagatgactccctggacttggacccatccatgctagactccatttggaaaccagatttgttctttgccaatgagaagggtgccaacttccacgatgtcaccactgacaacaaattgctacggatttcgaaaaatggcaaagtgctctacagtatcagactcaccttgaccttatcctgtcccatggacttgaagaactttccgatggatgtccagacctgtacaatgcagctggagagttttgggtacacgatgaatgacctgatatttgagtggttaagtgatggtccagtgcaagttgctgaaggattgaccctgccccagtttattttgaaagaagagaaggaacttggctactgtacaaagcactacaacactggaaagtttacctgcattgaggtcaagtttcatctggaacgccaaatgggatattatttgatccagatgtacatcccaagcctgcttatagtaattttgtcctgggtttccttttggataaatatggatgcagcccctgccagggtcgcactgggcatcaccacagtcttaacgatgaccacccagagttcaggctccagggcatctctgccaaaggtctcctatgtaaaagcgattgacatctggatggcggtgtgccttctgtttgtgtttgctgccttactggaatacgcagcggtgaacttcgtctccaggcaacacaaggagttcctgcgcctccgaagaagacagaagaggcagaataaggaagaagacgttactcgtgaaagtcgttttaattttagcggttatgggatgggtcactgcctccaagtgaaagatggaacagctgtcaaggccacacctgccaacccactcccacaaccgccaaaagatggagatgctatcaagaagaagtttgtggaccgggcaaaaaggattgacacgatatctcgagctgccttcccattggccttcctcattttcaacatcttttactggatcacatacaagatcattcggcatgaagatgtccacaagaaatagatgtgccctacagaccctgggaccttcttgcctcagtgttgtgcttgtaaatacacagtgaaattgtctttatatcactttgacagaggagaagattgagggaggggggagggagggtcatgggggtgggtttcctggcacctacatgaaaaaaaagacaagttatatgggtgatgaagaaaactgcacaaaattaaggggttgcagaatcacgggagcataataattcccttccataatctttagcattgttctttcagtcagacatgatatgcgcaacattcagacatgatatgcgcatcattcagacatgatatgcggggtcaagttcttaagggctgtttgccttttggtccttttggtttggtttggctttgactaattctggtactgaaaagttagctatacacacacacacacacacacacacacacacacacacacacacacacacacacacacacaaacttcaaaaatgcttaaccatctgaccatagtgactagcctatagtgagtcgaggaccaaactttttcaggaaaatgctgcctcgtttttaaaacaagcctcctaagctatgttctttacaatgtctgtaattagtgtttcacttgagaaagccttttgtgggtcgtaaattatttctacttatccagtaaataacaatgacaaaataaacaccaatgacagaaaaatttctactttactgtccatataggtgtgcattttaatatttttctttccaagataaaattttgaaacttaaattgtgtattgtgtaattaatttgatagtgtaccctcttaataaatgcccactttattttatatccaagttagtgcattatatatatatttttgctttggctatatttacacgtgactttaatcgcccaactgtgactagtcattgcagctactcagctacagtatttatggagatggtgtgtcctgaacagtgtagctcaggtcagcttgaactttccatttctgctctcattgtaggtgtaactactagtcctaatgtcaactgacccatgatttctactgtcagtcaatataagtgaacattgttttaaatatccttaactaacttaaagaattttaaaattgtactgtgattttcataacccgttgcctttttggtaccagagctacgtggtttgaattctggctacatgttttaagtaagaaaaaaaaagacgtatttttgcttactcagataaaagacaacctgtaaaaatataataattaaattttacatgtgctgtacaaggggttattttaaaaagcatttgttcaatttcaataaagctaagtgtgccgc

SEQ ID NO: 138001 - DNA, 659 bp, Homo sapiens
  Payload ID: 7028
  Gene Symbol: GLRA2
  Gene Name: glycine receptor, alpha 2
  ENST ID: ENST00000415367
  CDS Start-End: 14-659
cttgattaatcagatgaatctgcatatgagaatgacggctttctgcaaagaccatgactccaggtctggaaaacaaccttcacagaccctatctccttcagatttcttggacaagttaatgggaaggacatcaggatatgatgcaagaatcaggccaaattttaaaggtcctccagtaaacgttacttgcaatatttttatcaacagttttggatcagtcacagaaacgaccatggactaccgagtgaatatttttctgagacaacagtggaatgattcacggctggcgtacagtgagtacccagatgactccctggacttggacccatccatgctagactccatttggaaaccagatttgttctttgccaatgagaagggtgccaacttccacgatgtcaccactgacaacaaattgctacggatttcgaaaaatggcaaagtgctctacagtatcagactcaccttgaccttatcctgtcccatggacttgaagaactttccgatggatgtccagacctgtacaatgcagctggagagttttgggtacacgatgaatgacctgatatttgagtggttaagtgatggtccagtgcaagttgctgaaggattgaccctgccccagtttattttgaaagaagagaaggaacttggctact

SEQ ID NO: 138002 - DNA, 8770 bp, Homo sapiens
  Payload ID: 7029
  Gene Symbol: GLRA3
  Gene Name: glycine receptor, alpha 3
  Uniprot ID: O75311
  ENST ID: ENST00000274093
  CDS Start-End: 504-1898
gtcgacaggaccgggttgtccggccccacccccgcttccctttgccgcgctccgggtctcgggttttaacccaaggtggagagctggattccggcgggcggcgcttggagcaggtggagaggcgtcctctttccggctgttgctgctcttcttcctccaatcctgggtctcagtcagggaagaacgaacattcttcctttgctgctggagctttagagaactgttgcccagcacctaggcacttcagacatttcatctcactcatttttgtaatttcactgtaaaaatcacctgcacatttataacactgtgactctccacttctgctcaatgctgagaaggggtccgcatactgcggggagctgtctaaggtgctgaagcttcccaagcatcagtctacaccaacaccatgcggggttagattgtacattttcattctgtctttctggttccccatgccttggataagactattttcaggatcgtgaatatctctccgtatcatggcccacgtgagacactttcggacattagtttcgggattttacttctgggaagcagcactgttactcagtttggttgccacaaaggaaacagacagtgcaagatctcgaagtgctccaatgtcaccttctgattttctggataaattaatgggcaggacatcaggatatgatgcaagaatcagacccaattttaaaggccctccagttaatgtcacatgcaacatattcatcaacagctttggctctatcgcagagacgaccatggattacagagtgaatatctttcttcgtcagaaatggaatgatccccgcctcgcgtacagtgaatatcctgacgactctttagacctcgacccctccatgttggactccatttggaaacctgatttgttctttgccaatgaaaagggtgccaactttcatgaagtcactacagacaacaaattgctaagaattttcaaaaatggaaatgttctttattcaataagattaacattaacactttcctgtccaatggatctcaagaattttcccatggatgtacaaacatgtataatgcaactggaaagctttgggtacacaatgaatgatctcatttttgaatggcaagatgaggcacccgtacaagtggcagaaggactcactttgccccagtttctgttgaaagaagaaaaagatttacgatactgcactaaacattacaatacaggaaagtttacgtgtatagaagtgcgattccatctggagcgacaaatgggatactatctgatccagatgtacattcccagtctcctgattgttattctatcctgggtttcattctggatcaacatggatgcagcaccggccagggtagctctggggataaccactgtgctaacgatgactacacagagttcaggatcacgagcttccttgccaaaagtttcatatgtcaaagctattgatatttggatggcagtatgcctcctttttgtgttttcagcacttctggagtatgcagctgtaaattttgtatcaagacaacacaaagaacttctgagatttcgacgaaagagaaagaataagacagaagcttttgcactggagaagttttaccgtttctcagatatggatgatgaggtaagggaaagccgattcagcttcacagcctatggaatgggaccatgtctacaagcaaaggatggcatgactccaaagggccccaaccaccctgtccaggtaatgccaaaaagtcctgatgaaatgaggaaggtctttatcgaccgggccaagaagattgataccatctcccgagcctgcttcccattagcttttttgatttttaatattttctactgggttatctataaaattcttaggcatgaggatattcatcagcagcaagattaagtctctgggggcatgcaaatgcaaatggtcaattcagaagaaagtgtctctgccataggtgtgtatgtgtatatgtgtgcgtgtggtatacaaatgatgaccattgtattaaaatggcatatggaaaagctttgtattttggttagctatgcaaagtcatgagaaagatgagattcttttaatgaatataaaatatttattaggggattctatttcatattaattccaggtgatttgttttttcacagtaaaccatgtaagtggaagctttactgccaatgtgtttatatgttatataatatctcataatagtagacatgaaaactactttgaaattccttgatttgtaattcaatgctattaaatcatacaaaagcaaattttgcacagtaaaccaatagtttgagatttaaaactattttcttatagtatagttacaaaatgggaaaataattagttacagtgggaaattcactcatattaatggaggattgtacatataaatactatttaaacaacatatgtaattttgaaaatttttaaataagagcattaaaagactttaatgatttggaatactaaatttaattgtttagaatattaagttttcctctgtgcaaatttaaaacaaataacaagagatcgtgttacagtcacaatctacttttcttaaactttgtatctctaggaacgaaggtggaaatacgggaaacaactttgtttttaaataagtattatagctatgtatttttagttattgccaaacattgaacaattcaagccagcacccttgtttttgttagacttttaatagctacttaactgtatgtgattgtgtttaataatttgatataacaggacaaaattcagtaagacttttatattttagtttagaatgtgactttaaaattcaatgggattaaagtatttacattttgataaaaatgaatacaatgaaaacaaaatggattcatggaagattttttaataaaaaccattttcccatcaatgttttatgggtctcaactcctatctccaaatataagtagggaaagttttaattttaaatgatataagtaagtcatttctataaagtgaggactctttttctatttctgaattaatgatttcaaaatctaagccattcgcaagatgtgaataattttaaatgaaatttttacataaaatttttcaatgaccccatgggattacttcaacaaaaacagagcattagtaacttgttttttgcagtgtaattgggtgcaaatgtatgatagagttcttggtaaacagaaccagactctgactctttttcagttttgctatttttttaactatttttaccataaatttatttggaaaagctttggaatgctttttaggtattttaattattggtcagatgcacaaactcagtccaccaaattattcacagagaaaactttaaagattaagaaaacaatgaactcagatgtacaatagaaaagccagttctttaacaagatgctattttctacccttcaaccactttcaaattaaaagcaaaaactaccatttaaaactaaaacctttacaatgttattgtacatcagcttatacaattgtaattttttaaaataacattttaaaaaatagtaaatgttaagcagtttttgctagtaaaagaccaagttcccctcctttataagtaacttaaaacaacactataaggaaataatatcatgtttggcattatgtgcaaatgacacaaccaaaagaatttgttactctgtaagtacccacgttgaggactgtgcacctgaaaattaaacatatgcttcttcatttggtgtgtatttaacaaaaccatggaaacatattcttgttctaaagattagagcaagatatgtcatttgtattccttgagaattagcaggagagtttgaggtaattataaactacatcatctcgatgtgtctctgaaatacctgaatacgtttttctatactttccacatcttatttcaaaagtttcccaacattgcttaagtgaattctgccaggagcaaacagaaatataatgaatgcaaacatgcttacttccaaaagaaattcacagacatcacttctttccatatttgagaatattataaatgtgtctttgttaaatcagaaacttagaaagtgaaaataccaaacatgagacaatattgtcaacaaggacgttggtacattagaaatctatctcaaaagtattacactttccttaggcatagttttcctttcctattatatttgtcactgtcttactgcactaagaaaatactttaacagctttcactcacaaggcaacagtgacaaggtgcatgtggctgaatccaatatgtttaaaggaatgtgtctcctccttcgaactcttatagaccttttaaaactgaaaaattacattgcagttagcatcctgagataatatttgcctcaataagccctgtgtccaaccagaatattttaaattaaaccaaccacaaaattattaatggcaagaaattaaaaatgtgtgcatatacattaactactaaacacacaaattggaattccaatgtgcatattctgaagtattttaaaatagccacattagaaaatatgggattttcatgtatgcagtttatatcattttcttaaaaagaattatttgtatgtcaatcattgaaatatttgattccatagcatatgaatttataggctatcttatacattagcatatatgtgcccaaccttttctttctttcccaaccattagaattgaacttaaaccataatgaggctctagaacttactttacaactttaaatagattcaagagtcactgtattttcaagaaagctgagggtgtttaaaacttctccaacccttccaaaagtttctccatggcgctggagaccccatccaactctcagtggctatattagggaatcatccggactgctcatcttattctaaaattaattcttattctgttgatatattctaataacttttatcttaatttggaatttaattgcttgtatatttatatatccctaagacatgaattcatgtattagtttatgaatacccaggatctcatggaaggtaagggaaattttagaaaaaaaaatgaataatctaaatgtttaactaacagaagagagcaagctgttcactactttagtactcagtgcaacttaagtagttataatatttgaaaaaagatttagatgtatcttccatactatacatccctttttctgaacattttttattccactttttaaaatatgcttttctatttttctcaacacaacatacttcaacctgctggttacttgggaggactgaatattatactggcagctaaatttttatttcatctataaagtacacattccaggaaatggacatgagagaatacaagagacttgccaaaattgaaatggaaaatacttgcagtattttgtaaatggaaaagaaggaaactgacagcattgtttttcacaggtgtcccctaaaaatttagaacactctaagaacaaaactctgagaacaaaaatgtatctaatgatccttagacagatatcattaacaatccttgaggtcatgatatcttctactccaaaagtgattccacactctttgcaacatagataatagcataaactcccaaaatttatcagcatatacgacctatatttttcatctagttaatattgaactagcaaagaaaagcaagccattccaaatataagacaatctggtgttaatacaatatattagaagaaatagtgtaaatgttcacacagattccctcttgcaaataaagtacccataatacccattgcatcttgtacctgtataagagacatcttcctcagcagatgcattggtttttatttccttatttgtgtgctacagtggtaaatatagcctcactgcattttttttattgttatataaacctttcatggataaataagcagtgtacactgtaaattgcattaatttaattaactttaaaattaaacttttatctcagcccccattcctctttacaaacatagtgatattaaaaagtgaacttccatagggagacacctggtactccaattacttcaaaagtaaagtgatgcatattcttccataacaaagatacttataggccatgtgtaaaatataactctctacaatttaaacggaactagggcagggaaaaatatcctggggaagcttcttccagatatgaggacaagagatataatcccaagttagtagctaggacccacttacctgtttttttggtctacattttacatcttaataatgccttcatctcttccctttccctctctctctctctctttcacacacacacacacacacacacacacacacacacacatacacatattggtaatgagatgaattcctttagattaaaaatacaaagacagtcaatttttctagacaaaggttcataatcctgtgatatgttttgcaatattaagtgattcctggtggaaaatatgaaccatgcagtcattcgatttggccagctcttaatcatgcaacaatcttttgcctcaaaaacacataaacaaagctaactggatcaagtctttaacccttaacaatcgaattctaaaacactatttgaaccgtttttgaagaacagctaaataactgtcaaaaacctttttcaaaagacagctagtaatattggatgactttgtagtgtctgaacaggtggttttctcagtagtttttgtggttaacacataaacaaagaggagacatttaaggtgatggagtattatttttaaaaagtgattttgaaccctggctatgtgttggaattccttacacattttaaaaatacatacatatgcttggtgtccaacatagaagattatgatttaatcattgattaaacaaatattcattgagtaccttatgtgtgcctggcactgtcccaagtgctaaatttagtatttttggaataagatctgaaattctggatgattgaaaaaattccagaagtgagagaattcgtgtgaacttacacaagcttattctcttaataaggatcaatttaacactttttaagttttatcattttttctttcttcaagcaactaattttagttgtctctcatttatattcttagaattaaaaataggcccggccaggtggctcacgcctgtaatcccagcactttgggaggccgaggcagtcaaatcacttgaggtcaggagttaagacaccagcctggccaatatgataaaaccctgtctctactaaaaatacaaaaattagccaggcatgatggcaggtgcctgtaatcccagttactcaagggaggctgaggtggaagaatggcttgagcccaggagatggaggttgcagtgagccaagatcgcaccactgcactccaaactgggtgacagagtgagactctgtctcacaaacaaacagacagacaaaaaaagaatttaaaataaatctttgatgcgtttcaattcagctttcctcccaatgtcagaatcttcaccattacattatccacattcttcgagcacccagatagcaacaggtagctcattactctgagggcagtcttctgttccattgtgacataactctagatgataaaaatgttaatcttcatcaagaaatgacttttacttcctaaaataccaagtaagtttattcccctcctataagacaactagcatatattttcacatttctgctgtctgtgtttaagttcaatcaaccccttatcactagctttattcttatttaaaccattcatgagagcattgtaagtgttaaacaatgatgagatattttcaggcttataaaataatgaaatataaaattaattatctacatagataaatagaaattgatgaaaatttctatgtatattattttcagtaactgttaatgtcttcctataacagcaataaatttaaattaaatatttttaaatttatttcagatatgaagatattatataaaactctacaaagtaatatgaatttaaaaaaactagcagcaaaccatattaaccatattgtgtgtttttagagtaaagctataacaaaagtacaggggattaagttgttttattttaatagctgcttttactctggggtggttttagcaatggcgcctttgggcaaccccgctcacatacacagtatccagcctgggtggttaatactagggagctgtgacttaaatggcaggaaaggattcagatgtaaaattgtacttgaatatgcttgaataattttgcacttcttcacttttttctctatgaattattcaatggtcattacttaaatttgtattttaatgtatgataaatgataatatggggggggaaatagagtgaagtaccctgacattctacagatataatatgatatgctatgaaaaacaaaacaaaaagaaaatgtgccatatattttccatgtaccatctttatatgatatacagtgacttcattattagtgagtcaagttgtttaaaggactaccaaaagaagtattgctattttatggtttttatggtgtaaattatttttctgtcttcttgagtcttatgtctaagtctgtcttccttgtccagatgctgtcatatttttccaggaaattatactgaaaacatatttaaaaatttatgcacgatttcatcaacttgtttttcattatattatatttagttcaattttgcaactaacagactctctatcagagtcattaacctgtgaacagtataaagtatttaacatgtaactatagataatttgatccgaaacaataaaaatgaacacttttcaagaatatgga

SEQ ID NO: 138003 - DNA, 3065 bp, Homo sapiens
  Payload ID: 7029
  Gene Symbol: GLRA3
  Gene Name: glycine receptor, alpha 3
  Uniprot ID: O75311
  ENST ID: ENST00000340217
  CDS Start-End: 417-1766
attccggcgggcggcgcttggagcaggtggagaggcgtcctctttccggctgttgctgctcttcttcctccaatcctgggtctcagtcagggaagaacgaacattcttcctttgctgctggagctttagagaactgttgcccagcacctaggcacttcagacatttcatctcactcatttttgtaatttcactgtaaaaatcacctgcacatttataacactgtgactctccacttctgctcaatgctgagaaggggtccgcatactgcggggagctgtctaaggtgctgaagcttcccaagcatcagtctacaccaacaccatgcggggttagattgtacattttcattctgtctttctggttccccatgccttggataagactattttcaggatcgtgaatatctctccgtatcatggcccacgtgagacactttcggacattagtttcgggattttacttctgggaagcagcactgttactcagtttggttgccacaaaggaaacagacagtgcaagatctcgaagtgctccaatgtcaccttctgattttctggataaattaatgggcaggacatcaggatatgatgcaagaatcagacccaattttaaaggccctccagttaatgtcacatgcaacatattcatcaacagctttggctctatcgcagagacgaccatggattacagagtgaatatctttcttcgtcagaaatggaatgatccccgcctcgcgtacagtgaatatcctgacgactctttagacctcgacccctccatgttggactccatttggaaacctgatttgttctttgccaatgaaaagggtgccaactttcatgaagtcactacagacaacaaattgctaagaattttcaaaaatggaaatgttctttattcaataagattaacattaacactttcctgtccaatggatctcaagaattttcccatggatgtacaaacatgtataatgcaactggaaagctttgggtacacaatgaatgatctcatttttgaatggcaagatgaggcacccgtacaagtggcagaaggactcactttgccccagtttctgttgaaagaagaaaaagatttacgatactgcactaaacattacaatacaggaaagtttacgtgtatagaagtgcgattccatctggagcgacaaatgggatactatctgatccagatgtacattcccagtctcctgattgttattctatcctgggtttcattctggatcaacatggatgcagcaccggccagggtagctctggggataaccactgtgctaacgatgactacacagagttcaggatcacgagcttccttgccaaaagtttcatatgtcaaagctattgatatttggatggcagtatgcctcctttttgtgttttcagcacttctggagtatgcagctgtaaattttgtatcaagacaacacaaagaacttctgagatttcgacgaaagagaaagaataaggatgatgaggtaagggaaagccgattcagcttcacagcctatggaatgggaccatgtctacaagcaaaggatggcatgactccaaagggccccaaccaccctgtccaggtaatgccaaaaagtcctgatgaaatgaggaaggtctttatcgaccgggccaagaagattgataccatctcccgagcctgcttcccattagcttttttgatttttaatattttctactgggttatctataaaattcttaggcatgaggatattcatcagcagcaagattaagtctctgggggcatgcaaatgcaaatggtcaattcagaagaaagtgtctctgccataggtgtgtatgtgtatatgtgtgcgtgtggtatacaaatgatgaccattgtattaaaatggcatatggaaaagctttgtattttggttagctatgcaaagtcatgagaaagatgagattcttttaatgaatataaaatatttattaggggattctatttcatattaattccaggtgatttgttttttcacagtaaaccatgtaagtggaagctttactgccaatgtgtttatatgttatataatatctcataatagtagacatgaaaactactttgaaattccttgatttgtaattcaatgctattaaatcatacaaaagcaaattttgcacagtaaaccaatagtttgagatttaaaactattttcttatagtatagttacaaaatgggaaaataattagttacagtgggaaattcactcatattaatggaggattgtacatataaatactatttaaacaacatatgtaattttgaaaatttttaaataagagcattaaaagactttaatgatttggaatactaaatttaattgtttagaatattaagttttcctctgtgcaaatttaaaacaaataacaagagatcgtgttacagtcacaatctacttttcttaaactttgtatctctaggaacgaaggtggaaatacgggaaacaactttgtttttaaataagtattatagctatgtatttttagttattgccaaacattgaacaattcaagccagcacccttgtttttgttagacttttaatagctacttaactgtatgtgattgtgtttaataatttgatataacaggacaaaattcagtaagacttttatattttagtttagaatgtgactttaaaattcaatgggattaaagtatttacattttgataaaaatgaatacaatgaaaacaaaatggattcatggaagattttttaataaaaaccattttcccatcaatgttttatgggtctcaactcctatctccaaatataagtagggaaagttttaattttaaatgatataagtaagtcatttctataaagtgaggactctttttctatttctgaattaatgatttcaaaatctaagccattcgcaagatgtgaataattttaaatgaaatttttacataaaatttttcaatgaccccatgggattacttcaacaaaaacagagcattagtaacttgttttttgcagtgtaattgggtgcaaatgtatgatagagttcttggtaaacagaaccag

SEQ ID NO: 138004 - DNA, 1795 bp, Homo sapiens
  Payload ID: 7030
  Gene Symbol: GLRA4
  Gene Name: glycine receptor, alpha 4
  Uniprot ID: Q5JXX5
  ENST ID: ENST00000372617
  CDS Start-End: 422-1675
gtgcctttaaattactgctttcggagggtgcatctagggggaggtgggaggcaggaaaacatcttcctaccggtctccctcctccctcccctccaagactcttcagggtttggagagtgattgctgcccagagagaatcttttccagctcccagctggcaggctaaggccctccggagcccaaggcgagcccaagcagaagccagtagggttatctgtgtcaggatcatttccaggggaatagttctggcccctggcaggtaaagacaggccagaggagaagaggcagaagaggagagaaagcaggctcttttgcgagcagcccaggttggagaaaggctctgtacttttggcgttcctgcagggatatcccctctcacattggcagccaggctgagaaagggcttcaagatccccgcagaatgacaactcttgttcctgcaaccctctccttccttcttctctggaccctgccagggcaggtcctcctcagggtggccttggcaaaagaggaagtcaaatctggaaccaaggggtcccagcccatgtccccctctgatttcctagacaaacttatggggcgaacatctggatatgatgccaggattcggcccaattttaaaggcccacccgtgaacgtgacctgcaacatcttcatcaacagtttcagctccatcaccaagaccacaatggactaccgggtgaatgtcttcttgcggcaacagtggaatgacccacgcctgtcctaccgagaatatcctgatgactctctggacctcgatccctccatgctggactctatctggaagccagacctcttctttgctaatgagaaaggggccaacttccatgaggtgaccacggacaacaagttactgcgcatcttcaagaatgggaatgtgctgtacagcatcaggctgaccctcattttgtcctgcctgatggacctcaagaacttccccatggacatccagacctgcacgatgcagcttgagagctttggctacaccatgaaagacctcgtgtttgagtggctggaagatgctcctgctgtccaagtggctgaggggctgactctgccccagtttatcttgcgggatgagaaggatctaggctgttgtaccaagcactacaacacagggaaattcacctgcatcgaggtaaagtttcacctggaacggcagatgggctactatctgattcagatgtacatccccagcctactcatcgtcatcctgtcctgggtctccttctggatcaacatggatgctgcccctgcccgtgtgggcctgggcatcaccaccgtgctcaccatgaccacccagagctctggctcccgggcctctttgcctaaggtgtcctacgtgaaggcaatcgacatctggatggctgtgtgtctgctctttgtgttcgctgccttgctggagtatgctgccataaattttgtttctcgtcagcataaagaattcatacgacttcgaagaaggcagaggcgccaacgcttggaggaagatatcatccaagaaagtcgtttctatttccgtggctatggcttgggccactgcctgcaggcaagagatggaggtccaatggaaggttctggcatttatagtccccaacctccagcccctcttctaagggaaggagaaaccacgcggaaactctacgtggactgagccaagagaattgacaccatctcccgggctgtcttccctttcactttcctcatcttcaatatcttctactgggttgtctataaagtgctatggtcagaagatatccaccaggctctgtga

SEQ ID NO: 138005 - DNA, 1812 bp, Homo sapiens
  Payload ID: 7030
  Gene Symbol: GLRA4
  Gene Name: glycine receptor, alpha 4
  ENST ID: ENST00000436213
  CDS Start-End: 453-587
gctctgaaccccactccagctgctgccgactgtgcctttaaattactgctttcggagggtgcatctagggggaggtgggaggcaggaaaacatcttcctaccggtctccctcctccctcccctccaagactcttcagggtttggagagtgattgctgcccagagagaatcttttccagctcccagctggcaggctaaggccctccggagcccaaggcgagcccaagcagaagccagtagggttatctgtgtcaggatcatttccaggggaatagttctggcccctggcaggtaaagacaggccagaggagaagaggcagaagaggagagaaagcaggctcttttgcgagcagcccaggttggagaaaggctctgtacttttggcgttcctgcagggatatcccctctcacattggcagccaggctgagaaagggcttcaagatccccgcagaatgacaactcttgttcctgcaaccctctccttccttcttctctggaccctgccagggcaggtcctcctcagcaggcaggtggcaggtggccagaagcagcagcagcacctggctagcgtggacatcctgtggtgaagtcacagacttctgcttgctccagcaccaccaccagcctccttggattttcagagcctgcctctgtccccaggggtggccttggcaaaagaggaagtcaaatctggaaccaaggggtcccagcccatgtccccctctgatttcctagacaaacttatggggcgaacatctggatatgatgccaggattcggcccaattttaaaggcccacccgtgaacgtgacctgcaacatcttcatcaacagtttcagctccatcaccaagaccacaatggactaccgggtgaatgtcttcttgcggcaacagtggaatgacccacgcctgtcctaccgagaatatcctgatgactctctggacctcgatccctccatgctggactctatctggaagccagacctcttctttgctaatgagaaaggggccaacttccatgaggtgaccacggacaacaagttactgcgcatcttcaagaatgggaatgtgctgtacagcatcaggtgcaccgggtggatagccaggagagtttgcgttaaggggaagaatttggatgaagactgaggggtgggaggagggttcccttgcactgtgatgggccccagtaagccgatgtcacttctttcttactgtccccactaggctgaccctcattttgtcctgcctgatggacctcaagaacttccccatggacatccagacctgcacgatgcagcttgagagctttggctacaccatgaaagacctcgtgtttgagtggctggaagatgctcctgctgtccaagtggctgaggggctgactctgccccagtttatcttgcgggatgagaaggatctaggctgttgtaccaagcactacaacacaggtgtcctacgtgaaggcaatcgacatctggatggctgtgtgtctgctctttgtgttcgctgccttgctggagtatgctgccataaattttgtttctcgtcagcataaagaattcatacgacttcgaagaaggcagaggcgccaacgcttggaggaagatatcatccaagaaagtcgtttctatttccgtggctatggcttgggccactgcctgcaggcaagagatggaggtccaatggaaggttctggcatttatagtccccaacctccagcccctcttctaagggaaggagaaaccacgcggaaactctacgtggactgagccaagagaattgacaccatctcccgggctgtcttccctttcac

SEQ ID NO: 138006 - DNA, 3126 bp, Homo sapiens
  Payload ID: 7031
  Gene Symbol: GLRB
  Gene Name: glycine receptor, beta
  Uniprot ID: P48167
  ENST ID: ENST00000264428
  CDS Start-End: 271-1764
ccgcccgcggtcgccaggttcccccgcggcccgcgctgtccccgctgcggccccgaccgcggcgcgccacggcgcaggctccgcggcccgagcaggcgcgtcagccgagctcggcggtggcgcgggcggctgggacgcagctgcccccgctcggcgcccgctgcacccttagcagccactgccacctgggcccggagcctccacgatctcgcccggcgattgtgggcaggggcgcctccggatcgatcttctgaaattcaagttttcaagatgaagtttttattgacaactgcctttttaattttaatttccttgtgggtggaagaagcctattctaaggaaaagtcttcaaagaaagggaaggggaaaaagaagcagtatctatgcccatctcagcagtcagcagaggaccttgcccgagtacctgccaactccactagcaatatcttgaacaggttattggtcagttatgatcccaggataagaccaaacttcaaaggcattcctgttgatgtagtagtcaacatttttattaacagttttggatccattcaagaaacaacaatggactatagagttaacatcttcctgagacaaaaatggaatgaccccaggctgaagctccccagtgattttaggggttcagatgcactgacagtggatccaacaatgtacaagtgtttatggaaacctgatttattttttgcaaatgaaaaaagtgccaattttcatgatgtgacccaggaaaacatcctcctctttatttttcgtgatggagatgtccttgtcagcatgaggttatctattactctttcatgccctttggacttgacattgtttcccatggatacacaacgttgcaagatgcaactggagagctttggttacacaactgatgatttacgatttatctggcagtcaggagatcctgtgcaattagaaaaaattgccttgcctcaatttgatatcaaaaaggaagatattgaatatggtaactgtacaaaatactataaaggcacgggctactacacatgcgtggaagtcatcttcaccctgaggaggcaggtcggcttttacatgatgggggtctacgccccaactctgctcattgttgttctctcctggctttccttctggatcaacccggacgcgagtgctgccagagtgcccctgggtatcttctcagtcctcagcttggcctctgagtgcacaacccttgccgctgagcttcccaaagtttcctatgtgaaggctcttgatgtttggcttattgcttgccttctctttgggtttgcttccctggtggagtatgcagttgtccaggtgatgctgaacaaccccaaaagggttgaagctgaaaaagccagaattgctaaggctgagcaagcagatggaaaaggtggaaatgtggctaaaaagaatactgtgaatggaacagggactcctgttcatattagcactttgcaggttggtgagaccagatgcaaaaaagtttgtacttctaagtctgatctgagatctaatgacttcagcattgttggaagcttaccaagagattttgaactatccaattatgactgctatggaaaacccattgaagttaacaacggacttgggaaatctcaggctaagaacaacaagaagcctccccctgcgaaacctgttattccaacagcagcaaagcgaattgatctttatgcaagagcattgtttcctttctgcttcttgttcttcaatgttatatattggtctatatatttatgataaatcttttccatttgtacaaaataaaattccatttcattgtgacctactcctttcataaatgccaatctgtgagaacttttgaattttcatagcaacattgcattttggatgccatttgattgtaataaaactgtggcaccttaattttgaatggcagcatgatcatgtaatatctgtgctctaataacgatgtatatatgtatagtgaacatattgcttagtaacaaatgaaggacaagcatactacataatataatccatacaattctcttcagttagtgtaaactgcaaatactacagataattctgataataaaatgatatgcacgctgaatcctgctatggtcaccattctaatgtatgtagtatttcaaatttccttccttgtaactttcaaagaaagccatcttattcttgtaaaattttagatggtattatcacagatttaaaaaggttgtattacatattgtttaaactttgtaagtagaaatatatctgttataattatacaggctctgtggagaaataaagttcaaaatatattaatttgtaaaatcagctcgttttaaagtgtgcttgtgttgtcaaaaatatcagatagtaatacacagtgagcatttttaaacaaagggaaacctatatttatgtaactgtatactgaattctgacaaaataaaaaaagataccttattgacgaaatatttaggataaacaaaattctatttaatccaccttaaaacctaaatgtattttcatggatttcatttgttggtacatattacacaaaacattgtgccttaaaatgagtcatacatcttttaaattggaatgcagtaatagatatgtgattttacatcatttttaagaaaccaaggggaagtaataagttgaaaaagaaatccataactattaaaagattttaacttttttattttattaaaatgcttgcatattttaagtaaaattaaaaatgtttactgaatttatttttttatttgaatattttgggattagttacaaaatatttagagattaaataaataatagctttgtttgtgttagacttcacttctacttgtattttctttcttgttaaaagtctagacaactgagatttacttactttgaacttgttccaatccaaaagtaagcactaagtctcattttatgagaccaccatttcttaatatcacatccagtgcacctttgtctttctgccatatctgaaataaaactatcagtaattcacatagataaacataagactaaagaagtatatttacattatctggagagttttgttgcagctacgagtttgtatggcaaattcaataataaagtattgtttatgcaaattgc

SEQ ID NO: 138007 - DNA, 574 bp, Homo sapiens
  Payload ID: 7031
  Gene Symbol: GLRB
  Gene Name: glycine receptor, beta
  ENST ID: ENST00000515642
  CDS Start-End: 162-302
ctcggcggtggcgcgggcggctgggacgcagctgcccccgctcggcgcccgctgcacccttagcagccactgccacctgggcccggagcctccacgatctcgcccggcgattgtgggcaggggcgcctccggatcgatcttctgaaattcaagttttcaagatgaagtttttattgacaactgcctttttaattttaatttccttgtgggtggaagaagcctattctaaggaaaagtcttcaaagaaagggaaggggaaaaagaagcagtatctatgcccatcagagagattgtaccattgaatgacagcattttcatacttcagtctgtatgtactaagaaggaatgcaatggcttcagcagtcagcagaggaccttgcccgagtacctgccaactccactagcaatatcttgaacaggttattggtcagttatgatcccaggataagaccaaacttcaaaggcattcctgttgatgtagtagtcaacatttttattaacagttttggatccattcaagaaacaacaatggactatagagttaacatcttcctgagacaaaaatggaatgacc

SEQ ID NO: 138008 - DNA, 858 bp, Homo sapiens
  Payload ID: 7031
  Gene Symbol: GLRB
  Gene Name: glycine receptor, beta
  ENST ID: ENST00000506411
  CDS Start-End: 124-264
cgctcggcgcccgctgcacccttagcagccactgccacctgggcccggagcctccacgatctcgcccggcgattgtgggcaggggcgcctccggatcgatcttctgaaattcaagttttcaagatgaagtttttattgacaactgcctttttaattttaatttccttgtgggtggaagaagcctattctaaggaaaagtcttcaaagaaagggaaggggaaaaagaagcagtatctatgcccatcagagagattgtaccattgaatgacagcattttcatacttcagtctgtatgtactaagaaggtcagcagtcagcagaggaccttgcccgagtacctgccaactccactagcaatatcttgaacaggttattggtcagttatgatcccaggataagaccaaacttcaaaggcattcctgttgatgtagtagtcaacatttttattaacagttttggatccattcaagaaacaacaatggactatagagttaacatcttcctgagacaaaaatggaatgaccccaggctgaagctccccagtgattttaggggttcagatgcactgacagtggatccaacaatgtacaagtgtttatggaaacctgatttattttttgcaaatgaaaaaagtgccaattttcatgatgtgacccaggaaaacatcctcctctttatttttcgtgatggagatgtccttgtcagcatgaggttatctattactctttcatgccctttggacttgacattgtttcccatggatacacaacgttgcaagatgcaactggagagctttggttacacaactgatgatttacgatttatctggcagtcaggagatcctgtgcaattagaaaa

SEQ ID NO: 138009 - DNA, 728 bp, Homo sapiens
  Payload ID: 7031
  Gene Symbol: GLRB
  Gene Name: glycine receptor, beta
  ENST ID: ENST00000512619
  CDS Start-End: 133-303
agctgcccccgctcggcgcccgctgcacccttagcagccactgccacctgggcccggagcctccacgatctcgcccggcgattgtgggcaggggcgcctccggatcgatcttctgaaattcaagttttcaagatgaagtttttattgacaactgcctttttaattttaatttccttgtgggtggaagaagcctattctaaggaaaagtcttcaaagaaagggaaggggaaaaagaagcagtatctatgcccatcgttggtgagaccagatgcaaaaaagtttgtacttctaagtctgatctgagatctaatgacttcagcattgttggaagcttaccaagagattttgaactatccaattatgactgctatggaaaacccattgaagttaacaacggacttgggaaatctcaggctaagaacaacaagaagcctccccctgcgaaacctgttattccaacagcagcaaagcgaattgatctttatgcaagagcattgtttcctttctgcttcttgttcttcaatgttatatattggtctatatatttatgataaatcttttccatttgtacaaaataaaattccatttcattgtgacctactcctttcataaatgccaatctgtgagaacttttgaattttcatagcaacattgcattttggatgccatttgattgtaataaaactgtggcaccttaattttgaatggcagcatgatcatgtaatatc

SEQ ID NO: 138010 - DNA, 1757 bp, Homo sapiens
  Payload ID: 7031
  Gene Symbol: GLRB
  Gene Name: glycine receptor, beta
  Uniprot ID: P48167
  ENST ID: ENST00000509282
  CDS Start-End: 186-1679
ggggcggcggagcgcgaggagcactgcggcgtgcccgggaggacgcgcgctgccctgcgcgggagaggggcgcggggcgcctggcagcggcagccgggtccccgctgcggtggcgcccgcggagacgctccgggtggagagatgcagagggccgggatcgatcttctgaaattcaagttttcaagatgaagtttttattgacaactgcctttttaattttaatttccttgtgggtggaagaagcctattctaaggaaaagtcttcaaagaaagggaaggggaaaaagaagcagtatctatgcccatctcagcagtcagcagaggaccttgcccgagtacctgccaactccactagcaatatcttgaacaggttattggtcagttatgatcccaggataagaccaaacttcaaaggcattcctgttgatgtagtagtcaacatttttattaacagttttggatccattcaagaaacaacaatggactatagagttaacatcttcctgagacaaaaatggaatgaccccaggctgaagctccccagtgattttaggggttcagatgcactgacagtggatccaacaatgtacaagtgtttatggaaacctgatttattttttgcaaatgaaaaaagtgccaattttcatgatgtgacccaggaaaacatcctcctctttatttttcgtgatggagatgtccttgtcagcatgaggttatctattactctttcatgccctttggacttgacattgtttcccatggatacacaacgttgcaagatgcaactggagagctttggttacacaactgatgatttacgatttatctggcagtcaggagatcctgtgcaattagaaaaaattgccttgcctcaatttgatatcaaaaaggaagatattgaatatggtaactgtacaaaatactataaaggcacgggctactacacatgcgtggaagtcatcttcaccctgaggaggcaggtcggcttttacatgatgggggtctacgccccaactctgctcattgttgttctctcctggctttccttctggatcaacccggacgcgagtgctgccagagtgcccctgggtatcttctcagtcctcagcttggcctctgagtgcacaacccttgccgctgagcttcccaaagtttcctatgtgaaggctcttgatgtttggcttattgcttgccttctctttgggtttgcttccctggtggagtatgcagttgtccaggtgatgctgaacaaccccaaaagggttgaagctgaaaaagccagaattgctaaggctgagcaagcagatggaaaaggtggaaatgtggctaaaaagaatactgtgaatggaacagggactcctgttcatattagcactttgcaggttggtgagaccagatgcaaaaaagtttgtacttctaagtctgatctgagatctaatgacttcagcattgttggaagcttaccaagagattttgaactatccaattatgactgctatggaaaacccattgaagttaacaacggacttgggaaatctcaggctaagaacaacaagaagcctccccctgcgaaacctgttattccaacagcagcaaagcgaattgatctttatgcaagagcattgtttcctttctgcttcttgttcttcaatgttatatattggtctatatatttatgataaatcttttccatttgtacaaaataaaattccatttcattgtgacctactcctttcataaatgccaatctgtgagaa

SEQ ID NO: 138011 - DNA, 2765 bp, Homo sapiens
  Payload ID: 7031
  Gene Symbol: GLRB
  Gene Name: glycine receptor, beta
  Uniprot ID: P48167
  ENST ID: ENST00000541722
  CDS Start-End: 203-1114
acggcgcaggctccgcggcccgagcaggcgcgtcagccgagctcggcggtggcgcgggcggctgggacgcagctgcccccgctcggcgcccgctgcacccttagcagccactgccacctgggcccggagcctccacgatctcgcccggcgattgtgggcaggggcgcctccggatcgatcttctgaaattcaagttttcaagatgaagtttttattgacaactgcctttttaattttaatttccttgtgggtggaagaagcctattctaaggaaaagtcttcaaagaaagggaaggggaaaaagaagcagtatctatgcccatctcagcagtcagcagaggaccttgcccgagtacctgccaactccactagcaatatcttgaacaggttattggtcagttatgatcccaggataagaccaaacttcaaaggcattcctgttgatgtagtagtcaacatttttattaacagttttggatccattcaagaaacaacaatggactatagagttaacatcttcctgagacaaaaatggaatgaccccaggctgaagctccccagtgattttaggggttcagatgcactgacagtggatccaacaatgtacaagtgtttatggaaacctgatttattttttgcaaatgaaaaaagtgccaattttcatgatgtgacccaggaaaacatcctcctctttatttttcgtgatggagatgtccttgtcagcatgaggttatctattactctttcatgccctttggacttgacattgtttcccatggatacacaacgttgcaagatgcaactggagagctttggttacacaactgatgatttacgatttatctggcagtcaggagatcctgtgcaattagaaaaaattgccttgcctcaatttgatatcaaaaaggaagatattgaatatggtaactgtacaaaatactataaaggcacgggctactacacatgcgtggaagtcatcttcaccctgaggaggcaggtcggcttttacatgatgggggtctacgccccaactctgctcattgttgttctctcctggctttccttctggatcaacccggacgcgagtgctgccagagtgcccctgggttggtgagaccagatgcaaaaaagtttgtacttctaagtctgatctgagatctaatgacttcagcattgttggaagcttaccaagagattttgaactatccaattatgactgctatggaaaacccattgaagttaacaacggacttgggaaatctcaggctaagaacaacaagaagcctccccctgcgaaacctgttattccaacagcagcaaagcgaattgatctttatgcaagagcattgtttcctttctgcttcttgttcttcaatgttatatattggtctatatatttatgataaatcttttccatttgtacaaaataaaattccatttcattgtgacctactcctttcataaatgccaatctgtgagaacttttgaattttcatagcaacattgcattttggatgccatttgattgtaataaaactgtggcaccttaattttgaatggcagcatgatcatgtaatatctgtgctctaataacgatgtatatatgtatagtgaacatattgcttagtaacaaatgaaggacaagcatactacataatataatccatacaattctcttcagttagtgtaaactgcaaatactacagataattctgataataaaatgatatgcacgctgaatcctgctatggtcaccattctaatgtatgtagtatttcaaatttccttccttgtaactttcaaagaaagccatcttattcttgtaaaattttagatggtattatcacagatttaaaaaggttgtattacatattgtttaaactttgtaagtagaaatatatctgttataattatacaggctctgtggagaaataaagttcaaaatatattaatttgtaaaatcagctcgttttaaagtgtgcttgtgttgtcaaaaatatcagatagtaatacacagtgagcatttttaaacaaagggaaacctatatttatgtaactgtatactgaattctgacaaaataaaaaaagataccttattgacgaaatatttaggataaacaaaattctatttaatccaccttaaaacctaaatgtattttcatggatttcatttgttggtacatattacacaaaacattgtgccttaaaatgagtcatacatcttttaaattggaatgcagtaatagatatgtgattttacatcatttttaagaaaccaaggggaagtaataagttgaaaaagaaatccataactattaaaagattttaacttttttattttattaaaatgcttgcatattttaagtaaaattaaaaatgtttactgaatttatttttttatttgaatattttgggattagttacaaaatatttagagattaaataaataatagctttgtttgtgttagacttcacttctacttgtattttctttcttgttaaaagtctagacaactgagatttacttactttgaacttgttccaatccaaaagtaagcactaagtctcattttatgagaccaccatttcttaatatcacatccagtgcacctttgtctttctgccatatctgaaataaaactatcagtaattcacatagataaacataagactaaagaagtatatttacattatctggagagttttgttgcagctacgagtttgtatggcaaattcaataataaagtattgtttatgcaaattgc

SEQ ID NO: 138012 - DNA, 1150 bp, Homo sapiens
  Payload ID: 7032
  Gene Symbol: GLYAT
  Gene Name: glycine-N-acyltransferase
  Uniprot ID: Q6IB77
  ENST ID: ENST00000278400
  CDS Start-End: 156-647
agaaatttctggaggtggtgtatcaaaatttactctgcgagactctgctgaactggctgcatcagggagaaatttcatctcccagaagggtgttgctcatcgtttcttcccggaaacatctgcagagactagcttttcaggctaaggtatcctccatgatgttaccattgcaaggtgcccagatgctgcagatgctggagaaatccttgaggaagagcctcccagcatccttaaaggtttatggaactgtctttcacataaaccatggaaatccattcaatctgaaggctgtggtggacaagtggcctgattttaatacagtggttgtctgccctcaggagcaggatatgacagatgaccttgatcactataccaatacttaccaaatctactccaaagatccccaaaactgtcaggaattccttggatcaccagaactcatcaactggaaacagcatttacagattcaaagttcacagcctagcctgaatgaggctatacaaaatcttgcagccattaagtccttcaaagtcaaacaaacacaacgcattctctatatggcagctgaaacagccaaggaactgactcctttcctgctgaaatcaaagattttatctcccaatggtggcaaacccaaggccatgtgagtttgataaaatccagtctataccactcacacctctcaagtaacctcccaacttctctccctgcattcactctggctttcctacaatcaatgttgtacaaagaaatcagaattacatttttaaaaaatgtaactcagaacatgtttctctcctgcttaaaagactccaccatctcccttctcatctagaataaaccaggcctctggctaccacttggacctttattgcccttcctgctttcttcctccaacagctctgaccttcactctgttcctctttcatcacaagctcatctatattccaggacttcacatttgttatttcttctgtctactctgtctctcaagacaatagaggtcacagcaaatacaaacctttatactaatggattttgttttcttcttggaccctccatagcaaccaagagatgtttaaactctcatccatggatgttacccatgctcacttggtgaataaattctggcattttggtggtaatgaga

SEQ ID NO: 138013 - DNA, 1735 bp, Homo sapiens
  Payload ID: 7032
  Gene Symbol: GLYAT
  Gene Name: glycine-N-acyltransferase
  Uniprot ID: Q6IB77
  ENST ID: ENST00000344743
  CDS Start-End: 143-1033
ggtggtgtatcaaaatttactctgcgagactctgctgaactggctgcatcagggagaaatttcatctcccagaagggtgttgctcatcgtttcttcccggaaacatctgcagagactagcttttcaggctaaggtatcctccatgatgttaccattgcaaggtgcccagatgctgcagatgctggagaaatccttgaggaagagcctcccagcatccttaaaggtttatggaactgtctttcacataaaccatggaaatccattcaatctgaaggctgtggtggacaagtggcctgattttaatacagtggttgtctgccctcaggagcaggatatgacagatgaccttgatcactataccaatacttaccaaatctactccaaagatccccaaaactgtcaggaattccttggatcaccagaactcatcaactggaaacagcatttacagattcaaagttcacagcctagcctgaatgaggctatacaaaatcttgcagccattaagtccttcaaagtcaaacaaacacaacgcattctctatatggcagctgaaacagccaaggaactgactcctttcctgctgaaatcaaagattttatctcccaatggtggcaaacccaaggccatcaaccaagagatgtttaaactctcatccatggatgttacccatgctcacttggtgaataaattctggcattttggtggtaatgagaggagccagagattcattgagcgctgcattcagacctttcccacctgctgtctcctggggcctgaggggacccctgtgtgctgggatctaatggaccagactggagagatgagaatggcaggcaccttgccggaataccggctccatggccttgtgacgtatgtcatctattcccacgcccagaaattgggcaaacttgggtttcctgtctattctcatgtagactacagcaatgaagctatgcaaaaaatgagttacacactgcaacatgttcccattcccagaagctggaaccagtggaactgtgtacctctgtgatgccaatcctgaacataagacagtgttgggcaggtctgggcgtataatttgaggagtggatggtggatgaaaagaaataataaattgtaatcagcagtaaaggagtgggcactgtttggactctggggaagcagtgtgatgttcaacagcatcgccatggtccctgcattcacaggtttctcagtgggaagcaggcccaggtcctcttacatttgacataagcaatttacctccccacatttccaggacctctatgacacttcatcagatacatattgctccaaattacttctcctggaatccctggttcctcagttgcaagacccttgccagtttttctgggagctaggaagaggtgaattaaattttctgagcactatgacttctttctttctaaagcctttcccttatgatcaacaagtggactctcctcagcaggtctttagagattatcctctcctgttattgctactttataggtacattaaatatactggacacaaatatatatgggatattaggctaaatacagtatacatgatatagcagggaatgttactagaagaaatatcaactgatgatatcctatcctctccaagctcctattccaggaaaaaagatccaatgttttttctaaagatgagcttccaaaacccacaactcctaaataatacagaaagttttgtgtttgactgtatacaa

SEQ ID NO: 138014 - DNA, 1070 bp, Homo sapiens
  Payload ID: 7032
  Gene Symbol: GLYAT
  Gene Name: glycine-N-acyltransferase
  Uniprot ID: Q6IB77
  ENST ID: ENST00000529732
  CDS Start-End: 82-972
cagtgacagtccttgtgctctggttagattccatatccctgaacttcaacctgaaaacttccatcagctaaggtatcctccatgatgttaccattgcaaggtgcccagatgctgcagatgctggagaaatccttgaggaagagcctcccagcatccttaaaggtttatggaactgtctttcacataaaccatggaaatccattcaatctgaaggctgtggtggacaagtggcctgattttaatacagtggttgtctgccctcaggagcaggatatgacagatgaccttgatcactataccaatacttaccaaatctactccaaagatccccaaaactgtcaggaattccttggatcaccagaactcatcaactggaaacagcatttacagattcaaagttcacagcctagcctgaatgaggctatacaaaatcttgcagccattaagtccttcaaagtcaaacaaacacaacgcattctctatatggcagctgaaacagccaaggaactgactcctttcctgctgaaatcaaagattttatctcccaatggtggcaaacccaaggccatcaaccaagagatgtttaaactctcatccatggatgttacccatgctcacttggtgaataaattctggcattttggtggtaatgagaggagccagagattcattgagcgctgcattcagacctttcccacctgctgtctcctggggcctgaggggacccctgtgtgctgggatctaatggaccagactggagagatgagaatggcaggcaccttgccggaataccggctccatggccttgtgacgtatgtcatctattcccacgcccagaaattgggcaaacttgggtttcctgtctattctcatgtagactacagcaatgaagctatgcaaaaaatgagttacacactgcaacatgttcccattcccagaagctggaaccagtggaactgtgtacctctgtgatgccaatcctgaacataagacagtgttgggcaggtctgggcgtataatttgaggagtggatggtggatgaaaagaaataataaattgtaatcagcagt

SEQ ID NO: 138015 - DNA, 482 bp, Homo sapiens
  Payload ID: 7032
  Gene Symbol: GLYAT
  Gene Name: glycine-N-acyltransferase
  ENST ID: ENST00000586098
  CDS Start-End: 1-215
accaaatctactccaaagatccccaaaactgtcaggaattccttggatcaccagaactcatcaactggaaacagcatttacagattcaaagcttaattgggagccaatgctataaacaacgagccactgcaggtttttgtctcagagtttgccatgatcccagctgtccttcaggagatgggaatacttgttggaaggttgcagaaattacctagagaacatataacgatggaagtcacacttcttttctaaggtcacatgaggacttggcatctgactctgaagactgtcttgcctgcatcgtccttacactgcctctgaacaattgggggatgtgagtactgggcaccaaatgatgcctcctaatctcccagctcagcaaatgctgcccagggctgaaaacaaaacatcctcagagagttttccttgccctcctcctgttggtatcttgtccttgtcagcaaatgattcaccaccattca

SEQ ID NO: 138016 - DNA, 1899 bp, Homo sapiens
  Payload ID: 7032
  Gene Symbol: GLYAT
  Gene Name: glycine-N-acyltransferase
  Uniprot ID: Q6IB77
  ENST ID: ENST00000611865
  CDS Start-End: 1-891
atgatgttaccattgcaaggtgcccagatgctgcagatgctggagaaatccttgaggaagagcctcccagcatccttaaaggtttatggaactgtctttcacataaaccatggaaatccattcaatctgaaggctgtggtggacaagtggcctgattttaatacagtggttgtctgccctcaggagcaggatatgacagatgaccttgatcactataccaatacttaccaaatctactccaaagatccccaaaactgtcaggaattccttggatcaccagaactcatcaactggaaacagcatttacagattcaaagttcacagcctagcctgaatgaggctatacaaaatcttgcagccattaagtccttcaaagtcaaacaaacacaacgcattctctatatggcagctgaaacagccaaggaactgactcctttcctgctgaaatcaaagattttatctcccaatggtggcaaacccaaggccatcaaccaagagatgtttaaactctcatccatggatgttacccatgctcacttggtgaataaattctggcattttggtggtaatgagaggagccagagattcattgagcgctgcattcagacctttcccacctgctgtctcctggggcctgaggggacccctgtgtgctgggatctaatggaccagactggagagatgagaatggcaggcaccttgccggaataccggctccatggccttgtgacgtatgtcatctattcccacgcccagaaattgggcaaacttgggtttcctgtctattctcatgtagactacagcaatgaagctatgcaaaaaatgagttacacactgcaacatgttcccattcccagaagctggaaccagtggaactgtgtacctctgtgatgccaatcctgaacataagacagtgttgggcaggtctgggcgtataatttgaggagtggatggtggatgaaaagaaataataaattgtaatcagcagtaaaggagtgggcactgtttggactctggggaagcagtgtgatgttcaacagcatcgccatggtccctgcattcacaggtttctcagtgggaagcaggcccaggtcctcttacatttgacataagcaatttacctccccacatttccaggacctctatgacacttcatcagatacatattgctccaaattacttctcctggaatccctggttcctcagttgcaagacccttgccagtttttctgggagctaggaagaggtgaattaaattttctgagcactatgacttctttctttctaaagcctttcccttatgatcaacaagtggactctcctcagcaggtctttagagattatcctctcctgttattgctactttataggtacattaaatatactggacacaaatatatatgggatattaggctaaatacagtatacatgatatagcagggaatgttactagaagaaatatcaactgatgatatcctatcctctccaagctcctattccaggaaaaaagatccaatgttttttctaaagatgagcttccaaaacccacaactcctaaataatacagaaagttttgtgtttgactgtatacaatttttattgtgtttgttcaagctaagtggttcatcatggtgacagcatgaaaggaatgagtgtatgaaaaggtgaaggtgggagcaccttgacccagggatgtgatggtttattgaggagagataggagttgaagggagaggagacagcatgaacacctgcttgtccaattagcctcagcacattactaatctcagtttgttcctgctgtaacaaaatacctgagactgggtaattcataaataacagtctgaacttatttgtttatttaaaataataataaaataattaaaaatttatttatcac

SEQ ID NO: 138017 - DNA, 2068 bp, Homo sapiens
  Payload ID: 7033
  Gene Symbol: GLYATL1
  Gene Name: glycine-N-acyltransferase-like 1
  Uniprot ID: Q969I3
  ENST ID: ENST00000300079
  CDS Start-End: 51-1052
agtgttggccaatcccagcagccatacttcaactactcatagactgctgaatgttcaaactgtgttcaaataagatggtgtcacaagaaggatctgaagtggagcttctagtatccccaggagcgcgaagtgaacacggaaggtacctgcaggatccaattgtgtccattgatctctcagagtggctgaggataatagagtttcttcttcaaggtctcaaggtgtatggctctgtgtatcacatcaatcacgggaaccccttcaacatggaggtgctggtggattcctggcctgaatatcagatggttattatccggcctcaaaagcaggagatgactgatgacatggattcatacacaaacgtatatcgtatgttctccaaagagcctcaaaaatcagaagaagttttgaaaaattgtgagatcgtaaactggaaacagagactccaaatccaaggtcttcaagaaagtttaggtgaggggataagagtggctacattttcaaagtcagtgaaagtagagcattcgagagcactcctcttggttacggaagatattctgaagctcaatgcctccagtaaaagcaagcttggaagctgggctgagacaggccacccagatgatgaatttgaaagtgaaactcccaactttaagtatgcccagctggatgtctcttattctgggctggtaaatgacaactggaagcgagggaagaatgagaggagcctgcattacatcaagcgctgcatagaagacctgccagcagcctgtatgctcggcccagagggagtcccggtctcatgggtaaccatggacccttcttgtgaagtaggaatggcctacagcatggaaaaataccgaaggacaggcaacatggcacgagtgatggtgcgatacatgaaatatctgcgtcagaagaatattccattttacatctctgtgttggaagaaaatgaagactcccgcagatttgtggggcagtttggtttctttgaggcctcctgtgagtggcaccaatggacttgctacccacagaatctagttccattttagacaatgaagctgcttagtaatctctgccaagccatctcttaatattaaagcagacaccacagaatagatttcttcacttacaaatgcatattgggcacttataatacagcaggaactcttctcacctggagccttgatgttaaaagacacagccatgctcttgaggagcttacaatcctggctggaggcaggggagggtatattctttaaatatgcttaagtgttatagggaaagacggggttaccagtaaacatgtaactagaaagccaggctcagttcttacctctgggaatcagaactctttatgcaacttggttaatagaatctactatctggaagataaatgaaggattttaataaaattttcaatagaataaacctaatctgtatggatactttatcaaaaatgaatgtccctgctatttctggatttatgaggcaatggtacactaaagaatggaatcagttcagtgagtagaaaggtatccaaggtgaagcctgagacgaatggctttcccaggctaccttccatcactgttgtacagaaaagaaatccagagaatcaaatggactggccttgggggtctctgctatggaaatgccattttttgtgtctcctttctcctactctttctcacatcctcttcatgattgaagcatggcacaaggcaaggtgttgcctgcgagtctggttgtaagttcagcctttggtgtttgcactactgctatcataaggggtcagggacattccggggagaagtgaccactaaggtgaggattagagagtgagtagaagtgagccagacaaaaaaagcagaaaatgcagatgatggaaaggacatgtgccatgcactatcataagaacttcctaactgaacactgatactacaattctgaatccctgatcttaaaaaataattatacttcaccaacaaaacttggcctcttttggttccactctgccaccctgccattggaacttggattactgtgaacattgcagctatagcaaaat

SEQ ID NO: 138018 - DNA, 1627 bp, Homo sapiens
  Payload ID: 7033
  Gene Symbol: GLYATL1
  Gene Name: glycine-N-acyltransferase-like 1
  Uniprot ID: Q969I3
  ENST ID: ENST00000317391
  CDS Start-End: 341-1249
gatcgctttgccaattttgcgttactgggcaggctaagagatcttcttttaattcagcctgcttaagacgggaactgataactgtagtgtatcctctgccttttttcttatctattggaggaagctcaggtgaagaaatggagttgccatcaactaagttgagaaagactacagatggtgtcacaagaaggatctgaagtggagcttctagtatccccaggagcgcgaagtgaacacggaaggtacctgcaggatccaattgtgtccattgatctctcagagtggctgaggataatagagtttcttcttcaaggtctcaaggtctgaagcatcccacagaatgatcctactgaataactcccataagctgctggccctatacaaatccttggccaggagcatccctgagtccctgaaggtgtatggctctgtgtatcacatcaatcacgggaaccccttcaacatggaggtgctggtggattcctggcctgaatatcagatggttattatccggcctcaaaagcaggagatgactgatgacatggattcatacacaaacgtatatcgtatgttctccaaagagcctcaaaaatcagaagaagttttgaaaaattgtgagatcgtaaactggaaacagagactccaaatccaaggtcttcaagaaagtttaggtgaggggataagagtggctacattttcaaagtcagtgaaagtagagcattcgagagcactcctcttggttacggaagatattctgaagctcaatgcctccagtaaaagcaagcttggaagctgggctgagacaggccacccagatgatgaatttgaaagtgaaactcccaactttaagtatgcccagctggatgtctcttattctgggctggtaaatgacaactggaagcgagggaagaatgagaggagcctgcattacatcaagcgctgcatagaagacctgccagcagcctgtatgctcggcccagagggagtcccggtctcatgggtaaccatggacccttcttgtgaagtaggaatggcctacagcatggaaaaataccgaaggacaggcaacatggcacgagtgatggtgcgatacatgaaatatctgcgtcagaagaatattccattttacatctctgtgttggaagaaaatgaagactcccgcagatttgtggggcagtttggtttctttgaggcctcctgtgagtggcaccaatggacttgctacccacagaatctagttccattttagacaatgaagctgcttagtaatctctgccaagccatctcttaatattaaagcagacaccacagaatagatttcttcacttacaaatgcatattgggcacttataatacagcaggaactcttctcacctggagccttgatgttaaaagacacagccatgctcttgaggagcttacaatcctggctggaggcaggggagggtatattctttaaatatgcttaagtgttatagggaaagacggggttaccagtaaacatgtaactagaaagccaggctcagttcttacctctgggaatcagaactctttatgcaacttggttaatagaatctactatctggaagataaatgaaggattttaataaaattttcaatagaataa

SEQ ID NO: 138019 - DNA, 584 bp, Homo sapiens
  Payload ID: 7033
  Gene Symbol: GLYATL1
  Gene Name: glycine-N-acyltransferase-like 1
  ENST ID: ENST00000534612
  CDS Start-End: 249-401
agtaacagcttttggtttcccgaccaggaacactttggctcagttgccatgggccaggagtctcacagaactactaagcagctgcttacccaattttggctggagagataagtaccctctggggccaccacagctggccccaaccatggtcctgattgccttggaagaactgcctttggaatttcacatcggcatccagataggtgaagaaatggagttgccatcaactaagttgagaaagactacagatggtgtcacaagaaggatctgaagtggagcttctagtatccccaggagcgcgaagtgaacacggaaggtacctgcaggatccaattgtgtccattgatctctcagagtggctgaggataatagagtttcttcttcaaggtctcaaggtctgaagcatcccacagaatgatcctactgaataactcccataagctgctggccctatacaaatccttggccaggagcatccctgagtccctgaaggtgtatggctctgtgtatcacatcaatcacgggaaccccttcaacatggaggtgctggtggattcctggcctgaatatcagatggttattat

SEQ ID NO: 138020 - DNA, 728 bp, Homo sapiens
  Payload ID: 7033
  Gene Symbol: GLYATL1
  Gene Name: glycine-N-acyltransferase-like 1
  ENST ID: ENST00000524881
  CDS Start-End: 91-243
ggttcctgtacatcactttaccttttttgtctataaattcattttgaccacgaggcacccccggagcctcggtgaatctgctgtgattttatggtgtcacaagaaggatctgaagtggagcttctagtatccccaggagcgcgaagtgaacacggaaggtacctgcaggatccaattgtgtccattgatctctcagagtggctgaggataatagagtttcttcttcaaggtctcaaggtctgaagcatcccacagaatgatcctactgaataactcccataagctgctggccctatacaaatccttggccaggagcatccctgagtccctgaaggtgtatggctctgtgtatcacatcaatcacgggaaccccttcaacatggaggtgctggtggattcctggcctgaatatcagatggttattatccggcctcaaaagcaggagatgactgatgacatggattcatacacaaacgtatatcgtatgttctccaaagagcctcaaaaatcagaagaagttttgaaaaattgtgagatcgtaaactggaaacagagactccaaatccaaggtcttcaagaaagtttaggtgaggggataagagtggctacattttcaaagtcagtgaaagtagagcattcgagagcactcctcttggttacggaagatattctgaagctcaatgcctccagtaaaagcaagcttggaagctgggctgagacaggccacc

SEQ ID NO: 138021 - DNA, 573 bp, Homo sapiens
  Payload ID: 7033
  Gene Symbol: GLYATL1
  Gene Name: glycine-N-acyltransferase-like 1
  ENST ID: ENST00000525608
  CDS Start-End: 368-573
agttttttctcactgcttgcttggcaatgcagctctagcttctaatgcccttttttaaccctttaggtatctgatcgctttgccaattttgcgttactgggcaggctaagagatcttcttttaattcagcctgcttaagacgggaactgataactgtagtgtatcctctgccttttttcttatctattggaggaagctcagatggtgtcacaagaaggatctgaagtggagcttctagtatccccaggagcgcgaagtgaacacggaaggtacctgcaggatccaattgtgtccattgatctctcagagtggctgaggataatagagtttcttcttcaaggtctcaaggtctgaagcatcccacagaatgatcctactgaataactcccataagctgctggccctatacaaatccttggccaggagcatccctgagtccctgaaggtgtatggctctgtgtatcacatcaatcacgggaaccccttcaacatggaggtgctggtggattcctggcctgaatatcagatggttattatccggcctcaaaagcaggagatgactgatgacatgga

SEQ ID NO: 138022 - DNA, 760 bp, Homo sapiens
  Payload ID: 7033
  Gene Symbol: GLYATL1
  Gene Name: glycine-N-acyltransferase-like 1
  ENST ID: ENST00000526351
  CDS Start-End: 241-760
ttctcactgcttgcttggcaatgcagctctagcttctaatgcccttttttaaccctttaggtatctgatcgctttgccaattttgcgttactgggcaggctaagagatcttcttttaattcagcctgcttaagacgggaactgataactgtagtgtatcctctgccttttttcttatctattggaggaagctcaggtgaagaaatggagttgccatcaactaagttgagaaagactacagatggtgtcacaagaaggatctgaagtggagcttctagtatccccaggagcgcgaagtgaacacggaaggtacctgcaggatccaattgtgtccattgatctctcagagtggctgaggataatagagtttcttcttcaaggtctcaaggtgtatggctctgtgtatcacatcaatcacgggaaccccttcaacatggaggtgctggtggattcctggcctgaatatcagatggttattatccggcctcaaaagcaggagatgactgatgacatggattcatacacaaacgtatatcgtatgttctccaaagagcctcaaaaatcagaagaagttttgaaaaattgtgagatcgtaaactggaaacagagactccaaatccaaggtcttcaagaaagtttaggtgaggggataagagtggctacattttcaaagtcagtgaaagtagagcattcgagagcactcctcttggttacggaagatattctgaagctcaatgcctccagtaaaagcaagcttggaa

SEQ ID NO: 138023 - DNA, 647 bp, Homo sapiens
  Payload ID: 7033
  Gene Symbol: GLYATL1
  Gene Name: glycine-N-acyltransferase-like 1
  ENST ID: ENST00000530774
  CDS Start-End: 40-261
atcccagcagccatacttcaactactcatagactgctgaatgttcaaactgtgttcaaataagatggtgtcacaagaaggatctgaagtggagcttctagtatccccaggagcgcgaagtgaacacggaaggtacctgcaggatccaattgtgtccattgatctctcagagtggctgaggataataggtgtatggctctgtgtatcacatcaatcacgggaaccccttcaacatggaggtgctggtggattcctggcctgaatatcagatggttattatccggcctcaaaagcaggagatgactgatgacatggattcatacacaaacgtatatcgtatgttctccaaagagcctcaaaaatcagaagaagttttgaaaaattgtgagatcgtaaactggaaacagagactccaaatccaaggtcttcaagaaagtttaggtgaggggataagagtggctacattttcaaagtcagtgaaagtagagcattcgagagcactcctcttggttacggaagatattctgaagctcaatgcctccagtaaaagcaagcttggaagctgggctgagacaggccacccagatgatgaatttgaaagtgaaactcccaactttaagtatgcccagctggatgtctcttattctg

SEQ ID NO: 138024 - DNA, 1528 bp, Homo sapiens
  Payload ID: 7033
  Gene Symbol: GLYATL1
  Gene Name: glycine-N-acyltransferase-like 1
  ENST ID: ENST00000527708
  CDS Start-End: 51-227
agtgttggccaatcccagcagccatacttcaactactcatagactgctgaatgttcaaactgtgttcaaataagatggtgtcacaagaaggatctgaagtggagcttctagtatccccaggagcgcgaagtgaacacggaaggtacctgcaggatccaattgtgtccattgatctctcagagtggctgaggataatagagtttcttcttcaaggtctcaaggtctgaagcatcccacagaatgatcctactgaataactcccataagctgctggccctatacaaatccttggccaggagcatccctgagtccctgaaggtgtatggctctgtgtatcacatcaatcacgggaaccccttcaacatggaggtgctggtggattcctggcctgaatatcagatggttattatccggcctcaaaagcaggagatgactgatgacatggattcatacacaaacgtatatcgtatgttctccaaagagcctcaaaaatcagaagaagttttgaaaaattgtgagatcgtaaactggaaacagagactccaaatccaaggtcttcaagaaagtttaggtgaggggataagagtggctacattttcaaagtcagtgaaagtagagcattcgagagcactcctcttggttacggaagatattctgaagctcaatgcctccagtaaaagcaagcttggaagctgggctgagacaggccacccagatgatgaatttgaaagtgaaactcccaactttaagtatgcccagctggatgtctcttattctgggctggtaaatgacaactggaagcgagggaagaatgagaggagcctgcattacatcaagcgctgcatagaagacctgccagcagcctgtatgctcggcccagagggagtcccggtctcatgggtaaccatggacccttcttgtgaagtaggaatggcctacagcatggaaaaataccgaaggacaggcaacatggcacgagtgatggtgcgatacatgaaatatctgcgtcagaagaatattccattttacatctctgtgttggaagaaaatgaagactcccgcagatttgtggggcagtttggtttctttgaggcctcctgtgagtggcaccaatggacttgctacccacagaatctagttccattttagacaatgaagctgcttagtaatctctgccaagccatctcttaatattaaagcagacaccacagaatagatttcttcacttacaaatgcatattgggcacttataatacagcaggaactcttctcacctggagccttgatgttaaaagacacagccatgctcttgaggagcttacaatcctggctggaggcaggggagggtatattctttaaatatgcttaagtgttatagggaaagacggggttaccagtaaacatgtaactagaaagccaggctcagttcttacctctgggaatcagaactctttatgcaacttggttaatagaatctactatctggaagataaatgaaggattttaataaaattttcaatagaataaa

SEQ ID NO: 138025 - DNA, 571 bp, Homo sapiens
  Payload ID: 7033
  Gene Symbol: GLYATL1
  Gene Name: glycine-N-acyltransferase-like 1
  ENST ID: ENST00000532726
  CDS Start-End: 334-571
ggctcagttgccatgggccaggagtctcacagaactactaagcagctgcttacccaattttggctggagagataagtaccctctggggccaccacagctggccccaaccatggtcctgattgccttggaagaactgcctttggaatttcacatcggcatccagatagatggtgtcacaagaaggatctgaagtggagcttctagtatccccaggagcgcgaagtgaacacggaaggtacctgcaggatccaattgtgtccattgatctctcagagtggctgaggataatagagtttcttcttcaaggtctcaaggtctgaagcatcccacagaatgatcctactgaataactcccataagctgctggccctatacaaatccttggccaggagcatccctgagtccctgaaggtgtatggctctgtgtatcacatcaatcacgggaaccccttcaacatggaggtgctggtggattcctggcctgaatatcagatggttattatccggcctcaaaagcaggagatgactgatgacatggattcatacacaaacgtatatcgtatgttctcca

SEQ ID NO: 138026 - DNA, 1709 bp, Homo sapiens
  Payload ID: 7033
  Gene Symbol: GLYATL1
  Gene Name: glycine-N-acyltransferase-like 1
  ENST ID: ENST00000530240
  CDS Start-End: 232-384
gttcaaataaggcaagcgcccagttgtaaccaatctctttgtttctgtacctgatttctggttcctgtacatcactttaccttttttgtctataaattcattttgaccacgaggcacccccggagcctcggtgaatctgctgtgattttgtaggctgccggattcacaaattgtttgttgcttaatgaaactcctttaagtttaattcagctgaagtttttcttttatcagatggtgtcacaagaaggatctgaagtggagcttctagtatccccaggagcgcgaagtgaacacggaaggtacctgcaggatccaattgtgtccattgatctctcagagtggctgaggataatagagtttcttcttcaaggtctcaaggtctgaagcatcccacagaatgatcctactgaataactcccataagctgctggccctatacaaatccttggccaggagcatccctgagtccctgaaggtgtatggctctgtgtatcacatcaatcacgggaaccccttcaacatggaggtgctggtggattcctggcctgaatatcagatggttattatccggcctcaaaagcaggagatgactgatgacatggattcatacacaaacgtatatcgtatgttctccaaagagcctcaaaaatcagaagaagttttgaaaaattgtgagatcgtaaactggaaacagagactccaaatccaaggtcttcaagaaagtttaggtgaggggataagagtggctacattttcaaagtcagtgaaagtagagcattcgagagcactcctcttggttacggaagatattctgaagctcaatgcctccagtaaaagcaagcttggaagctgggctgagacaggccacccagatgatgaatttgaaagtgaaactcccaactttaagtatgcccagctggatgtctcttattctgggctggtaaatgacaactggaagcgagggaagaatgagaggagcctgcattacatcaagcgctgcatagaagacctgccagcagcctgtatgctcggcccagagggagtcccggtctcatgggtaaccatggacccttcttgtgaagtaggaatggcctacagcatggaaaaataccgaaggacaggcaacatggcacgagtgatggtgcgatacatgaaatatctgcgtcagaagaatattccattttacatctctgtgttggaagaaaatgaagactcccgcagatttgtggggcagtttggtttctttgaggcctcctgtgagtggcaccaatggacttgctacccacagaatctagttccattttagacaatgaagctgcttagtaatctctgccaagccatctcttaatattaaagcagacaccacagaatagatttcttcacttacaaatgcatattgggcacttataatacagcaggaactcttctcacctggagccttgatgttaaaagacacagccatgctcttgaggagcttacaatcctggctggaggcaggggagggtatattctttaaatatgcttaagtgttatagggaaagacggggttaccagtaaacatgtaactagaaagccaggctcagttcttacctctgggaatcagaactctttatgcaacttggttaatagaatctactatctggaagataaatgaaggattttaataaaattttcaatagaataaacctaatctgtatggatactttatc

SEQ ID NO: 138027 - DNA, 909 bp, Homo sapiens
  Payload ID: 7033
  Gene Symbol: GLYATL1
  Gene Name: glycine-N-acyltransferase-like 1
  Uniprot ID: Q969I3
  ENST ID: ENST00000612196
  CDS Start-End: 1-909
atgatcctactgaataactcccataagctgctggccctatacaaatccttggccaggagcatccctgagtccctgaaggtgtatggctctgtgtatcacatcaatcacgggaaccccttcaacatggaggtgctggtggattcctggcctgaatatcagatggttattatccggcctcaaaagcaggagatgactgatgacatggattcatacacaaacgtatatcgtatgttctccaaagagcctcaaaaatcagaagaagttttgaaaaattgtgagatcgtaaactggaaacagagactccaaatccaaggtcttcaagaaagtttaggtgaggggataagagtggctacattttcaaagtcagtgaaagtagagcattcgagagcactcctcttggttacggaagatattctgaagctcaatgcctccagtaaaagcaagcttggaagctgggctgagacaggccacccagatgatgaatttgaaagtgaaactcccaactttaagtatgcccagctggatgtctcttattctgggctggtaaatgacaactggaagcgagggaagaatgagaggagcctgcattacatcaagcgctgcatagaagacctgccagcagcctgtatgctcggcccagagggagtcccggtctcatgggtaaccatggacccttcttgtgaagtaggaatggcctacagcatggaaaaataccgaaggacaggcaacatggcacgagtgatggtgcgatacatgaaatatctgcgtcagaagaatattccattttacatctctgtgttggaagaaaatgaagactcccgcagatttgtggggcagtttggtttctttgaggcctcctgtgagtggcaccaatggacttgctacccacagaatctagttccattttag

SEQ ID NO: 138028 - DNA, 909 bp, Homo sapiens
  Payload ID: 7034
  Gene Symbol: GLYATL1P3
  Gene Name: glycine-N-acyltransferase-like 1 pseudogene 3
  ENST ID: ENST00000527482
  CDS Start-End: 1-909
atgattctattgaataattccgagcggctgctggccctattcaaatctttagcaaggagcattcctgagtccctgaaggtgtatggctctctgtttcacatcaatcacgggaaccccttcaacatggaagtgttggtggactcctggcccgagtatcagatggttattatccgacctcaaaaacaggagatgactgatgacatggattcatacactaatgtatatcgtgtattctccaaagaccctcaaaaatcacaagaagttttgaaaaattctgagatcataaactggaaacagaaactccaaatccaaggttttcaagaaagtttaggtgaggggataagagcagctgcattttcaaattcagtgaaggtagagcattcgagagcactcctctttgttacggaagatatcctgaagctctatgccaccaataaaagcaagcttggaagctgggctgagacaggccacccagatgacgaattggagagcgagactccgaactttaagtatgcccagctgaatgtgtcttattctgggctggtaaatgacaactggaagctagggatgaataagaggagcctgcgttacatcaagcgctgcctaggagccctgccagcagcctgtatgctgggcccagagggggtcccggtctcatgggtaaccatggacccttcttgtgaaataggaatgggctacagtgtggaaaaataccgaaggagaggcaatgggacacggctgatcatgcgatgcatgaagtatctgtgtcagaagaatattccattttacggctctgtgctggaagaaaatcaaggcgtcatcagaaagactagtgcactaggtttccttgaggcctcctgtcagtggcaccaatggaactgctacccacagaatcttgttccattgtag

SEQ ID NO: 138029 - DNA, 1640 bp, Homo sapiens
  Payload ID: 7035
  Gene Symbol: GLYATL2
  Gene Name: glycine-N-acyltransferase-like 2
  Uniprot ID: Q8WU03
  ENST ID: ENST00000287275
  CDS Start-End: 392-1276
aattgacttaatattgttctagaatagcctttcagctacaagaggttatatataaatcaaaagcttcttgagtaaaacttcttagaattgtagaagctgctcaatatggaacatattctcagtcctcctctggtctacaaagcctgtgatttcttgtctatggacagaacgtctggtttaatctacaggaacccataacttcctgaagctttatgcttaacagtgacaacgtgagtcagttgaattttattgtgtttcagtccgtagagtattagctacagaaacctttccattgccatactgagaaactgcagcaggcagtgtgcctacaggtctacaaagaaacttcagatcatcttcttgagggaaagaagctgaagtgctacataagatgcttgtgcttcataactctcagaagctgcagattctgtataaatccttagaaaagagcatccctgaatccataaaggtatatggcgccattttcaacataaaagataaaaaccctttcaacatggaggtgctggtagatgcctggccagattaccagatcgtcattacccggcctcagaaacaggagatgaaagatgaccaggatcattataccaacacttaccacatcttcaccaaagctcctgacaaattagaggaagtcctgtcatactccaatgtaatcagctgggagcaaactttgcagatccaaggttgccaagagggcttggatgaagcaataagaaaggttgcaacttcaaaatcagtgcaggtagattacatgaaaaccatcctctttataccggaattaccaaagaaacacaagacctcaagtaatgacaagatggagttatttgaagtggatgatgataacaaggaaggaaacttttcaaacatgttcttagatgcttcacatgcaggtcttgtgaatgaacactgggcctttgggaaaaatgagaggagcttgaaatatattgaacgctgcctccaggattttctaggatttggtgtgctgggtccagagggccagcttgtctcttggattgtgatggaacagtcctgtgagttgagaatgggttatactgtccccaaatacagacaccaaggcaacatgttgcaaattggttatcatcttgaaaagtatctttctcagaaagaaatcccattttatttccatgtggcagataataatgagaaaagcctacaggcactgaacaatttggggtttaagatttgtccttgtggctggcatcagtggaaatgcacccccaagaaatattgttgattgattccactgtccatttcaaatctttcttatcagtaaaaaaacattaattcaaacacaagcattgtgatctacattagcacaaaatgcaactgattatctaggatctgtgtattacttaagctcacccttaacagttttaccttccttctcctctgtattcttacagaaaattagaagctcaattttatggtctcataatttcctttatgacagacatctcagaattaaaatcacccaaagccaatcattagtgccaagataaccctttaacggcaacactttcttaaatgaagactatttctttcatgaaaaaattcacttttatgactttcttgttaaaataaaaagtctgcttttaaaa

SEQ ID NO: 138030 - DNA, 1488 bp, Homo sapiens
  Payload ID: 7035
  Gene Symbol: GLYATL2
  Gene Name: glycine-N-acyltransferase-like 2
  Uniprot ID: Q8WU03
  ENST ID: ENST00000532258
  CDS Start-End: 272-1156
agtccgtagagtattagctacagaaacctttccattgccatactgagaaactgcagcaggcagtgtgcctacaggtctacaaagaaacttcagagtctcacactgtcacccaggctggaatgcagtggtgcgatatcagatcactgcaacctcctcttccttggttcaagcaattctcctgcctcagcctcctgagtagctgggactactgacactcaccaccacacccagatcatcttcttgagggaaagaagctgaagtgctacataagatgcttgtgcttcataactctcagaagctgcagattctgtataaatccttagaaaagagcatccctgaatccataaaggtatatggcgccattttcaacataaaagataaaaaccctttcaacatggaggtgctggtagatgcctggccagattaccagatcgtcattacccggcctcagaaacaggagatgaaagatgaccaggatcattataccaacacttaccacatcttcaccaaagctcctgacaaattagaggaagtcctgtcatactccaatgtaatcagctgggagcaaactttgcagatccaaggttgccaagagggcttggatgaagcaataagaaaggttgcaacttcaaaatcagtgcaggtagattacatgaaaaccatcctctttataccggaattaccaaagaaacacaagacctcaagtaatgacaagatggagttatttgaagtggatgatgataacaaggaaggaaacttttcaaacatgttcttagatgcttcacatgcaggtcttgtgaatgaacactgggcctttgggaaaaatgagaggagcttgaaatatattgaacgctgcctccaggattttctaggatttggtgtgctgggtccagagggccagcttgtctcttggattgtgatggaacagtcctgtgagttgagaatgggttatactgtccccaaatacagacaccaaggcaacatgttgcaaattggttatcatcttgaaaagtatctttctcagaaagaaatcccattttatttccatgtggcagataataatgagaaaagcctacaggcactgaacaatttggggtttaagatttgtccttgtggctggcatcagtggaaatgcacccccaagaaatattgttgattgattccactgtccatttcaaatctttcttatcagtaaaaaaacattaattcaaacacaagcattgtgatctacattagcacaaaatgcaactgattatctaggatctgtgtattacttaagctcacccttaacagttttaccttccttctcctctgtattcttacagaaaattagaagctcaattttatggtctcataatttcctttatgacagacatctcagaattaaaatcacccaaagccaatcattagtgccaagataaccctttaacggcaacactttcttaaatgaagactatttctttcatgaaaaaattcacttttatgact

SEQ ID NO: 138031 - DNA, 1113 bp, Homo sapiens
  Payload ID: 7036
  Gene Symbol: GLYATL3
  Gene Name: glycine-N-acyltransferase-like 3
  Uniprot ID: Q5SZD4
  ENST ID: ENST00000371197
  CDS Start-End: 114-980
aagaataaacttaccatttatataaaagggctactggactgatacacagctgaaaaccctcagttctggactgaactcccagcaggtgtggagttgcaagagctctggaaaagatgttggtgctaaactgttctaccaaattactgatactggagaaaatgttgaagagttgctttcctgaatcactcaaggtttacggagcggtgatgaacataaatcgtgggaacccctttcaaaaggaagtggtgttggattcatggccggatttcaaagctgttatcacccgacgacaaagagaggctgagacagataaccttgatcattatactaatgcctatgctgtgttctacaaggatgtcagggcttatcgacagctattggaagaatgtgatgtttttaactgggaccaagtttttcaaatacaagggctgcagagtgagttatatgatgtttccaaagcggttgccaattcaaagcagttgaatataaagctaacttccttcaaggctgttcatttttctcctgtttcatctctgccagataccagtttcctcaaggggccttccccacgactaacctacctgagtgttgccaatgcggatctactcaaccggacttggtcccggggaggcaatgaacaatgtctccggtacatcgccaacctcatctcctgcttccctagtgtgtgtgtccgggatgagaagggaaacccggtctcctggtccatcacagaccagtttgccaccatgtgccatggctacaccctgccagaacatcgcaggaaaggttacagccggctggtggccctcacgctggccaggaagttgcaaagccggggattcccctctcaggggaacgtcctggatgacaacacggcgtctataagcctcctgaagagtctccatgctgagttcttgccttgtcgcttccacaggcttattctcacccctgcgactttctctggcctgcctcacctctagcccagtaaaaaactgcagtggttttattactttccctgagcatacacacactcttggctgccaacgaggggagagttaaaatgggaatcaggggactcttgagttgttggaaagggtctggagaatatataca

SEQ ID NO: 138032 - DNA, 571 bp, Homo sapiens
  Payload ID: 7036
  Gene Symbol: GLYATL3
  Gene Name: glycine-N-acyltransferase-like 3
  ENST ID: ENST00000545705
  CDS Start-End: 104-571
ataaaagggctactggactgatacacagctgaaaaccctcagttctggactgaactcccagcagtttctaattaggtgtggagttgcaagagctctggaaaagatgttggtgctaaactgttctaccaaattactgatactggagaaaatgttgaagagttgctttcctgaatcactcaaggtttacggagcggtgatgaacataaatcgtgggaacccctttcaaaaggaagtggtgttggattcatggccggatttcaaagctgttatcacccgacgacaaagagaggctgagacagataaccttgatcattatactaatgcctatgctgtgttctacaaggatgtcagggcttatcgacagctattggaagaatgtgatgtttttaactgggaccaagtttttcaaatacaagggctgcagagtgagttatatgatgtttccaaagcggttgccaattcaaagcagttgaatataaagctaacttccttcaaggctgttcatttttctcctgtttcatctctgccagataccagtttcctcaaggggccttccccacgactaacctac

SEQ ID NO: 138033 - DNA, 3378 bp, Homo sapiens
  Payload ID: 7037
  Gene Symbol: GYS1
  Gene Name: glycogen synthase 1 (muscle)
  Uniprot ID: P13807
  ENST ID: ENST00000263276
  CDS Start-End: 199-2220
cagtgacgctgcggcctccttctgcctaggtcccaacgcttcggggcaggggtgcggtcttgcaataggaagccgagcgtcttgcaagcttcccgtcgggcaccagctactcggccccgcaccctacctggtgcattccctagacacctccggggtccctacctggagatccccggagccccccttcctgcgccagccatgcctttaaaccgcactttgtccatgtcctcactgccaggactggaggactgggaggatgaattcgacctggagaacgcagtgctcttcgaagtggcctgggaggtggctaacaaggtgggtggcatctacacggtgctgcagacgaaggcgaaggtgacaggggacgaatggggcgacaactacttcctggtggggccgtacacggagcagggcgtgaggacccaggtggaactgctggaggcccccaccccggccctgaagaggacactggattccatgaacagcaagggctgcaagttcctggcacagagtgaggagaagccacatgtggttgctcacttccatgagtggttggcaggcgttggactctgcctgtgtcgtgcccggcgactgcctgtagcaaccatcttcaccacccatgccacgctgctggggcgctacctgtgtgccggtgccgtggacttctacaacaacctggagaacttcaacgtggacaaggaagcaggggagaggcagatctaccaccgatactgcatggaaagggcggcagcccactgcgctcacgtcttcactactgtgtcccagatcaccgccatcgaggcacagcacttgctcaagaggaaaccagatattgtgacccccaatgggctgaatgtgaagaagttttctgccatgcatgagttccagaacctccatgctcagagcaaggctcgaatccaggagtttgtgcggggccatttttatgggcatctggacttcaacttggacaagaccttatacttctttatcgccggccgctatgagttctccaacaagggtgctgacgtcttcctggaggcattggctcggctcaactatctgctcagagtgaacggcagcgagcagacagtggttgccttcttcatcatgccagcgcggaccaacaatttcaacgtggaaaccctcaaaggccaagctgtgcgcaaacagctttgggacacggccaacacggtgaaggaaaagttcgggaggaagctttatgaatccttactggttgggagccttcccgacatgaacaagatgctggataaggaagacttcactatgatgaagagagccatctttgcaacgcagcggcagtctttcccccctgtgtgcacccacaatatgctggatgactcctcagaccccatcctgaccaccatccgccgaatcggcctcttcaatagcagtgccgacagggtgaaggtgattttccacccggagttcctctcctccacaagccccctgctccctgtggactatgaggagtttgtccgtggctgtcaccttggagtcttcccctcctactatgagccttggggctacacaccggctgagtgcacggttatgggaatccccagtatctccaccaatctctccggcttcggctgcttcatggaggaacacatcgcagacccctcagcttacggtatctacattcttgaccggcggttccgcagcctggatgattcctgctcgcagctcacctccttcctctacagtttctgtcagcagagccggcggcagcgtatcatccagcggaaccgcacggagcgcctctccgaccttctggactggaaatacctaggccggtactatatgtctgcgcgccacatggcgctgtccaaggcctttccagagcacttcacctacgagcccaacgaggcggatgcggcccaggggtaccgctacccacggccagcctcggtgccaccgtcgccctcgctgtcacgacactccagcccgcaccagagtgaggacgaggaggatccccggaacgggccgctggaggaagacggcgagcgctacgatgaggacgaggaggccgccaaggaccggcgcaacatccgtgcaccagagtggccgcgccgagcgtcctgcacctcctccaccagcggcagcaagcgcaactctgtggacacggccacctccagctcactcagcaccccgagcgagcccctcagccccaccagctccctgggcgaggagcgtaactaagtccgccccaccacactccccgcctgtcctgcctctctgctccagagagaggatgcagaggggtgctgctcctaaacccccgctccagatctgcactgggtgtggccccgcagtgcccccacccagtccgccaaacactccaccccctccagctccagtttccaagttcctgcactccagaatccacaaagccgtgcctttctctggctccagaatatgcataatcagcgccctggagtcccctgggcctggaccgcttcccagaggccaggaatctgccattactctgcggtggtgccagaggttttaggaaacctggcatggtgctttcaggtctggggcttttagagccccccgtgtggcttacaaattctacagcatacagagcaggccacgctcaggcccggcatgcgggccaccaagttctggaaaccacgtggtgtccctgcgaatggggcgatcaagtccagagccggggcactttcagagtttgaaggtaactgagagcagatggtcctccatttcaactccagaagtggggctctgggagggatgttctagccctccctggcatgtcagagccaggctctgcctggaggatccctccatccggctcctgtcatcccctacactttggccaagcaagaggtggtagaaccacttggctgctcattccttctggaggacacacagtctcagtccagatgccttcctgtctttctggccctttctggaccagatcctactcttcctttctaaatctgagatctccctccagggaatccgcctgcagaggacagagctggctgtcttcccccacccctaacctggcttattcccaactgctctgcccactgtgaaaccactaggttctaggtcctggcttctagatctggaaccttaccacgttactgcatactgatccctttcccatgatccagaactgaggtcactgggttctagaacccccacatttacctcgaggctcttccatccccaaactgtgccctgccttcagctttggtgaaagggagggcccctcatgtgtgctgtgctgtgtctgcaccgcttggtttgcagttgagaggggagggcaggaggggtgtgattggagtgtgtccggagatgagatgaaaaaaatacatctatatttaagaa

SEQ ID NO: 138034 - DNA, 3574 bp, Homo sapiens
  Payload ID: 7037
  Gene Symbol: GYS1
  Gene Name: glycogen synthase 1 (muscle)
  Uniprot ID: P13807
  ENST ID: ENST00000323798
  CDS Start-End: 198-2411
agtgacgctgcggcctccttctgcctaggtcccaacgcttcggggcaggggtgcggtcttgcaataggaagccgagcgtcttgcaagcttcccgtcgggcaccagctactcggccccgcaccctacctggtgcattccctagacacctccggggtccctacctggagatccccggagccccccttcctgcgccagccatgcctttaaaccgcactttgtccatgtcctcactgccaggactggaggactgggaggatgaattcgacctggagaacgcagtgctcttcgaagtggcctgggaggtggctaacaaggtgggtggcatctacacggtgctgcagacgaaggcgaaggtgacaggggacgaatggggcgacaactacttcctggtggggccgtacacggagcagggcgtgaggacccaggtggaactgctggaggcccccaccccggccctgaagaggacactggattccatgaacagcaagggctgcaaggtgtatttcgggcgctggctgatcgagggaggccctctggtggtgctcctggacgtgggtgcctcagcttgggccctggagcgctggaagggagagctctgggatacctgcaacatcggagtgccgtggtacgaccgcgaggccaacgacgctgtcctctttggctttctgaccacctggttcctgggtgagttcctggcacagagtgaggagaagccacatgtggttgctcacttccatgagtggttggcaggcgttggactctgcctgtgtcgtgcccggcgactgcctgtagcaaccatcttcaccacccatgccacgctgctggggcgctacctgtgtgccggtgccgtggacttctacaacaacctggagaacttcaacgtggacaaggaagcaggggagaggcagatctaccaccgatactgcatggaaagggcggcagcccactgcgctcacgtcttcactactgtgtcccagatcaccgccatcgaggcacagcacttgctcaagaggaaaccagatattgtgacccccaatgggctgaatgtgaagaagttttctgccatgcatgagttccagaacctccatgctcagagcaaggctcgaatccaggagtttgtgcggggccatttttatgggcatctggacttcaacttggacaagaccttatacttctttatcgccggccgctatgagttctccaacaagggtgctgacgtcttcctggaggcattggctcggctcaactatctgctcagagtgaacggcagcgagcagacagtggttgccttcttcatcatgccagcgcggaccaacaatttcaacgtggaaaccctcaaaggccaagctgtgcgcaaacagctttgggacacggccaacacggtgaaggaaaagttcgggaggaagctttatgaatccttactggttgggagccttcccgacatgaacaagatgctggataaggaagacttcactatgatgaagagagccatctttgcaacgcagcggcagtctttcccccctgtgtgcacccacaatatgctggatgactcctcagaccccatcctgaccaccatccgccgaatcggcctcttcaatagcagtgccgacagggtgaaggtgattttccacccggagttcctctcctccacaagccccctgctccctgtggactatgaggagtttgtccgtggctgtcaccttggagtcttcccctcctactatgagccttggggctacacaccggctgagtgcacggttatgggaatccccagtatctccaccaatctctccggcttcggctgcttcatggaggaacacatcgcagacccctcagcttacggtatctacattcttgaccggcggttccgcagcctggatgattcctgctcgcagctcacctccttcctctacagtttctgtcagcagagccggcggcagcgtatcatccagcggaaccgcacggagcgcctctccgaccttctggactggaaatacctaggccggtactatatgtctgcgcgccacatggcgctgtccaaggcctttccagagcacttcacctacgagcccaacgaggcggatgcggcccaggggtaccgctacccacggccagcctcggtgccaccgtcgccctcgctgtcacgacactccagcccgcaccagagtgaggacgaggaggatccccggaacgggccgctggaggaagacggcgagcgctacgatgaggacgaggaggccgccaaggaccggcgcaacatccgtgcaccagagtggccgcgccgagcgtcctgcacctcctccaccagcggcagcaagcgcaactctgtggacacggccacctccagctcactcagcaccccgagcgagcccctcagccccaccagctccctgggcgaggagcgtaactaagtccgccccaccacactccccgcctgtcctgcctctctgctccagagagaggatgcagaggggtgctgctcctaaacccccgctccagatctgcactgggtgtggccccgcagtgcccccacccagtccgccaaacactccaccccctccagctccagtttccaagttcctgcactccagaatccacaaagccgtgcctttctctggctccagaatatgcataatcagcgccctggagtcccctgggcctggaccgcttcccagaggccaggaatctgccattactctgcggtggtgccagaggttttaggaaacctggcatggtgctttcaggtctggggcttttagagccccccgtgtggcttacaaattctacagcatacagagcaggccacgctcaggcccggcatgcgggccaccaagttctggaaaccacgtggtgtccctgcgaatggggcgatcaagtccagagccggggcactttcagagtttgaaggtaactgagagcagatggtcctccatttcaactccagaagtggggctctgggagggatgttctagccctccctggcatgtcagagccaggctctgcctggaggatccctccatccggctcctgtcatcccctacactttggccaagcaagaggtggtagaaccacttggctgctcattccttctggaggacacacagtctcagtccagatgccttcctgtctttctggccctttctggaccagatcctactcttcctttctaaatctgagatctccctccagggaatccgcctgcagaggacagagctggctgtcttcccccacccctaacctggcttattcccaactgctctgcccactgtgaaaccactaggttctaggtcctggcttctagatctggaaccttaccacgttactgcatactgatccctttcccatgatccagaactgaggtcactgggttctagaacccccacatttacctcgaggctcttccatccccaaactgtgccctgccttcagctttggtgaaagggagggcccctcatgtgtgctgtgctgtgtctgcaccgcttggtttgcagttgagaggggagggcaggaggggtgtgattggagtgtgtccggagatgagatgaaaaaaatacatctatatttaagaatccca

SEQ ID NO: 138035 - DNA, 427 bp, Homo sapiens
  Payload ID: 7037
  Gene Symbol: GYS1
  Gene Name: glycogen synthase 1 (muscle)
  ENST ID: ENST00000594220
  CDS Start-End: 1-341
gtatctacattcttgaccggcggttccgcagcctggatgattcctgctcgcagctcacctccttcctctacagtttctgtcagcagagccggcggcagcgtatcatccagcggaaccgcacggagcgcctctccgaccttctggactggaaatacctaggccgggtaggacccccactttcctatcctctcctggcaaatcagcagctcctggctaggggtctttggtgcagggtgcagggtctcatcctacttgtaacagttgctgtccctttaagcaatgaaccaggccgatcgcgatggtggctcatggttgtaatcccagcactttgggaggcctaacaggaaggatcgcatgagctcaggagttaagagaccagcctgggcaacattttatttttactaaaaataaaaaaaaatcagccgag

SEQ ID NO: 138036 - DNA, 3132 bp, Homo sapiens
  Payload ID: 7038
  Gene Symbol: GYS2
  Gene Name: glycogen synthase 2 (liver)
  Uniprot ID: P54840
  ENST ID: ENST00000261195
  CDS Start-End: 256-2367
agatactgacagggcagataccgtcctcacaatacctgcccagaaagacgagaaagaggaggaagaattcctccttccaccaggaattctgtgggaagcacataagatttcatgctactagtttattcccaagagaagctaccaaagcctggtaactctaccaactctaacttttgtgcctgtaagttctcttctcctgggattacaactaattgaaacaggaattcaaaggagtctcggaggactgtaagaagaatgcttcgaggccgatccctctctgtaacatccctgggtgggcttccccagtgggaagtcgaagaacttcctgtggaggagttactgctctttgaagttgcttgggaagtgaccaataaagttggaggcatctatactgtgattcagacaaaggccaaaacaacagcagatgaatggggagagaactattttctgataggtccatattttgagcataatatgaagactcaggtggaacagtgtgaacctgtaaatgatgctgtcagaagagcagtggacgcaatgaataagcatggctgccaggtgcattttggaagatggctgatagaaggaagtccttatgtggtactttttgacataggctattcagcttggaatctggacaggtggaagggtgacctctgggaagcatgcagtgtcggcattccttatcatgaccgagaagccaatgatatgctgatatttggatctttaactgcctggttcttaaaagaggtgacagatcatgcagatggtaaatatgtcgttgcccaattccatgaatggcaggctggaattggactgatcctttctcgagccaggaaacttcctattgccacaatatttacaacccacgctacactacttgggaggtatctctgtgcagcaaatattgatttctacaaccatcttgataagtttaacattgacaaagaggctggggaaaggcagatttaccaccggtactgcatggagcgagcttccgttcattgcgctcacgtgttcaccacggtttctgaaataacagcaatagaagctgaacatatgctgaagagaaagcctgatgtagttactccaaacggcttgaatgttaagaaattttcagcagtgcatgagtttcaaaatctacatgccatgtacaaggccagaatccaagattttgttcgaggtcatttctatggtcatctcgactttgatcttgaaaagactttgttccttttcattgctgggaggtatgagttttcaaacaaaggagctgacatcttcctagaatccttatccaggctaaatttcctgctgaggatgcataaaagtgacatcacagtgatggtgtttttcattatgcctgccaagacaaataatttcaacgtggaaaccctgaaaggacaagcagtgcgaaaacagctgtgggatgttgcacattctgtgaaggaaaagtttggaaaaaaactctatgatgcattattaagaggagaaattcctgacctgaacgatattttagatcgagatgatctaacaattatgaaaagagccatcttttcaactcagcgacagtcattgcccccagtgaccacgcacaacatgattgatgactccaccgaccccatcctcagcaccattagacggattggacttttcaacaaccgcacagatagagtcaaggtgattttgcacccagagtttctatcctccaccagtcccttactacccatggactatgaagagtttgttagaggttgtcatcttggagtatttccatcatactatgaaccctggggttatactccagctgaatgcactgtgatgggtatccccagtgtgaccacgaatctctccgggtttggctgtttcatgcaggagcacgtggctgatcctactgcttacggtatttacatcgttgacaggcggttccgttctccagatgattcttgcaatcagctgactaagtttctctatggattttgcaaacagtcacgccgccaaaggattatccagaggaacagaactgagaggctctcagatcttctggattggagatacttaggcagatattaccagcatgccagacacctgacattaagcagagcttttccagataaattccatgtggaactaacatcaccaccaacgacagaaggatttaaatatcccaggccttcctcagtaccaccttctccttcagggtctcaggcctccagtcctcagagcagtgatgtggaagatgaagtggaggatgagagatacgatgaggaagaggaggctgaaagggatcggttaaatatcaagtcaccattttcactgagccacgttcctcatgggaagaaaaagctgcatggtgaatataagaactgaattctacatgtgctgcatgaagagctaatttaaaaaagcaaagtaagactaattatttaaaataaaaatgccacaaatttcattttctccttctaagtattacaatggagtttattctctgcctaaaaagtggaagaaattgagtgaatgacaattttgtaatttaggataagatccaagttattttccccaactcttgtttcccccataaagttaggcatgaggaggagcactcattaaaggcagaagacggaaaagtgtttttaaaatggtgaatttaagtggtaaggattttctcttactctgtttatttttaaatgatcatcataatcctttgcttactatttatgcagcttctctaccccaccacacaaatttcccatttcccccccgaaaaccttgatcttacccatgaatgtgcactacctacattttttaaatagctaggtttttactgattattttcatttttcacatgcatcagaaccatgatttagatgtagttttgcagagacaaaaatccatgagtgaatagctatcctaagtccatattttgatgcatattaatggacatttatgtcacttttgaaatctagaattgatgttgtaattaatgcaagatattaccatgtacatggtaccaccatcttactgtaacatttttctattgtttaaatagaaagcctttttaaaatttggtcaatcttcatagatgataacttgtaaaatccaagtaaataaacacattaatatttaataacttaa

SEQ ID NO: 138037 - DNA, 2188 bp, Homo sapiens
  Payload ID: 7039
  Gene Symbol: GSK3A
  Gene Name: glycogen synthase kinase 3 alpha
  Uniprot ID: P49840
  ENST ID: ENST00000222330
  CDS Start-End: 129-1580
gagccggagcccaagccagagcggcgcggcctggaagaggccagggcccgggggaggcggcggcagcggcggcggctggggcagcccgggcagcccgagccccgcagcctgggcctgtgctcggcgccatgagcggcggcgggccttcgggaggcggccctgggggctcgggcagggcgcggactagctcgttcgcggagcccggcggcggaggcggaggaggcggcggcggccccggaggctcggcctccggcccaggcggcaccggcggcggaaaggcatctgtcggggccatgggtgggggcgtcggggcctcgagctccgggggtggacccggcggcagcggcggaggaggcagcggaggccccggcgcaggcactagcttcccgccgcccggggtgaagctgggccgtgacagcgggaaggtgaccacagtcgtagccactctaggccaaggcccagagcgctcccaagaagtggcttacacggacatcaaagtgattggcaatggctcatttggggtcgtgtaccaggcacggctggcagagaccagggaactagtcgccatcaagaaggttctccaggacaagaggttcaagaaccgagagctgcagatcatgcgtaagctggaccactgcaatattgtgaggctgagatactttttctactccagtggcgagaagaaagacgagctttacctaaatctggtgctggaatatgtgcccgagacagtgtaccgggtggcccgccacttcaccaaggccaagttgaccatccctatcctctatgtcaaggtgtacatgtaccagctcttccgcagcttggcctacatccactcccagggcgtgtgtcaccgcgacatcaagccccagaacctgctggtggaccctgacactgctgtcctcaagctctgcgattttggcagtgcaaagcagttggtccgaggggagcccaatgtctcctacatctgttctcgctactaccgggccccagagctcatctttggagccactgattacacctcatccatcgatgtttggtcagctggctgtgtactggcagagctcctcttgggccagcccatcttccctggggacagtggggtggaccagctggtggagatcatcaaggtgctgggaacaccaacccgggaacaaatccgagagatgaaccccaactacacggagttcaagttccctcagattaaagctcacccctggacaaaggtgttcaaatctcgaacgccgccagaggccatcgcgctctgctctagcctgctggagtacaccccatcctcaaggctctccccactagaggcctgtgcgcacagcttctttgatgaactgcgatgtctgggaacccagctgcctaacaaccgcccacttccccctctcttcaacttcagtgctggtgaactctccatccaaccgtctctcaacgccattctcatccctcctcacttgaggtccccagcgggcactaccaccctcaccccgtcctcacaagctttaactgagactccgaccagctcagactggcagtcgaccgatgccacacctaccctcactaactcctcctgagggccccaccaagcacccttccacttccatctgggagccccaagaggggctgggaaggggggccatagcccatcaagctcctgccctggctgggcccctagactagagggcagaggtaaatgagtccctgtccccacctccagtccctccctcaccagcctcacccctgtggtgggctttttaagaggattttaactggttgtggggagggaagagaaggacagggtgttggggggatgaggacctcctacccccttggccccctcccctcccccagacctccacctcctccagaccccctcccctcctgtgtcccttgtaaatagaaccagcccagcccgtctcctcttcccttccctggcccccgggtgtaaatagattgttataatttttttcttaaagaaaacgtcgattcgcaccgtccaacctggccccgcccctcctacagctgtaactcccctcctgtcctctgcccccaaggtctactccctcctcaccccaccctggagggccaggggagtggagagagctcctgatgtcttagtttccacagtaaggtttgcctgtgtacagacctccgttcaataaattattggcatgaaaacctg

SEQ ID NO: 138038 - DNA, 3524 bp, Homo sapiens
  Payload ID: 7039
  Gene Symbol: GSK3A
  Gene Name: glycogen synthase kinase 3 alpha
  ENST ID: ENST00000398249
  CDS Start-End: 1715-2920
atgttgctattcattataatattggatcagaggtcacagtcgcttgcaaatggggatctagggttattgtctcctaagagaacaagaataagaccaaccccgaaaaagagggatctgcattccctgtccttcagaagatggggatttggagcgaatatcacttagaagcagggctttgaggttactgtgttttgtccccaaagaatagggccaggctttccaaacctggtactcagatcatcttccctattaaaaccaagacctggcatcattacccaccctaaatcttgttgagctgtactgccaatggtgagaattaatagttactgccttttagatataaagacattgggagtcagcatatccttcaaaccaagtccatagtccatgttttaaaatacatggcttggtgtgtctcctttaacaaaaatggaatggagcagggtaggtcacagtttcctacagaatatggatctaaggttatacttttttaataattgttctaaggtatggtgtcattggctctgaaaaaaaaaagtgatgtagggttatctccctctgaaagaacttgtcactggcccctcaaaatggatttggtggccgggcgcggtggctcacgcctgtaatcccagcactttgggaggctgaggtgggcggatcacctgcggtcaggagttcgagaccagcctggccaactggtggaaccctgtctctactaaaaatataaaaaattagctgggcgtggtggcgggcgcctgtaatcccagcttctcgggaggctgaggcaggagaatcgcttgaacccagcaggcggaggttgcagtgagtcgagatcgtgccactgcactccagctgggcaacgagagcgaaactgtgtctcaaaaaaaaaaacaaaaaaatggatttggttcatcagttactcaaaggggtcactatcctctaagaatggcaccaaggtttgccaccatttgaataatgggaattgggaattatagctttccttcaaaggactgaggctggaatagctccttgataataaaggtcaggttcatcattatcataatttggtgcttgtccattagggaccacccacatatagtgaggggtctgggtctctggaccactcagatgaagaggtcaggtcagtgtttttttctaacctcaaagtaccaaaaagtgagggtcagggcactggcacttatagcaggagaggacattcatttctgtcaccaagaaccagtaaagttaccagctctacaggggaggacttagaggtcagtatcctctaggctgtgagagaggttagtgctttcctaaagtaggagtacctcagggttactgctccctgaagtggaagaggctcggtcaagctttctccaaataggaggggccagagggcagtagatccagagtagatggagtcaacatctgatgtctcccagtaccaagatggaccagtgatctgttgcttcctagaagtagaaatttggggttgccaacccttgaagcagagagatttaggtatcaatatcctcctatgtggaggggagcaggacttaagattcccagaaaggaagaggggaaaagtcactgggaaggtcccagcatccacctttcctcaaagaggaggaggggacaaagaggtccccaacgagcttcctgcagagatttcccttcctcccacagccccaggatagggtgatgcgcaggcaggatgggtcagtggatcgtgtatcccctttgttccccaggtgacagcgggaaggtgaccacagtcgtagccactctaggccaaggcccagagcgctcccaagaagtggcttacacggacatcaaagtgattggcaatggctcatttggggtcgtgtaccaggcacggctggcagagaccagggaactagtcgccatcaagaaggttctccaggacaagaggttcaagaaccgagagctgcagatcatgcgtaagctggaccactgcaatattgtgaggctgagatactttttctactccagtggcgagaagaaagacgagctttacctaaatctggtgctggaatatgtgcccgagacagtgtaccgggtggcccgccacttcaccaaggccaagttgaccatccctatcctctatgtcaaggtgtacatgtaccagctcttccgcagcttggcctacatccactcccagggcgtgtgtcaccgcgacatcaagccccagaacctgctggtggaccctgacactgctgtcctcaagctctgcgattttggcagtgcaaagcagttggtccgaggggagcccaatgtctcctacatctgttctcgctactaccgggccccagagctcatctttggagccactgattacacctcatccatcgatgtttggtcagctggctgtgtactggcagagctcctcttgggccagcccatcttccctggggacagtggggtggaccagctggtggagatcatcaaggtgctgggaacaccaacccgggaacaaatccgagagatgaaccccaactacacggagttcaagttccctcagattaaagctcacccctggacaaaggtgttcaaatctcgaacgccgccagaggccatcgcgctctgctctagcctgctggagtacaccccatcctcaaggctctccccactagaggcctgtgcgcacagcttctttgatgaactgcgatgtctgggaacccagctgcctaacaaccgcccacttccccctctcttcaacttcagtgctggtgaactctccatccaaccgtctctcaacgccattctcatccctcctcacttgaggtccccagcgggcactaccaccctcaccccgtcctcacaagctttaactgagactccgaccagctcagactggcagtcgaccgatgccacacctaccctcactaactcctcctgagggccccaccaagcacccttccacttccatctgggagccccaagaggggctgggaaggggggccatagcccatcaagctcctgccctggctgggcccctagactagagggcagaggtaaatgagtccctgtccccacctccagtccctccctcaccagcctcacccctgtggtgggctttttaagaggattttaactggttgtggggagggaagagaaggacagggtgttggggggatgaggacctcctacccccttggccccctcccctcccccagacctccacctcctccagaccccctcccctcctgtgtcccttgtaaatagaaccagcccagcccgtctcctcttcccttccctggcccccgggtgtaaatagattgttataatttttttcttaaagaaaacgtcgattcgcaccgtccaacctggccccgcccctcctacagctgtaactcccctcctgtcctctgcccccaaggtctactccctcctcaccccaccctggagggccaggggagtggagagagctcctgatgtcttagtttccacagtaaggtttgcctgtgtacagacctccgttcaataaattattggcatgaaaa

SEQ ID NO: 138039 - DNA, 1897 bp, Homo sapiens
  Payload ID: 7039
  Gene Symbol: GSK3A
  Gene Name: glycogen synthase kinase 3 alpha
  Uniprot ID: P49840
  ENST ID: ENST00000453535
  CDS Start-End: 161-1612
tcccggcgtgccccgcggcgggcgctgggccggagccggagcccaagccagagcggcgcggcctggaagaggccagggcccgggggaggcggcggcagcggcggcggctggggcagcccgggcagcccgagccccgcagcctgggcctgtgctcggcgccatgagcggcggcgggccttcgggaggcggccctgggggctcgggcagggcgcggactagctcgttcgcggagcccggcggcggaggcggaggaggcggcggcggccccggaggctcggcctccggcccaggcggcaccggcggcggaaaggcatctgtcggggccatgggtgggggcgtcggggcctcgagctccgggggtggacccggcggcagcggcggaggaggcagcggaggccccggcgcaggcactagcttcccgccgcccggggtgaagctgggccgtgacagcgggaaggtgaccacagtcgtagccactctaggccaaggcccagagcgctcccaagaagtggcttacacggacatcaaagtgattggcaatggctcatttggggtcgtgtaccaggcacggctggcagagaccagggaactagtcgccatcaagaaggttctccaggacaagaggttcaagaaccgagagctgcagatcatgcgtaagctggaccactgcaatattgtgaggctgagatactttttctactccagtggcgagaagaaagacgagctttacctaaatctggtgctggaatatgtgcccgagacagtgtaccgggtggcccgccacttcaccaaggccaagttgaccatccctatcctctatgtcaaggtgtacatgtaccagctcttccgcagcttggcctacatccactcccagggcgtgtgtcaccgcgacatcaagccccagaacctgctggtggaccctgacactgctgtcctcaagctctgcgattttggcagtgcaaagcagttggtccgaggggagcccaatgtctcctacatctgttctcgctactaccgggccccagagctcatctttggagccactgattacacctcatccatcgatgtttggtcagctggctgtgtactggcagagctcctcttgggccagcccatcttccctggggacagtggggtggaccagctggtggagatcatcaaggtgctgggaacaccaacccgggaacaaatccgagagatgaaccccaactacacggagttcaagttccctcagattaaagctcacccctggacaaaggtgttcaaatctcgaacgccgccagaggccatcgcgctctgctctagcctgctggagtacaccccatcctcaaggctctccccactagaggcctgtgcgcacagcttctttgatgaactgcgatgtctgggaacccagctgcctaacaaccgcccacttccccctctcttcaacttcagtgctggtgaactctccatccaaccgtctctcaacgccattctcatccctcctcacttgaggtccccagcgggcactaccaccctcaccccgtcctcacaagctttaactgagactccgaccagctcagactggcagtcgaccgatgccacacctaccctcactaactcctcctgagggccccaccaagcacccttccacttccatctgggagccccaagaggggctgggaaggggggccatagcccatcaagctcctgccctggctgggcccctagactagagggcagagaaaacgtcgattcgcaccgtccaacctggccccgcccctcctacagctgtaactcccctcctgtcctctgcccccaaggtctactccctcctcaccccaccctggagggccaggggagtggagagagctcctgatgtcttagtttccacagtaaggtttgcctgtgtaca

SEQ ID NO: 138040 - DNA, 7711 bp, Homo sapiens
  Payload ID: 7040
  Gene Symbol: GSK3B
  Gene Name: glycogen synthase kinase 3 beta
  Uniprot ID: P49841
  ENST ID: ENST00000264235
  CDS Start-End: 984-2246
cgggcttgtgccgccgccgccgccgccgccgcccgggccaagtgacaaaggaaggaaggaagcgaggaggagccggccccgcagccgctgacagggctctgggctggggcaaagcgcggacacttcctgagcgggcaccgagcagagccgaggggcgggagggcggccgagctgttgccgcggacgggggagggggccccgagggacggaagcggttgccgggttcccatgtccccggcgaatggggaacagtcgaggagccgctgcctggggtctgaagggagctgcctccgccaccgccatggccgctggatccagccgccgcctgcagctgctcctggcgcaatgaggagaggagccgccgccaccgccaccgcccgcctctgactgactcgcgactccgccgccctctagttcgccgggcccctgccgtcagcccgccggatcccgcggcttgccggagctgcagcgtttcccgtcgcatctccgagccaccccctccctccctctccctccctcctacccatccccctttctcttcaagcgtgagactcgtgatccttccgccgcttcccttcttcattgactcggaaaaaaaatccccgaggaaaatataatattcgaagtactcattttcaatcaagtatttgcccccgtttcacgtgatacatatttttttaggatttgccctctcttttctctcctcccaggaaagggaggggaaagaattgtattttttcccaagtcctaaatcatctatatgttaaatatccgtgccgatctgtcttgaaggagaaatatatcgcttgttttgttttttatagtatacaaaaggagtgaaaagccaagaggacgaagtctttttctttttcttctgtgggagaacttaatgctgcatttatcgttaacctaacaccccaacataaagacaaaaggaagaaaaggaggaaggaaggaaaaggtgattcgcgaagagagtgatcatgtcagggcggcccagaaccacctcctttgcggagagctgcaagccggtgcagcagccttcagcttttggcagcatgaaagttagcagagacaaggacggcagcaaggtgacaacagtggtggcaactcctgggcagggtccagacaggccacaagaagtcagctatacagacactaaagtgattggaaatggatcatttggtgtggtatatcaagccaaactttgtgattcaggagaactggtcgccatcaagaaagtattgcaggacaagagatttaagaatcgagagctccagatcatgagaaagctagatcactgtaacatagtccgattgcgttatttcttctactccagtggtgagaagaaagatgaggtctatcttaatctggtgctggactatgttccggaaacagtatacagagttgccagacactatagtcgagccaaacagacgctccctgtgatttatgtcaagttgtatatgtatcagctgttccgaagtttagcctatatccattcctttggaatctgccatcgggatattaaaccgcagaacctcttgttggatcctgatactgctgtattaaaactctgtgactttggaagtgcaaagcagctggtccgaggagaacccaatgtttcgtatatctgttctcggtactatagggcaccagagttgatctttggagccactgattatacctctagtatagatgtatggtctgctggctgtgtgttggctgagctgttactaggacaaccaatatttccaggggatagtggtgtggatcagttggtagaaataatcaaggtcctgggaactccaacaagggagcaaatcagagaaatgaacccaaactacacagaatttaaattccctcaaattaaggcacatccttggactaaggtcttccgaccccgaactccaccggaggcaattgcactgtgtagccgtctgctggagtatacaccaactgcccgactaacaccactggaagcttgtgcacattcattttttgatgaattacgggacccaaatgtcaaactaccaaatgggcgagacacacctgcactcttcaacttcaccactcaagaactgtcaagtaatccacctctggctaccatccttattcctcctcatgctcggattcaagcagctgcttcaacccccacaaatgccacagcagcgtcagatgctaatactggagaccgtggacagaccaataatgctgcttctgcatcagcttccaactccacctgaacagtcccgagcagccagctgcacaggaaaaaccaccagttacttgagtgtcactcagcaacactggtcacgtttggaaagaatattaaaaagagaaaaaaatcctgttcattttagtgttcaatttttttattattattgttgttcttatttaaccttgtaaaatatctataaatacaaaccaatttcattgtattctcactttgagggagatccagggggtgggaggggttgtggggagggggaaagcggagcactagaacatacaatctctctcccacgacaatctttttttattaaaagtctgctgttgtatactttaaaaacaggactcctgcctcatgccccttccacaaaagaagaaaacctttttctgtgctgatgggtttttttgaactttgttttcttttaaagtctagtgtgagactttggtatagtgcacagcttgaaattggttgggagcttagcaggtataactcaacggggacttaaatgtcacttgtaaaattaatccatatcttcgggtatttatagacttgcctttggcatgttggtggcaggtgtggcagacaaagaaatgtgtatcattcgtaacccagggaggtcaataaagtttggaactctacagggaagattcttagtagatttgttaaggttttgttttgctctcagttagtgctagtgatgtagaggcttgtacaggaggctgccagaggggaagcagcaagcaagactcaggcacacatgctctacaggtggctctttgtttgcctgaccaaagttctttgcaaatcttagcacagtttcaaactagtgacctgggaggagatggaaggggtgttgagcaggctgagctagctgctgaggtcaaaggctgatgagcccagaggaaggggacaggtcagggatacatctcaccactgtgaataagtttgtccagatttttttctaaagttacttcccttggaaagatacacttgagaggacattgtagttaaataatgtgaactgtaacagtcatctactggtttatttttcatattttttaattgaaaattgagcttgcagaaatagccacattctacacatagttctaattttaaatccaaatctagaatctgtatttaatttgttttttaacctcatgctttttacatttatttattgatgcatgtcagatggtagaaatattaaaaactacacatcagaatgatacagtcacttatacctgctgactttataggaaagctgatgatataaatgtgtgtatatatgttatatatacatatattcaatactgcctttttttttgtctacagtatcaaaattgactggttgaagcatgagaagaatgtttcccccacacccagttaagagtttttgtgtctgttttctttgtgtatcagtgaacgatgttaagaatcagtctctctttttgaagaaaaagcaatattccttggaaagcaaggagaattgaaggactatgtttgccgtgaggaaatagattttcatgactagtttgttttatacttttaaggttggcatctatgtgggccttatatactctaaaatgaactttagtcaccttggtgcttatgggccattacttgacctatgaatctttaaggcacaatcagttgtactttacatttaaagatcacttgagtgatggccgcctttccctcctacccgctccttccccacatgccttccaaggttagctggtaactgtagggctgcagagctgagcccatggttgtgtgtaacttgccctcaccctcctcattgccaccttaggtcactttatgggtctcgtcctccagagggttcggaagtggagtctgttggcagccctcctgcaggccctagcaccctgtcctgctccttaactgtgtgtgtgactctccaagagagttgtcctgcctgctgaagtgaaccagtacccagaaagacaactgtgagccatcttggttttcactcgctgtttagctgaggtcttgggccacaaaaggggtttcacaaacctctggatatatcagagtttatgagaaaggaaacatgctcagtcaaaccaaatcaaacaaattgaattttatgttttataaagtgcttctgaaagctaagatttgaaagaagtctgaaatcaaagtatttggcagcataactccttaaaggtagtggcgttgatagaccattttcagacagaatttataaagaatctgaaaaggcaggtctgtgatagagaaatggacctgcattcagatccaactgcccagcaagcgtttggatgcagacactgctctggacgtggtatactccccagagtccataaaaatcagtgcttattttaggaaacaggttgccccccacaactggggtaaaagaagagagaaaagtcacgcttttctctcatttcattgtgtgtgcatgtgtgcgtgtgtgtgtgtgtgtgtgtgtgctgagatgtgtgatttttctttctcaaggatcatggtgggatcacagaactcttttatacaagtgagatccaggtctctgaatatctttttgtatataataataataaaaagctcctcaccaaattcaagcttgtacattatattttctttctgtgtttttaaatttaagttttattgttttgtatgtaaatatgtggacccaggaactgttattaatgagcaaaaagttactgttcagggcagtgattctgtttaataatcagacaaaatgtagacgagctttttaaagccatatagttttaactctgtacagtaggtaccggcctgtattattgtaacaataactctagcaatgtatagtgtatctatatagtttggagtgccttcgcttccatgtgtttttttttttaatttgttcttttttaaattttaattggtttcctttatccatgtctccctgtccaccccctttccctttgaaataataactcactcataacagtatctttgccccttccacagttaagtttcagtgataccatactcaggagtgggaagaggaaatcatattcgtaatttcatttcgttgaagccctgcctttgttttggttctgaatgtctttcctcctcggtagcagtgagaccggtttcatttcatacttagtccattcagggacttagtgtagcaccagggagccctagagctggaggatatcgaatagattaaattttgctcgtctcttccacaagccctaaccatgggtcttaaaaacagcagattctgggagccttccatgctctctctctctcctcttttatctacttccctcccaaatgagagagtgacagagaattgtttttttataaatcgaagtttcttaatagtatcaggttttgatacgtcagtggtctaaaatgctatagtgcaattactagcagttactgcacggagtgccaccgtgccaatagaggactgttgttttaacaagggaactcttagcccatttcctccctcccgccatctctacccttgctcaatgaaatatcattttaatttcttttaaaaaaaatcagtttaattcttactgtgtgcccaacacgaaggccttttttgaaagaaaaatagaatgttttgcctcaaagtagtccatataaaatgtcttgaatagaagaaaaaactaccaaaccaaaggttactatttttgaaacatcgtgtgttcattccagcaaggcagaagactgcaccttctttccagtgacatgctgtgtcattttttttaagtcctcttaatttttagacacatttttggtttatgttttaacaatgtatgcctaaccagtcatcttgtctgcaccaatgcaaaggtttctgagaggagtattctctatccctgtggatatgaagacactggcatttcatctatttttccctttcctttttaaaggatttaactttggaatcttccaaaggaagtttggccaatgccagatccccaggaatttggggggttttctttcttttcaactgaaattgtatctgattcctactgttcatgttagtgatcatctaatcacagagccaaacacttttctcccctgtgtggaaaagtaggtatgctttacaataaaatctgtcttttctggtagaaacctgagccactgaaaataaaagagacaactagaagcacagtagagtcccagactgagatctacctttgagaggctttgaaagtaatccctggggtttggattattttcacaagggttatgccgttttattcaagtttgttgctccgttttgcacctctgcaataaaagcaaaatgacaaccagtacataaggggttagcttgacaaagtagacttccttgtgttaatttttaagtttttttttccttaactatatctgtctacaggcagatacagatagttgtatgaaaatctgcttgcctgtaaaatttgcatttataaatgtgttgccgatggatcacttgggcctgtacacataccaattagcgtgaccacttccatcttaaaaacaaacctaaaaaacaaaatttattatatatatatatatatatatataaaggactgtgggttgtatacaaactattgcaaacacttgtgcaaatctgtcttgatataaaggaaaagcaaaatctgtataacattattactacttgaatgcctctgtgactgatttttttttcattttaaatataaacttttttgtgaaaagtatgctcaatgttttttttccctttccccattcccttgtaaatacattttgttctatgtgacttggtttggaaatagttaactggtactgtaatttgcattaaataaaaagtaggttagcctggaaatgaaattaaaattcacaagtgtgtggtctttatttcagtacccaaccctcttccttcaccctactattttgccgctgcaatatgtagtcacatcaccatttccattcctctaattagggaaacattaatctttgttatacagaacaagatatcaataccacttcttgttctttccaatgattttattccattgtgtagccccaagaggtgcagcttccaccttggaaacctttggatttgatgtagaggaagctttgcagacactgcttagaaaagaaagaaaacaactctgaaagggacagtttttaaatgtgtataagctgctgtctttgattactgtgttcatgatttggtgtggctgtattttcttttaactttcatcctattagtaatggtctttgggggtctctgtaaaatatatggacaccacgaacagtggggctgtacctcccaggtaaccaacacatgttgtgtttgagtctgctcatttccaatactggatgatgtatgtaaacatgttatgtctcttagtgcaaaaagaaacatcatttttttagggctggctcactctgtcaggcctaatctaaaggctagatataaggtcatgtgactgctgcttcaataaaaacaaatttatattc

SEQ ID NO: 138041 - DNA, 1636 bp, Homo sapiens
  Payload ID: 7040
  Gene Symbol: GSK3B
  Gene Name: glycogen synthase kinase 3 beta
  Uniprot ID: P49841
  ENST ID: ENST00000316626
  CDS Start-End: 233-1534
atcatctatatgttaaatatccgtgccgatctgtcttgaaggagaaatatatcgcttgttttgttttttatagtatacaaaaggagtgaaaagccaagaggacgaagtctttttctttttcttctgtgggagaacttaatgctgcatttatcgttaacctaacaccccaacataaagacaaaaggaagaaaaggaggaaggaaggaaaaggtgattcgcgaagagagtgatcatgtcagggcggcccagaaccacctcctttgcggagagctgcaagccggtgcagcagccttcagcttttggcagcatgaaagttagcagagacaaggacggcagcaaggtgacaacagtggtggcaactcctgggcagggtccagacaggccacaagaagtcagctatacagacactaaagtgattggaaatggatcatttggtgtggtatatcaagccaaactttgtgattcaggagaactggtcgccatcaagaaagtattgcaggacaagagatttaagaatcgagagctccagatcatgagaaagctagatcactgtaacatagtccgattgcgttatttcttctactccagtggtgagaagaaagatgaggtctatcttaatctggtgctggactatgttccggaaacagtatacagagttgccagacactatagtcgagccaaacagacgctccctgtgatttatgtcaagttgtatatgtatcagctgttccgaagtttagcctatatccattcctttggaatctgccatcgggatattaaaccgcagaacctcttgttggatcctgatactgctgtattaaaactctgtgactttggaagtgcaaagcagctggtccgaggagaacccaatgtttcgtatatctgttctcggtactatagggcaccagagttgatctttggagccactgattatacctctagtatagatgtatggtctgctggctgtgtgttggctgagctgttactaggacaaccaatatttccaggggatagtggtgtggatcagttggtagaaataatcaaggtcctgggaactccaacaagggagcaaatcagagaaatgaacccaaactacacagaatttaaattccctcaaattaaggcacatccttggactaaggattcgtcaggaacaggacatttcacctcaggagtgcgggtcttccgaccccgaactccaccggaggcaattgcactgtgtagccgtctgctggagtatacaccaactgcccgactaacaccactggaagcttgtgcacattcattttttgatgaattacgggacccaaatgtcaaactaccaaatgggcgagacacacctgcactcttcaacttcaccactcaagaactgtcaagtaatccacctctggctaccatccttattcctcctcatgctcggattcaagcagctgcttcaacccccacaaatgccacagcagcgtcagatgctaatactggagaccgtggacagaccaataatgctgcttctgcatcagcttccaactccacctgaacagtcccgagcagccagctgcacaggaaaaaccaccagttacttgagtgtcactcagcaacactggtcacgtttggaaagaatattaaaaagagaaaaaaa

SEQ ID NO: 138042 - DNA, 1890 bp, Homo sapiens
  Payload ID: 7041
  Gene Symbol: GYG1
  Gene Name: glycogenin 1
  Uniprot ID: P46976
  ENST ID: ENST00000296048
  CDS Start-End: 190-1191
ccgcgcagctgggaggatgcggacggcagcgagagcgtgcgcggccacgtgacggccgctataagagcgcacggggcagacgctcggttccccgccgtgcctcctcgctggccgcgctccctcccggtgccggcttctctgagtcaccaacctgaggctgccccggccgcctgcgcacccggcagcaccatgacagatcaggcctttgtgacactaaccacaaacgatgcctacgccaaaggtgccctggtcctgggatcatctctgaaacagcacaggaccaccaggaggctggtcgtgctcgccacccctcaggtctcagactccatgagaaaagttttagagacagtctttgatgaagtcatcatggtagatgtcttggacagtggcgattctgctcatctaaccttaatgaagaggccagagttgggtgtcacgctgacaaagctccactgctggtcgcttacacagtattcaaaatgtgtattcatggatgcagatactctggtcctagcaaatattgatgatctttttgacagagaagaattgtcagcagcaccagacccagggtggcctgactgcttcaattccggagtcttcgtttatcagccttcagttgaaacatacaatcagctgttgcatcttgcttctgagcaaggtagttttgatggtggggaccaaggcatactgaacacattttttagcagctgggcaacaacagatatcagaaaacacctgccgtttatttataacctaagcagcatctctatatactcctacctcccggcatttaaagtgtttggtgcaagtgccaaagttgtgcatttcctgggacgagtcaaaccatggaattatacttatgatcccaaaacaaaaagtgtcaaaagtgaggcccatgatcccaacatgactcatccagagtttctcatcctgtggtggaacatctttaccaccaacgttttacctctgcttcaacaatttggccttgtcaaagacacctgctcatatgtaaatgtggaagatgtctcaggagccatatcacatctgtcccttggggagatcccagctatggcacagccgtttgtatcctcggaagaacggaaggaacgatgggaacagggccaggctgattatatgggagcagattcctttgacaacatcaagaggaaacttgacacttacctccagtagaaacactgcatttttctgtgaacacatccacttcacaagccttgtttctgatacttagtatctagagctgggttgagaaaagtctgttacagttgctagaggttttcattaaaacttatcagatgagaggcttttttaggataagaggtgagaactgggcaaaagttgtgaagcagcaattctgttatatggacagtgttctgctttttaatcctatttagcttgtttcagaaattctcacttttgttgactgccaacatacaaagtaagggaaactcaagatattaagatggctgtatcagttcttaaaatctgcagagcctggttcaaaatcagtcactcccttcagaagcagacatggcatctgttccttgcttgcttgttggttgtgtacctttcacgagacctgaattttagaattgcccagtgctgccagagtgagtgagtgtaattctcctttcaggtaaagataggctatctcaacactgctgagtgattcataaacatatcaaccaatagcattaacccattttatttcctgtccttagtgtctgaagatgctcaccagttttctgtgtacagtaaggcagcatgctaaaatgcttttgttcagttctgtatatttgaaaatagcagtgtgttctctgatggttacctgcagtggcaccctgtacaaaaaataaaagacttattgctgta

SEQ ID NO: 138043 - DNA, 2052 bp, Homo sapiens
  Payload ID: 7041
  Gene Symbol: GYG1
  Gene Name: glycogenin 1
  Uniprot ID: P46976
  ENST ID: ENST00000345003
  CDS Start-End: 301-1353
agcaggggcgccggtgagccgcagccgcagcggcagcctagccccgagggagggaggaggagccgagggagacgcgggacccggagccccgcgggccaccgcccctgccggccgcgcagctgggaggatgcggacggcagcgagagcgtgcgcggccacgtgacggccgctataagagcgcacggggcagacgctcggttccccgccgtgcctcctcgctggccgcgctccctcccggtgccggcttctctgagtcaccaacctgaggctgccccggccgcctgcgcacccggcagcaccatgacagatcaggcctttgtgacactaaccacaaacgatgcctacgccaaaggtgccctggtcctgggatcatctctgaaacagcacaggaccaccaggaggctggtcgtgctcgccacccctcaggtctcagactccatgagaaaagttttagagacagtctttgatgaagtcatcatggtagatgtcttggacagtggcgattctgctcatctaaccttaatgaagaggccagagttgggtgtcacgctgacaaagctccactgctggtcgcttacacagtattcaaaatgtgtattcatggatgcagatactctggtcctagcaaatattgatgatctttttgacagagaagaattgtcagcagcaccagacccagggtggcctgactgcttcaattccggagtcttcgtttatcagccttcagttgaaacatacaatcagctgttgcatcttgcttctgagcaaggtagttttgatggtggggaccaaggcatactgaacacattttttagcagctgggcaacaacagatatcagaaaacacctgccgtttatttataacctaagcagcatctctatatactcctacctcccggcatttaaagtgtttggtgcaagtgccaaagttgtgcatttcctgggacgagtcaaaccatggaattatacttatgatcccaaaacaaaaagtgtcaaaagtgaggcccatgatcccaacatgactcatccagagtttctcatcctgtggtggaacatctttaccaccaacgttttacctctgcttcaacaatttggccttgtcaaagacacctgctcatatgtaaatgtgctttcagacttggtctatacactggctttctcttgtggcttctgtagaaaggaagatgtctcaggagccatatcacatctgtcccttggggagatcccagctatggcacagccgtttgtatcctcggaagaacggaaggaacgatgggaacagggccaggctgattatatgggagcagattcctttgacaacatcaagaggaaacttgacacttacctccagtagaaacactgcatttttctgtgaacacatccacttcacaagccttgtttctgatacttagtatctagagctgggttgagaaaagtctgttacagttgctagaggttttcattaaaacttatcagatgagaggcttttttaggataagaggtgagaactgggcaaaagttgtgaagcagcaattctgttatatggacagtgttctgctttttaatcctatttagcttgtttcagaaattctcacttttgttgactgccaacatacaaagtaagggaaactcaagatattaagatggctgtatcagttcttaaaatctgcagagcctggttcaaaatcagtcactcccttcagaagcagacatggcatctgttccttgcttgcttgttggttgtgtacctttcacgagacctgaattttagaattgcccagtgctgccagagtgagtgagtgtaattctcctttcaggtaaagataggctatctcaacactgctgagtgattcataaacatatcaaccaatagcattaacccattttatttcctgtccttagtgtctgaagatgctcaccagttttctgtgtacagtaaggcagcatgctaaaatgcttttgttcagttctgtatatttgaaaatagcagtgtgttctctgatggttacctgcagtggcaccctgtacaaaaaataaaagacttattgctgta

SEQ ID NO: 138044 - DNA, 713 bp, Homo sapiens
  Payload ID: 7041
  Gene Symbol: GYG1
  Gene Name: glycogenin 1
  ENST ID: ENST00000473005
  CDS Start-End: 534-713
gccacaaagattgcaggtgtaacccagagttcagccgtctttaggaagattaaactcctacccagctgtcattggtctttcttggtcatttgtaatgttggctagtctggtgttctaacctgtgttctatcccttatttaatcttggaaatcatccatatccttgcttccagaaatccttgaatcctgctcaccttattacatttttctccatgatcgcctggaacctggacttcatttgagttagatgatcattcattttgcctagcttaagtatttttggtacagattgacagcgatgttacccatgttataatgggctgaagataatagaagcaagtacaggcggatgttgatgggcctgtcaagggacaggtgccactgttcagagctttcctagagtatcaggcctttgtgacactaaccacaaacgatgcctacgccaaaggtgccctggtcctgggatcatctctgaaacagcacaggaccaccaggaggctggtcgtgctcgccacccctcaggtctcagactccatgagaaaagttttagagacagtctttgatgaagtcatcatggtagatgtcttggacagtggcgattctgctcatctaaccttaatgaagaggccagagttgggtgtcacgctgacaaagctccactgctggtcgcttacacagtattcaaaatgtgtattcatggatgcagatactctg

SEQ ID NO: 138045 - DNA, 657 bp, Homo sapiens
  Payload ID: 7041
  Gene Symbol: GYG1
  Gene Name: glycogenin 1
  ENST ID: ENST00000492285
  CDS Start-End: 327-657
ctccctcccggtgccggcttctctgagtcaccaacctgaggctgccccggccgcctgcgcacccggcagcaccatgacagattgacagcgatgttacccatgttataatgggctgaagataatagaagcaagtacaggcggatgttgatgggcctgtcaagggacaggtgccactgttcagagctttcctagagtatcaggcctttgtgacactaaccacaaacgatgcctacgccaaaggtgccctggtcctgggatcatctctgaaacagcacaggaccaccaggaggctggtcgtgctcgccacccctcaggtctcagactccatgagaaaagttttagagacagtctttgatgaagtcatcatggtagatgtcttggacagtggcgattctgctcatctaaccttaatgaagaggccagagttgggtgtcacgctgacaaagctccactgctggtcgcttacacagtattcaaaatgtgtattcatggatgcagatactctggtcctagcaaatattgatgatctttttgacagagaagaattgtcagcagcaccagacccagggtggcctgactgcttcaattccggagtcttcgtttatcagccttcagttgaaacatacaatcagctgttgcatcttgcttctgagcaag

SEQ ID NO: 138046 - DNA, 801 bp, Homo sapiens
  Payload ID: 7041
  Gene Symbol: GYG1
  Gene Name: glycogenin 1
  ENST ID: ENST00000483267
  CDS Start-End: 130-711
ataagagcgcacggggcagacgctcggttccccgccgtgcctcctcgctggccgcgctccctcccggtgccggcttctctgagtcaccaacctgaggctgccccggccgcctgcgcacccggcagcaccatgacagatcaggcctttgtgacactaaccacaaacgatgcctacgccaaaggtgccctggtcctgggatcatctctgaaacagcacaggaccaccaggaggctggtcgtgctcgccacccctcaggtctcagactccatgagaaaagttttagagacagtctttgatgaagtcatcatggtagatgtcttggacagtggcgattctgctcatctaaccttaatgaagaggccagagttgggtgtcacgctgacaaagctccactgctggtcgcttacacagtattcaaaatgtgtattcatggatgcagatactctggtcctagcaaatattgatgatctttttgacagagaagaattgtcagcagcaccagacccagggtggcctgactgcttcaattccggagtcttcgtttatcagccttcagttgaaacatacaatcagctgttgcatcttgcttctgagcaaggtttggtgcaagtgccaaagttgtgcatttcctgggacgagtcaaaccatggaattatacttatgatcccaaaacaaaaagtgtcaaaagtgaggcccatgatcccaacatgactcatccagagtttctcatcctgtggtggaacatctttaccaccaacgttttacctctgcttcaacaatttggccttgtcaaagacacct

SEQ ID NO: 138047 - DNA, 866 bp, Homo sapiens
  Payload ID: 7041
  Gene Symbol: GYG1
  Gene Name: glycogenin 1
  ENST ID: ENST00000461191
  CDS Start-End: 70-866
ctcccggtgccggcttctctgagtcaccaacctgaggctgccccggccgcctgcgcacccggcagcaccatgacagatcaggcctttgtgacactaaccacaaacgatgcctacgccaaaggtgccctggtcctgggatcatctctgaaacagcacaggaccaccaggaggctggtcgtgctcgccacccctcaggtctcagactccatgagaaaagttttagagacagtctttgatgaagtcatcatggtagatgtcttggacagtggcgattctgctcatctaaccttaatgaagaggccagagttgggtgtcacgctgacaaagctccactgctggtcgcttacacagtattcaaaatgtgtattcatggatgcagatactctggtcctagcaaatattgatgatctttttgacagagaagaattgtcagcagcaccagacccagggtggcctgactgcttcaattccggagtcttcgtttatcagccttcagttgaaacatacaatcagctgttgcatcttgcttctgagcaaggtggggaccaaggcatactgaacacattttttagcagctgggcaacaacagatatcagaaaacacctgccgtttatttataacctaagcagcatctctatatactcctacctcccggcatttaaagtgtttggtgcaagtgccaaagttgtgcatttcctgggacgagtcaaaccatggaattatacttatgatcccaaaacaaaaagtgtcaaaagtgaggcccatgatcccaacatgactcatccagagtttctcatcctgtggtggaacatctttaccaccaacgttttacctctgcttcaacaatttggccttgtcaaagacac

SEQ ID NO: 138048 - DNA, 1563 bp, Homo sapiens
  Payload ID: 7041
  Gene Symbol: GYG1
  Gene Name: glycogenin 1
  Uniprot ID: P46976
  ENST ID: ENST00000484197
  CDS Start-End: 84-923
gctggccgcgctccctcccggtgccggcttctctgagtcaccaacctgaggctgccccggccgcctgcgcacccggcagcaccatgacagatcaggcctttgtgacactaaccacaaacgatgcctacgccaaaggtgccctggtcctgggatcatctctgaaacagcacaggaccaccaggaggctggtcgtgctcgccacccctcaggtctcagactccatgagaaaagttttagagacagtctttgatgaagtcatcatggtagatgtcttggacagtggcgattctgctcatctaaccttaatgaagaggccagagttgggtgtcacgctgacaaagctccactgctggtcgcttacacagtattcaaaatgtgtattcatggatgcagatactctggtcctagcaaatattgatgatctttttgacagagaagaattgtcagcagcaccagacccagggtggcctgactgcttcaattccggagtcttcgtttatcagccttcagttgaaacatacaatcagctgttgcatcttgcttctgagcaaggtagttttgatggtggggaccaaggcatactgaacacattttttagcagctgggcaacaacagatatcagaaaacacctgccgtttatttataacctaagcagcatctctatatactcctacctcccggcatttaaagtgaagatgtctcaggagccatatcacatctgtcccttggggagatcccagctatggcacagccgtttgtatcctcggaagaacggaaggaacgatgggaacagggccaggctgattatatgggagcagattcctttgacaacatcaagaggaaacttgacacttacctccagtagaaacactgcatttttctgtgaacacatccacttcacaagccttgtttctgatacttagtatctagagctgggttgagaaaagtctgttacagttgctagaggttttcattaaaacttatcagatgagaggcttttttaggataagaggtgagaactgggcaaaagttgtgaagcagcaattctgttatatggacagtgttctgctttttaatcctatttagcttgtttcagaaattctcacttttgttgactgccaacatacaaagtaagggaaactcaagatattaagatggctgtatcagttcttaaaatctgcagagcctggttcaaaatcagtcactcccttcagaagcagacatggcatctgttccttgcttgcttgttggttgtgtacctttcacgagacctgaattttagaattgcccagtgctgccagagtgagtgagtgtaattctcctttcaggtaaagataggctatctcaacactgctgagtgattcataaacatatcaaccaatagcattaacccattttatttcctgtccttagtgtctgaagatgctcaccagttttctgtgtacagtaaggcagcatgctaaaatgcttttgttcagttctgtatatttgaaaatagcagtgtgttctctgatggttacctgcagtggcaccctgtacaaaaaataaaagacttattgctgt

SEQ ID NO: 138049 - DNA, 1831 bp, Homo sapiens
  Payload ID: 7041
  Gene Symbol: GYG1
  Gene Name: glycogenin 1
  ENST ID: ENST00000627418
  CDS Start-End: 234-815
ggagacgcgggacccggagccccgcgggccaccgcccctgccggccgcgcagctgggaggatgcggacggcagcgagagcgtgcgcggccacgtgacggccgctataagagcgcacggggcagacgctcggttccccgccgtgcctcctcgctggccgcgctccctcccggtgccggcttctctgagtcaccaacctgaggctgccccggccgcctgcgcacccggcagcaccatgacagatcaggcctttgtgacactaaccacaaacgatgcctacgccaaaggtgccctggtcctgggatcatctctgaaacagcacaggaccaccaggaggctggtcgtgctcgccacccctcaggtctcagactccatgagaaaagttttagagacagtctttgatgaagtcatcatggtagatgtcttggacagtggcgattctgctcatctaaccttaatgaagaggccagagttgggtgtcacgctgacaaagctccactgctggtcgcttacacagtattcaaaatgtgtattcatggatgcagatactctggtcctagcaaatattgatgatctttttgacagagaagaattgtcagcagcaccagacccagggtggcctgactgcttcaattccggagtcttcgtttatcagccttcagttgaaacatacaatcagctgttgcatcttgcttctgagcaaggtttggtgcaagtgccaaagttgtgcatttcctgggacgagtcaaaccatggaattatacttatgatcccaaaacaaaaagtgtcaaaagtgaggcccatgatcccaacatgactcatccagagtttctcatcctgtggtggaacatctttaccaccaacgttttacctctgcttcaacaatttggccttgtcaaagacacctgctcatatgtaaatgtggaagatgtctcaggagccatatcacatctgtcccttggggagatcccagctatggcacagccgtttgtatcctcggaagaacggaaggaacgatgggaacagggccaggctgattatatgggagcagattcctttgacaacatcaagaggaaacttgacacttacctccagtagaaacactgcatttttctgtgaacacatccacttcacaagccttgtttctgatacttagtatctagagctgggttgagaaaagtctgttacagttgctagaggttttcattaaaacttatcagatgagaggcttttttaggataagaggtgagaactgggcaaaagttgtgaagcagcaattctgttatatggacagtgttctgctttttaatcctatttagcttgtttcagaaattctcacttttgttgactgccaacatacaaagtaagggaaactcaagatattaagatggctgtatcagttcttaaaatctgcagagcctggttcaaaatcagtcactcccttcagaagcagacatggcatctgttccttgcttgcttgttggttgtgtacctttcacgagacctgaattttagaattgcccagtgctgccagagtgagtgagtgtaattctcctttcaggtaaagataggctatctcaacactgctgagtgattcataaacatatcaaccaatagcattaacccattttatttcctgtccttagtgtctgaagatgctcaccagttttctgtgtacagtaaggcagcatgctaaaatgcttttgttcagttctgtatatttgaaaatagcagtgtgttctctgatggttacctgcagtggcaccctgtacaaaaaataaaagacttattgctgtatcttggttgtttaattaaattaaggaatttcaccat

SEQ ID NO: 138050 - DNA, 731 bp, Homo sapiens
  Payload ID: 7042
  Gene Symbol: GYG2
  Gene Name: glycogenin 2
  ENST ID: ENST00000381157
  CDS Start-End: 1-731
gctacagcacgccatggaacacggcagctttgacggggcagaccaaggcttactgaatagtttcttcaggaactggtcgaccacagacatccacaagcacctgccgttcatctataacttgagtagtaacacgatgtacacttacagccctgccttcaagcaattcggttccagtgcaaaggtcgtccactttttggggtccatgaaaccttggaactacaagtacaatccacagagtggctcggtgttggagcaaggctcagcgtccagcagccagcaccaggcggcattccttcatctctggtggacggtctaccagaacaacgtgctgcccctttataaaagcgtccaagcgggggaagcacgcgcgtctcctggtcacacactttgccacagtgatgtgggggggccgtgtgcggattcagcctctggtgttggagagccgtgtgaaaattcaacacccagtgcgggcgtgccgtgtgcaaattcaccactgggttctaaccagcctgctcagggccttccggagccgacccagatagtggatgagaccctgtccctacctgaaggacgccgttcagaagatatgatagcttgtcctgaaactgagactcctgccgtgataacgtgtgacccactgtcccagccttcccctcagcctgcagacttcacagagactgaaaccatcttggtcgacctggccgtctctgtttcccagatctccatcgaag

SEQ ID NO: 138051 - DNA, 3393 bp, Homo sapiens
  Payload ID: 7042
  Gene Symbol: GYG2
  Gene Name: glycogenin 2
  Uniprot ID: O15488
  ENST ID: ENST00000381163
  CDS Start-End: 283-1788
cgcgggcttgcgggcaggggctgcagggaggaggagaggacccgcgcccgcgggggctggcggaggcggggccgggcttccggacagaggccaatcgctgccctcggggcctccagcgccggctctgggccgaggcagccagagcgcggaagaggcctggaaatccacgcggattcccggagacggcgcctctgctctgcgggttcgtggcgaggaagtccacccactgctcccgggcgcaggtctgcaggtccgcgcccactgcccgcggcgccactgaccatgtcggagacagagtttcaccatggtgcccaggctggtctcgaactcctgaggtcaagcaattcacccacctcagcctcccaaagtgctggaatgacagtgactgatcaggcttttgtcacactagccaccaatgacatctactgccagggcgccctggtcctggggcagtcactgaggagacacaggctgacgaggaagctggtggtgttgatcactcctcaggtgtccagcctgctcagggtcatcctctcgaaggtgttcgatgaagtcattgaagtgaatctaatcgatagtgccgactacatccacctggcctttctgaagagacctgagctcgggctcaccctcaccaagcttcactgttggactctcactcactacagcaagtgtgtcttcctggatgcagacactctggtgctgtccaatgtcgatgagctgtttgacaggggagagttttctgcggccccggaccccggatggccggattgcttcaatagcggggtgtttgtcttccagccttctctccacacgcataaactcctgctacagcacgccatggaacacggcagctttgacggggcagaccaaggcttactgaatagtttcttcaggaactggtcgaccacagacatccacaagcacctgccgttcatctataacttgagtagtaacacgatgtacacttacagccctgccttcaagcaattcggttccagtgcaaaggtcgtccactttttggggtccatgaaaccttggaactacaagtacaatccacagagtggctcggtgttggagcaaggctcagcgtccagcagccagcaccaggcggcattccttcatctctggtggacggtctaccagaacaacgtgctgcccctttataaaagcgtccaagcgggggaagcacgcgcgtctcctggtcacacactttgccacagtgatgtgggggggccgtgtgcggattcagcctctggtgttggagagccgtgtgaaaattcaacacccagtgcgggcgtgccgtgtgcaaattcaccactgggttctaaccagcctgctcagggccttccggagccgacccagatagtggatgagaccctgtccctacctgaaggacgccgttcagaagatatgatagcttgtcctgaaactgagactcctgccgtgataacgtgtgacccactgtcccagccttcccctcagcctgcagacttcacagagactgaaaccatcttgcagccagcaaataaagtcgaaagtgtctcatccgaggaaaccttcgaaccaagccaggaactccctgctgaggctctcagggaccccagtctgcaggatgcactggaggtcgacctggccgtctctgtttcccagatctccatcgaagagaaggtgaaggaattgagccccgaggaagagaggaggaagtgggaggaaggccgtatcgactacatggggaaggacgcgtttgctcgcatccaggagaagctggaccggttcctgcagtaatccggcagctggtgggcgttgtgtgtagttagacaatgtcctgttgggtggtcctgttgcgtggagatctcctctggtcctttcaaagggaaacgctgttgaaccttgtgcctctatttatgcttaatccatttgagtgcctcacacaaaaaacgtagagtatagaaatccaccttaaagcccctcgccccaacttctccaccaacgccttctgggctttcttcagaggtcacttctacccttgaagctgtcggcaaaagcgagcagtaataacattctagtagactctcgatggtggtctccgctcttgcccgaaggacctctgaagtacgctggagctgtgttgtacaggtgctgtgagacctaccctattcagaattaaacctcactgcaaatttcctcccatcacgaagctaacaacactaatatacgtatttagcacctctgaggctttgccatggagacccatttctgtagggctaaggaaacatttagacgtggtgactgactttcatttggacttggcgaagtgtatctgagaaacacctcggctgtggtctctctgctttaaatcctaacaggacttcctagagcgttgacagaaattctactcgtggacgttgggaagaaagattgtaggtggcttggggaatgtgggtggcttagaggatctaaaccgattcacttcctggttgagaagcaacgagggcttgctctaaatcgtttagaggataacaggatctagagatgctctctgcttgacaacaaaagtcagggtgcagtcggtccacccttgactgctcttggcttggtctctaccctcactacctcagttctcaataacttagtgaatcactgccctcctcaaagccatttccactcagctctttccagagaattctcagttttatgagacgggaaactttatttcacgagaaagcctcattgtcagaagtatcttcattcaatgggcacaatatgctgtgtatctcaccaggtagctgtcaggggccaccgagagtgtcgttaaaaatgggcatggttgtaataaaggaggaaagtgcgacttttgaaatgtttggaaggtttatttctcatgcacattccagggaaaagcagagagtaaattagagacgggataggaaggccgtgggagaactcgatcctagcctgtgtcagctggatgtgtttacgtggagaggcgtggccactttttaggtcacctgaagcagtttagcctttggatagaggaacctgcctgaatttatggcattagtggtggcatttttttgtgtacaagatgtgggtgatggaggggctgtttctttttccgtgtgggtggttaataatcgtcagtctcggagggcgaggctcgtaggatatttcaggtgagtcagggttggatggtcatcggctttcagaaggagaccacgggaatgttcagggaaacaatgtcagcttctctgaggaccagaattcatgttcacgggcagtgatgagttggcttatggagtgagtccagtctggaattccgccgtgcattctagcctgtatcatctcatttggacaaatgctggcacgttgaaattaaaatgttaaaaaaca

SEQ ID NO: 138052 - DNA, 1956 bp, Homo sapiens
  Payload ID: 7042
  Gene Symbol: GYG2
  Gene Name: glycogenin 2
  Uniprot ID: O15488
  ENST ID: ENST00000398806
  CDS Start-End: 317-1729
cttcccggcagccggggctgggcaccaggcggcgcgcgggcttgcgggcaggggctgcagggaggaggagaggacccgcgcccgcgggggctggcggaggcggggccgggcttccggacagaggccaatcgctgccctcggggcctccagcgccggctctgggccgaggcagccagagcgcggaagaggcctggaaatccacgcggattcccggagacggcgcctctgctctgcgggttcgtggcgaggaagtccacccactgctcccgggcgcaggtctgcaggtccgcgcccactgcccgcggcgccactgaccatgtcggtgactgatcaggcttttgtcacactagccaccaatgacatctactgccagggcgccctggtcctggggcagtcactgaggagacacaggctgacgaggaagctggtggtgttgatcactcctcaggtgtccagcctgctcagggtcatcctctcgaaggtgttcgatgaagtcattgaagtgaatctaatcgatagtgccgactacatccacctggcctttctgaagagacctgagctcgggctcaccctcaccaagcttcactgttggactctcactcactacagcaagtgtgtcttcctggatgcagacactctggtgctgtccaatgtcgatgagctgtttgacaggggagagttttctgcggccccggaccccggatggccggattgcttcaatagcggggtgtttgtcttccagccttctctccacacgcataaactcctgctacagcacgccatggaacacggcagctttgacggggcagaccaaggcttactgaatagtttcttcaggaactggtcgaccacagacatccacaagcacctgccgttcatctataacttgagtagtaacacgatgtacacttacagccctgccttcaagcaattcggttccagtgcaaaggtcgtccactttttggggtccatgaaaccttggaactacaagtacaatccacagagtggctcggtgttggagcaaggctcagcgtccagcagccagcaccaggcggcattccttcatctctggtggacggtctaccagaacaacgtgctgcccctttataaaagcgtccaagcgggggaagcacgcgcgtctcctggtcacacactttgccacagtgatgtgggggggccgtgtgcggattcagcctctggtgttggagagccgtgtgaaaattcaacacccagtgcgggcgtgccgtgtgcaaattcaccactgggttctaaccagcctgctcagggccttccggagccgacccagatagtggatgagaccctgtccctacctgaaggacgccgttcagaagatatgatagcttgtcctgaaactgagactcctgccgtgataacgtgtgacccactgtcccagccttcccctcagcctgcagacttcacagagactgaaaccatcttgcagccagcaaataaagtcgaaagtgtctcatccgaggaaaccttcgaaccaagccaggaactccctgctgaggctctcagggaccccagtctgcaggatgcactggaggtcgacctggccgtctctgtttcccagatctccatcgaagagaaggtgaaggaattgagccccgaggaagagaggaggaagtgggaggaaggccgtatcgactacatggggaaggacgcgtttgctcgcatccaggagaagctggaccggttcctgcagtaatccggcagctggtgggcgttgtgtgtagttagacaatgtcctgttgggtggtcctgttgcgtggagatctcctctggtcctttcaaagggaaacgctgttgaaccttgtgcctctatttatgcttaatccatttgagtgcctcacacaaaaaacgtagagtatagaaatccaccttaaagcccctcgccccaacttctccaccaacgccttctgggctttcttcaga

SEQ ID NO: 138053 - DNA, 624 bp, Homo sapiens
  Payload ID: 7042
  Gene Symbol: GYG2
  Gene Name: glycogenin 2
  ENST ID: ENST00000520904
  CDS Start-End: 212-624
agtgcgccgagccagggcaccgagtgctggggaatacaggccgtccaggcgcggcggggcgcggggagacggaggctgccggagcctggaaatccacgcggattcccggagacggcgcctctgctctgcgggttcgtggcgaggaagtccacccactgctcccgggcgcaggtctgcaggtccgcgcccactgcccgcggcgccactgaccatgtcggtgactgatcaggcttttgtcacactagccaccaatgacatctactgccagggcgccctggtcctggggcagtcactgaggagacacaggctgacgaggaagctggtggtgttgatcactcctcaggtgtccagcctgctcagggtcatcctctcgaaggtgttcgatgaagtcattgaagtgaatctaatcgatagtgccgactacatccacctggcctttctgaagagacctgagctcgggctcaccctcaccaagcttcactgttggactctcactcactacagcaagtgtgtcttcctggatgcagacactctggtgctgtccaatgtcgatgagctgtttgacaggggagagttttctgcggccccggaccccggatggccggattgcttcaatagcggggt

SEQ ID NO: 138054 - DNA, 1293 bp, Homo sapiens
  Payload ID: 7042
  Gene Symbol: GYG2
  Gene Name: glycogenin 2
  Uniprot ID: O15488
  ENST ID: ENST00000353656
  CDS Start-End: 1-1293
atgtcggagacagagtttcaccatggtgcccaggctggtctcgaactcctgaggtcaagcaattcacccacctcagcctcccaaagtgctggaatgacagtgactgatcaggcttttgtcacactagccaccaatgacatctactgccagggcgccctggtcctggggcagtcactgaggagacacaggctgacgaggaagctggtggtgttgatcactcctcaggtgtccagcctgctcagggtcatcctctcgaaggtgttcgatgaagtcattgaagtgaatctaatcgatagtgccgactacatccacctggcctttctgaagagacctgagctcgggctcaccctcaccaagcttcactgttggactctcactcactacagcaagtgtgtcttcctggatgcagacactctggtgctgtccaatgtcgatgagctgtttgacaggggagagttttctgcggccccggaccccggatggccggattgcttcaatagcggggtgtttgtcttccagccttctctccacacgcataaactcctgctacagcacgccatggaacacggcagctttgacggggcagaccaaggcttactgaatagtttcttcaggaactggtcgaccacagacatccacaagcacctgccgttcatctataacttgagtagtaacacgatgtacacttacagccctgccttcaagcaattcggttccagtgcaaaggtcgtccactttttggggtccatgaaaccttggaactacaagtacaatccacagagtggctcggtgttggagcaaggctcagcgtccagcagccagcaccaggcggcattccttcatctctggtggacggtctaccagaacaacgtgctgcccctttataaaagcgtccaagcgggggaagcacgcgcgtctcctggtcacacactttgccacagtgatgtgggggggccgtgtgcggattcagcctctggtgttggagagccgtgtgaaaattcaacacccagtgcgggcgtgccgtgtgcaaattcaccactgggttctaaccagcctgctcagggccttccggagccgacccagatagtggatgagaccctgtccctacctgaaggacgccgttcagaagatgtcgacctggccgtctctgtttcccagatctccatcgaagagaaggtgaaggaattgagccccgaggaagagaggaggaagtgggaggaaggccgtatcgactacatggggaaggacgcgtttgctcgcatccaggagaagctggaccggttcctgcagtaa

SEQ ID NO: 138055 - DNA, 2356 bp, Homo sapiens
  Payload ID: 7043
  Gene Symbol: GLTP
  Gene Name: glycolipid transfer protein
  Uniprot ID: Q9NZD2
  ENST ID: ENST00000318348
  CDS Start-End: 115-744
ccggagcctgcggcgggcggctgtgacggccccggcgctgacggcggcggccgggggggcggtgtcgacgcccgcggcgccggctggggcatcaccgcgggcctcgaccccgaaatggcgctgctggccgaacacttgctgaagccgctgcccgcggacaagcagatcgagaccgggcccttcctcgaggcggtgtcccacctgccgcccttcttcgattgccttgggtccccagtgtttactcccatcaaggcagacataagcggcaacatcacgaaaatcaaagctgtgtacgacaccaacccagccaagttccggaccctgcagaacatcctggaggtggagaaagaaatgtatggagcagagtggcccaaagtaggggccacactggcgctgatgtggctgaaaagaggcctccgcttcatccaggtcttcctccagagcatctgcgacggggagcgggacgagaaccaccccaacctcatccgtgtcaacgccaccaaggcctacgagatggccctcaagaagtaccatggctggatcgtgcagaagatcttccaggcagcactgtacgcagcaccctataagtctgacttcctgaaagcgctctccaaggggcagaatgttacggaggaggagtgcctggagaagatccgcctcttcctagtcaactacacggcgaccatcgatgtcatctacgagatgtacacccagatgaacgctgagcttaactacaaggtgtaggcatgcccactgctggacacgtccccgactcgtggccacatggagaaacaggcaaaccagaatcactgtgaatcaagtcggtgaactgcccctggcctgtgtcccccagagcagcccagggtcctgccagagtctgcaggggacagccctcgttttttaagtcttttttttttttttttttggtctattctaaaggaccagtaaataatgatcttacttccaaatctccttggaatttcacgacagcacagactgactttataccttcatttcagcgtggtaaaaaccgattaacacttctaatgagtcaagtcctagggttttttggttttgttttgttgccaacgaggaacacagctctgggggaatggtgtcatccacctcgctttaaaaataagcacatgatggctgggcaccgtggctcacgcctgtaatcccagcactttgggaggctgaggcgggtggatcacctgaggtcgggagtttgagaccagcctggccaacatggtgaaaccccatcgctactaaaaatataaaaaattagctgggcatggtggcgcacgcctgtagttccagctactcaggaggctgaggcaggagaatcgcttgaacccgggaggtggaggttgcagtgagctgagatcgcaccattgcactccagcctgggcaacaagagcgaaactctgtctcaaaaaaaaaaaaaagaggtgggtggattacttgaggtcagggtttgagatcagcctgaccaacatggtgaaaccctatctctactaaaaatatagaattagccaggcatggtagcgcacgcctgtaatcccatcttcttgggaggctgaggcaggagaatcgctagaaactgggaggtggaggttacagtagccgagatcgcgccactgcattccagcctgggcaacaaaagcgaaactctgtctcaaaaaagaaaaaaaagaaaaaaaagcacgtgaccttatgaggctctcgctgtattgttattttaaggactataaagagtttgatttaaaattatgcagggcccctatgtgggattttttaaaaagcaaactggtgtgtattctcatgtggtttgcacagcccagcctcacagcactattgtaaaccctgctctttctgtctcgctagacagatttttttgtttgttttcttttttctggttgttttttgttgttgttgttgttgttttacagctgaaaccaaccagcaagcccttgatgaccaagaggcgtttctttcaaagctatagggcacaaacaattgaccatagatgactccgtttgcattcttctgcagaattatttccttcagggacagattttccaacctaagaaactacctaccgtgtgtattctcttgacggggagagatgaacccttcagctgctaagatccaagaaaacgcctcactgccttaaccttaactgttcttcctggcgctaaaaagagctgtattttttaaagtgctggggcaaacaaagcaaccccaaaagagttgatgtgtgttttaaaagaaaaaacccaatgaggaacaattggagatttttatgcagaaactaaataatccttaataaataaatctctattttggaatcaca

SEQ ID NO: 138056 - DNA, 791 bp, Homo sapiens
  Payload ID: 7043
  Gene Symbol: GLTP
  Gene Name: glycolipid transfer protein
  ENST ID: ENST00000537066
  CDS Start-End: 5-208
cgaaatggcgctgctggccgaacacttgctgaagccgctgcccgcggacaagcagatcgagaccgggcccttcctcgaggcggtgtcccacctgccgcccttcttcgattgccttgggtccccagtgtttactcccatcaaggcagacataagcggcaacatcacgatgaggaagctgagactcagaggggttgaaggactcgcttaaggtcacaagcaagtacgtggcaaagctgggattcagacccaggcctacctggctccatctcagaggccttcgttcctggacttcttggaatcctcggaacctatttccacttgtccaccaaagcaaaacttcagatacttggtgtctgaggcagtgtcagtagtggctggagaacatgaactctgtaccaactgtgtgaccttgggcaagtccgtgctcctctgtgagcctcagtgtctctgcctgtaaaatgggataatgacagcaacatcaggtttgccaccaggatcatataagaaaatcaaagctgtgtacgacaccaacccagccaagttccggaccctgcagaacatcctggaggtggagaaagaaatgtatggagcagagtggcccaaagtaggggccacactggcgctgatgtggctgaaaagaggcctccgcttcatccaggtcttcctccagagcatctgcgacggggagcgggacgagaaccaccccaacctcatccgtgtcaacgccaccaaggcctacgagatggccctcaagaagtaccatggctggatcgtgcagaagatcttccagg

SEQ ID NO: 138057 - DNA, 560 bp, Homo sapiens
  Payload ID: 7043
  Gene Symbol: GLTP
  Gene Name: glycolipid transfer protein
  ENST ID: ENST00000540772
  CDS Start-End: 1-550
agatcgagaccgggcccttcctcgaggcggtgtcccacctgccgcccttcttcgattgccttgggtccccagtgtttactcccatcaaggcagacataagcggcaacatcacgaaaatcaaagctgtgtacgacaccaacccagccaagttccggaccctgcagaacatcctggaggtggagaaagaaatgtatggagcagagtggcccaaagtaggggccacactggcgctgatgtggctgaaaagagcatctgcgacggggagcgggacgagaaccaccccaacctcatccgtgtcaacgccaccaaggcctacgagatggccctcaagaagtaccatggctggatcgtgcagaagatcttccaggcagcactgtacgcagcaccctataagtctgacttcctgaaagcgctctccaaggggcagaatgttacggaggaggagtgcctggagaagatccgcctcttcctagtcaactacacggcgaccatcgatgtcatctacgagatgtacacccagatgaacgctgagcttaactacaaggtgtaggcatgcccac

SEQ ID NO: 138058 - DNA, 583 bp, Homo sapiens
  Payload ID: 7043
  Gene Symbol: GLTP
  Gene Name: glycolipid transfer protein
  ENST ID: ENST00000536390
  CDS Start-End: 10-213
gaccccgaaatggcgctgctggccgaacacttgctgaagccgctgcccgcggacaagcagatcgagaccgggcccttcctcgaggcggtgtcccacctgccgcccttcttcgattgccttgggtccccagtgtttactcccatcaaggcagacataagcggcaacatcacgatgaggaagctgagactcagaggggttgaaggactcgcttaaggtcacaagcaaaaaatcaaagctgtgtacgacaccaacccagccaagttccggaccctgcagaacatcctggaggtggagaaagaaatgtatggagcagagtggcccaaagtaggggccacactggcgctgatgtggctgaaaagaggcctccgcttcatccaggtcttcctccagagcatctgcgacggggagcgggacgagaaccaccccaacctcatccgtgtcaacgccaccaaggcctacgagatggccctcaagaagtaccatggctggatcgtgcagaagatcttccaggcagcactgtacgcagcaccctataagtctgacttcctgaaagcgctctccaaggggcagaatgttacggagg

SEQ ID NO: 138059 - DNA, 914 bp, Homo sapiens
  Payload ID: 7043
  Gene Symbol: GLTP
  Gene Name: glycolipid transfer protein
  ENST ID: ENST00000544393
  CDS Start-End: 48-620
acgcccgcggcgccggctggggcatcaccgcgggcctcgaccccgaaatggcgctgctggccgaacacttgctgaagccgctgcccgcggacaagcagatcgagaccgggcccttcctcgaggcggtgtcccacctgccgcccttcttcgattgccttgggtccccagtgtttactcccatcaaggcagacataagcggcaacatcacgaaaatcaaagctgtgtacgacaccaacccagccaagttccggaccctgcagaacatcctggaggtggagaaagaaataggcctccgcttcatccaggtcttcctccagagcatctgcgacggggagcgggacgagaaccaccccaacctcatccgtgtcaacgccaccaaggcctacgagatggccctcaagaagtaccatggctggatcgtgcagaagatcttccaggcagcactgtacgcagcaccctataagtctgacttcctgaaagcgctctccaaggggcagaatgttacggaggaggagtgcctggagaagatccgcctcttcctagtcaactacacggcgaccatcgatgtcatctacgagatgtacacccagatgaacgctgagcttaactacaaggtgtaggcatgcccactgctggacacgtccccgactcgtggccacatggagaaacaggcaaaccagaatcactgtgaatcaagtcggtgaactgcccctggcctgtgtcccccagagcagcccagggtcctgccagagtctgcaggggacagccctcgttttttaagtcttttttttttttttttttggtctattctaaaggaccagtaaataatgatcttacttccaaatctccttggaatttcacgacagcacagactgactttataccttcatttcagcgtggtaaaaaccgattaa

SEQ ID NO: 138060 - DNA, 969 bp, Homo sapiens
  Payload ID: 7043
  Gene Symbol: GLTP
  Gene Name: glycolipid transfer protein
  ENST ID: ENST00000617457
  CDS Start-End: 1-204
atggcgctgctggccgaacacttgctgaagccgctgcccgcggacaagcagatcgagaccgggcccttcctcgaggcggtgtcccacctgccgcccttcttcgattgccttgggtccccagtgtttactcccatcaaggcagacataagcggcaacatcacgatgaggaagctgagactcagaggggttgaaggactcgcttaaggtcacaagcaagtacgtggcaaagctgggattcagacccaggcctacctggctccatctcagaggccttcgttcctggacttcttggaatcctcggaacctatttccacttgtccaccaaagcaaaacttcagatacttggtgtctgaggcagtgtcagtagtggctggagaacatgaactctgtaccaactgtgtgaccttgggcaagtccgtgctcctctgtgagcctcagtgtctctgcctgtaaaatgggataatgacagcaacatcaggtttgccaccaggatcatataagaaaatcaaagctgtgtacgacaccaacccagccaagttccggaccctgcagaacatcctggaggtggagaaagaaatgtatggagcagagtggcccaaagtaggggccacactggcgctgatgtggctgaaaagaggcctccgcttcatccaggtcttcctccagagcatctgcgacggggagcgggacgagaaccaccccaacctcatccgtgtcaacgccaccaaggcctacgagatggccctcaagaagtaccatggctggatcgtgcagaagatcttccaggcagcactgtacgcagcaccctataagtctgacttcctgaaagcgctctccaaggggcagaatgttacggaggaggagtgcctggagaagatccgcctcttcctagtcaactacacggcgaccatcgatgtcatctacgagatgtacacccagatgaacgctgagcttaactacaaggtgtag

SEQ ID NO: 138061 - DNA, 1023 bp, Homo sapiens
  Payload ID: 7044
  Gene Symbol: GLTPD2
  Gene Name: glycolipid transfer protein domain containing 2
  Uniprot ID: A6NH11
  ENST ID: ENST00000331264
  CDS Start-End: 54-929
gggacacggactggctaggcgctggtgagggggcggcggtcccagcagcaggcatgggagtggcggcgcggcccccagccctgcggcactggttcagccactcaattcctctcgctatcttcgcgctgctgctgctttatctcagtgttcggagcctaggcgcccgctcgggctgcggacccagggcgcagccctgcgttccaggggaaacggcgcccttccaggtccggcaggagtcgggaaccctggaggccccggagaggaaacagcctccgtgtctgggccctcgggggatgctgggccgcatgatgaggcggttccacgccagtctgaaacccgaaggggatgtggggctgtcgccgtacctggcgggatggagggcactcgtcgagttcctgactcccctcggctccgtcttcgccttcgccactagggaggccttcaccaaggtgacagacctggaggctcgggtgcacggcccggacgcggagcactactggtcgctggtggccatggcggcgtgggagcggagggcgggactgctggagcagccgggggcggccccccgggacccgacccggagctcgggctctcgcacgctgctcctgctgcaccgcgcgctgcgctggtcccagctctgcctccaccgggtggcgaccggcgcgctgggaggcccggacgcgggcgtgcagtgcagcgacgcctaccgtgcggccctgggtccgcatcacccctggctggtccgacagaccgcccgcctcgccttcctcgccttcccgggtcgccgccgcctgctggagctggcgtgtcccggagccaccgaggcggaggcgcgggccgcgctggtccgggccgccggcaccttggaggatgtctacaaccgcacccagagcctgctggccgagcgcggcctgctccagctggcctaagacggcggctgcggggaccggcgggaacggagcggaccgcccggggtggggccgcgcagcccggggtcagtcctgcagcccgcgccgcggccgc

SEQ ID NO: 138062 - DNA, 751 bp, Homo sapiens
  Payload ID: 7045
  Gene Symbol: GYPA
  Gene Name:: glycophorin A (MNS blood group)
  Uniprot ID: P02724
  ENST ID: ENST00000324022
  CDS Start-End: 59-412
gcagttgtctttggtagtttttttgcactaacttcaggaaccagctcatgatctcaggatgtatggaaaaataatctttgtattactattgtcagatacgcacaaacgggacacatatgcagccactcctagagctcatgaagtttcagaaatttctgttagaactgtttaccctccagaagaggaaaccggagaaagggtacaacttgcccatcatttctctgaaccagagataacactcattatttttggggtgatggctggtgttattggaacgatcctcttaatttcttacggtattcgccgactgataaagaaaagcccatctgatgtaaaacctctcccctcacctgacacagacgtgcctttaagttctgttgaaatagaaaatccagagacaagtgatcaatgagaatctgttcaccaaaccaaatgtggaaagaacacaaagaagacataagacttcagtcaagtgaaaaattaacatgtggactggacactccaataaattatatacctgcctaagttgtacaatttcagaatgcaattttcattataatgagttccagtgactcaatgatggggaaaaaaatctctgctcattaatatttcaagataaagaacaaatgtttccttgaatgcttgcttttgtgtgttagcataatttttagaattgtttgagaattctgatccaaaactttagttgaattcatctacgtttgtttaatattaacttaacctattctattgt

SEQ ID NO: 138063 - DNA, 2659 bp, Homo sapiens
  Payload ID: 7045
  Gene Symbol: GYPA
  Gene Name: glycophorin A (MNS blood group)
  ENST ID: ENST00000360771
  CDS Start-End: 117-569
gcaggaaggtgggcctggaagataacagctagcaggctaaggtcagacactgacacttgcagttgtctttggtagtttttttgcactaacttcaggaaccagctcatgatctcaggatgtatggaaaaataatctttgtattactattgtcagaaattgtgagcatatcagcattaagtaccactgaggtggcaatgcacacttcaacttcttcttcagtcacaaagagttacatctcatcacagacaaatgatacgcacaaacgggacacatatgcagccactcctagagctcatgaagtttcagaaatttctgttagaactgtttaccctccagaagaggaaaccggagaaagggtacaacttgcccatcatttctctgaaccagagataacactcattatttttggggtgatggctggtgttattggaacgatcctcttaatttcttacggtattcgccgactgataaagaaaagcccatctgatgtaaaacctctcccctcacctgacacagacgtgcctttaagttctgttgaaatagaaaatccagagacaagtgatcaatgagaatctgttcaccaaaccaaatgtggaaagaacacaaagaagacataagacttcagtcaagtgaaaaattaacatgtggactggacactccaataaattatatacctgcctaagttgtacaatttcagaatgcaattttcattataatgagttccagtgactcaatgatggggaaaaaaatctctgctcattaatatttcaagataaagaacaaatgtttccttgaatgcttgcttttgtgtgttagcataatttttagaattgtttgagaattctgatccaaaactttagttgaattcatctacgtttgtttaatattaacttaacctattctattgtattataatgatgattctgtcaaatgaaaggcttgaaatacctagatgaagtttagattttcttcctattgtaaacttttgagtctggtttcattgttttaaataaattaaggggacactaaagtcctatcattcatttccttcattgctgaacaggcaagatataatattacatgaatgattactatattttgttcacactaataaagcttatgctcagaaatgccatacacacacacacacacacacacaaacacacacatttatcatttaatgcataaatcaacacaaaaggttttcccattaatatgaaatattacatatatataagtgccatatttaaaataatttgtctaacagtagaactgtgtcggagcactcactgaagcttgcattccactgaaagagttatttgtgtaagtagagtatccggagaaggaaaagaacttacgacctttctttataacagaaactcaactctaaattcaacaagatgtgcaaaccggacatgcaggtgaatattttaataggttactataaggttctcaattaaattctttaatctgtccagtcccagtttctcttattaataaaactttggaaattgctttaaaccatttaaaggaaatttctagatatagaaactaaggactgtgactatacagctgtcactcatttgtagtaaaacttaaaaagcaaaaacaaaaaacaaaaaagaccttcctgtgatactttatttccgaactaataaaaatctatatgactttttattattgtgtgataaccaagtaaatgttttctattttgcatattttcaggcatggtaacagaaatttaccttttaataaattaaaaaatctaaattttaacctacttgtatgttcggagagtgtttttgtactatattgactacttaaaatagagaatgagactaagaagggaacatttctgttgatacatgttttttaaaagtaattttaagagcattattaggttaattaatccaattaatgacccaaatgccaaggtaattttaaatttacatttttaataaaagcaacatgttgaaacaagagagggtgagattaacctttttgctaaagtaatttacaagtcaaagacaggaagagatcagagtgaatgtgccttcttaaccagagctacagaatttagtgaataattaaagtacaaactgctttgacctccttgaacttttccaagcaatttctctgtacttctatatatgaatgtcttagccaattttctgctactataacagaatacgacagactgggtaatttaaaaagaaaagaaatttattttcttcctagttctggaggctgggaaggcgaagggcatggcactgacatctgccttgtaactgatgagaaccttcttactgcatgataacaaagcagcaaggcaagcaaaagcgtaagatgaagagagaggaaatgaagccaaacacatcctttcatcagaagcccattccctctataaggcgttattacatttatgagaatggagtcctcatgacctaatcgtgaccttaaaggcccctcccaacactgttacaatggcaattaaatttcaacaaaggttccagaggtgacattcgaatcagcaatgaaattttcatagttaaatttggtattcgtgggggaagaaatgaccatttcccttgtatttttataattaaatcagcaaaatattgtaataaagaaatctttcctgtgaagataccatgacccc

SEQ ID NO: 138064 - DNA, 318 bp, Homo sapiens
  Payload ID: 7045
  Gene Symbol: GYPA
  Gene Name: glycophorin A (MNS blood group)
  ENST ID: ENST00000503627
  CDS Start-End: 1-318
atgtatggaaaaataatctttgtattactattgtcagaaattgtgagcatatcagcattaagtaccactgaggtggcaatgcacacttcaacttcttcttcagtcacaaagagttacatctcatcacagacaaatgagataacactcattatttttggggtgatggctggtgttattggaacgatcctcttaatttcttacggtattcgccgactgataaagaaaagcccatctgatgtaaaacctctcccctcacctgacacagacgtgcctttaagttctgttgaaatagaaaatccagagacaagtgatcaatga

SEQ ID NO: 138065 - DNA, 258 bp, Homo sapiens
  Payload ID: 7045
  Gene Symbol: GYPA
  Gene Name: glycophorin A (MNS blood group)
  ENST ID: ENST00000512789
  CDS Start-End: 1-258
atgtatggaaaaataatctttgtattactattgtcaggagaaagggtacaacttgcccatcatttctctgaaccagagataacactcattatttttggggtgatggctggtgttattggaacgatcctcttaatttcttacggtattcgccgactgataaagaaaagcccatctgatgtaaaacctctcccctcacctgacacagacgtgcctttaagttctgttgaaatagaaaatccagagacaagtgatcaatga

SEQ ID NO: 138066 - DNA, 357 bp, Homo sapiens
  Payload ID: 7045
  Gene Symbol: GYPA
  Gene Name: glycophorin A (MNS blood group)
  ENST ID: ENST00000504786
  CDS Start-End: 1-357
atgtatggaaaaataatctttgtattactattgtcagaaattgtgagcatatcagcattaagtaccactgaggtggcaatgcacacttcaacttcttcttcagtcacaaagagttacatctcatcacagacaaatggagaaagggtacaacttgcccatcatttctctgaaccagagataacactcattatttttggggtgatggctggtgttattggaacgatcctcttaatttcttacggtattcgccgactgataaagaaaagcccatctgatgtaaaacctctcccctcacctgacacagacgtgcctttaagttctgttgaaatagaaaatccagagacaagtgatcaatga

SEQ ID NO: 138067 - DNA, 622 bp, Homo sapiens
  Payload ID: 7045
  Gene Symbol: GYPA
  Gene Name: glycophorin A (MNS blood group)
  ENST ID: ENST00000508337
  CDS Start-End: 38-166
tttgcactaacttcaggaaccagctcatgatctcaggatgtatggaaaaataatctttgtattactattgtcaggagacggagccaaccctgaaaattctgggaaaagaggacagaaggcagagggaagagcaagagcaaaaattctgaaacagcagaaattgtgagcatatcagcattaagtaccactgaggtggcaatgcacacttcaacttcttcttcagtcacaaagagttacatctcatcacagacaaatgatacgcacaaacgggacacatatgcagccactcctagagctcatgaagtttcagaaatttctgttagaactgtttaccctccagaagaggaaaccggagaaagggtacaacttgcccatcatttctctgaaccagagataacactcattatttttggggtgatggctggtgttattggaacgatcctcttaatttcttacggtattcgccgactgataaagaaaagcccatctgatgtaaaacctctcccctcacctgacacagacgtgcctttaagttctgttgaaatagaaaatccagagacaagtgatcaatgagaatctgttcaccaaaccaaatgtggaaagaacacaaagaagacataag

SEQ ID NO: 138068 - DNA, 441 bp, Homo sapiens
  Payload ID: 7045
  Gene Symbol: GYPA
  Gene Name: glycophorin A (MNS blood group)
  ENST ID: ENST00000512064
  CDS Start-End: 1-414
atgtatggaaaaataatctttgtattactattgtcagaaattgtgagcatatcagcattaagtaccactgaggtggcaatgcacacttcaacttcttcttcagtcacaaagagttacatctcatcacagacaaatgatacgcacaaacgggacacatatgcagccactcctagagctcatgaagtttcagaaatttctgttagaactgtttaccctccagaagaggaaaccgagataacactcattatttttggggtgatggctggtgttattggaacgatcctcttaatttcttacggtattcgccgactgataaagaaaagcccatctgatgtaaaacctctcccctcacctgacacagacgtgcctttaagttctgttgaaatagaaaatccagagacaagtgatcaatgagaatctgttcaccaaaccaaatgtgga

SEQ ID NO: 138069 - DNA, 695 bp, Homo sapiens
  Payload ID: 7045
  Gene Symbol: GYPA
  Gene Name: glycophorin A (MNS blood group)
  ENST ID: ENST00000535709
  CDS Start-End: 199-645
gcactaacttcaggaaccagctcatgatctcaggatgtatggaaaaataatctttgtattactattgtcagggttcatccagtgattcatttgcaagcaggcatggggtaaggtcttcagagtatgtttctcagaggcccatgcagctaagaaaatgtgcagtgttggcacaaggtctgtctattcctgggtagccagatgctggacacatctttcataacaccacaagaaattgtgagcatatcagcattaagtaccactgaggtggcaatgcacacttcaacttcttcttcagtcacaaagagttacatctcatcacagacaaatgatacgcacaaacgggacacatatgcagccactcctagagctcatgaagtttcagaaatttctgttagaactgtttaccctccagaagaggaaaccggagaaagggtacaacttgcccatcatttctctgaaccagagataacactcattatttttggggtgatggctggtgttattggaacgatcctcttaatttcttacggtattcgccgactgataaagaaaagcccatctgatgtaaaacctctcccctcacctgacacagacgtgcctttaagttctgttgaaatagaaaatccagagacaagtgatcaatgagaatctgttcaccaaaccaaatgtggaaagaacacaaagaagacataaga

SEQ ID NO: 138070 - DNA, 2538 bp, Homo sapiens
  Payload ID: 7045
  Gene Symbol: GYPA
  Gene Name: glycophorin A (MNS blood group)
  ENST ID: ENST00000616983
  CDS Start-End: 1-447
atgctggacacatctttcataacaccacaagaaattgtgagcatatcagcattaagtaccactgaggtggcaatgcacacttcaacttcttcttcagtcacaaagagttacatctcatcacagacaaatgatacgcacaaacgggacacatatgcagccactcctagagctcatgaagtttcagaaatttctgttagaactgtttaccctccagaagaggaaaccggagaaagggtacaacttgcccatcatttctctgaaccagagataacactcattatttttggggtgatggctggtgttattggaacgatcctcttaatttcttacggtattcgccgactgataaagaaaagcccatctgatgtaaaacctctcccctcacctgacacagacgtgcctttaagttctgttgaaatagaaaatccagagacaagtgatcaatgagaatctgttcaccaaaccaaatgtggaaagaacacaaagaagacataagacttcagtcaagtgaaaaattaacatgtggactggacactccaataaattatatacctgcctaagttgtacaatttcagaatgcaattttcattataatgagttccagtgactcaatgatggggaaaaaaatctctgctcattaatatttcaagataaagaacaaatgtttccttgaatgcttgcttttgtgtgttagcataatttttagaattgtttgagaattctgatccaaaactttagttgaattcatctacgtttgtttaatattaacttaacctattctattgtattataatgatgattctgtcaaatgaaaggcttgaaatacctagatgaagtttagattttcttcctattgtaaacttttgagtctggtttcattgttttaaataaattaaggggacactaaagtcctatcattcatttccttcattgctgaacaggcaagatataatattacatgaatgattactatattttgttcacactaataaagcttatgctcagaaatgccatacacacacacacacacacacacaaacacacacatttatcatttaatgcataaatcaacacaaaaggttttcccattaatatgaaatattacatatatataagtgccatatttaaaataatttgtctaacagtagaactgtgtcggagcactcactgaagcttgcattccactgaaagagttatttgtgtaagtagagtatccggagaaggaaaagaacttacgacctttctttataacagaaactcaactctaaattcaacaagatgtgcaaaccggacatgcaggtgaatattttaataggttactataaggttctcaattaaattctttaatctgtccagtcccagtttctcttattaataaaactttggaaattgctttaaaccatttaaaggaaatttctagatatagaaactaaggactgtgactatacagctgtcactcatttgtagtaaaacttaaaaagcaaaaacaaaaaacaaaaaagaccttcctgtgatactttatttccgaactaataaaaatctatatgactttttattattgtgtgataaccaagtaaatgttttctattttgcatattttcaggcatggtaacagaaatttaccttttaataaattaaaaaatctaaattttaacctacttgtatgttcggagagtgtttttgtactatattgactacttaaaatagagaatgagactaagaagggaacatttctgttgatacatgttttttaaaagtaattttaagagcattattaggttaattaatccaattaatgacccaaatgccaaggtaattttaaatttacatttttaataaaagcaacatgttgaaacaagagagggtgagattaacctttttgctaaagtaatttacaagtcaaagacaggaagagatcagagtgaatgtgccttcttaaccagagctacagaatttagtgaataattaaagtacaaactgctttgacctccttgaacttttccaagcaatttctctgtacttctatatatgaatgtcttagccaattttctgctactataacagaatacgacagactgggtaatttaaaaagaaaagaaatttattttcttcctagttctggaggctgggaaggcgaagggcatggcactgacatctgccttgtaactgatgagaaccttcttactgcatgataacaaagcagcaaggcaagcaaaagcgtaagatgaagagagaggaaatgaagccaaacacatcctttcatcagaagcccattccctctataaggcgttattacatttatgagaatggagtcctcatgacctaatcgtgaccttaaaggcccctcccaacactgttacaatggcaattaaatttcaacaaaggttccagaggtgacattcgaatcagcaatgaaattttcatagttaaatttggtattcgtgggggaagaaatgaccatttcccttgtatttttataattaaatcagcaaaatattgtaataaagaaatctttcctgtgaagataccatgacccca

SEQ ID NO: 138071 - DNA, 239 bp, Homo sapiens
  Payload ID: 7046
  Gene Symbol: GYPB
  Gene Name: glycophorin B (MNS blood group)
  ENST ID: ENST00000429670
  CDS Start-End: 51-239
ctttggtagtttttttgcactaacttcaggaaccagctcatgatctcaggatgtatggaaaaataatctttgtattactattgtcagaaattgtgagcatatcagcattaagtaccactgaggtggcaatgcacacttcaacctcttcttcagtcacaaagagttacatctcatcacagacaaatggagaaacgggacaacttgtccatcgtttcactgtaccagtattcgccgactga

SEQ ID NO: 138072 - DNA, 632 bp, Homo sapiens
  Payload ID: 7046
  Gene Symbol: GYPB
  Gene Name: glycophorin B (MNS blood group)
  ENST ID: ENST00000504951
  CDS Start-End: 38-175
tttgcactaacttcaggaaccagctcatgatctcaggatgtatggaaaaataatctttgtattactattgtcaggaaactttgagcattcagctgaggggccaagttggctgcctctgagaagaagcccttccacctccactccactgcacttgggtgccattcccctcatttgaatgtctccaagagatgagcaaagaaattgtgagcatatcagcattaagtaccactgaggtggcaatgcacacttcaacctcttcttcagtcacaaagagttacatctcatcacagacaaatgataagcacaaacgggacacatgtccagctcatactgctaatgaagtttcagaaatttctgttacaactgtttcccctccagaaaagaaaaacggagaaacgggacaacttgtccatcgtttcactgtaccagctcctgtagtgataatactcattattttgtgtgtgatggctggtattattggaacgatcctcttaatttcttacagtattcgccgactgataaaggcatgaggatgtggcctgcatgctgcctgatcttgcctagaaccggctgcacctgctgttctcttgtttatgcaaactggctgcacctgctattcctttgcttatgcc

SEQ ID NO: 138073 - DNA, 606 bp, Homo sapiens
  Payload ID: 7046
  Gene Symbol: GYPB
  Gene Name: glycophorin B (MNS blood group)
  ENST ID: ENST00000506679
  CDS Start-End: 53-181
gtctttggtagtttttttgcactaacttcaggaaccagctcatgatctcaggatgtatggaaaaataatctttgtattactattgtcaggagatggagccaaccctgaaaattctgggagaagaggacagaaggcagagggaagagcaagagcaaaaattctgaaacaggagaaattgtgagcatatcagcattaagtaccactgaggtggcaatgcacacttcaacctcttcttcagtcacaaagagttacatctcatcacagacaaatggagaaacgggacaacttgtccatcgtttcactgtaccagctcctgtagtgataatactcattattttgtgtgtgatggctggtattattggaacgatcctcttaatttcttacagtattcgccgactgataaaggcatgaggatgtggcctgcatgctgcctgatcttgcctagaaccggctgcacctgctgttctcttgtttatgcaaactggctgcacctgctattcctttgcttatgcccctacccctggctatcctaattccctgttctcctgcctcactattactgtattctctacttctaaataaaaataaaacaaaatacaaaccgtt

SEQ ID NO: 138074 - DNA, 444 bp, Homo sapiens
  Payload ID: 7046
  Gene Symbol: GYPB
  Gene Name: glycophorin B (MNS blood group)
  ENST ID: ENST00000511198
  CDS Start-End: 38-175
tttgcactaacttcaggaaccagctcatgatctcaggatgtatggaaaaataatctttgtattactattgtcaggaaactttgagcattcagctgaggggccaagttggctgcctctgagaagaagcccttccacctccactccactgcacttgggtgccattcccctcatttgaatgtctccaagagatgagcaaagaaattgtgagcatatcagcattaagtaccactgaggtggcaatgcacacttcaacctcttcttcagtcacaaagagttacatctcatcacagacaaatggagaaacgggacaacttgtccatcgtttcactgtaccaggcatgaggatgtggcctgcatgctgcctgatcttgcctagaaccggctgcacctgctgttctcttgtttatgcaaactggctgcacctgctattcctttgcttatgcc

SEQ ID NO: 138075 - DNA, 583 bp, Homo sapiens
  Payload ID: 7046
  Gene Symbol: GYPB
  Gene Name: glycophorin B (MNS blood group)
  ENST ID: ENST00000505583
  CDS Start-End: 38-175
tttgcactaacttcaggaaccagctcatgatctcaggatgtatggaaaaataatctttgtattactattgtcaggaaactttgagcattcagctgaggggccaagttggctgcctctgagaagaagcccttccacctccactccactgcacttgggtgccattcccctcatttgaatgtctccaagagatgagcaaagaaattgtgagcatatcagcattaagtaccactgaggtggcaatgcacacttcaacctcttcttcagtcacaaagagttacatctcatcacagacaaatggagaaacgggacaacttgtccatcgtttcactgtaccagctcctgtagtgataatactcattattttgtgtgtgatggctggtattattggaacgatcctcttaatttcttacagtattcgccgactgataaaggcatgaggatgtggcctgcatgctgcctgatcttgcctagaaccggctgcacctgctgttctcttgtttatgcaaactggctgcacctgctattcctttgcttatgcccctacccctggctatcctaattccctgttctcctgcctcactat

SEQ ID NO: 138076 - DNA, 473 bp, Homo sapiens
  Payload ID: 7046
  Gene Symbol: GYPB
  Gene Name: glycophorin B (MNS blood group)
  ENST ID: ENST00000506516
  CDS Start-End: 38-97
tttgcactaacttcaggaaccagctcatgatctcaggatgtatggaaaaataatctttgtattactattgtcaggtcaccctacaatgctatgttagaggtacaacactcctaccctcaggctataaacaagaaattgtgagcatatcagcattaagtaccactgaggtggcaatgcacacttcaacctcttcttcagtcacaaagagttacatctcatcacagacaaatggagaaacgggacaacttgtccatcgtttcactgtaccagctcctgtagtgataatactcattattttgtgtgtgatggctggtattattggaacgatcctcttaatttcttacagtattcgccgactgataaaggcatgaggatgtggcctgcatgctgcctgatcttgcctagaaccggctgcacctgctgttctcttgtttatgcaaactggctgcacctgctattcctttgcttatgcc

SEQ ID NO: 138077 - DNA, 360 bp, Homo sapiens
  Payload ID: 7046
  Gene Symbol: GYPB
  Gene Name: glycophorin B (MNS blood group)
  Uniprot ID: P06028
  ENST ID: ENST00000513128
  CDS Start-End: 38-214
tttgcactaacttcaggaaccagctcatgatctcaggatgtatggaaaaataatctttgtattactattgtcaggagaaacgggacaacttgtccatcgtttcactgtaccagctcctgtagtgataatactcattattttgtgtgtgatggctggtattattggaacgatcctcttaatttcttacagtattcgccgactgataaaggcatgaggatgtggcctgcatgctgcctgatcttgcctagaaccggctgcacctgctgttctcttgtttatgcaaactggctgcacctgctattcctttgcttatgcccctacccctggctatcctaattccctgttctcctgcctcactat

SEQ ID NO: 138078 - DNA, 521 bp, Homo sapiens
  Payload ID: 7046
  Gene Symbol: GYPB
  Gene Name: glycophorin B (MNS blood group)
  Uniprot ID: P06028
  ENST ID: ENST00000502664
  CDS Start-End: 53-328
gtctttggtagtttttttgcactaacttcaggaaccagctcatgatctcaggatgtatggaaaaataatctttgtattactattgtcagaaattgtgagcatatcagcattaagtaccactgaggtggcaatgcacacttcaacctcttcttcagtcacaaagagttacatctcatcacagacaaatggagaaacgggacaacttgtccatcgtttcactgtaccagctcctgtagtgataatactcattattttgtgtgtgatggctggtattattggaacgatcctcttaatttcttacagtattcgccgactgataaaggcatgaggatgtggcctgcatgctgcctgatcttgcctagaaccggctgcacctgctgttctcttgtttatgcaaactggctgcacctgctattcctttgcttatgcccctacccctggctatcctaattccctgttctcctgcctcactattactgtattctctacttctaaataaaaataaaacaaaatacaaaccg

SEQ ID NO: 138079 - DNA, 1246 bp, Homo sapiens
  Payload ID: 7047
  Gene Symbol: GYPC
  Gene Name: glycophorin C (Gerbich blood group)
  Uniprot ID: P04921
  ENST ID: ENST00000259254
  CDS Start-End: 332-718
agtggcagatggaaagagaaacggttagaaaagcgtggttcttgcgcaggaaagttggagcaaagaagagttcagaagtgggcgggtgtgtgtttaaaaaaaaaaaagggggtggaaaccccaccagccaagtctgcagaaaaaaaataaatgaagtctgcctatctccgggccagagcccctcccctcggcccgcgcgggaggagtgtgacccaggtgccgcttcctctcgccgccgagggtcaggagcccgggagcgcgaccctcccccggcccggcctggcccggcctggccagtccccgcggtctctgcccgggctgacgcccaggaatgtggtcgacgagaagccccaacagcacggcgtggcctctcagcctcgagcctgatccggggatggcctctgcctccaccacaatgcatactaccaccattgcagagcctgatccagggatgtctggatggccggatggcagaatggagacctccacccccaccataatggacattgtcgtcattgcaggtgtgattgctgctgtggccatcgtcctagtctccctcctcttcgtcatgctgcgctacatgtaccggcacaagggcacgtaccacaccaatgaggccaagggcacggagtttgctgagagtgcagatgcagccctgcagggagaccctgccctccaagatgctggtgatagcagcagaaaggagtactttatttgagggacaacagacttcacttccctgaatgcctcccccatctccatcaggaaaaatacaccccatcgcccagcacccctgctgataccaccagacagagagagagagcacttgattcttcccgagatagccacctggaaacactaggtgcctgcccagggaggaacggaggaggactcgcgctacaagaggccactcccagggacccagggaggcgatggccaccccagaggccaccttttgctccacggaggtgggagaaaatctgggcacatggggccccctgggcagtgcaggacaacatcagctcactggcaggaaagtccttgttgagggtgagggggtgctggggtacccgggggctggggaagcaaggaaataagtcatctgtatgctgactggggataatggcatcaaatgtcagtccttgacatttggggggaacagcaggtgccagagctaaaaggtacctttgtctgccattgatccagctcagaacgattggaaataaatttgaaatgtaaccgagca

SEQ ID NO: 138080 - DNA, 2067 bp, Homo sapiens
  Payload ID: 7047
  Gene Symbol: GYPC
  Gene Name: glycophorin C (Gerbich blood group)
  Uniprot ID: P04921
  ENST ID: ENST00000356887
  CDS Start-End: 1211-1534
tggcagatggaaagagaaacggttagaaaagcgtggttcttgcgcaggaaagttggagcaaagaagagttcagaagtgggcgggtgtgtgtttaaaaaaaaaaaagggggtggaaaccccaccagccaagtctgcagaaaaaaaataaatgaagtctgcctatctccgggccagagcccctcccctcggcccgcgcgggaggagtgtgacccaggtgccgcttcctctcgccgccgagggtcaggagcccgggagcgcgaccctcccccggcccggcctggcccggcctggccagtccccgcggtctctgcccgggctgacgcccaggaatgtggtcgacgagaagccccaacagcacggcgtggcctctcagcctcggaagtctccaaggacccccatgaaacacctgcatttcctgtcatgattttgaggctgaaatcatcttcctcctcccagaacacctaggtgttctagtctgaagccatcctcactctcaactcccctccttcgagccctcaccctgtgcctgaattcttccttctttgctgggacagatggacaggaggaagacaggaagtggggaaccccttcaacaactcctatggcagaggggagccataggagatgggccgggaaatgtaaagaccagcccacgcaggaaaaaaagagaactttttagcacagtgtcatctgaaaatgcaagagaagagaggctcttggtggcaacagaggagtgtgacttccagcctcagggctagcacctgacccctgctctccgtccacatctgaaaaataccactggccctgagaatccattgcaactgaggttctgcaccccaacagctgcactcaagctgccaactgaagcagagagcactgcccgcactgcagggttgtgcctgtgtgccccgctgcctccaggggtggctgccttctgccagagaatggacagctgacatcctgaggacatagagagttagtaggaatgactgtagccaatggcaaatcccatggatgaaaagccactcccaactccacaaagatgagcatagtgaaggctgcagtttagttggttcgtggttccccagaaggctttcaaacattcagcagttgtcattcagtgccaggcacccagtctaatgctgagtatagagttgtgagcaagacaagcctgaacgtgtggagcttcctgtctgagcctgatccggggatggcctctgcctccaccacaatgcatactaccaccattgcagagcctgatccagggatgtctggatggccggatggcagaatggagacctccacccccaccataatggacattgtcgtcattgcaggtgtgattgctgctgtggccatcgtcctagtctccctcctcttcgtcatgctgcgctacatgtaccggcacaagggcacgtaccacaccaatgaggccaagggcacggagtttgctgagagtgcagatgcagccctgcagggagaccctgccctccaagatgctggtgatagcagcagaaaggagtactttatttgagggacaacagacttcacttccctgaatgcctcccccatctccatcaggaaaaatacaccccatcgcccagcacccctgctgataccaccagacagagagagagagcacttgattcttcccgagatagccacctggaaacactaggtgcctgcccagggaggaacggaggaggactcgcgctacaagaggccactcccagggacccagggaggcgatggccaccccagaggccaccttttgctccacggaggtgggagaaaatctgggcacatggggccccctgggcagtgcaggacaacatcagctcactggcaggaaagtccttgttgagggtgagggggtgctggggtacccgggggctggggaagcaaggaaataagtcatctgtatgctgactggggataatggcatcaaatgtcagtccttgacatttggggggaacagcaggtgccagagctaaaaggtacctttgtctgccattgatccagctcagaacgattggaaataaatttgaaatgtaaccgagcattccg

SEQ ID NO: 138081 - DNA, 932 bp, Homo sapiens
  Payload ID: 7047
  Gene Symbol: GYPC
  Gene Name: glycophorin C (Gerbich blood group)
  Uniprot ID: P04921
  ENST ID: ENST00000409836
  CDS Start-End: 81-410
cgggagcgcgaccctcccccggcccggcctggcccggcctggccagtccccgcggtctctgcccgggctgacgcccaggaatgtggtcgacgagaagccccaacagcacggcgtggcctctcagcctcgagcctgatccagggatgtctggatggccggatggcagaatggagacctccacccccaccataatggacattgtcgtcattgcaggtgtgattgctgctgtggccatcgtcctagtctccctcctcttcgtcatgctgcgctacatgtaccggcacaagggcacgtaccacaccaatgaggccaagggcacggagtttgctgagagtgcagatgcagccctgcagggagaccctgccctccaagatgctggtgatagcagcagaaaggagtactttatttgagggacaacagacttcacttccctgaatgcctcccccatctccatcaggaaaaatacaccccatcgcccagcacccctgctgataccaccagacagagagagagagcacttgattcttcccgagatagccacctggaaacactaggtgcctgcccagggaggaacggaggaggactcgcgctacaagaggccactcccagggacccagggaggcgatggccaccccagaggccaccttttgctccacggaggtgggagaaaatctgggcacatggggccccctgggcagtgcaggacaacatcagctcactggcaggaaagtccttgttgagggtgagggggtgctggggtacccgggggctggggaagcaaggaaataagtcatctgtatgctgactggggataatggcatcaaatgtcagtccttgacatttggggggaacagcaggtgccagagctaaaaggtacctttgtctgccattgatccagctcagaacgattggaaataaatttgaaatgtaac

SEQ ID NO: 138082 - DNA, 1684 bp, Homo sapiens
  Payload ID: 7048
  Gene Symbol: GYPE
  Gene Name: glycophorin E (MNS blood group)
  Uniprot ID: P15421
  ENST ID: ENST00000358615
  CDS Start-End: 53-289
gtctttggtagtttttttgcactaacttcaggagccagctcgtgatctcaggatgtatggaaaaataatctttgtattactattgtcaggaattgtgagcatatcagcatcaagtaccactggtgtggcaatgcacacttcaacctcttcttcagtcacaaagagttacatctcatcacagacaaatgggataacactcattaattggtgggcgatggctcgtgttatttttgaggtgatgcttgttgttgttggaatgatcatcttaatttcttactgtattcgatgactgataaaggttttcatgcctctgggattgagattagaggaagaaagcaaagaaaggacatttttttacttcactgttcatggtgtaattgtgtgcctgacggctgtagctactaacttggcttacgttgactggctactaagggactctaggagtcagaaactaaatgctgagtctctcaaaggcgtagagagaatttcagagggccttaccatgacatgaggattaaactccagttctgcccgattctcatcacgaaatccttatcccatgcctcattgtgtttggtgtccccttgcctaggggacagtcctcctgggtaagatcagcaagataactcttcagtcacattccatttgatactttgaatactctgaggtccttacccaccaaatggatggaattcagctgctcaatcactgcctttctcagaactcggttgtccaaccacaattccctttcccttaggatagggctatattggcaaaatgccgcccgaacagactgctgacagtaaaccaaatattagtttctctcaccttcttgaaggcatttacagtctttgtaagcttttctcctagattttccctttcctgttcctgcttagattctaagaatgaagtgcatccttctccttttcttcattaggtgaagtgggatttacccattaccatatattcaccaccaggtcactgacgagagactccagtgaatcgctttccctctgcattcctctccttgtacagactagagggtcacattgtgtaaagcctaacatagccctgcaaagagatctggccccagcagtgaacacaaactcagtaattctctttagagtgaggtggtaatcagtgcctcttggtttcagccgtggtcctagtggctacttatggaagaataggaatagttccacaacatcctgtaacattggcttacctgtatattatatgccacccgtaaccataaaaacaccaggatttaggttccttgaaggtaatgactatgggtccctctctgtggaagaatactgaatagaagagagaaatcactcaatatgtggaatgactgatatggtttggctgtgttcccactcaaatctcatcttgaattgtagttccaataatccccacatgtcatgggaggaacccagtgggaggtacttgaatcattgcggtggtttcccctgtgctattctcatgatagtgagtaaattctcacataatctgatagttttataaaggagcttcccccttcactcagctctcattcttctccttcctgccactatgtaagaaagatgtgtttgtttcccctttggtcatgattgtaagtatcctgagaccttcccagccatgcaaaactgtagatcaataaaacctctttcctttataaatt

SEQ ID NO: 138083 - DNA, 499 bp, Homo sapiens
  Payload ID: 7048
  Gene Symbol: GYPE
  Gene Name: glycophorin E (MNS blood group)
  Uniprot ID: P15421
  ENST ID: ENST00000437468
  CDS Start-End: 57-293
agttgtctttggtagtttttttgcactaacttcaggagccagctcgtgatctcaggatgtatggaaaaataatctttgtattactattgtcaggaattgtgagcatatcagcatcaagtaccactggtgtggcaatgcacacttcaacctcttcttcagtcacaaagagttacatctcatcacagacaaatgggataacactcattaattggtgggcgatggctcgtgttatttttgaggtgatgcttgttgttgttggaatgatcatcttaatttcttactgtattcgatgactgataaaggcatgaggatgtggcctgcatgctgcctgatcttgcctagaaccagctgcacctgctgttctcttgcttatgcaaactggctgcacctgctattcctttgcttatgccccaacccttggctatcctaactccctgttctcctgcctattactgtattctctacttctaaataaaaataaaacaaaatacaaattatt

SEQ ID NO: 138084 - DNA, 1624 bp, Homo sapiens
  Payload ID: 7048
  Gene Symbol: GYPE
  Gene Name: glycophorin E (MNS blood group)
  ENST ID: ENST00000506264
  CDS Start-End: 13-192
cgtgatctcaggatgtatggaaaaataatctttgtattactattgtcaggaattgtgagcatatcagcatcaagtaccactggtgtggcaatgcacacttcaacctcttcttcagtcacaaagagttacatctcatcacagacaaatggttgtgttattggtaacataatttgctctgacaaaagcaaataaaggaaattttagacctttattattcaactggataaaactgaaggttcagaagtgattgcaaatattgccaaccaggttttcatgcctctgggattgagattagaggaagaaagcaaagaaaggacatttttttacttcactgttcatggtgtaattgtgtgcctgacggctgtagctactaacttggcttacgttgactggctactaagggactctaggagtcagaaactaaatgctgagtctctcaaaggcgtagagagaatttcagagggccttaccatgacatgaggattaaactccagttctgcccgattctcatcacgaaatccttatcccatgcctcattgtgtttggtgtccccttgcctaggggacagtcctcctgggtaagatcagcaagataactcttcagtcacattccatttgatactttgaatactctgaggtccttacccaccaaatggatggaattcagctgctcaatcactgcctttctcagaactcggttgtccaaccacaattccctttcccttaggatagggctatattggcaaaatgccgcccgaacagactgctgacagtaaaccaaatattagtttctctcaccttcttgaaggcatttacagtctttgtaagcttttctcctagattttccctttcctgttcctgcttagattctaagaatgaagtgcatccttctccttttcttcattaggtgaagtgggatttacccattaccatatattcaccaccaggtcactgacgagagactccagtgaatcgctttccctctgcattcctctccttgtacagactagagggtcacattgtgtaaagcctaacatagccctgcaaagagatctggccccagcagtgaacacaaactcagtaattctctttagagtgaggtggtaatcagtgcctcttggtttcagccgtggtcctagtggctacttatggaagaataggaatagttccacaacatcctgtaacattggcttacctgtatattatatgccacccgtaaccataaaaacaccaggatttaggttccttgaaggtaatgactatgggtccctctctgtggaagaatactgaatagaagagagaaatcactcaatatgtggaatgactgatatggtttggctgtgttcccactcaaatctcatcttgaattgtagttccaataatccccacatgtcatgggaggaacccagtgggaggtacttgaatcattgcggtggtttcccctgtgctattctcatgatagtgagtaaattctcacataatctgatagttttataaaggagcttcccccttcactcagctctcattcttctccttcctgccactatgtaagaaagatgtgtttgtttcccctttggtcatgattgtaagtatcctgagaccttcccagccatgcaaaactgtag

SEQ ID NO: 138085 - DNA, 2862 bp, Homo sapiens
  Payload ID: 7049
  Gene Symbol: GPNMB
  Gene Name: glycoprotein (transmembrane) nmb
  Uniprot ID: Q14956
  ENST ID: ENST00000258733
  CDS Start-End: 296-1978
ttgaatctagtaaatgtggaatcacaaaattgaaataatgtgcatctgaaaagtgaataaatagatgccaagaaggagtgagtcataagcacatgagttgtaagaggttgaacttgagagaccagatcaggcagtgccgcttaataccatcacatgatcctccccgaggccctgtatttaattaaaatagagagggaggcaccacagatgccagaagaacactgttgctcttggtggacgggcccagaggaattcagagttaaaccttgagtgcctgcgtccgtgagaattcagcatggaatgtctctactatttcctgggatttctgctcctggctgcaagattgccacttgatgccgccaaacgatttcatgatgtgctgggcaatgaaagaccttctgcttacatgagggagcacaatcaattaaatggctggtcttctgatgaaaatgactggaatgaaaaactctacccagtgtggaagcggggagacatgaggtggaaaaactcctggaagggaggccgtgtgcaggcggtcctgaccagtgactcaccagccctcgtgggctcaaatataacatttgcggtgaacctgatattccctagatgccaaaaggaagatgccaatggcaacatagtctatgagaagaactgcagaaatgaggctggtttatctgctgatccgtatgtttacaactggacagcatggtcagaggacagtgacggggaaaatggcaccggccaaagccatcataacgtcttccctgatgggaaaccttttcctcaccaccccggatggagaagatggaatttcatctacgtcttccacacacttggtcagtatttccagaaattgggacgatgttcagtgagagtttctgtgaacacagccaatgtgacacttgggcctcaactcatggaagtgactgtctacagaagacatggacgggcatatgttcccatcgcacaagtgaaagatgtgtacgtggtaacagatcagattcctgtgtttgtgactatgttccagaagaacgatcgaaattcatccgacgaaaccttcctcaaagatctccccattatgtttgatgtcctgattcatgatcctagccacttcctcaattattctaccattaactacaagtggagcttcggggataatactggcctgtttgtttccaccaatcatactgtgaatcacacgtatgtgctcaatggaaccttcagccttaacctcactgtgaaagctgcagcaccaggaccttgtccgccaccgccaccaccacccagaccttcaaaacccaccccttctttaggacctgctggtgacaaccccctggagctgagtaggattcctgatgaaaactgccagattaacagatatggccactttcaagccaccatcacaattgtagagggaatcttagaggttaacatcatccagatgacagacgtcctgatgccggtgccatggcctgaaagctccctaatagactttgtcgtgacctgccaagggagcattcccacggaggtctgtaccatcatttctgaccccacctgcgagatcacccagaacacagtctgcagccctgtggatgtggatgagatgtgtctgctgactgtgagacgaaccttcaatgggtctgggacgtactgtgtgaacctcaccctgggggatgacacaagcctggctctcacgagcaccctgatttctgttcctgacagagacccagcctcgcctttaaggatggcaaacagtgccctgatctccgttggctgcttggccatatttgtcactgtgatctccctcttggtgtacaaaaaacacaaggaatacaacccaatagaaaatagtcctgggaatgtggtcagaagcaaaggcctgagtgtctttctcaaccgtgcaaaagccgtgttcttcccgggaaaccaggaaaaggatccgctactcaaaaaccaagaatttaaaggagtttcttaaatttcgaccttgtttctgaagctcacttttcagtgccattgatgtgagatgtgctggagtggctattaacctttttttcctaaagattattgttaaatagatattgtggtttggggaagttgaattttttataggttaaatgtcattttagagatggggagagggattatactgcaggcagcttcagccatgttgtgaaactgataaaagcaacttagcaaggcttcttttcattattttttatgtttcacttataaagtcttaggtaactagtaggatagaaacactgtgtcccgagagtaaggagagaagctactattgattagagcctaacccaggttaactgcaagaagaggcgggatactttcagctttccatgtaactgtatgcataaagccaatgtagtccagtttctaagatcatgttccaagctaactgaatcccacttcaatacacactcatgaactcctgatggaacaataacaggcccaagcctgtggtatgatgtgcacacttgctagactcagaaaaaatactactctcataaatgggtgggagtattttggtgacaacctactttgcttggctgagtgaaggaatgatattcatatattcatttattccatggacatttagttagtgctttttatataccaggcatgatgctgagtgacactcttgtgtatatttccaaatttttgtacagtcgctgcacatatttgaaatcatatattaagactttccaaagatgaggtccctggtttttcatggcaacttgatcagtaaggatttcacctctgtttgtaactaaaaccatctactatatgttagacatgacattctttttctctccttcctgaaaaataaagtgtgggaagagacaa

SEQ ID NO: 138086 - DNA, 2763 bp, Homo sapiens
  Payload ID: 7049
  Gene Symbol: GPNMB
  Gene Name: glycoprotein (transmembrane) nmb
  Uniprot ID: Q14956
  ENST ID: ENST00000381990
  CDS Start-End: 162-1880
tgccgcttaataccatcacatgatcctccccgaggccctgtatttaattaaaatagagagggaggcaccacagatgccagaagaacactgttgctcttggtggacgggcccagaggaattcagagttaaaccttgagtgcctgcgtccgtgagaattcagcatggaatgtctctactatttcctgggatttctgctcctggctgcaagattgccacttgatgccgccaaacgatttcatgatgtgctgggcaatgaaagaccttctgcttacatgagggagcacaatcaattaaatggctggtcttctgatgaaaatgactggaatgaaaaactctacccagtgtggaagcggggagacatgaggtggaaaaactcctggaagggaggccgtgtgcaggcggtcctgaccagtgactcaccagccctcgtgggctcaaatataacatttgcggtgaacctgatattccctagatgccaaaaggaagatgccaatggcaacatagtctatgagaagaactgcagaaatgaggctggtttatctgctgatccgtatgtttacaactggacagcatggtcagaggacagtgacggggaaaatggcaccggccaaagccatcataacgtcttccctgatgggaaaccttttcctcaccaccccggatggagaagatggaatttcatctacgtcttccacacacttggtcagtatttccagaaattgggacgatgttcagtgagagtttctgtgaacacagccaatgtgacacttgggcctcaactcatggaagtgactgtctacagaagacatggacgggcatatgttcccatcgcacaagtgaaagatgtgtacgtggtaacagatcagattcctgtgtttgtgactatgttccagaagaacgatcgaaattcatccgacgaaaccttcctcaaagatctccccattatgtttgatgtcctgattcatgatcctagccacttcctcaattattctaccattaactacaagtggagcttcggggataatactggcctgtttgtttccaccaatcatactgtgaatcacacgtatgtgctcaatggaaccttcagccttaacctcactgtgaaagctgcagcaccaggaccttgtccgccaccgccaccaccacccagaccttcaaaacccaccccttctttagcaactactctaaaatcttatgattcaaacaccccaggacctgctggtgacaaccccctggagctgagtaggattcctgatgaaaactgccagattaacagatatggccactttcaagccaccatcacaattgtagagggaatcttagaggttaacatcatccagatgacagacgtcctgatgccggtgccatggcctgaaagctccctaatagactttgtcgtgacctgccaagggagcattcccacggaggtctgtaccatcatttctgaccccacctgcgagatcacccagaacacagtctgcagccctgtggatgtggatgagatgtgtctgctgactgtgagacgaaccttcaatgggtctgggacgtactgtgtgaacctcaccctgggggatgacacaagcctggctctcacgagcaccctgatttctgttcctgacagagacccagcctcgcctttaaggatggcaaacagtgccctgatctccgttggctgcttggccatatttgtcactgtgatctccctcttggtgtacaaaaaacacaaggaatacaacccaatagaaaatagtcctgggaatgtggtcagaagcaaaggcctgagtgtctttctcaaccgtgcaaaagccgtgttcttcccgggaaaccaggaaaaggatccgctactcaaaaaccaagaatttaaaggagtttcttaaatttcgaccttgtttctgaagctcacttttcagtgccattgatgtgagatgtgctggagtggctattaacctttttttcctaaagattattgttaaatagatattgtggtttggggaagttgaattttttataggttaaatgtcattttagagatggggagagggattatactgcaggcagcttcagccatgttgtgaaactgataaaagcaacttagcaaggcttcttttcattattttttatgtttcacttataaagtcttaggtaactagtaggatagaaacactgtgtcccgagagtaaggagagaagctactattgattagagcctaacccaggttaactgcaagaagaggcgggatactttcagctttccatgtaactgtatgcataaagccaatgtagtccagtttctaagatcatgttccaagctaactgaatcccacttcaatacacactcatgaactcctgatggaacaataacaggcccaagcctgtggtatgatgtgcacacttgctagactcagaaaaaatactactctcataaatgggtgggagtattttggtgacaacctactttgcttggctgagtgaaggaatgatattcatatattcatttattccatggacatttagttagtgctttttatataccaggcatgatgctgagtgacactcttgtgtatatttccaaatttttgtacagtcgctgcacatatttgaaatcatatattaagactttccaaagatgaggtccctggtttttcatggcaacttgatcagtaaggatttcacctctgtttgtaactaaaaccatctactatatgttagacatgacattctttttctctccttcctgaaaaataaagtgtgggaagagaca

SEQ ID NO: 138087 - DNA, 1673 bp, Homo sapiens
  Payload ID: 7049
  Gene Symbol: GPNMB
  Gene Name: glycoprotein (transmembrane) nmb
  ENST ID: ENST00000409458
  CDS Start-End: 150-770
ccatcacatgatcctccccgaggccctgtatttaattaaaatagagagggaggcaccacagatgccagaagaacactgttgctcttggtggacgggcccagaggaattcagagttaaaccttgagtgcctgcgtccgtgagaattcagcatggaatgtctctactatttcctgggatttctgctcctggctgcaagattgccacttgatgccgccaaacgatttcatgatgtgctgggcaatgaaagaccttctgcttacatgagggagcacaatcaattaaatggctggtcttctgatgaaaatgactggaatgaaaaactctacccagtgtggaagcggggagacatgaggtggaaaaactcctggaagggaggccgtgtgcaggcggtcctgaccagtgactcaccagccctcgtgggctcaaatataacatttgcggtgaacctgatattccctagatgccaaaaggaagatgccaatggcaacatagtctatgagaagaactgcagaaatgaggctggtttatctgctgatccgtatgtttacaactggacagcatggtcagaggacagtgacggggaaaatggcaccggccaaagccatcataacgtcttccctgatgggaaaccttttcctcaccaccccggatggagaagatggaatttcatctacgtcttccacacacttggttggcttttacaaacccctaagcttcttctttacctttccttaaaatttcaaccttctcttttcttactctataattgagaatgataacacagagagttaataacagtcaccctgctaactttccttagcatgagtgaacagtgagagataaaaatgaaatcttggttaaccttgccaaatctccaggacaccgaagagttaaaaagagagaaaaacaaaaagattaagctctttttcaaaaaaacaaaaccacttaatttttttctacctaaaaccataacaagaaaaaatgctaacacttatttatttgaatggcacatggagaccgggcatgtggctcacacttgtaatcccagcaccttggaaggcggaggcgggtggatcacctgaagtcaggagttcaagaccagcctggccaacatggtgaagtcccgtccctactaaaaatacaaaaattagccaggtgtggtggtgcgcacctgtaatcccagctactcaggaggctgaggcaggagaatcacttgaatccgggaggtggaggttgcagtgagaggagattgagccattgcactccagcctgggcaacagagtgagactccatctcgaaaaacaaacaaacaaacaaaaaacagaatggcacattgatgagcattcattgattgattctttagtttttttatgttctctaaagaatttttaagatttaaagaagcatgtgctatttatttgtaggaaatcctcagaaaaggtacaaataaaaaataaaaattatccataattaataccagagattataattgttaattattatggtgttttctttgctagtatttaagatcattattaagatcacatacacatttttgcttactatcattagcatttgatgatatgatttttttaatttttatacattgttttaatggctgcacgatatttcattgtgtacaaataaaataactactgttccgctttgaccta

SEQ ID NO: 138088 - DNA, 3406 bp, Homo sapiens
  Payload ID: 7050
  Gene Symbol: GP2
  Gene Name: glycoprotein 2 (zymogen granule membrane)
  Uniprot ID: P55259
  ENST ID: ENST00000302555
  CDS Start-End: 151-1755
gtgcaccaattgaggagagacacatgggtgggaaattgcaataaaaagacggcccacagcaggctgcattcccatggctggccagaggaggaacgctttgtgttctcatcggagctgcatgggaagtctgcatacagcaaagtgacctgcatgcctcaccttatggaaaggatggtgggctctggcctcctgtggctggccttggtctcctgcattctgacccaggcatctgcagtgcagcgaggttatggaaaccccattgaagccagttcgtatgggctggacctggactgcggagctcctggcaccccagaggctcatgtctgttttgacccctgtcagaattacaccctcctggatgaacccttccgaagcacagagaactcagcagggtcccaggggtgcgataaaaacatgagcggctggtaccgctttgtaggggaaggaggagtaaggatgtcggagacctgtgtccaggtgcaccgatgccagacagacgctcccatgtggctgaatgggacccaccctgcccttggggatggcatcaccaaccacactgcctgtgcccattggagtggcaactgctgtttctggaaaacagaggtgctggtgaaggcctgcccaggcgggtaccatgtgtaccggttggaaggcactccctggtgtaatctgagatactgcacagacccatccactgtggaggacaagtgtgagaaggcctgccgccccgaggaggagtgccttgccctcaacagcacctggggctgtttctgcagacaggacctcaatagttctgatgtccacagtttgcagcctcagctagactgtgggcccagggagatcaaggtgaaggtggacaaatgtttgctgggaggcctgggtttgggggaggaggtcattgcctacctgcgagacccaaactgcagcagcatcttgcagacagaggagaggaactgggtatctgtgaccagccccgtccaggctagtgcctgcaggaacattctggagagaaatcaaacccatgccatctacaaaaacaccctctccttggtcaatgatttcatcatcagagacaccatcctcaacatcaacttccaatgtgcctacccactggacatgaaagtcagcctccaagctgccttgcagcccattgtaagttccctgaacgtcagtgtggacgggaatggagagttcattgtcaggatggccctcttccaagaccagaactacacgaatccttacgaaggggatgcagttgaactgtctgttgagtccgtgctgtatgtgggtgccatcttggaacaaggggacacctcccggtttaacctggtgttgaggaactgctatgccacccccactgaagacaaggctgaccttgtgaagtatttcatcatcagaaacagctgctcaaatcaacgtgattccaccatccacgtggaggagaatgggcagtcctcggaaagccggttctcagttcagatgttcatgtttgctggacattatgacctagttttcctgcattgtgagattcatctctgtgattctcttaatgaacagtgccagccttcttgctcaagaagtcaagtccgcagtgaagtaccggccatcgacctagcccgggttctagatttggggcccatcactcggagaggtgcacagtctcccggtgtcatgaatggaacccctagcactgcagggttcctggtggcctggcctatggtcctcctgactgtcctcctggcttggctgttctgagagctccgctgagcatctggccttgaagtttgtgttcttccctctggcaatggctcccttcagcacttctgctttccactccaattcacacaggcttggtattaatagaatcaaggccaagctaggttaggaaaagggaagagctttcaccttctttaaaactctcggctgggcgcagtggctcatgcctgtaatcccagcattttgggaggctgaggcaggtggatcacctgaggtcagcagttcaaaatcagcctggccaaaatgctgaaactccgtctctactaaaaatacaaaaattagccaggcatggtggcaggcgcctgtaatcccagctactcgggaggccaaggcaggagaattgctcgaactcagggggtggaggttgcagtgagttgagattgtgccattgcactccagcctgggcaacagagcaagactctgtctcaggaaaaaaaaaaaaaaaaaagaaaagcaacatagtggggtttctgtcaatctgtcctcggctgcccttctcatttgttgatgggaccttgaaagcaagcttgctaggtgccctctgtggctccagcctttaccggaagtgtggtgcatgtttttaacttcagggaagcggtatcctgtcactggggtatgggatgagcatggagaagaggcaccagccacgattccttcctaagcatctcctgttctgactgctcatgaattgaagaaactgacccttgtgttcactctgcttcctctgattgtttctatcatggtttccaaaaattgccatgggaacatgtcaaagggccacttttggagactctgctccaggaagaactagtccccatagctcccctatcccccaccataccacagacatgctgtgacttagagaactacacaaacatccttgggacctagatgctggaggaatgacttaatttgatgcagaaactccatcacccaagggagtacctctcactgtaaacagtgctgtgcttgctctgaaggattaagcaagaagtcccaacagaagcaatgcaccagtcctgctatgggaatgaaactgcaaagcctaggagatgggtgaagtccctttctggagacctttaatgagtacttcaaagcacccgacacagatgcagcaaatagggcatcacacatacacaggcattaatactcacgggcatatagatgctgacatgtgtacactgacttacgcccttcccacagctacagataaggcctcgcaaagttggcctcagagacacatcaggaaccaaggtggaccagcaggtgccgagcctgtgtatctgcttggaggagacgttccaatgtgctgccttgttcagagatggtgtagttgcaagaaacagaaacccaccacaatttctcaggcaaaaagggagttaattataaggacataagagcacaaagttccagtgcaagagatacatccaggctgcacaagctccgggagtggggcctggcaagccaaaagaaaccaaagtttgtcttgccttctgttcctctttctgaagccacatagccttttatgactgtgtatttttgcatcgcttttgttttctttttatgtctctgaagccagcttttcctgttcactcatcccttgattaaatatggacattctagcttcaca

SEQ ID NO: 138089 - DNA, 1975 bp, Homo sapiens
  Payload ID: 7050
  Gene Symbol: GP2
  Gene Name: glycoprotein 2 (zymogen granule membrane)
  Uniprot ID: P55259
  ENST ID: ENST00000341642
  CDS Start-End: 78-1241
atggctggccagaggaggaacgctttgtgttctcatcggagctgcatgggaagtctgcatacagcaaagtgacctgcatgcctcaccttatggaaaggatggtgggctctggcctcctgtggctggccttggtctcctgcattctgacccaggcatctgcagtgcagcgagacccatccactgtggaggacaagtgtgagaaggcctgccgccccgaggaggagtgccttgccctcaacagcacctggggctgtttctgcagacaggacctcaatagttctgatgtccacagtttgcagcctcagctagactgtgggcccagggagatcaaggtgaaggtggacaaatgtttgctgggaggcctgggtttgggggaggaggtcattgcctacctgcgagacccaaactgcagcagcatcttgcagacagaggagaggaactgggtatctgtgaccagccccgtccaggctagtgcctgcaggaacattctggagagaaatcaaacccatgccatctacaaaaacaccctctccttggtcaatgatttcatcatcagagacaccatcctcaacatcaacttccaatgtgcctacccactggacatgaaagtcagcctccaagctgccttgcagcccattgtaagttccctgaacgtcagtgtggacgggaatggagagttcattgtcaggatggccctcttccaagaccagaactacacgaatccttacgaaggggatgcagttgaactgtctgttgagtccgtgctgtatgtgggtgccatcttggaacaaggggacacctcccggtttaacctggtgttgaggaactgctatgccacccccactgaagacaaggctgaccttgtgaagtatttcatcatcagaaacagctgctcaaatcaacgtgattccaccatccacgtggaggagaatgggcagtcctcggaaagccggttctcagttcagatgttcatgtttgctggacattatgacctagttttcctgcattgtgagattcatctctgtgattctcttaatgaacagtgccagccttcttgctcaagaagtcaagtccgcagtgaagtaccggccatcgacctagcccgggttctagatttggggcccatcactcggagaggtgcacagtctcccggtgtcatgaatggaacccctagcactgcagggttcctggtggcctggcctatggtcctcctgactgtcctcctggcttggctgttctgagagctccgctgagcatctggccttgaagtttgtgttcttccctctggcaatggctcccttcagcacttctgctttccactccaattcacacaggcttggtattaatagaatcaaggccaagctaggttaggaaaagggaagagctttcaccttctttaaaactctcggctgggcgcagtggctcatgcctgtaatcccagcattttgggaggctgaggcaggtggatcacctgaggtcagcagttcaaaatcagcctggccaaaatgctgaaactccgtctctactaaaaatacaaaaattagccaggcatggtggcaggcgcctgtaatcccagctactcgggaggccaaggcaggagaattgctcgaactcagggggtggaggttgcagtgagttgagattgtgccattgcactccagcctgggcaacagagcaagactctgtctcaggaaaaaaaaaaaaaaaaaagaaaagcaacatagtggggtttctgtcaatctgtcctcggctgcccttctcatttgttgatgggaccttgaaagcaagcttgctaggtgccctctgtggctccagcctttaccggaagtgtggtgcatgtttttaacttcagggaagcggtatcctgtcactggggtatgggatgagcatggagaagaggcaccagccacgattccttcctaagcatctcctgttctgactgctcatgaattgaagaaactgacccttgtgttca

SEQ ID NO: 138090 - DNA, 2285 bp, Homo sapiens
  Payload ID: 7050
  Gene Symbol: GP2
  Gene Name: glycoprotein 2 (zymogen granule membrane)
  Uniprot ID: P55259
  ENST ID: ENST00000381360
  CDS Start-End: 379-1551
attatgaagattaaatgtgagaagtcaagaacgcaaagcagtgcccagcatgttcagcattcagcacacagcactattgtttgtaggaagcattcgcacaatgctgagacagctggaagggttgacattgtgaggggagggcccttctttcaccatcctttgcgtaaatggcttatctcacctccactcaacaagcccagtgtatggcctagaactcccatcatacctgtgcaccaattgaggagagacacatgggtgggaaattgcaataaaaagacggcccacagcaggctgcattcccatggctggccagaggaggaacgctttgtgttctcatcggagctgcatgggaagtctgcatacagcaaagtgacctgcatgcctcaccttatggaaaggatggtgggctctggcctcctgtggctggccttggtctcctgcattctgacccaggcatctgcagtgcagcgagttccacgagacccatccactgtggaggacaagtgtgagaaggcctgccgccccgaggaggagtgccttgccctcaacagcacctggggctgtttctgcagacaggacctcaatagttctgatgtccacagtttgcagcctcagctagactgtgggcccagggagatcaaggtgaaggtggacaaatgtttgctgggaggcctgggtttgggggaggaggtcattgcctacctgcgagacccaaactgcagcagcatcttgcagacagaggagaggaactgggtatctgtgaccagccccgtccaggctagtgcctgcaggaacattctggagagaaatcaaacccatgccatctacaaaaacaccctctccttggtcaatgatttcatcatcagagacaccatcctcaacatcaacttccaatgtgcctacccactggacatgaaagtcagcctccaagctgccttgcagcccattgtaagttccctgaacgtcagtgtggacgggaatggagagttcattgtcaggatggccctcttccaagaccagaactacacgaatccttacgaaggggatgcagttgaactgtctgttgagtccgtgctgtatgtgggtgccatcttggaacaaggggacacctcccggtttaacctggtgttgaggaactgctatgccacccccactgaagacaaggctgaccttgtgaagtatttcatcatcagaaacagctgctcaaatcaacgtgattccaccatccacgtggaggagaatgggcagtcctcggaaagccggttctcagttcagatgttcatgtttgctggacattatgacctagttttcctgcattgtgagattcatctctgtgattctcttaatgaacagtgccagccttcttgctcaagaagtcaagtccgcagtgaagtaccggccatcgacctagcccgggttctagatttggggcccatcactcggagaggtgcacagtctcccggtgtcatgaatggaacccctagcactgcagggttcctggtggcctggcctatggtcctcctgactgtcctcctggcttggctgttctgagagctccgctgagcatctggccttgaagtttgtgttcttccctctggcaatggctcccttcagcacttctgctttccactccaattcacacaggcttggtattaatagaatcaaggccaagctaggttaggaaaagggaagagctttcaccttctttaaaactctcggctgggcgcagtggctcatgcctgtaatcccagcattttgggaggctgaggcaggtggatcacctgaggtcagcagttcaaaatcagcctggccaaaatgctgaaactccgtctctactaaaaatacaaaaattagccaggcatggtggcaggcgcctgtaatcccagctactcgggaggccaaggcaggagaattgctcgaactcagggggtggaggttgcagtgagttgagattgtgccattgcactccagcctgggcaacagagcaagactctgtctcaggaaaaaaaaaaaaaaaaaagaaaagcaacatagtggggtttctgtcaatctgtcctcggctgcccttctcatttgttgatgggaccttgaaagcaagcttgctaggtgccctctgtggctccagcctttaccggaagtgtggtgcatgtttttaacttcagggaagcggtatcctgtcactggggtatgggatgagcatggagaagaggcaccagccacgattccttcctaagcatctcctgttctgactgctcatgaattgaagaaactgacccttgtgttca

SEQ ID NO: 138091 - DNA, 2425 bp, Homo sapiens
  Payload ID: 7050
  Gene Symbol: GP2
  Gene Name: glycoprotein 2 (zymogen granule membrane)
  Uniprot ID: P55259
  ENST ID: ENST00000381362
  CDS Start-End: 78-1691
atggctggccagaggaggaacgctttgtgttctcatcggagctgcatgggaagtctgcatacagcaaagtgacctgcatgcctcaccttatggaaaggatggtgggctctggcctcctgtggctggccttggtctcctgcattctgacccaggcatctgcagtgcagcgaggttatggaaaccccattgaagccagttcgtatgggctggacctggactgcggagctcctggcaccccagaggctcatgtctgttttgacccctgtcagaattacaccctcctggatgaacccttccgaagcacagagaactcagcagggtcccaggggtgcgataaaaacatgagcggctggtaccgctttgtaggggaaggaggagtaaggatgtcggagacctgtgtccaggtgcaccgatgccagacagacgctcccatgtggctgaatgggacccaccctgcccttggggatggcatcaccaaccacactgcctgtgcccattggagtggcaactgctgtttctggaaaacagaggtgctggtgaaggcctgcccaggcgggtaccatgtgtaccggttggaaggcactccctggtgtaatctgagatactgcacagttccacgagacccatccactgtggaggacaagtgtgagaaggcctgccgccccgaggaggagtgccttgccctcaacagcacctggggctgtttctgcagacaggacctcaatagttctgatgtccacagtttgcagcctcagctagactgtgggcccagggagatcaaggtgaaggtggacaaatgtttgctgggaggcctgggtttgggggaggaggtcattgcctacctgcgagacccaaactgcagcagcatcttgcagacagaggagaggaactgggtatctgtgaccagccccgtccaggctagtgcctgcaggaacattctggagagaaatcaaacccatgccatctacaaaaacaccctctccttggtcaatgatttcatcatcagagacaccatcctcaacatcaacttccaatgtgcctacccactggacatgaaagtcagcctccaagctgccttgcagcccattgtaagttccctgaacgtcagtgtggacgggaatggagagttcattgtcaggatggccctcttccaagaccagaactacacgaatccttacgaaggggatgcagttgaactgtctgttgagtccgtgctgtatgtgggtgccatcttggaacaaggggacacctcccggtttaacctggtgttgaggaactgctatgccacccccactgaagacaaggctgaccttgtgaagtatttcatcatcagaaacagctgctcaaatcaacgtgattccaccatccacgtggaggagaatgggcagtcctcggaaagccggttctcagttcagatgttcatgtttgctggacattatgacctagttttcctgcattgtgagattcatctctgtgattctcttaatgaacagtgccagccttcttgctcaagaagtcaagtccgcagtgaagtaccggccatcgacctagcccgggttctagatttggggcccatcactcggagaggtgcacagtctcccggtgtcatgaatggaacccctagcactgcagggttcctggtggcctggcctatggtcctcctgactgtcctcctggcttggctgttctgagagctccgctgagcatctggccttgaagtttgtgttcttccctctggcaatggctcccttcagcacttctgctttccactccaattcacacaggcttggtattaatagaatcaaggccaagctaggttaggaaaagggaagagctttcaccttctttaaaactctcggctgggcgcagtggctcatgcctgtaatcccagcattttgggaggctgaggcaggtggatcacctgaggtcagcagttcaaaatcagcctggccaaaatgctgaaactccgtctctactaaaaatacaaaaattagccaggcatggtggcaggcgcctgtaatcccagctactcgggaggccaaggcaggagaattgctcgaactcagggggtggaggttgcagtgagttgagattgtgccattgcactccagcctgggcaacagagcaagactctgtctcaggaaaaaaaaaaaaaaaaaagaaaagcaacatagtggggtttctgtcaatctgtcctcggctgcccttctcatttgttgatgggaccttgaaagcaagcttgctaggtgccctctgtggctccagcctttaccggaagtgtggtgcatgtttttaacttcagggaagcggtatcctgtcactggggtatgggatgagcatggagaagaggcaccagccacgattccttcctaagcatctcctgttctgactgctcatgaattgaagaaactgacccttgtgttca

SEQ ID NO: 138092 - DNA, 572 bp, Homo sapiens
  Payload ID: 7050
  Gene Symbol: GP2
  Gene Name: glycoprotein 2 (zymogen granule membrane)
  ENST ID: ENST00000575449
  CDS Start-End: 189-572
cagattctgtactaggagcaaggaacatgaggctcggtttggcatggttccacagtcacagaaatctacatccatagaggacatttcagggggctcttagcagcacccaatgcataaaactaagaaagggcagccattacttttgtgtgcagctgcatgggaagtctgcatacagcaaagtgacctgcatgcctcaccttatggaaaggatggtgggctctggcctcctgtggctggccttggtctcctgcattctgacccaggcatctgcagtgcagcgaggttatggaaaccccattgaagccagttcgtatgggctggacctggactgcggagctcctggcaccccagaggctcatgtctgttttgacccctgtcagaattacaccctcctggatgaacccttccgaagcacagagaactcagcagggtcccaggggtgcgataaaaacatgagcggctggtaccgctttgtaggggaaggaggagtaaggatgtcggagacctgtgtccaggtgcaccgatgccagacagacgctcccatgtggctgaatgggacccaccctgccctt

SEQ ID NO: 138093 - DNA, 388 bp, Homo sapiens
  Payload ID: 7050
  Gene Symbol: GP2
  Gene Name: glycoprotein 2 (zymogen granule membrane)
  ENST ID: ENST00000574982
  CDS Start-End: 1-128
tggaaaggatggtgggctctggcctcctgtggctggccttggtctcctgcattctgacccaggcatctgcagtgcagcgaggtaagtattctgctcacctggcatctcagatgtcaaggaagacctagcaagtgaggatagaagtgcagagaaggtggctcagacccatccactgtggaggacaagtgtgagaaggcctgccgccccgaggaggagtgccttgccctcaacagcacctggggctgtttctgcagacaggacctcaatagttctgatgtccacagtttgcagcctcagctagactgtgggcccagggagatcaaggtgaaggtggacaaatgtttgctgggaggcctgggtttgggggaggaggtcattgcctacctgc

SEQ ID NO: 138094 - DNA, 573 bp, Homo sapiens
  Payload ID: 7050
  Gene Symbol: GP2
  Gene Name: glycoprotein 2 (zymogen granule membrane)
  ENST ID: ENST00000575582
  CDS Start-End: 139-573
ctgggaaatcttgatccactggacatgctaggattctttgtttctggaaatttttagaacccagcaagtagtttggaccctggccattgtcaagtgctccagctgcatgggaagtctgcatacagcaaagtgacctgcatgcctcaccttatggaaaggatggtgggctctggcctcctgtggctggccttggtctcctgcattctgacccaggcatctgcagtgcagcgagacccatccactgtggaggacaagtgtgagaaggcctgccgccccgaggaggagtgccttgccctcaacagcacctggggctgtttctgcagacaggacctcaatagttctgatgtccacagtttgcagcctcagctagactgtgggcccagggagatcaaggtgaaggtggacaaatgtttgctgggaggcctgggtttgggggaggaggtcattgcctacctgcgagacccaaactgcagcagcatcttgcagacagaggagaggaactgggtatctgtgaccagccccgtccaggctagtgcctgcaggaacattctggagagaaatcaaacccatgcc

SEQ ID NO: 138095 - DNA, 567 bp, Homo sapiens
  Payload ID: 7050
  Gene Symbol: GP2
  Gene Name: glycoprotein 2 (zymogen granule membrane)
  ENST ID: ENST00000572478
  CDS Start-End: 78-567
atggctggccagaggaggaacgctttgtgttctcatcggagctgcatgggaagtctgcatacagcaaagtgacctgcatgcctcaccttatggaaaggatggtgggctctggcctcctgtggctggccttggtctcctgcattctgacccaggcatctgcagtgcagcgaggggaaggaggagtaaggatgtcggagacctgtgtccaggtgcaccgatgccagacagacgctcccatgtggctgaatgggacccaccctgcccttggggatggcatcaccaaccacactgcctgtgcccattggagtggcaactgctgtttctggaaaacagaggtgctggtgaaggcctgcccaggcgggtaccatgtgtaccggttggaaggcactccctggtgtaatctgagatactgcacagacccatccactgtggaggacaagtgtgagaaggcctgccgccccgaggaggagtgccttgccctcaacagcacctggggctgtttctgcagacaggacctcaatagttctgatgtccacagtttgcagcctcagctagactgtgggccca

SEQ ID NO: 138096 - DNA, 580 bp, Homo sapiens
  Payload ID: 7050
  Gene Symbol: GP2
  Gene Name: glycoprotein 2 (zymogen granule membrane)
  ENST ID: ENST00000572347
  CDS Start-End: 158-580
atggctggccagaggaggaacgctttgtgttctcatcggagctcctggcaccccagaggctcatgtctgttttgacccctgtcagaattacaccctcctggatgaacccttccgaagcacagagaactcagcagggtcccaggggtgcgataaaaacatgagcggctggtaccgctttgtaggggaaggaggagtaaggatgtcggagacctgtgtccaggtgcaccgatgccagacagacgctcccatgtggctgaatgggacccaccctgcccttggggatggcatcaccaaccacactgcctgtgcccattggagtggcaactgctgtttctggaaaacagaggtgctggtgaaggcctgcccaggcgggtaccatgtgtaccggttggaaggcactccctggtgtaatctgagatactgcacagacccatccactgtggaggacaagtgtgagaaggcctgccgccccgaggaggagtgccttgccctcaacagcacctggggctgtttctgcagacaggacctcaatagttctgatgtccacagtttgcagcctcagctagactgtgggcccagg

SEQ ID NO: 138097 - DNA, 2802 bp, Homo sapiens
  Payload ID: 7051
  Gene Symbol: GPA33
  Gene Name: glycoprotein A33 (transmembrane)
  Uniprot ID: Q99795
  ENST ID: ENST00000367868
  CDS Start-End: 345-1304
ctacccctttgtgagcagtctaggactttgtacacttgttaagtagggagaaggcaggggaggtggctggtttaaggggaacttgagggaagtagggaagactcctcttgggacctttggagtaggtgacacatgagcccagccccagctcacctgccaatccagctgaggagctcacctgccaatccagctgaggctgggcagaggtgggtgagaagagggaaaattgcagggacctccagttgggccaggccagaagctgctgtagctttaaccagacagctcagacctgtctggaggctgccagtgacaggttaggtttagggcagagaagaagcaagaccatggtggggaagatgtggcctgtgttgtggacactctgtgcagtcagggtgaccgtcgatgccatctctgtggaaactccgcaggacgttcttcgggcttcgcagggaaagagtgtcaccctgccctgcacctaccacacttccacctccagtcgagagggacttattcaatgggataagctcctcctcactcatacggaaagggtggtcatctggccgttttcaaacaaaaactacatccatggtgagctttataagaatcgcgtcagcatatccaacaatgctgagcagtccgatgcctccatcaccattgatcagctgaccatggctgacaacggcacctacgagtgttctgtctcgctgatgtcagacctggagggcaacaccaagtcacgtgtccgcctgttggtcctcgtgccaccctccaaaccagaatgcggcatcgagggagagaccataattgggaacaacatccagctgacctgccaatcaaaggagggctcaccaacccctcagtacagctggaagaggtacaacatcctgaatcaggagcagcccctggcccagccagcctcaggtcagcctgtctccctgaagaatatctccacagacacatcgggttactacatctgtacctccagcaatgaggaggggacgcagttctgcaacatcacggtggccgtcagatctccctccatgaacgtggccctgtatgtgggcatcgcggtgggcgtggttgcagccctcattatcattggcatcatcatctactgctgctgctgccgagggaaggacgacaacactgaagacaaggaggatgcaaggccgaaccgggaagcctatgaggagccaccagagcagctaagagaactttccagagagagggaggaggaggatgactacaggcaagaagagcagaggagcactgggcgtgaatccccggaccacctcgaccagtgacaggccagcagcagagggcggcggaggaagggttaggggttcattctcccgcttcctggcctcccttctcctttctaagccctgttctcctgtccctccatcccagacattgatggggacatttcttccccagtgtcagctgtggggaacatggctggcctggtaagggggtccctgtgctgatcctgctgacctcactgtcctgtgaagtaacccctcctggctgtgacacctggtgcgggcctggccctcactcaagaccaggctgcagcctccacttccctcgtagttggcaggagctcctggaagcacagcgctgagcatggggcgctcccactcagaactctccagggaggcgatgccagccttggggggtgggggctgtcctgctcacctgtgtgcccagcacctggaggggcaccaggtggagggtttgcactccacacatctttcttgaatgaatgaaagaataagtgagtatgcttgggccctgcattggcctggcctccagctcccactccctttccaacctcacttcccgtagctgccagtatgttccaaaccctcctgggaaggccacctcccactcctgctgcacaggccctggggagcttttgcccacacactttccatctctgcctgtcaatatcgtacctgtccctccaggcccatctcaaatcacaaggatttctctaaccctatcctaattgtccacatacgtggaaacaatcctgttactctgtcccacgtccaatcatgggccacaaggcacagtcttctgagcgagtgctctcactgtattagagcgccagctccttggggcagggcctgggcctcatggcttttgctttccctgaagccctagtagctggcgcccatcctagtgggcacttaagcttaattggggaaactgctttgattggttgtgccttcccttctctggtctccttgagatgatcgtagacacagggatgattcccacccaaacccacgtattcattcagtgagttaaacacgaattgatttaaagtgaacacacacaagggagcttgcttgcagatggtctgagttcttgtgtcctggtaattcctctccaggccagaataattggcatgtctcctcaacccacatggggttcctggttgttcctgcatcccgatacctcagccctggccctgcccagcccatttgggctctggttttctggtggggctgtcctgctgccctcccacagcctccttctgtttgtcgagcatttcttctactcttgagagctcaggcagcgttagggctgcttaggtctcatggaccagtggctggtctcacccaactgcagtttactattgctatcttttctggatgatcagaaaaataattccataaatctattgtctacttgcgattttttaaaaaatgtatatttttatatatattgttaaatcctttgcttcattccaaatgctttcagtaataataaaattgtgggtggaaattctta

SEQ ID NO: 138098 - DNA, 569 bp, Homo sapiens
  Payload ID: 7051
  Gene Symbol: GPA33
  Gene Name: glycoprotein A33 (transmembrane)
  ENST ID: ENST00000534512
  CDS Start-End: 40-285
agtgacaggttaggtttagggcagagaagaagcaagaccatggtggggaagatgtggcctgtgttgtggacactctgtgcagagcatttgggaaataaaagtacacatagaagaaatctcagattgccccacgatctcagaatccacagtcagggtgaccgtcgatgccatctctgtggaaactccgcaggacgttcttcgggcttcgcagggaaagagtgtcaccctgccctgcacctaccacacttccacctccagtcgagagggacttattcaatgggataagctcctcctcactcatacggaaagggtggtcatctggccgttttcaaacaaaaactacatccatggtgagctttataagaatcgcgtcagcatatccaacaatgctgagcagtccgatgcctccatcaccattgatcagctgaccatggctgacaacggcacctacgagtgttctgtctcgctgatgtcagacctggagggcaacaccaagtcacgtgtccgcctgttggtcctcgtgccaccctccaaaccagaatgcggcatcgagggagagaccataattg

SEQ ID NO: 138099 - DNA, 677 bp, Homo sapiens
  Payload ID: 7051
  Gene Symbol: GPA33
  Gene Name: glycoprotein A33 (transmembrane)
  ENST ID: ENST00000632571
  CDS Start-End: 479-677
tttctggtatcttccagcagctcccaacaccctttcgtcttagcctgggccttttcttcagctgcaaacacccacgagggaaatgtgcagctgacctctggggtccccgggctgagggtgatgtacgccacagtggaggaggacattggcgctgcctcaaggctgctgagcagacctgccatgaagaaaattatgagtcagggtgaccgtcgatgccatctctgtggaaactccgcaggacgttcttcgggcttcgcagggaaagagtgtcaccctgccctgcacctaccacacttccacctccagtcgagagggacttattcaatgggataagctcctcctcactcatacggaaagggtggtcatctggccgttttcaaacaaaaactacatccatggtgagctttataagaatcgcgtcagcatatccaacaatgctgagcagtccgatgcctccatcaccattgatcagctgaccatggctgacaacggcacctacgagtgttctgtctcgctgatgtcagacctggagggcaacaccaagtcacgtgtccgcctgttggtcctcgtgccaccctccaaaccagaatgcggcatcgagggagagaccataattgggaacaacatccagctgacctgccaatcaaaggagggctcaccaacccctcagtacagct

SEQ ID NO: 138100 - DNA, 747 bp, Homo sapiens
  Payload ID: 7052
  Gene Symbol: GPHA2
  Gene Name: glycoprotein hormone alpha 2
  Uniprot ID: Q96T91
  ENST ID: ENST00000279168
  CDS Start-End: 56-445
ccagcaggaggcacaggaaaactgcaagccgctctgttcctgggcctcggaagtgatgcctatggcgtcccctcaaaccctggtcctctatctgctggtcctggcagtcactgaagcctggggccaggaggcagtcatcccaggctgccacttgcaccccttcaatgtgacagtgcgaagtgaccgccaaggcacctgccagggctcccacgtggcacaggcctgtgtgggccactgtgagtccagcgccttcccttctcggtactctgtgctggtggccagtggttaccgacacaacatcacctccgtctctcagtgctgcaccatcagtggcctgaagaaggtcaaagtacagctgcagtgtgtggggagccggagggaggagctcgagatcttcacggccagggcctgccagtgtgacatgtgtcgcctctctcgctactagcccatcctctcccctccttcctcccctgggtcacagggcttgacgttctggtgggggaaacctgtgttcaagattcaaaaactggaaggagctccagccctgatggttacttgctatggaatttttttaaataaggggagggttgttccagctttgatcctttgtaagattttgtgactgtcacctgagaagaggggagtttctgcttcttccctgcctctgcctggcccttctaaaccaatctttcatcattttacttccctctttgcccttacccctaaataaagcaagcagttcttgaa

SEQ ID NO: 138101 - DNA, 466 bp, Homo sapiens
  Payload ID: 7052
  Gene Symbol: GPHA2
  Gene Name: glycoprotein hormone alpha 2
  ENST ID: ENST00000532246
  CDS Start-End: 50-406
ggaggcacaggaaaactgcaagccgctctgttcctgggcctcggaagtgatgcctatggcgtcccctcaaaccctggtcctctatctgctggtcctggcagtcactgaagcctggggccaggaggcagtcatcccaggctgccacttgcaccccttcaatgtgacagtgcgaagtgaccgccaaggcacctgccagggctcccacgtggcacaggcctgtgtgggccactgtgagtccagcgccttcccttctcggtactctgtgctggtggccagtggttaccgacacaacatcacctccgtctctcagtgctgcaccatcagtggcctgaagaaggtgaggagggcccgggcccggtggatggacgctggggtcgcgggaagaccagagagatggagatcctagacagccctgagaaaggggactgcagcacggactcccctctcccgcaggtcaaagtacagc

SEQ ID NO: 138102 - DNA, 582 bp, Homo sapiens
  Payload ID: 7052
  Gene Symbol: GPHA2
  Gene Name: glycoprotein hormone alpha 2
  Uniprot ID: Q96T91
  ENST ID: ENST00000533257
  CDS Start-End: 64-453
atttaaagaactcgccatcccacctgcacacccacgtagagacatctccccactgtgtttcagatgcctatggcgtcccctcaaaccctggtcctctatctgctggtcctggcagtcactgaagcctggggccaggaggcagtcatcccaggctgccacttgcaccccttcaatgtgacagtgcgaagtgaccgccaaggcacctgccagggctcccacgtggcacaggcctgtgtgggccactgtgagtccagcgccttcccttctcggtactctgtgctggtggccagtggttaccgacacaacatcacctccgtctctcagtgctgcaccatcagtggcctgaagaaggtcaaagtacagctgcagtgtgtggggagccggagggaggagctcgagatcttcacggccagggcctgccagtgtgacatgtgtcgcctctctcgctactagcccatcctctcccctccttcctcccctgggtcacagggcttgacgttctggtgggggaaacctgtgttcaagattcaaaaactggaaggagctccagccctgatggttacttgctatggaattttttta

SEQ ID NO: 138103 - DNA, 543 bp, Homo sapiens
  Payload ID: 7053
  Gene Symbol: GPHB5
  Gene Name: glycoprotein hormone beta 5
  Uniprot ID: Q86YW7
  ENST ID: ENST00000621500
  CDS Start-End: 58-450
tgaaatcttagtgcaagtttcagctctaaaagaagagtgggctcctgcaagattagcatgaagctggcattcctcttccttggccccatggccctcctccttctggctggctatggctgtgtcctcggtgcctccagtgggaacctgcgcacctttgtgggctgtgccgtgagggagtttactttcctggccaagaagccaggctgcaggggccttcggatcaccacggatgcctgctggggtcgctgtgagacctgggagaaacccattctggaacccccctatattgaagcccatcatcgagtctgtacctacaacgagaccaaacaggtgactgtcaagctgcccaactgtgccccgggagtcgaccccttctacacctatcccgtggccatccgctgtgactgcggagcctgctccactgccaccacggagtgtgagaccatctgaggccgctagctgctctctgcagacccacctgtgtgagcagcacatgcagttatacttcctggatgcaagactgtttaatttcgaccacaccca
